United States Patent Application Publication US 2005/0228172 A9 - sequence listing, part 24

SEQ ID NO: 77315 - DNA, 1475 bp, Homo sapiens
catttctagattagctttaaaaaaagaattctaggccaggcgtggtggctcatgcctataatcccagcactttaggaggctgaggtgagaagatcacttgagcccaggagttcaagaccagactgggcaacatagtgagacctgtttctctctacaaaacaataaaaaattagccaggggtggtggcgtgtgcttggagaggctgaggcaggagaatctcctaagcccagcaggtcaagcctgcgatgagctgtctttacaccactgcactccagcctgggcaacagagcaagaccgtgtctcaggttaaaaaaaaaaaatttcctactgagttaaccaggaagcagcaactctacaaagaattctcgatgtacttgtgaccgatattttatccacatattcagccatttatccaataagcatttcttgaattctattgcacactggcctaggtgctggatgtacagttagacacatctatgtcctcaaaaaaaagaagtccacagggacttacgtggacaagtgaagcaggtagttacagtgcagagtgacaagtgccaaacaaagcacatctacacttgggtgccctgaaaatgcagaggactctgaaaccacttctatttaaaattatcttccctgaaagggtttgatgtgtagtggcttacagacggctgcccattctgtgctatcctcccatctacagggggaccgttgagtcctggctggcactcagacttgtttgggccaatccagtgtggatgaagggatcctgtgtgatttgagactgggcctcatgggatctgcaacttctgttttcgtgtgcttgggactctttctcttggaaatcaacagccaagtaagaagtcyaccctgccggaggaaaggccgcatagagggaggcctgaaccagtgtttgatgtcccagctgaactccagccatcttggatgtttaagccactaagttttgggtcggtgtgctatttagcaacagataactaaaacttcagttgtagctaagccatgaacaaattctagcctgcatccgcggtttccacacacagaacttaacacacaatcgtgtggtcactcacatccatatctggcataccccaaaccagaaggaggcaggtttggccaaagactacgaagagggctgcacagtatccaccaaaggcggatcacttcgtagagtctttaagatggctcctttggcttctttctatcctgggacactgcaaaaagcatcagacatctgacgccccccctttaagttcccagtccactggcaaacctgcaatttcttactgaagaagagtgagctatgtttctgaagctaaagggggactgaaaactcaagtgattggaattagcgctagacaagcaaaagctctttggatgcccactaacgagtctaggcgtactcacctgaagacatcagcaggacggcctgaaggagggctacttcagtgtcatcc

SEQ ID NO: 77316 - DNA, 527 bp, Homo sapiens
cctaagtggtcccataatacagtcccaagagatgatctaaagagaaaacaataaaaataaactttataatcaaatgagtttgggaaatgacacattaatgctcctctcttggagattcacacacacacaactttgaatgactttgtataacagcatttcctaaacatttctgatcatagaaccctgtgtgtatcttgtaacatttgttacaagtgttccatgaaacatactttgaaaaacctagtcatctgctctgttggatatatatgctggagcttaaggcacggatacataacagtgcatttctcagattacacaccaagaacagagagaagaaatctgctgaaggggagtgtcctttttagggtctttaccaacgaggaaagctgccggccagaagaggcaggctggacacatggaaatgcaaatccccaggtgggcacaggacaagaccagggcctcttgggctcttgaattaagtstgtttcagtaggaatagaaactcaaagctcttctcttttaaaaca

SEQ ID NO: 77317 - DNA, 744 bp, Homo sapiens
atggtcttcattgagttgtaaccatgcagcattttcattgcaatgtgctgttattgttccatatatgttattagattaccataacatcagtgagttctcgggaggaagattcacagggctgctagctaagcaacatctcagttcactgccacagacactttgagctctgtttgtgtggagcaattgcccatcagcagatggtactgatgtcaacatgcctggagttttccttggcattataagttcaaaagtgtcaaagttcagtttcatacaaagtagctgcttgttttccaaaactgacctggaggcctagaaaagactgcagaattttgatagatgtggaagttattaaggaaagccatttaatccaaataaattgctcttgaggtaggccttgatcaagaagtttcaattacatttctttaccaataaatagatgtctctggcagcaaatgagagataaggaaggttctctctcactcccaattcaaaactcaagccagagaaaatccacatgcctgacaagaaataataatagcctatttctttttcagctctgtctttaacaccctgtatgatgcttcagttaggtgtgtattttyaacagttttattgagatgtaatttatataacaaagtttacccattgaaaatatatagttcactggattttggtgtatttacagccatttatatactgccgtcaccacagtctcctttcaggataccttcatccaccccaaaa

SEQ ID NO: 77318 - DNA, 667 bp, Homo sapiens
aaaaccctgaaaattcaaaagtctaatattacaagaaatgttgtatttacaaggcattcacttcttgcttaaaaaaatagtcatgtttgaaataatacttccttatatggaccaaagtttccttcttaagcaaaaattcgattctgataacttagccacattctatctttaaacatgataaatactgatctcaaaaaaaaatcagaaagtgaaatgttcaaaactgcaagcttcccaatatgtacacaggggggaagttcctgaattacaggtgatgggtggagaaggtgtaaaggcagtagatcgaagtaaacttgaggagcacaaggtgctatgaatcctgaaatacctgacaaaacgtctccaaaactgcagcagtcagctaaatgctcatgattccatgcttttacacatttcaaaatttcagcatttttaaagaatgtattttagaatttacaatgggatacagaatgtgaaatttactttgtaaccttaatcataatttttaatatatattttactttgttttgattagtcaaaatcaggtatgtaaaaagttgaccttatatcaacattatgatccaattttaaagtaggaaaatcrtaacaaaatattttctaattagatcaaaaagacactctgtgatccactgctagaatggcacct

SEQ ID NO: 77319 - DNA, 1250 bp, Homo sapiens
aaagtcttgagagttatatattcttagcagattgtttcttttaacataaagtgatgttcctatttcttttgtatttttggttcctatgtactagacatttcaactctttattttcaaaatttctctagccttagattttasttgtcacttttattaactccatatagctagttcttttttaatcttatttaatgctctgttttaataggtgaatttagtaattttacttttattgtattactgatatattggaccttgaccgaatctccaagtagttgttgtagcctttacttccacagtctgtacagatataccaatacaccatttcctgggctaatattttcatttgcacatctcctattgtttattatccaagcttcatataatatatatacacttctcaatacaatggctttgtccagtgtttgcatagaataaaattatgtttcatccacaaaactcatacaatgtttttcacaaaattaagtaggggagaaatctagagttatttttcatatacattattaaatgggatgaccttattactatagatattctgaaaagtatttggagtgtcaagaaagcagattcacatcctggatgtcaatggcactgagaaggcaacttgtacatgttactgtgtagaagactactggttgttagcaaccatattaaagttcataagcaatgtgtatagcatggtttgttattggaaagcacattgccatattgtgcacattttaggaaattgataagttcacaggtaaaagacaataacttcttcccgtttaaaaagtaggaaatagctttccaattagcaaattgcctaaaatgtgggcaaaacatctgatttttaaaaacagattacagatattaggtaacagatgtctgtattcagttctgacatttcaattgctcaaagtggtttcgtttctcactcactgctgtagttttgtaatccactaaagtaacggtaccccaaaatgtttcttttctaacttctgacctctgctatttgttttaacaaattttattatattttatctcacctggttagtaaatcaccttgaaaaagtgtgaaattattttaaaaaaaatgaaagctaaataagcccttttaaaaaagaaaatgagaagctgggcttttatataggaaatttaaacaaaagagcttgaaattctacaagagacatttgaataagtgaagcagaatttatataagatacatttaacgtttcgttatatgatgc

SEQ ID NO: 77320 - DNA, 1250 bp, Homo sapiens
aaagtcttgagagttatatattcttagcagattgtttcttttaacataaagtgatgttcctatttcttttgtatttttggttcctatgtactagacatttcaactctttattttcaaaatttctctagccttagattttagttgtcacttttattaactccatatagctagttcttttttaatcttatttaatgctctgttttaataggtgaatttagtaattttacttttattgtattactgatatattggaccttgaccgaatctccaagtagttgttgtagcctttacttccacagtctgtacagatataccaatacaccatttcctgggctaatattttcatttgcacatctcctattgtttattatccaagcttcatataatatatatacacttctcaatacaatggctttgtccagtgtttgcatagaataaaattatgtttcatccacaaaactcatacaatgtttttcacaaaattaagtaggggagaaatctagagttatttttcatatacattattaaatgggatgrccttattactatagatattctgaaaagtatttggagtgtcaagaaagcagattcacatcctggatgtcaatggcactgagaaggcaacttgtacatgttactgtgtagaagactactggttgttagcaaccatattaaagttcataagcaatgtgtatagcatggtttgttattggaaagcacattgccatattgtgcacattttaggaaattgataagttcacaggtaaaagacaataacttcttcccgtttaaaaagtaggaaatagctttccaattagcaaattgcctaaaatgtgggcaaaacatctgatttttaaaaacagattacagatattaggtaacagatgtctgtattcagttctgacatttcaattgctcaaagtggtttcgtttctcactcactgctgtagttttgtaatccactaaagtaacggtaccccaaaatgtttcttttctaacttctgacctctgctatttgttttaacaaattttattatattttatctcacctggttagtaaatcaccttgaaaaagtgtgaaattattttaaaaaaaatgaaagctaaataagcccttttaaaaaagaaaatgagaagctgggcttttatataggaaatttaaacaaaagagcttgaaattctacaagagacatttgaataagtgaagcagaatttatataagatacatttaacgtttcgttatatgatgc

SEQ ID NO: 77321 - DNA, 1250 bp, Homo sapiens
aaagtcttgagagttatatattcttagcagattgtttcttttaacataaagtgatgttcctatttcttttgtatttttggttcctatgtactagacatttcaactctttattttcaaaatttctctagccttagattttagttgtcacttttattaactccatatagctagttcttttttaatcttatttaatgctctgttttaataggtgaatttagtaattttacttttattgtattactgatatattggaccttgaccgaatctccaagtagttgttgtagcctttacttccacagtctgtacagatataccaatacaccatttcctgggctaatattttcatttgcacatctcctattgtttattatccaagcttcatataatatatatacacttctcaatacaatggctttgtccagtgtttgcatagaataaaattatgtttcatccacaaaactcatacaatgtttttcacaaaattaagtaggggagaaatctagagttatttttcatatacattattaaatgggatgaccttattactatagatattctgaaaagtatttggagtgtcaagaaagcagattcacatcctggatgtcaatggcactgagaaggcaacttgtacatgttactgtgtagaagactactggttgttagcaaccatattaaagttcataagcaatgtgtatagcatggtttgttattggaaagcacattgccatattgtgcacattttaggaaattgataagttcacaggtaaaagacaataacttcttcccgtttaaaaagtaggaaatagctttccaattagcaaattgcctaaaatgtgggcaaaacatctgatttttaaaaacagattacagatattaggtaacagatgtctgtattcagttctgacatttcaattgctcaaagtggtttcgtttctcactcactgctgtagttttgtaatccactaaagtaacggtaccccaaaatgtttcttttctaacttctgacctctgctatttgttttaacaaattttattatattttatctcacctggttagtaaatcaccttgaaaaagtgtgaaattatttwaaaaaaaatgaaagctaaataagcccttttaaaaaagaaaatgagaagctgggcttttatataggaaatttaaacaaaagagcttgaaattctacaagagacatttgaataagtgaagcagaatttatataagatacatttaacgtttcgttatatgatgc

SEQ ID NO: 77322 - DNA, 756 bp, Homo sapiens
tattcactctacttttatgcatctttgaaaattaccataattttaaaaagtttagaaacccagtctctgtcacatataagtagtttaatcttgggtaagttatttaactattctgaatttcaattccttgatttataaataagaaaaatacccaccttacagagttaatgtaaaagtgaaataaaaaatatatagaaaaaggactaagcactaggcatagcatgatgaaggaggtttatagactttagagttcaatatttaaaggtcagcatttaagtttaatatttaaggacccagcatcaaggcaagtctcttggctctgtagccctggtccttggtcctagatcttttctaacttccatgagcaaatgaaatacccagaggctttgataaaatatagattctgattccgttgatcttcgggaggccaaagatcagcacttctaataagattccagtgatgccgaagctaccagtacagggaccaggatttggaaagtaagccctgacttctgccttatttctgaaactaaacttccaattatgccctcttttgattgttttgattgatgggtttmtcctgttctggctgagtccctggctggataatttgccccagaaattcaatccctccaggactgaggtcctggacatactattagttacccttagagtcggaaatcttgctcttgagcttcagcatggaagttatatctgtcaacaatgcctcagattctgatttcctgcttggatccc

SEQ ID NO: 77323 - DNA, 788 bp, Homo sapiens
ttttttttaaaaaaaataaatcaaatattcatttactttctggatctgcatactagctctaccacttactagttgtgtgaccttagataagttttataattgtttttcttcagtttgataatctataaagtgtatatgtacagaggatrtactaatatctacctcataaaattttatgggttaatacatgtttactacctagggcagtttctggcatagggtattagcataaatattatttttattttgagcatctgccatatgccagccagtagtgagggacaaggcagtctttggctaatagttacttatggtgtgttaaagctgttggtaattgcacagctgattctgtattatgggccacttctaggatgcgaagacatttactcctgtctactgcatggtgcttggagatggctaacataccaaacactgccatcactctgttgtctttaggagtctatggtagatcataacaatggccccaattcttagcctctttgtatccacatcctttgccatgtaactgtgtggtgcccttccactctgatactggacaagacaacgtaacttgatttgaccactggagactgaaaagtactggtgtgagtaagctgaccctctcccatgcctctgtcattgtaagacagcattcttgggtatagttagaacagctcccaaagatgtccatactttaatctctggaatctgtggatatgttatgatacatagcaaaagggatgtttaaaaaaatttctgtaataaaggttacagaccttaagataaag

SEQ ID NO: 77324 - DNA, 537 bp, Homo sapiens
agcatacataacatgaacaccgtctatttcagaaataaaaattcagtttaccattgtgggacttaattcattagtttttgatgttttaaattagggatttcttatttacagttttttttcctactttttccgttaacatgatcctattcatgttatacattttataactatcattgcactgtattctaaattatgttaggtaagtatgttatgaaagyataactagataaactggactacatcaaaatttaacatttcctcatcaaaggacacaatcaacagagtgaaaaggcaacccatggaatgaaagacagtatttataaatcatatatcttcaaatcaccaaacaaatgaagagctcctacaactcaaaaacaaatagtttaaaaatgggcaaagcacttgaacagacttttctccaaagaagatatacaaattgctaagaagcatatgaaaagaggctcaacatcattgtcattaggaaaacgcacaacaaaaccaccatgagttactacttcatacccattaggacatcca

SEQ ID NO: 77325 - DNA, 537 bp, Homo sapiens
agcatacataacatgaacaccgtctatttcagaaataaaaattcagtttaccattgtgggacttaattcattagtttttgatgttttaaattagggatttcttatttacagttttttttcctactttttccgttaacatgatcctattcatgttatacattttataactatcattgcactgtattctaaattatgttaggtaagtatgttatgaaagcataactagataaactggactacatcaaaatttaacatttcctcatcaaaggacacaatcaacagagtgaaaaggcaacccatgkaatgaaagacagtatttataaatcatatatcttcaaatcaccaaacaaatgaagagctcctacaactcaaaaacaaatagtttaaaaatgggcaaagcacttgaacagacttttctccaaagaagatatacaaattgctaagaagcatatgaaaagaggctcaacatcattgtcattaggaaaacgcacaacaaaaccaccatgagttactacttcatacccattaggacatcca

SEQ ID NO: 77326 - DNA, 644 bp, Homo sapiens
gttttagggctaaacaagatagaaaaagggtttagacattttttagaaaagaaagacaatattttagttttgtttaaatggactttcagaatatgcagagacatacaaagagaatttaagaattgaggcaattttgtggtttgaggcttgaattatctggataattgcttcaattttccacctcactacacatgggaacacacactgaacacacacatcctcacacattggaaaacattagtttttcttttttattgatgggggaaaaataaactaaaaggtaaaatcttaatattattaaaaggtaaaatcttaayattattaacattatgaatacactttaatctgcatgttttattgataagttttaggtagatgttctaaacctattcaaattcagaattttgaattcaaggcaatatttgctcttaaaaaacaaatggttttaagccctgcaatcttcatttctgaattgaaatggaaatggagcactgcattgtgcagggaggtgaaggaatgctcatagttcattaaataatgtgagtagtaatgaggtttacacaaatcaaacagtgtgttaggtaattgtaatgttgctttgtggtgaaccacctgtcaggaagtacttccagccgaaggctcaa

SEQ ID NO: 77327 - DNA, 688 bp, Homo sapiens
tttaaaaactgaaatgacttgaggttacttttctactcagaatcctccagtcagaatccctgtcttcttcagaggaaagccagagttcaaatgtcacctaccaggactggtgatctgccctcctcctcctacctcccttctccccctcatttcactccaggcacraggcccccagctttcctgcctctggcctttgtggtgactgctccccctgcctggaactatcctcacctcttctctgagaggaggttttctctgatcacccggcataaagcagcctttccttatcccctgtgcagtgcttcatatttcatctaagtgtttatcaaccttacagcaatcaactctgacttggttctttgctgcctgttttcaacactgcttggtttaagtaggcgtttgacatttgttgagttaggccacttcattaaagttagtcttagtagaggggaaactgagggctcaaaccagggcagggatagtacaagattgaaatatgtatgtgtgttgtttggaagaggtgggtgagagaaagactcctggtgggtgtaaaggaatttggaaaccaactaagggaggttaggagaagggccatgacacaggtatattggggcattttttagcatacgggatatgggagtctgtagtgatgtctaggggacaagaatagggggtaagggaagaccca

SEQ ID NO: 77328 - DNA, 688 bp, Homo sapiens
tttaaaaactgaaatgacttgaggttacttttctactcagaatcctccagtcagaatccctgtcttcttcagaggaaagccagagttcaaatgtcacctaccaggactggtgatctgccctcctcctcctacctcccttctccccctcatttcactccaggcacaaggcccccagctttcctgcctctggcctttgtggtgactgctccccctgcctggaactatcctcacctcttctctgagargaggttttctctgatcacccggcataaagcagcctttccttatcccctgtgcagtgcttcatatttcatctaagtgtttatcaaccttacagcaatcaactctgacttggttctttgctgcctgttttcaacactgcttggtttaagtaggcgtttgacatttgttgagttaggccacttcattaaagttagtcttagtagaggggaaactgagggctcaaaccagggcagggatagtacaagattgaaatatgtatgtgtgttgtttggaagaggtgggtgagagaaagactcctggtgggtgtaaaggaatttggaaaccaactaagggaggttaggagaagggccatgacacaggtatattggggcattttttagcatacgggatatgggagtctgtagtgatgtctaggggacaagaatagggggtaagggaagaccca

SEQ ID NO: 77329 - DNA, 688 bp, Homo sapiens
tttaaaaactgaaatgacttgaggttacttttctactcagaatcctccagtcagaatccctgtcttcttcagaggaaagccagagttcaaatgtcacctaccaggactggtgatctgccctcctcctcctacctcccttctccccctcatttcactccaggcacaaggcccccagctttcctgcctctggcctttgtggtgactgctccccctgcctggaactatcctcacctcttctctgagaggaggttttctctgatcacccggcataaagcagcctttccttatcccctgtgcagtgcttcatatttcatctaagtgtttatcaaccttacagcaatcaactctgacttggttctttgctgcctgttttcaacactgcttggtttaagtaggcgtttgacatttgttgagttaggccacttcattaaagttagtcttagtagaggggaaactgagggctcaaaccagggcagggatagtacaagattgaaatatgtatgtgtgttgtttggaagaggtgggtgagagaaagactcctggtgggtgtaaaggaatttggaaaccaactaagggaggttaggagaagggccatgacacaggtatattggggcattttttagcataygggatatgggagtctgtagtgatgtctaggggacaagaatagggggtaagggaagaccca

SEQ ID NO: 77330 - DNA, 499 bp, Homo sapiens
aataaatactgtgtatttcatttctgtttttaatttagcccatgttatggtaatctgatcctaaagtttggtgagtttttttaagggaagtagcttgactgcatttgtgtcacctggtgttagcactgattacaacctcacggaatactaaatgagttctggccatcactgtaaagtcttatttacaatttttaaaaaaaaggttaaagcagagttgggttcaaagtcaagcagttttaaatgggtgattcctacaattaacatgcctaatcacatggcttagaattgatgaaagatattgccacattattgtgacatatactgcaatactgagagaattcctggmgtacacaactcattgactcgtagataaattccgaatatgaacagcaaataaccagattgcagaacggttaccaaatggcaaacaaaatcatcacaaaatattctattttttgataattcctgagaatgcaaaataatattttatatcctggca

SEQ ID NO: 77331 - DNA, 1830 bp, Homo sapiens
ataaacaaagagcctggccattggaaactacaaatttagaagtcaggtagagaatgaaccatgaaggaaacttagaaggaagagcctgtaaagaaaaaatcctttcaagaaatgaagatatgtgaatattactaagagtttgagtgagatgaaagtgaaatactatacagccaatacaagtacaggtgaagtctatatttattgacatggaaagatggttatgaccatatgtcaaagagaacacactctggaatcctctgcctaaattcaaatctcatttcaaccacttagcagctatgtgaactttgggggttatttatcctaactacgtgagtttaattttcccatctgtacaatgggcataatagtaataatacttacctgaaaggactgttgtgaagacctaggttactaaatacaaatggattaaaagtctgsctggcatgttacaactgctaaaagagtgtatgctaccatttattactacattaaaaaacacaaattacaaaactatgtatataatgatcctttaagacttaaatatattacatttatcttcagaaatgggcaagttggaaatctagatatcaaattaataagagtagttctctctcaattctaacactacaggtgaattttaaaaatataacgttggcttattttctcattattctactgtgaacatattcatcatttacataattcttaatttcaagggaaattttcataactcaatagcgaaaagttttaaactttcctagaatgaaaatgattaggagaaaatataaatacccactgaaaataattcaacattagttttgcaacagtctccaaatgtctgtaaatcaccaagcagtgaaacgatacaaaaagggtggttacctttatgtttgaaaatggtaatagggagaaagaaacatgataaatggaggttttaacacgtttttccacctaattctaagcaatttagacctttgtgaatgagaatgcattcatatattaaattccatagtttaaaataaaacagcgaccaggaaaaaatttaatgtcacttaacatttttcttaggaataagaagtaagcagggggattacacagtgggattgcaggattactcacacctgtaatcccagcaatttaggaggccaaagcaggaggactgcttgaggccaggagttagagacaagtgtgggcaacactgggggaccttgtttctacaaaaaaaaaaaaaaattcaaaactagccatgtatggcggtacacacctgtggtcctttttctatttttagatttttaaagctttcttattgaaaactaaaacacgcacgcccactagcataggcctacagagggtcaggatcataaatatcactgtcttccacctctacatcttgtcccactaaaaggttttcaggcgaaataacatgaatggagctggcatttcctatggtaacaatgccttctcctggaatccctcctgagggacctgcctgaggtacttcttgaggaggtgtcacttttttcagaaatatgttcatggtggtttgttgggcttgtttcttttctcactattgagttgcatgagtaatgtgttggaactacggcattaagatggctatgaccttaagacagctgacattactaggtaaaaggaatttttcagctccattatagtctttggggaccactgacatatatgcagtctatcatttaccaaaacaccataatgctgcgcatgactgtactgtgcaatacctactgtgacatactaaagttacttgtacaatgagaattctatctgtagaaattggcagatcctctgtggtaatgc

SEQ ID NO: 77332 - DNA, 675 bp, Homo sapiens
gtgttattgacaatagaaacacccatgatagtttgatatttgccccaacctagtagccccttctcctagaattgggatttagaatcttgattatcattttctcaaaccaaatgtttctaaaagtaaaagaaggcctayacttatagagtagtgctctaagttaccattatttggtgcatatcacagagcttggtatgtctttatggagtgaggaaaccccaagtagatgaatccttaaaatggcaaatatgtacagtgattgccctagtgtggtggacaacagatttcttcctctggtgtagtgagactggaaaacttgtgaggcaggcttcacttgggctcataaagatttatctttatttgttgctcaatctcagggaaatcagaaggaacctgcatgcaggtgtacttcagtggctgatatggaggccagatgttgggtgtctgagcaaaagtcctgattttagttgacctccttctggattcattagcggatcaaaccatatctgaacagatgtactcattagtcctgcagtaggtccactgggaagcttctttctaattttggctttgagtccattggatgaatggatttttctagagtctatcctctcctatggacatttgaacaatagttttagcttatcatcaaaatctttatagtgagctccccta

SEQ ID NO: 77333 - DNA, 675 bp, Homo sapiens
gtgttattgacaatagaaacacccatgatagtttgatatttgccccaacctagtagccccttctcctagaattgggatttagaatcttgattatcattttctcaaaccaaatgtttctaaaagtaaaagaaggcctacactyatagagtagtgctctaagttaccattatttggtgcatatcacagagcttggtatgtctttatggagtgaggaaaccccaagtagatgaatccttaaaatggcaaatatgtacagtgattgccctagtgtggtggacaacagatttcttcctctggtgtagtgagactggaaaacttgtgaggcaggcttcacttgggctcataaagatttatctttatttgttgctcaatctcagggaaatcagaaggaacctgcatgcaggtgtacttcagtggctgatatggaggccagatgttgggtgtctgagcaaaagtcctgattttagttgacctccttctggattcattagcggatcaaaccatatctgaacagatgtactcattagtcctgcagtaggtccactgggaagcttctttctaattttggctttgagtccattggatgaatggatttttctagagtctatcctctcctatggacatttgaacaatagttttagcttatcatcaaaatctttatagtgagctccccta

SEQ ID NO: 77334 - DNA, 675 bp, Homo sapiens
gtgttattgacaatagaaacacccatgatagtttgatatttgccccaacctagtagccccttctcctagaattgggatttagaatcttgattatcattttctcaaaccaaatgtttctaaaagtaaaagaaggcctacacttatagagtagtgctctaagttaccattatttggtgcatatcacagagcttggtatgtctttatggagtgaggaaaccccaagtagatgaatccttaaaatggcaaatatgtacagtgattgccctrgtgtggtggacaacagatttcttcctctggtgtagtgagactggaaaacttgtgaggcaggcttcacttgggctcataaagatttatctttatttgttgctcaatctcagggaaatcagaaggaacctgcatgcaggtgtacttcagtggctgatatggaggccagatgttgggtgtctgagcaaaagtcctgattttagttgacctccttctggattcattagcggatcaaaccatatctgaacagatgtactcattagtcctgcagtaggtccactgggaagcttctttctaattttggctttgagtccattggatgaatggatttttctagagtctatcctctcctatggacatttgaacaatagttttagcttatcatcaaaatctttatagtgagctccccta

SEQ ID NO: 77335 - DNA, 765 bp, Homo sapiens
ttggaaatattctctgcatacactacaagtaaaaataaagttgtattttaacatactgtgtacgactacaaaataagacggaaaaaattggcttttattaatcaagatgggaaactttcaaatttaagatttctgctttgaaaatgtcaaactgagataaatttgagcaccttgtagcactttcaaatttttaaaaattactatacaataaagaatgatcacaaattatgtttagtaaataaaaaatatgttttttcaggattacagatgtgtttgtatatactttactgaacttctctcgactaaaacttctccagcaaagcttacataactctactatgcagtgacaacatccagaaggaatagtagttgcagttaattttgagctggctttactagtagtagacagataacccaacagctgttcttgaggtccctctgggtttatgataacaaagtcagggtgagtgtgcgtgcrcgcgcgcacgcgcgtgtgtgtgtttgtatgtatgtgtatatatatgtgtatatatgtatatatggagagcgagcgagctcatttttcttcttatttgcacttaatttactacatatagctcatactttacacaaagctattttatcattctccacagacattgcttggtgaagttccaaaaatacatggcaagagaagaattgaagagcaaagaattcatgcaaaactggtttcagcaagtacaactatggtccaagggaactatgcccatttctccttcatgctta

SEQ ID NO: 77336 - DNA, 962 bp, Homo sapiens
ggggaagttttagtagcacacaaaatgattacttttattctcaggaatggtcttatgagttgagaagccctatacaggacacctttgctgccctgaatgaacacctgagctgaaataagttttactaaaaagcattcacatcgaaataaaaatattaagatttgaattccagtatttatgtttcctaggtacatgactttgtgcctggtaaactttctgagaaccaacttctgctgtacagatatgtttgggaaactactaccctgagaagatgtagagtgtacttctaagttgggtttacattctggstctactctttactttgggatcttggacaagttacttaaattttctatggctgttttctcatctcttaagaaggtgaaaggggtactttattcaaaatgttgatgggagacttaagtgggatattacatgaaaaattcttaggagagtatatggcatacagtaagtgctacattatcatcactataattaataaaattactgtaaaaattacatgagataatatatgtagaaagttggacagggactagccatgcaataattctggttatactttcttttctcctcattgatgtttgaaatcactccattcctttgcattaagcattgacctcaaagacttatagcacccttggaagaggatttattttcttgtacacctgtgtatgtttgaattagttcgtcacttactgtgggacagaaaaacgtaaaagttctgggtgctagagctagggagagtgggccaggaaagaaaggataaaagattgctatactgttttctggtttgttgaaggggtgagtgtaatttagagaattaaacgctaggagtcctcttcatgatcctatgcaaaaggctcaccatccacacatcgtagctgcaggcttgttgtgatttgctatatgagactctagaatcttattgagaatggaaaaga

SEQ ID NO: 77337 - DNA, 665 bp, Homo sapiens
ttgtagattgttaaaaagggggatctccttcatctctgcaaagttagcatcctgccttggaaaaaatcagcaactggtgaatttttggtcatagtgaattattgcwacttcattttatcagccagagagattgggaaggatgttacctgcaaacatctgaagagcttatagagactagatgaaagaaacacacatcatttgtatctccaggatgaaatgatctcatctgcaaaatacgaatgatgataataccaacctcagagagttgctgaggcacttgagtggtaaaatagagctaaagtatttagcacgagtctgcacacagtgagtgcacaatcagtagtgcctatgatttgcattataagaatcacatactatggttacagagaaactggtgataggtcaatgtgagaaagaattttccaaaattattaagggctgcccactactggaagctacaacataggctgtgctccttaccccggaagcaagatgaacatctctcatgaaggtgtcgagaaaagtgttgctctagataatagttggcttattgcactggttcactcacctggttgagaatcagaataacataggcaatgttttaaaactaaaagttctggctgggcgtggtggctcacgcctgtaatcccagcactttgggaggc

SEQ ID NO: 77338 - DNA, 665 bp, Homo sapiens
ttgtagattgttaaaaagggggatctccttcatctctgcaaagttagcatcctgccttggaaaaaatcagcaactggtgaatttttggtcatagtgaattattgctacttcattttatcagccagagagattgggaaggatgttacctgcaaacatctgaagagcttatagagactagatgaaagaaacacacatcatttgtatctccaggatgaaatgatctcatctgcaaaatacgaatgatgataatamcaacctcagagagttgctgaggcacttgagtggtaaaatagagctaaagtatttagcacgagtctgcacacagtgagtgcacaatcagtagtgcctatgatttgcattataagaatcacatactatggttacagagaaactggtgataggtcaatgtgagaaagaattttccaaaattattaagggctgcccactactggaagctacaacataggctgtgctccttaccccggaagcaagatgaacatctctcatgaaggtgtcgagaaaagtgttgctctagataatagttggcttattgcactggttcactcacctggttgagaatcagaataacataggcaatgttttaaaactaaaagttctggctgggcgtggtggctcacgcctgtaatcccagcactttgggaggc

SEQ ID NO: 77339 - DNA, 644 bp, Homo sapiens
gcatgtgtaggcatacaaactgcattgccttggaagactgtgcctagtttccacccactcacgctcagtatcagcactgataaccttcagcccagccacttggagcaccatgcctgatgccaccctgagcatcatgagctggcacaactcaggagcaactaccatgaaaacaggcttcgtttctttgccctctttcttcatgtctcactgaagatgacaattgactctcagaggtgtttaatgggggaaatcacccaccctgtgcccagtgtgctccaaaccaggcaaagcaacggtggagaaggaatatttttggaacagagaaagcaagacacagagggctgtacccctccaggaatagtttctcccctgatagatctcttctccttcttckcccttgcaaggtgcctattacctggttagttgatcaaagtatcaagtggagaagccagaaataattgacagaaatatggggaacccctggcctttattacatcctcatccaggaaagaaaaacttcctgtccacagcagcacctgagtggatcatggtcagtacgtctgtgtgggagtacattcacacatgctgattttctgaacaggaaacagcttcctgatatttcttccaaacatattctctatact

SEQ ID NO: 77340 - DNA, 2353 bp, Homo sapiens
tgctagccacaccatttcatctaatgacactgcctgggatttaatggactcttaaacataatgctgctattgtggacaaagtttagttttagctaatgaagtcattgtaagttgaaataaagagcagagattgaaatgctcacaatcattcagtgaaatggaatgacttcatagtcggcacaaaacatgggacgctctctcctggtctccccccaggggtttctggccaggctgttggtgagggtgggtgggtttggcagatccggggaggcacaggcctyctgtgctcattcacatgatctcatggtttccactgctttctgtttgcacaggagccgtctctgtgtttatggcctttaaaattccaatttttattctcattattctagttttgtttgtgaaagttcgcttagcagctctaagcatgaagttacgtaaagagaggagtatttcctttgaccacctggagaaagcactagaaagtaggtaatacctaccactttagaaatagaaagcaaatatgaaggattttttttaatcccagcagttatttaaaagataaacagtaaatacaagtggaattataccaactaaccatactaccagcagtcaattgctgtagaataaacatccttatttccagggtgttctaatatattcgaagacatggagaatggcaccaaaagaatttatcactgacaattgctaaattagatattcccgaggtttgcctatatggatgacaacatttttagcacttcaaggtccttggaagaaaaactctgtataaaaattcaggacgatattgttatcatcaacatgttaaaattgactgagattgttacagcagttttaaaatcaaacagacctaaaaagaaggggaaaattacatgtgtactctatatttggatttttatacatgagatttaacacataatgttgtgatgtttgtttcagataaattcctttttaccaaaggtgtttcttctgagccaatcaatgcatagcttagcaggacccatcaaccaaataatatccattaacaacactccaattagccagggcaccatatttgacagttcagttctcaacctgttcaaccattcattccattttggctgctgtcctaattaatgactaatctataaaaaggagataataatacataccttatacatgccacacacacataattataagaacagaaccagattacacacacggtggcacctggtgtgggaggtgcttcgtaaacatttggattttctgtttcttttttttcctaatattctgtaaactcttattatctttactcttgcatttccaaggctatttagaaataaataataacaaaatttaaaaatccttttgtatagtaaaatcgcctaatatggatattttccaaaaacaagtcaaaggaatcagaggcctctgtagcaatttgaggctctttggctgggatccctattcctcagtggctcaagaccaaatttccactatcaacaccatccatctttatcccagagcacaattggagactaaagtctagaaatggactgaattacaaacatttttaaactatgtcaccagaaatgtatctgtactcttgcatcacttttgttcctctccctacattggatattcaataacccacttttagactgttttcaaaatatacaatgctcccaaaccttctcccagcaacagtttggtctttcagatcattggtttcccagtctttctctcctctcccttcccctctaccctcagcaggatttattgctctactaagtctttactaaaactatgtaaaatgttttaaagtcagctgcaacctccagaattcacaaacaatacattccttaggacaagggccgtgacttgcatttgtttaaaatcttctctatctgctgtcatagctagttctcaatgatctttgaatgaagcttaatctttttgaatgcaaagctggcaacagatattaacgatgctgtgatttgggctctggacattatgtgggtgtctcaagttgagcctgctttctgaaagatgggccttatccagaccctctcagctttagacacacttggcccttcctggatgccataagcaaacatgaacctggtcaagggatatgtagcttcagccaatgacccagccctgcaatggtcaacaatggctgttaagaggggcaacctgaaatttgtaaacctactatacagcataaataaaagctttaaccttgtttcttggtgataaatttttcccactttttatgtgtttatacttgccctgtatatttgtgtgtacatatgtgcataccaactcattcacctaacactttatggatgca

SEQ ID NO: 77341 - DNA, 395 bp, Homo sapiens
tctcctctttctgcattcttaagctgcacttctccttccccatccattctctcttgtccaatattcctggggtcaaagagccttagtctcctcttccttccaaaagaaatgccytatcctcagtatgcattgctatacctcttgccctgactccagaatcttaagtgttaagtcttaatgccaggcctatgaatatagaagtctgggatgagatttgctgatggaaagaggaggcaccaggctctatctccctagaaattcgctcctccatggaggatatgacccaagaaactcttagaaacaaagccagagtaaccaccaaccacattaaccccacacaggaggggtactacttttagaatgggcactctgaggcctgaggatatgaggctctt

SEQ ID NO: 77342 - DNA, 1001 bp, Homo sapiens
aaagctctgattacaaattgttgtgcttactcttttatagacaatcattgtgtgagtcgctgtaactcccagagctgcatattagcccaggaagaagaacagtatctacagagtggagaccagcaactgacccgacatgtgttgctgtgtttacttctcatcattggcctgttcgctgtaatggttttttctggttttgttttggggccatttctttaaatttttggcaaaggttttattcaggcatccgggaaaaacttagttgctgctttccagaagtgtggtagctaggtcacctgaatttggatcttgagctaaatawttgcaggtgtgaggggaagagatgaatcattcacattactctgaggcctgagtgctccaatagcttattctgcttagaatcatttattcattctatgctctgaacctagaatttggtaaaagcagctatttctttttattttttattttttttttttttgagacagagtctaactctgttgcccaggctggagtgaagtggcatgatctcagctcactgcaacctctgcctcccgggttcaagcgattctcctgcttcagtctcctgagtagttgggattacaggcgcatgccaccatgcctggctaatttttgtatttgtagtagagacggggtttcatcatgttggtcaggctggtcttgaacccctgacctcaggtgatccaccctccttagcctcccaaagtgctggaattacaggcgtgagccactgcgccaggcccaaaagcagctatttcaataatgtacacagggccacttattcctaacatacctgactgaccaaagtggataaatgcctacattaatgtctcagaacatgaaacctcagtgtccaccagaaaaaaaaaaagaaaaccaaaaaacctctcagaacatattcctcagataaactttaaaaaataattttcaattatcaaaataacataactacttcatataatagacccttacaaaataga

SEQ ID NO: 77343 - DNA, 653 bp, Homo sapiens
agccttcctagtagctaggattacaggcgctgaccaccactcccggctaattttttttttttttttttttttttggatttttagtagagacgaggtttcaccatgttggccaggctggtcttaaacttccgacctcaggtgatccgcccgcctcggcctcccaaagtgctgggattacaggcgtgagccaccgcgcctggcctctgtcccttttaaatggtgcatctgatcatcacttgctcaccccaccagcaggtcccagagggacacagcacctgagcaagctctggaggtggtcctgtccctcttgctgaaaaggcaagggctcactcagggagggcaggtggtgagcttccagcccagccctggactgcagggcattgctagcaagcacagccagtgaggagacgaggcttgagaggctaggcaccttggccaagtcacacagcggacatgggctgcgccaggatttgaagcagatctgccctcttmcaaagactgtgggaacccttccctaccttgctgcctctcgtgaattaacaaaaacgttcatcaatcgtagtctcattttcaaagaccaggccagaagatactgactgaacaatttacttagatttatcaaatgacttaatgaaatatttttagattatgat

SEQ ID NO: 77344 - DNA, 732 bp, Homo sapiens
ttctagtttaagaagtaactggattaaagaatagtcactgggtagctggtaggcaagaaggaatggttagagttgaaaaggcaccaaagagagttctctcactttaaagtgttttcaagggttccactcagttccagagatcacatgagaagcagatcatcccatcagaaaataggtttcaagtggaaatgaactcccaagcagcttctcattaggcccagaaaaatctacagacaggtaatatggatttgtgtgtgtgtgtttgtgcgtatacatacatataattcaaatctgagactgagacatgatctccatgccccaggtaaagatggcagaaaagggggtgtattttccttctaaattctatagagtaggggtccaaatccataccagtagttcttttttctccttcttcccctccttttcctaagatagggacctacagacagttmtctgagttgaacaaaaaattactttgtgtgatttgacacagaccagtagatgcaaagggtgcatgaatgagctagcagggtgtactagagtaacaatacagagcatgatttaagaaattcaaatgtctgggtgtatagcaaacactgaagttacaaaacataatcactgcttaattctaagtatttaaactattctgatttgaatagatattgatatgtaaaaacatcatattctcataaaataataattgccttagtcttcttaacaaagtagcataac

SEQ ID NO: 77345 - DNA, 747 bp, Homo sapiens
gatccttacagccagaaagacaccaagaatatatagaagttccagcctgaccaacatggtgaaaccccgtctctactaaaaatacaaaaactagccaggtgtggtggtgcatgcctgtaatcccagctactcaggaggctgaggcaggagaatcgcttgaacccgggaggtggaggctgcagtgagccgagatcgcgccactaccctccagcctgggcaacagagcaaggctctgtctcaaaaaaaaaaaaaaaraagaagaaaagaaagaaaaagaatatataaaagtctgccaaagattatatagcattacaacccaatgcatttgtggtggccccaagggatgactatcagtactgtcataataaactcaaacagacacacacacacatacacacatgcacacacacacagaggaaacatttccttccacaactaagaatgatataaccttttgagcatgaaaagaaaaatgatagctaaaattagcatcttaaaaagtaaactacataataactgaagatgagatttccttaaaactgtagaacaatgagatactatgatagctgtcacaagagaggaaattgcatgagtgtatttgaaaggatttgggggtgtttttcccccattgagatttgcttttctacataccacagtgtgactgaaaagctaaaatatttccccagggcctgtatgatctgtgcctcactacgctgcctctgacatttggagagtgtcatttagccc

SEQ ID NO: 77346 - DNA, 765 bp, Homo sapiens
gttttttaattttggtcatctgtaagttgagagtatcatttctccttcagaaatgcagatagaacttgaaaggaagcatatgagaataaacctaggataagatttgacatagcaacggtgctaaaaaaatgaaatagaatcttaatgaacacattctgaaacctaagcaagtgtgttctacatacagagttggtataaaataaagtatgaactgcacaagtaggtggattgctgaaagaaaggagagcacagaaaacaaaatgctgttatgtgtatgattgaatttcaatcttctatcctaaattctctacttcattcagcagactctggccaaatcagattgtatttgtttgatggctggaggaacrggtgtgcgctgacaaagtaaattggttgaattccattcttttaaaagaaaaataactaatattcacccttcaaaaaatgttgtttaaagttccaggaatactgaggtcatgaagcgattccacaggaaatgaagtgcaaactggcaactcgccactcaggagaggtcacaatgaataaacagtccttttacctgcttccaccgtgtcgaggacgtcatgtatactaactcaacagtagttaactgagcaactaccttgagctttctcagttatccacatagacaaggatatgaaaaggaaccaaacacattctctggcataaggagctcaagaagataaaatttgtaagtgaattagcattgcacgatatagaagatgatgagcaccacagacagga

SEQ ID NO: 77347 - DNA, 765 bp, Homo sapiens
gttttttaattttggtcatctgtaagttgagagtatcatttctccttcagaaatgcagatagaacttgaaaggaagcatatgagaataaacctaggataagatttgacatagcaacggtgctaaaaaaatgaaatagaatcttaatgaacacattctgaaacctaagcaagtgtgttctacatacagagttggtataaaataaagtatgaactgcacaagtaggtggattgctgaaagaaaggagagcacagaaaacaaaatgctgttatgtgtatgattgaatttcaatcttctatcctaaattctctacttcattcagcagactctggccaaatcagattgtatttgtttgatggctggaggaacgggtgtgcgctgacaaagtaaattggttgaattccattcttttaaaagaaaaataactaatattcacccttcaaaaaatgttgtttaaagttccaggaatactgaggtcatgaagsgattccacaggaaatgaagtgcaaactggcaactcgccactcaggagaggtcacaatgaataaacagtccttttacctgcttccaccgtgtcgaggacgtcatgtatactaactcaacagtagttaactgagcaactaccttgagctttctcagttatccacatagacaaggatatgaaaaggaaccaaacacattctctggcataaggagctcaagaagataaaatttgtaagtgaattagcattgcacgatatagaagatgatgagcaccacagacagga

SEQ ID NO: 77348 - DNA, 765 bp, Homo sapiens
gttttttaattttggtcatctgtaagttgagagtatcatttctccttcagaaatgcagatagaacttgaaaggaagcatatgagaataaacctaggataagatttgacatagcaacggtgctaaaaaaatgaaatagaatcttaatgaacacattctgaaacctaagcaagtgtgttctacatacagagttggtataaaataaagtatgaactgcacaagtaggtggattgctgaaagaaaggagagcacagaaaacaaaatgctgttatgtgtatgattgaatttcaatcttctatcctaaattctctacttcattcagcagactctggccaaatcagattgtatttgtttgatggctggaggaacgggtgtgcgctgacaaagtaaattggttgaattccattcttttaaaagaaaaataactaatattcacccttcaaaaaatgttgtttaaagttccaggaatactgaggtcatgaagcgattccacaggaaatgaagtgcaaactggcaactcgccactcaggagaggtcacaatgaataaacagtccttttacctgcttccaccgtgtcgaggacgtcatgtatactaactcaacagtagttaactgagcaactaccttgagctttctcagttatccacatagacaaggatatgaaaaggaaccaaacacattctctggcataaggwgctcaagaagataaaatttgtaagtgaattagcattgcacgatatagaagatgatgagcaccacagacagga

SEQ ID NO: 77349 - DNA, 368 bp, Homo sapiens
tgtcttctttctgatatacactttcagaccacacatatttcccacttatggtacttaccttggatgctattgtatagttatttctatgattacataattaatgtctgtctcccctcctatactgtaaactctgaaaatacaaaktcagttcttagccttgtgtctccaaggttgtagtatccaaaacatacttctgaaatgaattactaaaaacacaagctatcctggcactgcacaacctatatgccttggttcatgctgtttggggaacccgactttcaggtttatatattgcaatagtaccccacaaaataacgtattttctgtcaataaacaatcagtaacattgcggaaatgttcatgccaaa

SEQ ID NO: 77350 - DNA, 1309 bp, Homo sapiens
aaagacagaggcaagtcttactgggctttgagttgcttggaggcccatggacacggaggcaggacacaacggatggaccctgctagtatcagccaagggcttcatacagtggattacttgatcagaaccaaatctgagccaagtgtgtggtaagttctgagcccaatcatgtgccacacactgtactaatcactgggaactaggctgagattgctgaatataagtgactcagaatcaggccctgcctcaaggagtgccttcttcacaaagtgcacaatgaactacactttatcgtataatgtgagcacaaagaagggagacaagattattccagttgaatcaatatggaaaggctctatggacttggtatccctgaatgacaggagaaggccgggttagcagaaacaaggcagaggcatacaaaacagaggaaatgggatgagtgcaatcatgaggccaagggatagcaccggaaatttggggaaacagcaggcagttcaatttgactgatagaatttgtaaaggctcataatggtaagtaaggctggagcaagaaactcagtcatgacatacaaaggcttgtggatgtaacagacgtatatggaagcagtgagaacccaccgaaattcttatgcatgaacatgagagtgatctggaccagtatacttctcaaattttaatgtgcataaggaatcaactggggatcctgtgaaaatgcagatttgtgttcagtaggcctggctgggatgagaactaggggttagcattgctaacaagctcccaggtgatgctggtgctgctgaattcaggactacactttgagtaccaggggtctagactagatgagcgcgtacaaaaatccatggggttgagtagaaaatgcagtttcgaaatggtmgtttccatagtacttttatcattcagttcctcatgatttaataaggattagaaatctctgatttccagttttttttaacctttttcctttttaattattggtagtagtgtttttattatatgattagtttagcagtcctgataacataatgagactgtgacaaggtaaacgtgtgactggctttagtccatcagcattgcccaccatcccttacaggcatttgacttttttgttgttcctggtcaaagactaaataaagtcaaatgaacagcaaaaaccagagaaagatctggagaggaaaaggtccctgaacctgcccaatgaacccctgatcctattccctgcaaacaaaagacaatcaacaaagaaaacagacacaggcacaaagattatttaaccaatttgaactgc

SEQ ID NO: 77351 - DNA, 450 bp, Homo sapiens
  misc_feature (1)...(450): n = A,T,C or G
atcttccacattgtctgagcaatgattttaatccatactcctgagtaggctctctaccagttcacttgctccccaagaaccctcataactcatctatctcctcatggtagactctggtgacaacattccataccatgttttaaaaaaatactttatacaactttacttatgctcacggcattcccagtatttactgtgtcctttccacccctctgttccatccagctcatcatattgtgttttccaggctcatwgcaaacgccatctctatgaaccaattctgactttctgctattcctctgtttctcccttgctcccctccaatatgggatttatattatagaccnnnnnnnnnnnnnnnnnnnnnnnnnnnnnnnnnnnnnnnnnnnnnnnnnnnnnnnnnnnnnnnnnnnnnnnnnnnnnnnnnnnnnnnnnnnnnnnnnnnncagg

SEQ ID NO: 77352 - DNA, 722 bp, Homo sapiens
atttttatttgcattactacttatgtcaaatagctttggctgcttgaaattcatcttatttattgaagagagaaaatggagtagatgaattcaatcaagagtttattttaaaccttgtgttaaggtttaagcactttcacagttttggggrtgctgatcttagtttatgtggctctttattcagcagttttacagtgtctttttaaaactgccaaatgctagtccctagttaatggcaattttagttattgaagagtctgggagaaagagggacaaagcacaactttgcatgagttgttcatgctggaaaggtgtgtttggggcactgtgaactagacctgagccaaggcggtctaaccctggctcaggttaagagccagaagaaaacatagaagaaaaatcaatttgctgaaagtcgtttctccaaagagtcagctttccaaaaagataattaccaaatttatgagctgtgggtttatacatttaaaagctgtgacagtgatgtgtaaaagtactaaccaaaaacgttaaacagtttaataatattcagactacacatcccagtttgcctggtaggatctcagtttatacccattgtcattgggcaatcactaatagtgcccccttttactctcaaatgtgtttcaacttggaagatgaattatatggccaccttatttaatagagaaattttatttttgttacagaggagataatatttt

SEQ ID NO: 77353 - DNA, 873 bp, Homo sapiens
acaccagctcagtaagcaagatagatatgaataattatctccattttgcagagaagaaaatggagatagaggttatatttaatttgggtttacrtaagaagtaaatggaacagtcagtcaggactacatcttaggtcttacagttctaatcttagtgtacatggcctcttggtctgtaaaatgcaattacatgatacccagagatactgaacttttaggttgtacatccaaaataaagagaggaacgccttagctggaacaaaaagaagagtatatgtaacttaagatctttcattgtgctatgcctcttccatgtttgagttacagggttttcgtgtggtcactaagtaaagaaaacagggggatgagttgatgcttgctaggtggggttgttggccctgacctgacttggacttctcagaaatatcacagtgttaagaataatcaattttgatctttcaactgcagcagccctaatagatgaagagtggtttattattttttttaagtctatgttgtttcaagccagctagaacgttgctttgttaatcaaataaactattatttgtttctgaaacagtgggggagggaaaatataaacataataactgataatgtcataattacacaaatgagtttttaatactcctccagagagattgaaccttctaaaccacagagttcactcagaagaggtgaggaagaggaaatgaggactaaaacttgagttaacagcatccctaggggagttttcatctctttatctagtaaggattcaggaacaatatttttcctaaaaggcacgatttgtgaaagaaaacaataaggtgactttaagggagaaccagagcctctagtaagttctaggaggcc

SEQ ID NO: 77354 - DNA, 873 bp, Homo sapiens
acaccagctcagtaagcaagatagatatgaataattatctccattttgcagagaagaaaatggagatagaggttatatttaatttgggtttacataagaagtaaatggaacagtcagtcaggactacatcttaggtcttacagttctaatcttagtgtacatggcctcttggtctgtaaaatgcaattacatgatacccagagatactgaacttttaggttgtacatccaaaataaagagaggaacgccttagctggaacaaaaagaagagtatatgtaacttaagatctttcattgtgctatgcctcttccatgtttgagttacagggttttcgtgtggtcactaagtaaagaaaacagggggatgagttgatgcttgctaggtggggttgttggccctgacctgacttggacttctcagaaatatcacagtgttaagaataatcaattttgatcttwcaactgcagcagccctaatagatgaagagtggtttattattttttttaagtctatgttgtttcaagccagctagaacgttgctttgttaatcaaataaactattatttgtttctgaaacagtgggggagggaaaatataaacataataactgataatgtcataattacacaaatgagtttttaatactcctccagagagattgaaccttctaaaccacagagttcactcagaagaggtgaggaagaggaaatgaggactaaaacttgagttaacagcatccctaggggagttttcatctctttatctagtaaggattcaggaacaatatttttcctaaaaggcacgatttgtgaaagaaaacaataaggtgactttaagggagaaccagagcctctagtaagttctaggaggcc

SEQ ID NO: 77355 - DNA, 873 bp, Homo sapiens
acaccagctcagtaagcaagatagatatgaataattatctccattttgcagagaagaaaatggagatagaggttatatttaatttgggtttacataagaagtaaatggaacagtcagtcaggactacatcttaggtcttacagttctaatcttagtgtacatggcctcttggtctgtaaaatgcaattacatgatacccagagatactgaacttttaggttgtacatccaaaataaagagaggaacgccttagctggaacaaaaagaagagtatatgtaacttaagatctttcattgtgctatgcctcttccatgtttgagttacagggttttcgtgtggtcactaagtaaagaaaacagggggatgagttgatgcttgctaggtggggttgttggccctgacctgacttggacttctcagaaatatcacagtgttaagaataatcaattttgatctttcaactgcagcagccctaatagatgaagagtggtttattattttttttaagtctatgttgtttcaagccagctagaacgttgctttgttaatcaaataaactattatttgtttctgaaacagtgggggagggaaaatrtaaacataataactgataatgtcataattacacaaatgagtttttaatactcctccagagagattgaaccttctaaaccacagagttcactcagaagaggtgaggaagaggaaatgaggactaaaacttgagttaacagcatccctaggggagttttcatctctttatctagtaaggattcaggaacaatatttttcctaaaaggcacgatttgtgaaagaaaacaataaggtgactttaagggagaaccagagcctctagtaagttctaggaggcc

SEQ ID NO: 77356 - DNA, 1133 bp, Homo sapiens
aaaaattaagttaaaccaaaggaattacttataataaattatcgtgtgaagcttattatttattcttgacttgcactaacaaatctttgaattttgggtctattttcattttcaccttgctaaaaaaaaacgatcctattggtcctagaaacttataatgatgaaagaaaatccttcttctccacaatctgaacttttttaaatctgaaaatgaggccagtgatagttgacccataattgttttgagcgtttttaaaagttaacatttcttgatttctatttactatgaatgacattgttttcaacattttaaaacatatgaatggttctgaaagttgaagcatagaagcgtatttaaatcctgtacctgcctttccttgccagtaaaatgtccacaagactcctgtgaaaatggacttgttcgtgtattgctaaccagttaaaaatgcgaactctcagagttcacccaacccaccactgcctggccagaaactctgagggtggggctcagccctctgtggtttaacactctcctgatgtttctgatctcaatgaagtatgagaatccctgtgataagcagagcccataagactttgtcattgcagatcttgaagaaaacctacattggtgagatgaggactgtaatcatcttgtatagggttactggagatgaaccgtttactgttttagtgttactaaagcattactgttttagtaaatggccttgagaaagacacagacaagmttaccagaagtggatttaggaaaacctggaaagcattagctgctatttccccaccattactgcttcacatacttttactatcatttctgtcacttaagacacttgtgtagtaaaaagagcacagacactggaatccaagataatggttaaaattctcacatggagaatacaatcaatattaaaattaaatgaaaatataacacattagaaaagcttaaaacttctgaaaatcaaagatacgtgtatcaataaatttgcaatacttttcatgttatacatagaagtagctggctttaaacaatcaaatataacaccccatgtctgtgaggttgtgaagaaattagcataacctgctgactgttcatggccacggagatgggcacactg

SEQ ID NO: 77357 - DNA, 1133 bp, Homo sapiens
aaaaattaagttaaaccaaaggaattacttataataaattatcgtgtgaagcttattatttattcttgacttgcactaacaaatctttgaattttgggtctattttcattttcaccttgctaaaaaaaaacgatcctattggtcctagaaacttataatgatgaaagaaaatccttcttctccacaatctgaacttttttaaatctgaaaatgaggccagtgatagttgacccataattgttttgagcgtttttaaaagttaacatttcttgatttctatttactatgaatgacattgttttcaacattttaaaacatatgaatggttctgaaagttgaagcatagaagcgtatttaaatcctgtacctgcctttccttgccagtaaaatgtccacaagactcctgtgaaaatggacttgttcgtgtattgctaaccagttaaaaatgcgaactctcagagttcacccaacccaccactgcctggccagaaactctgagggtggggctcagccctctgtggtttaacactctcctgatgtttctgatctcaatgaagtatgagaatccctgtgataagcagagcccataagactttgtcattgcagatcttgaagaaaacctacattggtgagatgaggactgtaatcatcttgtatagggttactggagatgaaccgtttactgttttagtgttactaaagcattactgttttagtaaatggccttgagaaagacacagacaagcttaccagaagtggatttaggaaaacctggaaagcattagctgctatttccccaccattactgcttcacatacttttactatcatttctgtcacttaagacacttgtgtagtaaaaagagcacagacactggaatccaagataatggttaaaattctcacatggagaatacaatcaatattaaaattaaatgaaaatataacacattagaaaagcttaaaacttctgaaaatcaaagatacgtgtatcaataaatttgcaatacttttcatgttatacatagaagtagctggctttaaacaatcaaatataacaccccatgtctgtgaggttgtgaagaaattagcataacctgctkactgttcatggccacggagatgggcacactg

SEQ ID NO: 77358 - DNA, 896 bp, Homo sapiens
ctcaatttgtcttaaatcaagctcatcagcagaaatgactttctaacccacattttctctaaaccttyttttctagaatcccttccttctttctttccttccttccttccttccttccttccttcctttcttccttccttcgagacagagtctcactttgtttcccaggctggagtgcagtggttcatagctcactgtagcctcgaactcctgggatcaagcaatcctcctgtcacagcctctcaagtagctagagtagctaggattacaggcacacgccaccatgcctgctaatttttgtagtttttgtacagatggagtcttgttatgttgcccaggtggccttgaacgtctggcctcaagtgatcctctcacatcagcctctcaaatcactggaactgtttaatttctttatagcacttatacaatgtctatctgtgaatctatttgctaattcgcatatgaattgaccattttcctcactagactatagtccccatgagggtgctgagagtgactatttagttcatcactagcatgatactagatacctagtaaacaccaaatactttgctgaacatttgctgaatttagggcttctaatcacccttactagttataaactttttaacaattctaactttcaatataattgacttatttcaccccagagagaagaaagaatacttcgcaaggcaattagaccaggggatccacttcctggtacatttatcacacaattatatttaacaattatactcatgagcaatgtaaacaatcagatttaagatatatgtgtttgcccaagagatgtataaagattgttcagtaacgaaggagggacacacagtaaaagaagagcagtcctgccctcaaggagcttataatttagtgaa

SEQ ID NO: 77359 - DNA, 798 bp, Homo sapiens
gtcaaaaaaaaaaaaaaaaagaagggtggttgtcaggcgctggggaaagggggaaacaaggaggtattagtcaaagggtacaaagtttcagttaggcaagataaataaatcctagagatctacagtacaacatagtgcccatatagttaataatattaataatattttattatatattcaaaattgctaagagggtattttgttgtgttcttattatacacatacaataataataataacagagagggggaggaggaaacatttggaggtaatggatatattcatggcatagattgtattgattctttcataggtgtatgcttacctccaaacttgtcaagttgtctacattaagtatgtatagctttttgtaagtcaaaacacaaacaaataaaaacactgctgatracaaaagaaaaggaaaggaaggaaggaaggaaataaggaacgaaggaaggacggaaggaagggcgtattctactcttccttgtttattaaaggttatttttcagaaagcgatgtaaaaattgtatcagttattttaatatcactgatacaagtggtcactttttaaaattttttcctttgagctgggtgtgatggctcacacctgtaatcctagaattttgagaggccaaggtgggcagagcccctgagtccaggagttcaagaggagcctaggtaacatggataaactctatctctacacaaacaaacaaaaaaaattagcacagcatggtgatgcacacgtgtaatcccagctactacagaggctgaggtgaggtggaaggatcccct

SEQ ID NO: 77360 - DNA, 763 bp, Homo sapiens
tgtgctgtcctggtggtatactgccataggggcagccgaatacaagagaaaggctacctggtgtttctggaaagatggggctgtgggtaccctgcagatgttccctgtgtttttcatcagctgcagtgacagagagcttaatgtcttcttaaagccacctgatagggcaatgacagacaagcaatgaaggatcggatgcctttttccttctgccctgctgggccttggcagcattggagactctggacatgaggcactgctcagggcagataaggaatctccagaaagaactgtgttaagtttttctctatagcctgtgggaatgggggcttgaagtcagaaaatcatgtgactagaatataaacaggacatttcttattgcctagtttgtggactgagagtcaaacccattagttcgactttattattttctgcgttgaggaaagcaaagatcacctggtggccatcaggcagaccatccagaggcaaactcctcatccggggaattcagaagtaattagacttccctattatctaaagccagcacctggtttcaggcttctttccccacaatttataactagaatttctatacatctctggaatgcttgcatgtygaagctcattgcataacccttcttgacgtcaaagcaccaaaattcctgcaaatgtaatcatttatcattatttacatggctaatgttgtccaatttactcttaagctcccgctttaaggcccataaatactttcaaggaaaaatcc

SEQ ID NO: 77361 - DNA, 1433 bp, Homo sapiens
gcctgcctcggcctcccaaagtgctgcggttacaggcgtgagtcaccgcgccyggcctgcctcttcacttttaatggagattaaaattgacaacaaacatgtaagtaattgttgtcaagtatgtccacttttgtgcgtaatgcattcaattatttttctaccaagatctcgcagaagtgatgcttggggatagagacagctcgagggggaagaacttcagggttcctggtgtttgttagttgtcatttcattattccatgtgatggggtgaaaaggaaggtaaggtatgagcaaacctgaaaatggtgaaggctgacatttcacccttatagaagtcacaaaatagaattttaacgcatggtgttgatttaaaaattaaacaatcttcatgctgaatacacttaacagatatattgtgtgaaacttgccaaagaatgccagtctcatttggggtctgctgtgtattccaataatcatacaataacacagaccaccacactaaccacctgcagaccttcaaaacgtggttcaaatcccattacagttgtggccttgtctcatcttgaggctaagtcctgtccatttttaattttcttttctttctctctctctctctcttttttgagacagtgtcttggtcacccaggctggactacagtggtgcaatcatggctcactgaagcctcaaccccctgaactcaagcaatcctcccacctcagcctctggagtagctaagactacaggtacgtactaccacaccaagctaattttttattttttgtagagatggggtctcactatgtttcccaggttagtctccaactcctgggcttaggagaaccttcttccaaagtgttgaggttgaaggtgtgagccatcaggcccagttcaatttttaattttctatgataagaaagaacagttaatgccattcaattgttttgaagtgattttttgaaaagctgacatcgaatgctctccaagatcttgcctgtgtgcttagagatttatgagcgtggtctcatgtaatccttgtgactagcccatctcagccaggaggagagtggtggcaacttcctcctgtgtctgaaagcctgttaaatgggggagttggatttgaaaacttgggggaaagaatgtcagggctggccccgccctgggtccggcagtggggtgttggcatgggcaatccactgtgtttccttccttaatcagatcagctcagggctaggcctgtggattgtgaggatgtcgggaaacctaggtgtgacctgctctgccagaggccgcctgcctgtggagcctgtgggagcacacggcctcctgactcaaggtttctaatccccttatgaaccaccctgaaacaggcctgaggtccttgaccacacacagagatggtgacgggcaggccagccctctcacttcccatgca

SEQ ID NO: 77362 - DNA, 1433 bp, Homo sapiens
gcctgcctcggcctcccaaagtgctgcggttacaggcgtgagtcaccgcgcccggcctgcctcttcacttttaatggagattaaaattgacaacaaacatgtaagtaattgttgtcaagtatgtccacttttgtgcgtaatgcattcaattatttttctaccaagatctcgcagaagtgatgcttggggatagagacagctcgagggggaagaacttcagggttcctggtgtttgttagttgtcatttcattattccatgtgatrgggtgaaaaggaaggtaaggtatgagcaaacctgaaaatggtgaaggctgacatttcacccttatagaagtcacaaaatagaattttaacgcatggtgttgatttaaaaattaaacaatcttcatgctgaatacacttaacagatatattgtgtgaaacttgccaaagaatgccagtctcatttggggtctgctgtgtattccaataatcatacaataacacagaccaccacactaaccacctgcagaccttcaaaacgtggttcaaatcccattacagttgtggccttgtctcatcttgaggctaagtcctgtccatttttaattttcttttctttctctctctctctctcttttttgagacagtgtcttggtcacccaggctggactacagtggtgcaatcatggctcactgaagcctcaaccccctgaactcaagcaatcctcccacctcagcctctggagtagctaagactacaggtacgtactaccacaccaagctaattttttattttttgtagagatggggtctcactatgtttcccaggttagtctccaactcctgggcttaggagaaccttcttccaaagtgttgaggttgaaggtgtgagccatcaggcccagttcaatttttaattttctatgataagaaagaacagttaatgccattcaattgttttgaagtgattttttgaaaagctgacatcgaatgctctccaagatcttgcctgtgtgcttagagatttatgagcgtggtctcatgtaatccttgtgactagcccatctcagccaggaggagagtggtggcaacttcctcctgtgtctgaaagcctgttaaatgggggagttggatttgaaaacttgggggaaagaatgtcagggctggccccgccctgggtccggcagtggggtgttggcatgggcaatccactgtgtttccttccttaatcagatcagctcagggctaggcctgtggattgtgaggatgtcgggaaacctaggtgtgacctgctctgccagaggccgcctgcctgtggagcctgtgggagcacacggcctcctgactcaaggtttctaatccccttatgaaccaccctgaaacaggcctgaggtccttgaccacacacagagatggtgacgggcaggccagccctctcacttcccatgca

SEQ ID NO: 77363 - DNA, 1433 bp, Homo sapiens
gcctgcctcggcctcccaaagtgctgcggttacaggcgtgagtcaccgcgcccggcctgcctcttcacttttaatggagattaaaattgacaacaaacatgtaagtaattgttgtcaagtatgtccacttttgtgcgtaatgcattcaattatttttctaccaagatctcgcagaagtgatgcttggggatagagacagctcgagggggaagaacttcagggttcctggtgtttgttagttgtcatttcattattccatgtgatggggtgaaaaggaaggtaaggtatgagcaaacctgaaaatggtgaaggctgacatttcacccttatagaagtcacaaaatagaattttaacgcatggtgttgatttaaaaattaaacaatcttcatgctgaatacacttaacagatatattgtgtgaaacttgccaaagaatgccagtctcatttggggtctgctgtgtattccaataatcatacaataacacagaccaccacastaaccacctgcagaccttcaaaacgtggttcaaatcccattacagttgtggccttgtctcatcttgaggctaagtcctgtccatttttaattttcttttctttctctctctctctctcttttttgagacagtgtcttggtcacccaggctggactacagtggtgcaatcatggctcactgaagcctcaaccccctgaactcaagcaatcctcccacctcagcctctggagtagctaagactacaggtacgtactaccacaccaagctaattttttattttttgtagagatggggtctcactatgtttcccaggttagtctccaactcctgggcttaggagaaccttcttccaaagtgttgaggttgaaggtgtgagccatcaggcccagttcaatttttaattttctatgataagaaagaacagttaatgccattcaattgttttgaagtgattttttgaaaagctgacatcgaatgctctccaagatcttgcctgtgtgcttagagatttatgagcgtggtctcatgtaatccttgtgactagcccatctcagccaggaggagagtggtggcaacttcctcctgtgtctgaaagcctgttaaatgggggagttggatttgaaaacttgggggaaagaatgtcagggctggccccgccctgggtccggcagtggggtgttggcatgggcaatccactgtgtttccttccttaatcagatcagctcagggctaggcctgtggattgtgaggatgtcgggaaacctaggtgtgacctgctctgccagaggccgcctgcctgtggagcctgtgggagcacacggcctcctgactcaaggtttctaatccccttatgaaccaccctgaaacaggcctgaggtccttgaccacacacagagatggtgacgggcaggccagccctctcacttcccatgca

SEQ ID NO: 77364 - DNA, 788 bp, Homo sapiens
taacgtgtgtgaagcatgaggtaacatgtgtgaagcatgaggtaacgtgtgaagcatgcctggcacaaagaagtgcccgctaattgttagccattatgattgttaagtgcaatgaggcacacaaaactcttaggactgtggctgtgaaatagacagtgctctgcagacgtcagctccttgtagctattggacgttgtttcttcagcctcccaagtcaaggaaaaccagacaaaatagcaagattgatgttcaggttaattgcaaagggagttgctcatagtccattggtaagcagagagaatcctctgtccttaataaaatttagtggctggtgaaaaagggaggtgtgtcctttacagaaaaggatgaaaggctttctttctcttattacattctaaatcatttacttaaaatttttattcatctaattacagataagcataattttgcataaggatgtaaagataattttttaatgtttggtataggttctttttttactagaaatttttgctgaaataattatagacaagcatgtagttttaagaagktatacagagacaggcctgtatatttcacctactttcccccagtggtaacatttttcaaaactgttgtataatatcagaaccaggatattgacactgatagtctcaaaccatcttattcagacttccaccgtgttgcttatacttgtgtgtgtgtgagtttgtgtgtgtgtgtgtgtgtgtgtacttagttatatccaattctgtcacatccaccccaccatatcaaaatgctccaaa

SEQ ID NO: 77365 - DNA, 788 bp, Homo sapiens
taacgtgtgtgaagcatgaggtaacatgtgtgaagcatgaggtaacgtgtgaagcatgcctggcacaaagaagtgcccgctaattgttagccattatgattgttaagtgcaatgaggcacacaaaactcttaggactgtggctgtgaaatagacagtgctctgcagacgtcagctccttgtagctattggacgttgtttcttcagcctcccaagtcaaggaaaaccagacaaaatagcaagattgatgttcaggttaattgcaaagggagttgctcatagtccattggtaagcagagagaatcctctgtccttaataaaatttagtggctggtgaaaaagggaggtgtgtcctttacagaaaaggatgaaaggctttctttctcttattacattctaaatcatttacttaaaatttttattcatctaattacagataagcataattttgcataaggatgtaaagataattttttaatgtttggtataggttctttttttactagaaatttttgctgaaataattatagacaagcatgtagttttaagaaggtatacagagacaggcctgtatatttcacctactttcccccagtggtaacatttttcaaaactgttgtataatatcagaaccaggatattgacactgatagkctcaaaccatcttattcagacttccaccgtgttgcttatacttgtgtgtgtgtgagtttgtgtgtgtgtgtgtgtgtgtgtacttagttatatccaattctgtcacatccaccccaccatatcaaaatgctccaaa

SEQ ID NO: 77366 - DNA, 750 bp, Homo sapiens
acttacccatatcaccctgagcagtacataaagatgaacttctcagggagaggcaaggggggcagggatggcagaggacaacatcttctaagtatagaaatagataaaatgacaagaagactagagttgccatctgctggaggatgraaagaatgacatttgacactatttgcaacagcaaagctaaactcattagtaaaaataataaatctccatgtactgtgtactgccagttaaatgatacaaaattatagcagtgtgttattatttcagcatggcagtttttggataatgtagaaaatatatagaggtagtaaaacaatagcatccactttccctaatttgtactctacctactcttagaagggcttacaaatactgctttattccctttcaaatgccagcaagttccctcaatatgtatttctcactttcaccactgcgactttgaaaatgatgatggggtttcttctatgagtatgcctagtcattgcttccagattttctttctgcttatgtaacatgaccaaatgcatgaagctcactaaggttcaataaaaagaccgctggacggagaatcacaagggtggggttgataatctgtttgcccaccagctaccaatgtaaccataaaccaatcactttactactctgggtcctggcattttaagctgtaaaatgataaatgctagggaggatgggctgcagaatctcagtgatctctaaggtcctttttagctctcaaatttt

SEQ ID NO: 77367 - DNA, 652 bp, Homo sapiens
ccagatgagaagtttgcactgggagagatgacacaatcagaaaggcacattagagctttccaattggtaaaatgttgaataacagaattttcagtgtttcctttagactatataaattccacaagtgagagttcccaattcctgtgaattgaaggcttctgaccatttgatccatatttgtttctgaaaataataggttattagacacacaaatgcatttgagattcttattttgtagctggggagaccaagacccagaaaagttaagagttgaccacattgtacagcttgttcatgccacactgggaccaggactcaactctcccaattccaaatgctgtgtctccccttctatacctgcattttattatgraaactttttaatgtacagaaaaattgaagaaattgtatagtgcacacccatgtactcatgtcttagttcatttttgctgcaataacagactaccttagactggctgacttaaaagcaaaagaaatttatttctcatgattctgaaggctgggaagtccaagattagggctccagcatattcagtgtctggtgagggttcgttcctcatagatgtcaccttctcaccatattcttatagggtgaagggggcaaagcagctctttggggccccttttataa

SEQ ID NO: 77368 - DNA, 764 bp, Homo sapiens
agtgcttctccctgtatacatttactgtgtggtccataaatagaggtccagtagaactgtgatagaaggtacagtagagtctatggcactctgaaaccctttacttccgttatctcttcaattagcaactcagtcttactgctataaattctcaaggtctacatcctcctttatatcacccatacaatggccaataagtttatttgtgattccttctatcaagagcttcagagttacttcctggaaggtcccaatattgccacaggtgttgtagaaggctcagggccccctcctggcagtgctgctcctcttgatcctaaaccgtagcattcaacttggacacctcattgaggtccatttgatgtaactggccrtggccaaggcaacagtggagactgccataacaatgatgagatggcaaccataagaacagtggcactggcagcctggtggagccatccttcctgtgacttcttgacaagctgtatataacagatgccttctattcagttatttacagtttattacctcactttagtggactctgaactactgctacaaagcggattactgatcagtttcttccttctgtacaagatcagtagatatttttttttttgtcctcaaattctgggctttggggttatggctcttgtttcactgatgataaaatattctttgtttttcatcatttaggttgcttattgattctatggataagagaggaatttttaaaaactattatgtcttcactcagaggaaaa

SEQ ID NO: 77369 - DNA, 784 bp, Homo sapiens
tcagtctataacatacattaaatagcaaaatttgagaattttatggctatgtcagaatgttagaattgcaaaattaaaatacataaaatataattaagtctgaaaccttaccaaaaacttccatgtgtaatgtatttcactattattttccatagcaaaggtagttaaatactcagaaattctggaaaatacaaagaagtggaaaagagagtggaaaaaatattgttttccatcactcactttaaatattttttacatgctggtgcttgtccttctagtcttttccttatttaagttaaaaaagatatttgaaaaaaatatatgtaactatgcattatgctttttaaattctttactcggcaatataacttaaacgttttatcttttacacattttgyaaaaatatttttaacaggttaaaaacactatgtctaatgaacagaaacagcgtttactgaattattctgctcactgttgggcatctggattaacagttagtgttccaccaggaaatagattgcacaatcaaagtgggtagtttaggagatttttgaaaaataagctttattttttagaacagttttagatttatagaaacattgagaagatagtacagtttccatataccttatcacccagtttcccttttggttaacatggtatatgttattcatatggtacatttgttacaattaatgaaccaaatgatgcattgctatcgattaaagcccatcatttgttcagatttccttagctcttaacttatatccttttctattccagg

SEQ ID NO: 77370 - DNA, 784 bp, Homo sapiens
tcagtctataacatacattaaatagcaaaatttgagaattttatggctatgtcagaatgttagaattgcaaaattaaaatacataaaatataattaagtctgaaaccttaccaaaaacttccatgtgtaatgtatttcactattattttccatagcaaaggtagttaaatactcagaaattctggaaaatacaaagaagtggaaaagagagtggaaaaaatattgttttccatcactcactttaaatattttttacatgctggtgcttgtccttctagtcttttccttatttaagttaaaaaagatatttgaaaaaaatatatgtaactatgcattatgctttttaaattctttactcggcaatataacttaaacgttttatcttttacacattttgtaaaaatatttttaacaggttaaaaacactatgtctaatgaacagaaacagcgtttactgaattattctgctcactgttgggcatctggattaacagttagtgttccaccaggaaatagattgcacaatcaaagtgggtartttaggagatttttgaaaaataagctttattttttagaacagttttagatttatagaaacattgagaagatagtacagtttccatataccttatcacccagtttcccttttggttaacatggtatatgttattcatatggtacatttgttacaattaatgaaccaaatgatgcattgctatcgattaaagcccatcatttgttcagatttccttagctcttaacttatatccttttctattccagg

SEQ ID NO: 77371 - DNA, 784 bp, Homo sapiens
tcagtctataacatacattaaatagcaaaatttgagaattttatggctatgtcagaatgttagaattgcaaaattaaaatacataaaatataattaagtctgaaaccttaccaaaaacttccatgtgtaatgtatttcactattattttccatagcaaaggtagttaaatactcagaaattctggaaaatacaaagaagtggaaaagagagtggaaaaaatattgttttccatcactcactttaaatattttttacatgctggtgcttgtccttctagtcttttccttatttaagttaaaaaagatatttgaaaaaaatatatgtaactatgcattatgctttttaaattctttactcggcaatataacttaaacgttttatcttttacacattttgtaaaaatatttttaacaggttaaaaacactatgtctaatgaacagaaacagcgtttactgaattattctgctcactgttgggcatctggattaacagttagtgttccaccaggaaatagattgcacaatcaaagtgggtagtttaggagatttttgaaaaataagctttattttttagaacagttttagatttatagaaacattgagaagatagtacagtttccatataccttatcacccagtttcccttttggttaacatggtatatgttattcatatggtacatttgttacaattaatgaaccaaatgatgcattgctatcrattaaagcccatcatttgttcagatttccttagctcttaacttatatccttttctattccagg

SEQ ID NO: 77372 - DNA, 2013 bp, Homo sapiens
ttttaaaaaataaaaacgagttaaaattttcactgtatgttgagagacttgtatttactgtttaaaaggaataaaaattaagttttctagaacttgaagcaagtaggagaaattatattttgagtgtttgctggagaagaaattgtatcataattatctcctcagtgtgctattgcaaaaaaaaaatctaaatctttgggaatggatagaaagaccatgtttgatctttctgccacagaacatagaactatggaataaaattaagatatctgtagttgggagtagaccctttgtatggtatttgatcatttgtgttacatttgtaatatgatctctgatggatctgtgaaacaccatttgatgttgatttataataagagtagaacagtttcactacggttataccagttaatttggcaaaacgtcacaagccaaatgtgctggaggaaatatctgcctttcaatattttgtgcactctattttgtgtattagttcaatttggctactggaggaaaggggatttatggtctctatttttaaagcatttttccttgtttttaatccgctttactttgccaaaaacatgtaattttatttttctgctcaactatgttcgacttcctagcattattcactttggaaatgccacaaagatactatcagttctgtcttttacgatttcaggagattgagtttctttttctcttctaaaacactttgcaacactaataatgatttaattaattatttggagatctttaatgatctattttctgcagaagtgtaagctttatgacagcaggatcctggtgtgcactgtgtacacagggtttctggtggattgtacagtgtctggcacatggagagtgggcaacagaattttattcattggctgaaataggggataaaactctggcttcaacacttcactgagataactaatacataaatctcactttgtgtaaagagctggcaagtatgcttaaataagtttattcatcatgagataaaaatgattgaggtaatagaatattcatattgatgtgtatattgttacaagataaagctattaagcacacagcaaatcagaccgaacagtagtcaatattttaggaatcttgttatttcatggcctaagcttttggaaatccacataaggtaatcaaaatgcagtcataagtagaatttgaatctccaaagtctcaacgtcatagaaaaaggtaatttgtggaaataaagataatttatcaaattgatttaatctgaccaaaaaactatgtttattaatagctatgtaagcyattgtcttctctctatacagcaaaatcttaatattaaaattgagtttagtttaaggcaattttgctttgaccttctccctgagtttaaggtattctgattatgagaaatgactacagaaagacttggtgtggcaccttggtaatttgtggagttaatggctcatttttaaattaaaattttgtggggaggagacagaaagtactaaattttggagcagatatatttattatgcttcatttccatttgaagttaagatttcagagaactgactctctgaatatgactcatcatattctaaagttacacctcatagggtatggaaagtctttatttcctctgaatattagtggagtgattcctttgcaggtggttcactctccaaggaccacacgacctgtagacagactgtgaaatagtcactttgtttccctatgacactctgggaccattccctcctggaggtttttactttgagattttccattattcctgtatattgaacaatcacacctaaatctaaacctttctttctttttttttattatactttaagttttagggtacatgtgcacaatgtgcctgttagttacatatgtatatatgtgccatgctggtgtgctgcacccgttaactcgtcatttagcattaggtatatctcctaatgctatccctcccccctccccccaccccacaacagtccccagagtgtg

SEQ ID NO: 77373 - DNA, 2013 bp, Homo sapiens
ttttaaaaaataaaaacgagttaaaattttcactgtatgttgagagacttgtatttactgtttaaaaggaataaaaattaagttttctagaacttgaagcaagtaggagaaattatattttgagtgtttgctggagaagaaattgtatcataattatctcctcagtgtgctattgcaaaaaaaaaatctaaatctttgggaatggatagaaagaccatgtttgatctttctgccacagaacatagaactatggaataaaattaagatatctgtagttgggagtagaccctttgtatggtatttgatcatttgtgttacatttgtaatatgatctctgatggatctgtgaaacaccatttgatgttgatttataataagagtagaacagtttcactacggttataccagttaatttggcaaaacgtcacaagccaaatgtgctggaggaaatatctgcctttcaatattttgtgcactctattttgtgtattagttcaatttggctactggaggaaaggggatttatggtctctatttttaaagcatttttccttgtttttaatccgctttactttgccaaaaacatgtaattttatttttctgctcaactatgttcgacttcctagcattattcactttggaaatgccacaaagatactatcagttctgtcttttacgatttcaggagattgagtttctttttctcttctaaaacactttgcaacactaataatgatttaattaattatttggagatctttaatgatctattttctgcagaagtgtaagctttatgacagcaggatcctggtgtgcactgtgtacacagggtttctggtggattgtacagtgtctggcacatggagagtgggcaacagaattttattcattggctgaaataggggataaaactctggcttcaacacttcactgagataactaatacataaatctcactttgtgtaaagagctggcaagtatgcttaaataagtttattcatcatgagataaaaatgattgaggtaatagaatattcatattgatgtgtatattgttacaagataaagctattaagcacacagcaaatcagaccgaacagtagtcaatattttaggaatcttgttatttcatggcctaagcttttggaaatccacataaggtaatcaaaatgcagtcataagtagaatttgaatctccaaagtctcaacgtcatagaaaaaggtaatttgtggaaataaagataatttatcaaattgatttaatctgaccaaaaaactatgtttattaatagctatgtaagccattgtcttctctctatacagcaaaatcttaatattaaaattgagtttagtttaaggcaattttgctttgaccttctccctgagtttaaggtattctgattatgagaaatgactacagaaagacttggtgtggcaccttggtaatttgtggagttaatggctcatttttaaattaaaattttgtggggaggagacagaaagtactaaattttggagcagatatatttattatgcttcatttccatttgaagttaagatttcagagaactgactctctgaatatgactcatcatattctaaagttacacctcatagggtatggaaagtctttatttcctctgaatattagtggagtgattcctttgcaggtggttcactctccaaggaccacacgacctgtagacagactgtgaaatagtcactttgtttccctatgacactctgggaccattccctcctggaggtttttactttgagattttccattattcctgtatattgaacaatcacacctaaatctaaacctttctttctttttttttattatactttaagttttagggtacatgtgcacaatgtgcctgttagttacatatgtatayatgtgccatgctggtgtgctgcacccgttaactcgtcatttagcattaggtatatctcctaatgctatccctcccccctccccccaccccacaacagtccccagagtgtg

SEQ ID NO: 77374 - DNA, 552 bp, Homo sapiens
tgctaaggccctgaggtggagaaggaaacatgttccagaactggaaagaagcttgatgtggctgaagtwcagcaaatgagaaagtggcataaaatgagaccagggaagaaggcaggagacatattcatgcacagctttttggccttggtgaggaagttataaaaggaaagagctaaagcagaaattgatgtgatctgatttaaaagattgctctagctgctacgtggaaaatagattggagagggggtcacatggaagcaaggaactgctggtcttttagccaagggatgatgggtggcttaatctgatgggacagcactggagacaagtttggggtatagagtaggatgtggtgggcaagggagacttcatgtacttttgccacatttctgcttgagaaactgagtgaatagtgtaggggtgggttgcccctccacacctgtgggtgtttctcgtaaggtgggacgagagatttggaaaagaaaaagacacagagacaaagtatagagaaagaaataaggggacccggggaaccagcgttcagcatatgga

SEQ ID NO: 77375 - DNA, 548 bp, Homo sapiens
tgcagaaaatatgattttgttctgacaacttaaggacacacttcacagctctcagcccagaaagggtcatttaagattatctaataaggaaaacattgtataattcctttgaatgtaataaacaatatcttttggagcaacctgcagcaaatgttccaaatttcacatcaacatttaattccccctctgtgcgtatgttctacactccccaaaaaatgatgttaaaacatttaatgcagtgaattgacagcaccaggaaaatatttgggctgtctggagttgccattattggctttaattatgacctactggctcttgggtcctaaagcagccagaaaatgagatatgtgtgccaaaatattcattagaattcccttctcagtcattgtayagaaagaacaagtttccttctggctcccatcttcagtattttaagtggaattattaatatgccagattttttaaaggatcagtcagtaaacaagattatgtgcataccttgtattttgcattttaaaaatcttgaaaaggtcaaatgtcccctttgc

SEQ ID NO: 77376 - DNA, 1064 bp, Homo sapiens
ggaagtggaaccttcagtcttgacacatgtggtgccattggttttagacaccaattatttctagttctatctccttctggacacatgttaggattgcaataaaagttatggccatgtgacttgctttgaccaataacatgtgagcagacattgcatatgtcacasctgagtgaaagttctaggatctggagtacaccttgcctggtccccttccactgctgcagtgactatgtgagcccctgccaagacctgagaaactcgaatgagaagagtgccccagcagccctcattggacacaggtgaaggagaacataccttggttggttaatcactgagatatgggagccaatttttaatgttgcacagccaagcttatcttgcctcatttgtgaaaattaaatgcatctagaacccggagtccttctcttgtcagaacctgcttcccagctttcagaaaagcccagtctgatggaagggtgtgaagtagtaaaccaccgttctctgccttcttctttcaatcttgatctactttattccctagtagatgccattcagctcaggaggtaaagggttctgaacagaagagggattttgtttcagtttgcttttgtttttcgttgtattcccctgataaagacattgggatccctacccactcagttgttcccatcaacctcctgatatctcagaggaagtagagagatgcagggattatacaagcacctccggtaggagtggggtttgaaacaggctttgcttgccctggtcttgggctgccccttctcaagaacttgatctctaagtataagagactcagcctggagctgacattgagagaccccttcccagggtctcagggccggaaggagacttaactaaacaccaccccatattctagaggaggggagtgggactttgaaaggtaatggatggccctgaagccaggctgtctgcagtccttgaaaggcaggaccagctgcataatttgcatggcctagtacaaaagaaaaatgctggggcacttgtccaaaagtattaaacatttcaagatggtgactgccaaa

SEQ ID NO: 77377 - DNA, 1064 bp, Homo sapiens
ggaagtggaaccttcagtcttgacacatgtggtgccattggttttagacaccaattatttctagttctatctccttctggacacatgttaggattgcaataaaagttatggccatgtgacttgctttgaccaataacatgtgagcagacattgcatatgtcacagctgagtgaaagttctaggatctggagtacaccttgcctggtccccttccactgctgcagtgactatgtgagcccctgccaagacctgagaaactcgaatgagaagagtgccccagcagccctcattggacacaggtgaaggagaacataccttggttggttaatcactgagatatgggagccaatttttaatgttgcacagccaagcttatcttgcctcatttgtgaaaattaaatgcatctagaacccggagtccttctcttgtcagaacctgcttcccagctttcagaaaagcccagtctgatggaagggtgtgaagtagtaaaccaccgttctctgccttcttctttcaatcttgatctactttattccctagtagatgccattcagctcaggaggtaaagggttctgaacagaagagggattttgtttcagtttgcttttgtttttcgttgtattcccctgataaagacattgggatccctacccactcagttgttcccatcaacctcctgatatctcagaggaagtagagagatgcagggattatacaagcacctccggtaggagtggggtttgaaacaggctttgcttgccctggtcttgggctgccccttctcaagaacttgatctctaagtataagagactcagcctggagctgacattgagagacyccttcccagggtctcagggccggaaggagacttaactaaacaccaccccatattctagaggaggggagtgggactttgaaaggtaatggatggccctgaagccaggctgtctgcagtccttgaaaggcaggaccagctgcataatttgcatggcctagtacaaaagaaaaatgctggggcacttgtccaaaagtattaaacatttcaagatggtgactgccaaa

SEQ ID NO: 77378 - DNA, 757 bp, Homo sapiens
tgtggaacaagcaggcrgcaggtggagctggtgatgtctctgggtgctccacagtgcagagtcgtgtgcgtcgcacttccctcctgcacccaagtcaggatatctaggtgtaaataactgctgcagcacatcaggcaatttcttctggagaatttatggggattaaagtgcccagcttgatccaatcaatcatcagtagccaaatattttctaaacatctagcatttattcattcaaatgaaataaacatttactctggaccagtaagatttacaaagatgtagagacagaaaactctaattgtgtgatttcaggatccagcctaacgccttagggtgcaggggtgggagtggcgtcaagacttgatgcctttaccattttctggaataacagagaactccgaaatgatgcctgggagtctctttgcctacgggtaaggcatgagccctaaaagggatgcaggaagggacaggacaggtctgaagatgtcgctcctgcatgtctgaaaacccagtttgtctccactcctccctagggtggtctcccactggagtcaatgatgctcccaagttaacaaacacagctagcctctttccctgcaattctgtctctcctcttttgctggaatggtaattttaagtctctaatagctcctcagggcactgaggtgaggcaagagggggatgtatttatgttcacatttgccagcctgtcttgccgggtgatagcagggctgatggcacagctgatgaaagcc

SEQ ID NO: 77379 - DNA, 757 bp, Homo sapiens
tgtggaacaagcaggcggcaggtggagctggtgatgtctctgggtgctccacagtgcagagtcgtgtgcgtcgcacttccctcctgcacccaagtcaggatatctaggtgtaaataactgctgcagcacatcaggcaatttcttctggagaatttatggggattaaagtgcccagcttgatccaatcaatcatcagtagccaaatattttctaaacatctagcatttattcattcaaatgaaataaacatttactctggaccagtaagatttacaaagatgtagagacagaaaactctaattgtgtgatttcaggatccagcctaackccttagggtgcaggggtgggagtggcgtcaagacttgatgcctttaccattttctggaataacagagaactccgaaatgatgcctgggagtctctttgcctacgggtaaggcatgagccctaaaagggatgcaggaagggacaggacaggtctgaagatgtcgctcctgcatgtctgaaaacccagtttgtctccactcctccctagggtggtctcccactggagtcaatgatgctcccaagttaacaaacacagctagcctctttccctgcaattctgtctctcctcttttgctggaatggtaattttaagtctctaatagctcctcagggcactgaggtgaggcaagagggggatgtatttatgttcacatttgccagcctgtcttgccgggtgatagcagggctgatggcacagctgatgaaagcc

SEQ ID NO: 77380 - DNA, 757 bp, Homo sapiens
tgtggaacaagcaggcggcaggtggagctggtgatgtctctgggtgctccacagtgcagagtcgtgtgcgtcgcacttccctcctgcacccaagtcaggatatctaggtgtaaataactgctgcagcacatcaggcaatttcttctggagaatttatggggattaaagtgcccagcttgatccaatcaatcatcagtagccaaatattttctaaacatctagcatttattcattcaaatgaaataaacatttactctggaccagtaagatttacaaagatgtagagacagaaaactctaattgtgtgatttcaggatccagcctaacgccttagggtgcaggggtgggagtggsgtcaagacttgatgcctttaccattttctggaataacagagaactccgaaatgatgcctgggagtctctttgcctacgggtaaggcatgagccctaaaagggatgcaggaagggacaggacaggtctgaagatgtcgctcctgcatgtctgaaaacccagtttgtctccactcctccctagggtggtctcccactggagtcaatgatgctcccaagttaacaaacacagctagcctctttccctgcaattctgtctctcctcttttgctggaatggtaattttaagtctctaatagctcctcagggcactgaggtgaggcaagagggggatgtatttatgttcacatttgccagcctgtcttgccgggtgatagcagggctgatggcacagctgatgaaagcc

SEQ ID NO: 77381 - DNA, 532 bp, Homo sapiens
tgccctggctcagacaccctgggacagattctgcagcccgttgggggcactgcctgggtggagtcagttcttcggcttggctgcctaaacctttccctactcactgtgggtctgaggacctaagacatgagcaagtgtcttaaaagtaaagtttctgtacaagtgttaggaattattatctagatccatatgatttcagagtcttttaatcttcttaggttagattctcagatgccctayggtatctttagttttttgtcataattcaagagaactcatctttaattgctttaatttaagcaaataatcaaaatatcacaattttaaggataactgaaacactacaattttaaggagaactattgaaatcaagtagaggaccccaggttaataatattaatagtcagaggcacagggagaggattagaaggttcatttatttagcatacaggagatttggtctgacaaagatggcctcattgaatcctcaggagacaagatcttactcccattttctacccccagggaacag

SEQ ID NO: 77382 - DNA, 1378 bp, Homo sapiens
attacaaaaaagtaggaagggaccaagccaccttgttaatgatgattgggtttagatatttgtagaatgaataacttctatattttttctcctttctatttttatggtttcttttccctaaagcttttatatgagtatgactactttcaattgaaaatcaaccgataaacaaaaaggaaaaacacagtattcgtgtgtttcttggtcagggtggtgttaaatctttgtgggctcatagtaagcagtgactttttgtagtacgtatttagattaacaattgcatttatataagaaaacagagattatggaaagaccactggcttgggattaaggagatgggtcccagtcctgattttacaatgggtggtgtagcactggccaagtcatttctcacctctggtctgctgtgtcctatctataaaacgaaggggttgcactcgaaacctctatggttcccagcaggtctctaactttttgtgatatagaaactaaacatgtggagatttgagaccaataactccagtagaatgttactggacagaccttctgcaaatccagcgctttggatcctaattagtgtttccgtgccatgctttccatcctgaacttacattgtcatctggtgacaaaattctcatggcaattaaaacattgctgttgtagataacaataattaaaaatgagaaagatggaaagaagaaggaaaagaatggaaatttgcggtaatttcarcctgagctgtcaagttgaacttagcccccaaactggaatagttattagatatcagtattttacagatgaggaaatatatctgagaggcgtactggatgcacacatgtctacatccatggacacagtcacagggctatgaaggaaccaagatggctctcaaacctggagactcccacttcattgtattcattgctggagttatggttgtttacagcaaaatcagattacattcagttcataactattgaatacttaaataattagaaataacaatgttacttaacatggacagggagcttcaagatttccaaaatgcccagaaccatactaattatcatagctataaaattgggttttatgtaacaaaactcattacagatactcggttccacaaaagctattgaaagttcccaaattctattatttaactatattcctcctagtgcctctcaaatctacaaatagaattaaaatcttttgctattcattcacgtattccacaaatatttcttgggcaccctcctcagggctgggaataccagatgggcctggtccgtttattcatggagcttttgttccctagttcttcctgtctgccagtggagggcgttcctggacttgaccccaggaggtcaaagttacatgc

SEQ ID NO: 77383 - DNA, 1057 bp, Homo sapiens
ttaaattttgttaaaggggaagtgtatcaatactgcacatatgtaacctgttaatttcacagtatgggcatcctgccttcaaaaatataataattttaaaaatcggaaatcacaataaaaagcaaaacaaacaaagactgaaaaacagtttgaatattgcaagaaaatttaccccagagtttttaagtataaagagcctctgtggtttatttaaattcttattctattaaaggaaatcaaatgtattcatttattcctggggacacagagaataaaaatatgtatgacacatccagcatgtacctaaatacttaaaaagtgaagtcaaggccaggtgcagtggctcatgcttgtaatcccagcactttgggaggccaaggtgggcagatcacctgaggtcaggagttcgagaccagcctgaccaacatggagaaaccctgtctctactaaaaaaaatatgtaaaattagctgggtgtggtggcacatgcctgtaatctcagctacttgggagactgaggcaggagaatcgcttgaacccgagaggcagaggttgcagtgagccgagatcacaccattgcactccagcctgggcaacaagagggaaactccgtctcaaaaaaaagaaaaaaaaaaaagtcaaatgtcctaagagtgaaacaaatggtaaaatagggttgttctaataaggaarcaaatcccctgaagcaaatgatcagggaatcttcttgaaggaggagagacttggctggaactaacagaactggtagaacaacaagaggttgatattagaagttaaggaaaggacagcccatacagggaactagtgtgagacaaaaagacaagaataagggatgaggccatgaatcctccttgagggtaaatagctattaagtaatatagaatattttataaaaatatgacgggatggtcagttatttgtttgcttttatagcagagaataggaagtagtggaaatgtgtctcatcttaaaattagaaaggggaaaagcttaacatattgatgtgctatgagttggccattccctggacccatgca

SEQ ID NO: 77384 - DNA, 2724 bp, Homo sapiens
tgtcaagctaggctgccatttgagctcctaaggaagaaaatccttgggaaagattgtattttatagtcctgccctcagcaattcagctgtgcttcattccaagacacatttttgccttatgtgccataataaaagcaaaccttcttgccccttagaggggcacatttagaagatcaagaggagaatgtacttgggccacagtctctcctaggacggctgcaaggcaagctgtaatagaaaccaaaacagggcacatctaaccggttctgggttttctcctgaaggcaggatgtagaccaggttttttgcaagggtcactgaagtttgcaaaactttttctgctcctggctgattgagcgagccagagccagctcatagcttggattggaaatcatgtgaaactcatttatgccattttgtatttctctctttaactccctatcagacattgagccgagtttgcatccgagtctggagttggtttacaagcatactggaaataaaactcaattgggagtgagaatccaggtgaaccgaagtaaacgtgaactctttgtgaaccaaatactactgtacgcctcttcaaagcctacaggcgcctgaaaatctcccataaatccaagctgcattgaaaggatttgctccaagccttctaccagtagcttgcatccacatgcatcagattcagctgtctcctaaatctgcaaagtgttatctgcctcaccgtgcacaaactactgtcccaaactgtattcaatccagatgggaggttttatcacttcctgacttcccttccattgtaaggatgaatattttgaaaccaggcaactaggaaaaccataccccactaaatgggagcatatactatttagggaaaactttctaattgtcccccagaaaatgaagaaattatgctcttcttgtaccctgattgtacaaaatgttcagctccctgggatatgcaccagatcacattcacaagagaacctaccatgggtgtgtccagcgtcacgcacaattctcagtgaaacagcttaatctccacacttttctgtctcacaagcaaattaggatgcaagtgaggttgaaattatcacaggaatacatgttatcctattttaaaaaataattttcaaatgctggcacttcactattaataacaacaatttacttgtgacagctgwtaagacacattgatatttcaatcctgattcactcagaccaccaccactcctataagtacctccaatcagggaacttgtcaatcataaagtggaagttggtttatgttctatttcctcctcagggacagggcccaagtcttgatcatcactttacataaatcagtgcccaggctattgcaggggtgcaataacacttatgtaaaccaagggaaaggcacataatatgcctagaatatctctagaaggatcctccaagaaactgctagcagtgattgtccctcaacagagaaactaggggttgaggtgagacacttgatttcactgtttttttttgtttgtttgtttgtttgtttactaattaaactttttacccagtattttgtattttattgggtacattagaatatttattgaatgaatcaacacacagatgaacgaacaagctatatccaggaacacaagagttgacgcccaaatatttttgtctgtaccaacttaacagcagtggctttttccaacccgaagtttcaaatccttctggtgactcatgtcaagttgcgtgcgccaagttaagagagtgctgacactctgactcagtgtgtacagaaattcttggccaaggaggagacaaagaactgtcacaaaggctagactttattggttcagttttgattcattaatcagaagtggaaatgctcacagtttttctccatattagatgttgctgtatcttgtctgtgaagagcaagcgtggttacttctcaagataaagctctatccaagatccagaaaaatggcaattctttagagaaaaaaaatccatttatctcatgtccctagtttcatgtctcctttcagctccagagaggtggcttactgcagtgaattgaagagcactggctttgggatcaggcagaactgtctaactatcctttgtctcagaatttgcagttgtatataaactggggacaaaggtacctacctgacaaggctgccattaggcttaaattagctaatatatttaaaatccctgtaacatagtgcttaaaaagtggtagctattattcctaccgtaaaatagttttacagcccttttcatcctttaaattgactgagaatcaacaccagtcgttgctttaaaacaaagctttgaggctttaagtcttacctataaggtgccactacattataagcttaagaacgttttgcctcctcccataataaaaatattctgtggtgtttttgacatgttacttcttttgcctacagtgtaaagattaggaataagcttgctattaatacttccaatattcactgtgtcatctgtctgactgtcataatcctcaatcaatcacctttgtgctagcatcactttttatccaaccaggtcaagatcatgtaatttgacggctgcttaggaatttgtcagcactgttatttgaagggtgttagaaagacactggcactacaatcagactctgtagcaatatgccatgccaaaggaatttttaatgaggtggatttttttttttgagttggg

SEQ ID NO: 77385 - DNA, 2724 bp, Homo sapiens
tgtcaagctaggctgccatttgagctcctaaggaagaaaatccttgggaaagattgtattttatagtcctgccctcagcaattcagctgtgcttcattccaagacacatttttgccttatgtgccataataaaagcaaaccttcttgccccttagaggggcacatttagaagatcaagaggagaatgtacttgggccacagtctctcctaggacggctgcaaggcaagctgtaatagaaaccaaaacagggcacatctaaccggttctgggttttctcctgaaggcaggatgtagaccaggttttttgcaagggtcactgaagtttgcaaaactttttctgctcctggctgattgagcgagccagagccagctcatagcttggattggaaatcatgtgaaactcatttatgccattttgtatttctctctttaactccctatcagacattgagccgagtttgcatccgagtctggagttggtttacaagcatactggaaataaaactcaattgggagtgagaatccaggtgaaccgaagtaaacgtgaactctttgtgaaccaaatactactgtacgcctcttcaaagcctacaggcgcctgaaaatctcccataaatccaagctgcattgaaaggatttgctccaagccttctaccagtagcttgcatccacatgcatcagattcagctgtctcctaaatctgcaaagtgttatctgcctcaccgtgcacaaactactgtcccaaactgtattcaatccagatgggaggttttatcacttcctgacttcccttccattgtaaggatgaatattttgaaaccaggcaactaggaaaaccataccccactaaatgggagcatatactatttagggaaaactttctaattgtcccccagaaaatgaagaaattatgctcttcttgtaccctgattgtacaaaatgttcagctccctgggatatgcaccagatcacattcacaagagaacctaccatgggtgtgtccagcgtcacgcacaattctcagtgaaacagcttaatctccacacttttctgtctcacaagcaaattaggatgcaagtgaggttgaaattatcacaggaatacatgttatcctattttaaaaaataattttcaaatgctggcacttcactattaataacaacaatttacttgtgacagctgataagacacattgatatttcaatcctgattcactcagaccaccaccactcctataagtacctccaatcagggaacttgtcaatcataaagtggaagttggtttatgttctatttcctcctcagggacagggcccaagtcttgatcatcactttacataaatcagtgcccaggctattgcaggggtgcaataacacttatgtaaaccaagggaaaggcacataatatgcctagaatatctctagaaggatcctccaagaaactgctagcagtgattgtccctcaacagagaaactaggggttgaggtgagacacttgatttcactgtttttttttgtttgtttgtttgtttgtttactaattaaactttttacccagtattttgtattttattgggtacattagaatatttattgaatgaatcaacacayagatgaacgaacaagctatatccaggaacacaagagttgacgcccaaatatttttgtctgtaccaacttaacagcagtggctttttccaacccgaagtttcaaatccttctggtgactcatgtcaagttgcgtgcgccaagttaagagagtgctgacactctgactcagtgtgtacagaaattcttggccaaggaggagacaaagaactgtcacaaaggctagactttattggttcagttttgattcattaatcagaagtggaaatgctcacagtttttctccatattagatgttgctgtatcttgtctgtgaagagcaagcgtggttacttctcaagataaagctctatccaagatccagaaaaatggcaattctttagagaaaaaaaatccatttatctcatgtccctagtttcatgtctcctttcagctccagagaggtggcttactgcagtgaattgaagagcactggctttgggatcaggcagaactgtctaactatcctttgtctcagaatttgcagttgtatataaactggggacaaaggtacctacctgacaaggctgccattaggcttaaattagctaatatatttaaaatccctgtaacatagtgcttaaaaagtggtagctattattcctaccgtaaaatagttttacagcccttttcatcctttaaattgactgagaatcaacaccagtcgttgctttaaaacaaagctttgaggctttaagtcttacctataaggtgccactacattataagcttaagaacgttttgcctcctcccataataaaaatattctgtggtgtttttgacatgttacttcttttgcctacagtgtaaagattaggaataagcttgctattaatacttccaatattcactgtgtcatctgtctgactgtcataatcctcaatcaatcacctttgtgctagcatcactttttatccaaccaggtcaagatcatgtaatttgacggctgcttaggaatttgtcagcactgttatttgaagggtgttagaaagacactggcactacaatcagactctgtagcaatatgccatgccaaaggaatttttaatgaggtggatttttttttttgagttggg

SEQ ID NO: 77386 - DNA, 2724 bp, Homo sapiens
tgtcaagctaggctgccatttgagctcctaaggaagaaaatccttgggaaagattgtattttatagtcctgccctcagcaattcagctgtgcttcattccaagacacatttttgccttatgtgccataataaaagcaaaccttcttgccccttagaggggcacatttagaagatcaagaggagaatgtacttgggccacagtctctcctaggacggctgcaaggcaagctgtaatagaaaccaaaacagggcacatctaaccggttctgggttttctcctgaaggcaggatgtagaccaggttttttgcaagggtcactgaagtttgcaaaactttttctgctcctggctgattgagcgagccagagccagctcatagcttggattggaaatcatgtgaaactcatttatgccattttgtatttctctctttaactccctatcagacattgagccgagtttgcatccgagtctggagttggtttacaagcatactggaaataaaactcaattgggagtgagaatccaggtgaaccgaagtaaacgtgaactctttgtgaaccaaatactactgtacgcctcttcaaagcctacaggcgcctgaaaatctcccataaatccaagctgcattgaaaggatttgctccaagccttctaccagtagcttgcatccacatgcatcagattcagctgtctcctaaatctgcaaagtgttatctgcctcaccgtgcacaaactactgtcccaaactgtattcaatccagatgggaggttttatcacttcctgacttcccttccattgtaaggatgaatattttgaaaccaggcaactaggaaaaccataccccactaaatgggagcatatactatttagggaaaactttctaattgtcccccagaaaatgaagaaattatgctcttcttgtaccctgattgtacaaaatgttcagctccctgggatatgcaccagatcacattcacaagagaacctaccatgggtgtgtccagcgtcacgcacaattctcagtgaaacagcttaatctccacacttttctgtctcacaagcaaattaggatgcaagtgaggttgaaattatcacaggaatacatgttatcctattttaaaaaataattttcaaatgctggcacttcactattaataacaacaatttacttgtgacagctgataagacacattgatatttcaatcctgattcactcagaccaccaccactcctataagtacctccaatcagggaacttgtcaatcataaagtggaagttggtttatgttctatttcctcctcagggacagggcccaagtcttgatcatcactttacataaatcagtgcccaggctattgcaggggtgcaataacacttatgtaaaccaagggaaaggcacataatatgcctagaatatctctagaaggatcctccaagaaactgctagcagtgattgtccctcaacagagaaactaggggttgaggtgagacacttgatttcactgtttttttttgtttgtttgtttgtttgtttactaattaaactttttacccagtattttgtattttattgggtacattagaatatttattgaatgaatcaacacacagatgaacgaacaagctatatccaggaacacaagagttgacgcccaaatatttttgtctgtaccaacttaacagcagtggctttttccaacccgaagtttcaaatccttctggtgactcatgtcaagttgygtgcgccaagttaagagagtgctgacactctgactcagtgtgtacagaaattcttggccaaggaggagacaaagaactgtcacaaaggctagactttattggttcagttttgattcattaatcagaagtggaaatgctcacagtttttctccatattagatgttgctgtatcttgtctgtgaagagcaagcgtggttacttctcaagataaagctctatccaagatccagaaaaatggcaattctttagagaaaaaaaatccatttatctcatgtccctagtttcatgtctcctttcagctccagagaggtggcttactgcagtgaattgaagagcactggctttgggatcaggcagaactgtctaactatcctttgtctcagaatttgcagttgtatataaactggggacaaaggtacctacctgacaaggctgccattaggcttaaattagctaatatatttaaaatccctgtaacatagtgcttaaaaagtggtagctattattcctaccgtaaaatagttttacagcccttttcatcctttaaattgactgagaatcaacaccagtcgttgctttaaaacaaagctttgaggctttaagtcttacctataaggtgccactacattataagcttaagaacgttttgcctcctcccataataaaaatattctgtggtgtttttgacatgttacttcttttgcctacagtgtaaagattaggaataagcttgctattaatacttccaatattcactgtgtcatctgtctgactgtcataatcctcaatcaatcacctttgtgctagcatcactttttatccaaccaggtcaagatcatgtaatttgacggctgcttaggaatttgtcagcactgttatttgaagggtgttagaaagacactggcactacaatcagactctgtagcaatatgccatgccaaaggaatttttaatgaggtggatttttttttttgagttggg

SEQ ID NO: 77387 - DNA, 1356 bp, Homo sapiens
ttgaggtaaagccatggctggtggtgaaatgcataaaataaagagtggcaactccttgaatctttctgtatgttgattttacgtcaattaaataattcttaaaaggcaaagagacaaagaaaagcccttggataaggagaaaatattttaggaaagatacttaaataacaatatcagactttggtgggcaaagttatttactaaaacttttatagctatgagggatcttagaaatcacctagcccaaacctccatatatttgatttgacgattcagacttaggatgtccagaaaaggataagtcctcaaatgtcataggtatacataatttcttccagtaattaaataataagtatgtattcagcccagaagaagtcttttaataaagtttgtcatttcctgacatgctttggtctgtgccctgcaaatatagaagaacaaattgtaaacttctctggccatctttagtcaaaaggggacaatcaaaattttaaaggctgatttgctacagcatactgttataaaattaatgacagccttaatgaaatcctttaatctgatgattaaaaagatcctatgaaataaactgcaagcatrattttcaaacgtatttttaggtcgggcatggttgctcatgcctgtaatcccagcactttgggaggccaaggcaggtggattacctgaggtcaggagttcaagaccagcctggccaacatggtgaaactccatctctagtgaaactacaaaaattagccaggcatggtggtgcatgcctgtagtcccagctacgcaggaggctgaggtaggaaaatcgcttgagcctgggaggtggaggttgcaatgagcagagatcgcactattgcaccctagcctgggcgacaagagtgaaacttctctaaaataataatagtaaataaataaaagcatttttagtcctggagaaatgaaggtaaggcaaattatctgagtctctaaaacttttcattaataatagcttacatttgtgtagggattttaacttttccaaagcacttttgtaacatccacctaattgtattcttacaccatctctgtaaagtagccatagagggaataacaattcccatttgccattgaggaaactgctgccataagaggttattaaagaacttgttcaaggccaagcaaatcagtaggggaactaacactgaaaaaccacatttgtaactccaaacccagtcagacaaccaattccagtgggtaataatatctcttgctcagggaaaatcattctcataaacaagattgtattaccttgagggagtcaccacttgaagtaagaaaaaggaaactttgagatggtttagacacaaatca

SEQ ID NO: 77388 - DNA, 986 bp, Homo sapiens
tcagtcctctcatccatcctgccagccatcctcctacccatctcccatctcttcttccaactccacactcctatccttcctccaatcctctttccccactcccttctttcctttccttccatagagtattccttgagcttcttttctggtccagacctatttatacataacaatgaacaacaagacagtcacagttctctcagagggaggcagataagaaaggtacttggtctcccatttcctttctgtggatgaaacctcacccaaagtcataacatataaagccggtaacccccagatgcccagtgccccaaagagtccgatttgtaaaccacagatctagtcagactctcccattgttttgattttacaaatgggctcagtggttgggtgatgggaggggagatgggccgtcacactccggttgatggtgcagtctacatcagaactcagctctcctgctggttccccagycccagggagatgtctgggcccctgacactcctcttccagccatctgactcgtagtcacccacctttccttggcaggaagcggagaaggcaaagccggatgccctgcacggcctgcgggtgcactcctgggtccttgtgctatcggggaagcgcgaggtgcctgagaacttcttcatcgacccattcacaggacatagctacagcacccaggatgagcacttcctgggcatcgaaagcctgtggaaccacaagaactactggatcaacatgcaggattgctggaactgctgcaaggtgcctagggagggggagctgggtgggtgtggcaggcacagtgcaggtgataggaatagagggaagcaatggcagccagaccttggggagagcgagacaccaggccacgagggctttgaaccttctccatagctgcgtctccatggcccactcccttgcccatgaataaccattctgatacgattattgtctctcctgatttgtgtatccttctaaag

SEQ ID NO: 77389 - DNA, 690 bp, Homo sapiens
ccctctggccacgccgcaccatgttccccagctttggctggatgtggggcccaggttgtactcccagagcttggcctgccagtagacactgaggatttttattttttatttttggtatgaaaatcaagtattcggcctgggctgttggttgctgtccaacaagccaggatgaaggaggagctcttggggtggtgccccgtgcctcctttgcaggtgcctgtgctgtgtccctgcccctctgccctccctctgtgggctccagtcagtccctggtcaggctgcttagaggggagtgatgtgggctcctccagaagggcccaacttctaaatctttctcactccaaagtctgcggttttgccagctcagtgtcccgcccccaccaccatctgattatactggggcatatttcgtgcaaggcctagaacaggcacccaggaaatactgatattatgaatgaatgcccctgactccaggggcagyagtcctgaggcccagtgaggtggggcccagccagacactttccctgggaggagtgagggccaggggacagacagagccctccaggtaggccagggggagcgagcagtgcctccacggagaggacaccaggctcgggcacggaatgccagggagaaggtgctttgccctctttctgggtcaggtggaaaccttgaacagacacgtctgtg

SEQ ID NO: 77390 - DNA, 1669 bp, Homo sapiens
gtctcagtcttcatttactcatccagcagtcactggggatcttctatggaccaggcactgtgctaggtactggagatgcaggtggtgagcaagacaggtgagacagcaaagctgagcaagggataacaggtaagcaaatggcagagtcatgtcaatgttgggtgccaatacgggtaataaatcacatggaagcgagtgatggatacggaagataattttaattgggtggtcatggaaggcttctcagaggaagggacatttgagttgaggcctgagaaggaggcagtcagggaaagggtcctggaaaggatgtgctatgctgagggaaaagtgcacgcaaagaccctgaggtgtgtctgaggacagaagtctagagtggctggagttggcgactgcaaggaagggatggggtggcgtaaggctgggggacgggagtaggcttgtggtcactggcttgtgatttcagcagtcctgctgctccctgagcctcagttctctgacttacaaaatgagcttcatcatttcagtccccgccccgaccctggtcgggaatgttgtaggtgtgaagtaagacagtgctttggcttttggctctgggcagcaatgagctattgcagttatttttattattactatgagtgggatgtttagggactatgggtggggctggggaagctgtgcctctgtttctccgggttgctgttgtaagtgagtgccaagtgtatgtaaaaggcgtggtgtgcctcgtctgtacctccccccaggtcccctgaaccacagccccttgccagctccctttaagcacaggatcctttgatgcaacagaggccgccttctccggccagcaagccttgtgagcctttccgggagaaggtttcaccagagaacagcaagtcctttctttgctttcttttcctcttcctccgggggccaaaaatagggcctgaatgggacccagctctgggcctgcagwgagacaatagcagcctcctgactgaagctgcctcctggctctgctccacggaggggcgggggagaaggggagttgcagagacaccatcccctcagccccaagcccctgctgcctttcccatggcctctgccagaaatcatcccaaagccccttcctctgttggactcccctcagaatgtgattgccagtggggttccccacttgtgctctgagaaagtgcttgtagctggttgactgagaccccaggaccttttgcacccctgagcaaccccaccctatctgctggcctggaaccgaaaacctcggtgggggttctaacccctggttcttttctgtgccctgtctggggcgtaccacagtttttatgtccttttccctttgactcagtgggtatgaaaaacttagagatcaaaggaatgtgccctcttggaagagagcgagctccctgtcactggagatgttcaaataaagttggctgagcattgaacgtgggggagagttagggattagccaagtgccagatggacaactggtcttgatagcttcatgtcccagagaaaatctccatttaaattccatacccttcccttaccagctaggtggctcacagcaagtcacatcccccgagtctctgtttcccaatctgtaaggtgggtcccctagggctaaccttgcagagtggtagaaatggatctc

SEQ ID NO: 77391 - DNA, 1669 bp, Homo sapiens
gtctcagtcttcatttactcatccagcagtcactggggatcttctatggaccaggcactgtgctaggtactggagatgcaggtggtgagcaagacaggtgagacagcaaagctgagcaagggataacaggtaagcaaatggcagagtcatgtcaatgttgggtgccaatacgggtaataaatcacatggaagcgagtgatggatacggaagataattttaattgggtggtcatggaaggcttctcagaggaagggacatttgagttgaggcctgagaaggaggcagtcagggaaagggtcctggaaaggatgtgctatgctgagggaaaagtgcacgcaaagaccctgaggtgtgtctgaggacagaagtctagagtggctggagttggcgactgcaaggaagggatggggtggcgtaaggctgggggacgggagtaggcttgtggtcactggcttgtgatttcagcagtcctgctgctccctgagcctcagttctctgacttacaaaatgagcttcatcatttcagtccccgccccgaccctggtcgggaatgttgtaggtgtgaagtaagacagtgctttggcttttggctctgggcagcaatgagctattgcagttatttttattattactatgagtgggatgtttagggactatgggtggggctggggaagctgtgcctctgtttctccgggttgctgttgtaagtgagtgccaagtgtatgtaaaaggcgtggtgtgcctcgtctgtacctccccccaggtcccctgaaccacagccccttgccagctccctttaagcacaggatcctttgatgcaacagaggccgccttctccggccagcaagccttgtgagcctttccgggagaaggtttcaccagagaacagcaagtcctttctttgctttcttttcctcttcctccgggggccaaaaatagggcctgaatgggacccagctctgggcctgcagtgagacaatagcagcctcctgactgaagctgcctcctggctctgctccacggaggggcgggggagaaggggagttgcagagacaccatcccctcagccccaagcccctgctgcctttcccatggcctctgccagaaatcatcccaaagccccttcctctgttggactcccctcagaatgtgattgccagtggggttccccacttgtgctctgagaaagtgcttgtagctggttgactgagaccccaggaccttttgcacccctgagcaaccccaccctatctgctggcctggaaccgaaaacctcggtggggrttctaacccctggttcttttctgtgccctgtctggggcgtaccacagtttttatgtccttttccctttgactcagtgggtatgaaaaacttagagatcaaaggaatgtgccctcttggaagagagcgagctccctgtcactggagatgttcaaataaagttggctgagcattgaacgtgggggagagttagggattagccaagtgccagatggacaactggtcttgatagcttcatgtcccagagaaaatctccatttaaattccatacccttcccttaccagctaggtggctcacagcaagtcacatcccccgagtctctgtttcccaatctgtaaggtgggtcccctagggctaaccttgcagagtggtagaaatggatctc

SEQ ID NO: 77392 - DNA, 752 bp, Homo sapiens
ccaacggttgccagggcaacggttgccaggggctgctgtcacctgcgccccttctcccgcgctggcggctggggcttctcagcctctattccctggctgtcccctttgtttgaagctccagtgagggagcagtggctggggtggcccagcttcaaagtctctgtcctcttgaaaaaaggtggtcgggggacattgacccaccagccccgcaggctactgcctgcaaacaagaacccctcatctgccacgcacgttcttaatgtatctatagtctgcctgatgccacaaaggagtccaggtacgattctcccgcctcctctcccctcctccccgtccctttcactcctgctccctctccctgctccccgcttctcccctgtcttcctccttcactccccttcccctccagctcgcctccttcctccccatcccttcccctttatctttttcctctcccstgcattccccttctccccagcattgatggtgtagccagtgggtgggggtgtggtggcactagggaccctgggggggtcagatggtactccaagggacttgggcagtttaagacagcagcctcaactacaaggaaatagttgggggtgagagctccacacccgtccctgcagcccagcccttgctgaagattcttttgggtccctgggctgcacccccggtgtcagaaacaagcctctgacaagtccagggcgtgaggggactggaagtgcaggaaagagccaccagtggggctg

SEQ ID NO: 77393 - DNA, 752 bp, Homo sapiens
ccaacggttgccagggcaacggttgccaggggctgctgtcacctgcgccccttctcccgcgctggcggctggggcttctcagcctctattccctggctgtcccctttgtttgaagctccagtgagggagcagtggctggggtggcccagcttcaaagtctctgtcctcttgaaaaaaggtggtcgggggacattgacccaccagccccgcaggctactgcctgcaaacaagaacccctcatctgccacgcacgttcttaatgtatctatagtctgcctgatgccacaaaggagtccaggtacgattctcccgcctcctctcccctcctccccgtccctttcactcctgctccctctccctgctccccgcttctcccctgtcttcctccttcactccccttcccctccagctcgcctccttcctccccatcccttcccctttatctttttcctctcccgtgcattccccttctccccarcattgatggtgtagccagtgggtgggggtgtggtggcactagggaccctgggggggtcagatggtactccaagggacttgggcagtttaagacagcagcctcaactacaaggaaatagttgggggtgagagctccacacccgtccctgcagcccagcccttgctgaagattcttttgggtccctgggctgcacccccggtgtcagaaacaagcctctgacaagtccagggcgtgaggggactggaagtgcaggaaagagccaccagtggggctg

SEQ ID NO: 77394 - DNA, 2407 bp, Homo sapiens
tgtagggtccgagcggagcaggatccaggatcactgagaattagagaggaaaattaaagcatttgatagatgctctttcaaaagtcattgaagtaggcctttggggaaaacacaggcccttgctgaaccccctgacactttacatattagttttgtgctgaattgcattcctgtgtgttttaaggcacccactattctcagagctgggcctctaaagatctatacagggcagttgttggcccacttcttactccagccatggctgtggtgggtggtcagtcccatacagcaggggtccccaacccctgggccagggaccagtaccagtccatggcctgttaggaactgagggtcggtcgcacagtaggaggtgagtggtaggctagcaagcaaagcttcactgtatttgcagacactccccattgcttgcattaccacttgagctccacctcctgtcagatcagctgcagcaggagattctcatagaagcataaaccctattgtgaattgcacttgcgaggtatctagtttgcatgctccttatgagaatctaatgcctgatgatctgtcactgtctcctatcacccccagatgggactgtctagttgcaggaaaataagctcagggctcccactgattctacattatggtgagttgtataattatttcattatatattacaatgtaacaataatagaaataaagtgcacaatgaatgtaatgggcttgaatcatccccaaaccatcccccattcccagtccatggaaaaattgtcttccatgaaactggtctctggtgcttaaagcttggggaccactatcaccatatgggctttgaccagcttcttggagccacaggtagacaccctcttgcattgactccaccatattcctctttcttcctgtcctggggcttctctgacaccataagacttttcaggcctgtagaaacccactcaacattcactggtgcaccccaagaatataagggggttaatgcctaggggactgcgttgaccaacaggggtggaaactgatgggaaaacgcttctgctttcatctcctgggtgggcagtcctgagatgcatttctgccagcacctcctgcccatgccccggcactcccgccccagcctgcactcctggtccctgggattttcccaaataaactacctgagcagcagcctttgccttggcatttgcttttgaaggagtccaggctaaaacaaggttttgatcagaaatcatcagagttctagatgggccagaggtctgaactaaggtttttaagtaagaaatagaaatagcttggcagagagaaatgggataaggaaccttggaaagacagggagaaaaaataagctgaaagagagagaaagaagaggagaaagaaaaaaaaaacctcaatttcccagtgagctcactgcttgcctctctttcgaagttccaaattgcctycactttctcagaattccaatcagggctccttcagaggaagcaatttctgccagcacatggtctcccacctgctgacccaggagaagagctcacaactttagctaaaagagccccagcagacattagcaagtcagctagcaaaaggatccacaagaaatggtgcagttatctccacctgcccctaatgagaaggtggccgggccatctgctggaagctccatgacaggggaagagggaatcagggctccacagcaacacacacgcacgaaccaatggggctgcaccaaagacacgggattcccctttcccgcaacactgcacagacaattataaattaagacgtttcccccacattttcaaaattaatcaatttcaaagacctcctggctgcctaagccaccagctctatctgactccctcacattcaccttcttctcagggtgggagtgaggacaggtcttggtcattcaccccccactcccagaaggaggcagtggtcactgctatcgtcactgcaccacaaggtcagggcataagcaagagatggagctgctgactggggcaaccatagtccccagaaaagcaacaaaaggacttcagggaaactgagtcccgttgcctctctttcctggggcagaaagaagggaactctttttttccatttttttcttttattgacaaggtctcactctgtcgcccagactggagttcagtggcatgatcacagctcactgcagcctcgacctcatcggctcaagccatcctcctatctcagcctcccaagtagatgggactactacaggcatgggcaccaccacaatatttttactgtggtagaatacacataacataaaatttatcatcttcatcatttttcagtgtacagtttaacaatattaagtccattcacattgtgcagctgtcaccaccatctatctccggaacgtttt

SEQ ID NO: 77395 - DNA, 1679 bp, Homo sapiens
agcatccatccatgttgcagcaagtgtcagaatgttcttccttttttaaggctaaatagtattgcattgtgtggaatatctcattttgtgtatccactcatctgttgagggacccctgggttgcgtccactttttagcgactatgaatcatgctgctataaacatggttgtgcaaatgtccctttgagattctactttcagttttttcaggtctatacggaagaaacatttttgtaacttcaagtgaccccaccgcaagcctgagagaagraggcaggacagtagttacggacgcagattttacagtcaaacagaactgattctacctcttactctgcatagaacaaaataactaacacctgttgggcacttagcatatgccaaatgttcttctaacctcttctacttatgttagtagcagaggttaatcctcacaacaattctagaagataggtactattattaatcttattttacagaggaagaaagtccataaaagttaaacagtttacctggattcgagtaagtggtagaaccaagatttgaattcagacagtctggttccagtgcccatatgatgataacaatcatgataatgataatgacagtaacaacaaatgaagaggaggaggaggaaaacagacacttattagcacttaatccaaatcaggccctgttagagcatctaaatgaattaactcatttaaatctaactcctctctcaattaactcatttaaacctaaatactctcagttaagtgtattatttttccttgttttactcacaaggaaactgactctccaaatggctccataccatgtccaaagtcacatggcgaccaagaaaaggatccaagatctgaacccggatcctctgttagccaagtccccctttgttcacttcatcagccgtctctgcttgaatttctctgtatagagtgaggaaaggcttggaggcaaacagcattcatgctctccactcttctactgtatttttttggccagagcagacgttccagggacctctggcagagagacaataaagtgtgacatgtgggaaggaggaaggaggcagtagaagcaccacgcaggctggagatgaggaacagatttaggggcaaccacagaatgcaggaaaaggaaagaagagagggatttggggaagtgtctctctgaatcacaaatggatctacataaagtgctttcaaagtcaggagtaaagattagaatctttttaaaatgagcctggtgcagtggcagctcacacctgtaatcctaccactttaggaggccaaggtgggaagaccacttgaggccaggagttcaaggccaacctgggcaacataaggaaaccccatctctacaaaaaaattaaaagttacccgagcatagcggcgtgcacatagacccaggtactcagaaggctgaggtaggaagatcccttgagcccaggagttgaggctgccatgagtggtgatcatgccactgaactccagcctgggtgacagagtgagaccctgtttcaaaaacaataaaattatatcttttactttggactctattttctctaaatactacatggaggtaatactgggccacataggaccccaagttatatttgggttaaaccagttgaacaagatttgttgcacactgtctatgcgccaggcattggttta

SEQ ID NO: 77396 - DNA, 1679 bp, Homo sapiens
agcatccatccatgttgcagcaagtgtcagaatgttcttccttttttaaggctaaatagtattgcattgtgtggaatatctcattttgtgtatccactcatctgttgagggacccctgggttgcgtccactttttagcgactatgaatcatgctgctataaacatggttgtgcaaatgtccctttgagattctactttcagttttttcaggtctatacggaagaaacatttttgtaacttcaagtgaccccaccgcaagcctgagagaaggaggcaggacagtagttacggacgcagattttacagtcaaacagaactgattctacctcttactctgcatagaacaaaataactaacacctgttgggcacttagcatatgccaaatgttcttctaacctcttctacttatgttagtagcagaggttaatcctcacaacaattctagaagataggtactattattaatcttattttacagaggaagaaagtccataaaagttaaacagtttacctggattcgagtaagtggtagaaccaagatttgaattcagacagtctggttccagtgcccatatgatgataacaatcatgataatgataatgacagtaacaacaaatgaagaggaggaggaggaaaacagacacttattagcacttaatccaaatcaggccctgttagagcatctaaatgaattaactcatttaaatctaactcctctctcaattaactcatttaaacctaaatactctcagttaagtgtattatttttccttgttttactcacaaggaaactgactctccaaatggctccataccatgtccaaagtcacatggcgaccaagaaaaggatccaagatctgaacccggatcctctgttagccaagtccccctttgttcacttcatcagccgtctctgcttgaatttctctgtatagagtgaggaaaggcttggaggcaaacagcattcatgctctccactcttctactgtatttttttggccagagcagacgttccagggacctctggcagagagacaataaagtgtgacatgtgggaaggaggaaggaggcagtagaagcaccacgcaggctggagatgaggaacagatttaggggcaaccacagaatgcaggaaaaggaaagaagagagggatttggggaagtgtctctctgaatcacaaatggatctacataaagtgctttcaaagtcaggagtaaagattagaatctttttaaaatgagcctggtgcagtggcagctcacacctgtaatcctaccactttaggaggccaaggtgggaagaccacttgaggccaggagttcaaggccaacctgggcaacataaggaaaccccatctctacaaaaaaattaaaagttacccgagcatagcggcrtgcacatagacccaggtactcagaaggctgaggtaggaagatcccttgagcccaggagttgaggctgccatgagtggtgatcatgccactgaactccagcctgggtgacagagtgagaccctgtttcaaaaacaataaaattatatcttttactttggactctattttctctaaatactacatggaggtaatactgggccacataggaccccaagttatatttgggttaaaccagttgaacaagatttgttgcacactgtctatgcgccaggcattggttta

SEQ ID NO: 77397 - DNA, 626 bp, Homo sapiens
tctccgggactcttcacatcaagtcccttcgctcagcctgttgagtcgtctagtaaccatccctgaaaacacttctgcatgccaggacttagcccagagccctgatgaaggaacagcttgggctgctatccaggaatctcatgttgcagatggggttgggagcaggatacattccatattcttaacattttgcagactgtacaaatggtaatttttattgttcaagtcatatgaaacatgtttccttttttctgctatgtgttggcaaagtttttttctctgtcagaaatacccaccactccaagatacccacctctctagtcctgaagaakaatgtgagccacattttctactgggcccaaagaggtcacggcacaccctgaagcctccagaaataccagaaatgggtcatcaagggacaagatcttgctttgcttcactggaaccatccatctatccatctattcatttatttattcagtgaatgagaccaccagtctctgtccatgatacagagggccaaagtcagccaagttcaccttagggaagagctgggcacatcaaatgaacctctcagaaggagccatatctcagtgagataatgacttttataatatcaattgtat

SEQ ID NO: 77398 - DNA, 626 bp, Homo sapiens
tctccgggactcttcacatcaagtcccttcgctcagcctgttgagtcgtctagtaaccatccctgaaaacacttctgcatgccaggacttagcccagagccctgatgaaggaacagcttgggctgctatccaggaatctcatgttgcagatggggttgggagcaggatacattccatattcttaacattttgcagactgtacaaatggtaatttttattgttcaagtcatatgaaacatgtttccttttttctgctatgtgttggcaaagtttttttctctgtcagaaatacccaccactccaagatacccacctctctagtcctgaagaagaatgtgagccacattttctactgggcccaaagaggtcacggcacaccctgaagcctccagaaataccagaaatgggtcatcaagggacaagatcttgctttgcttcastggaaccatccatctatccatctattcatttatttattcagtgaatgagaccaccagtctctgtccatgatacagagggccaaagtcagccaagttcaccttagggaagagctgggcacatcaaatgaacctctcagaaggagccatatctcagtgagataatgacttttataatatcaattgtat

SEQ ID NO: 77399 - DNA, 972 bp, Homo sapiens
gaaactccaagtttcagccaatcacaaatagctgagcttcagccagtcacaggtaaccaactgctcacaccatgcccaaacaaggcagacacctagttgtggccaatcatctactttgcttttattcaacctataaaagcttactgctcacactgctgggctgggatctttgaacctcttctggttctgaatactgcctaattcatgaatcattctttcctcaaataaactggtaaatttaatttgcctaaggtttttcttttaatacttttcactttcatatttgttgcaatttgtaaaataaagtatatggacatccaaattcacgcccatcttatgtagatttcaaaagtctgaggaaagatctcttgaaaatttcacatacaaataacttagaatgctagaatgcttgttccataatcatttcttgataataataatgtcatgtaatattttatcactcacattctctaatgttcaaactcttcatttatagaatgggaaacctataataattgagctacctactcaattatttactgatgtgttcactcagtcacttacttaaacacactctcattctctttttaccagttcatacaattatcaaaaggatgctccatacttggagtaatgctagaatctgaggatgaaaaggttaatcagaaatcattcttgccttcaagcgactcatggtgtaaggggaagggacatgagtggagaaataaattgaaatgtgcastataccaaatttgcagaacagacgataatataaataacagcattgattccaagataaattaaatatgttttgacaaaagtcaatttcaggatcatgaacatgaacatgtatgtcatgtataatttctttcttttttaaaaaataatttaaccacagttctcagtgagtctcttctttctagtaaagggacatacttgcagggctcaaaaatttatttcagagaaattata

SEQ ID NO: 77400 - DNA, 625 bp, Homo sapiens
ttattggatattattaaataaaaaatgttttgtttgcatcctaggtatagtgatgtctcaagtattatataaaaatcttttacgtgtaaaaccatcccatttagccatctttatattctgtttgtagtataggctccaaatgttgattacttawgaaaaaggccagacgtggtggctcacgcctataatcccagcactttgggaggccgaggtgggaggatcacttgaggtcaggagttcgagaccagcctggccaacatggtgaaaccccatctctactaaaaatacaacaattggctggatgtggtggcatgcacctgtaatcccagctactggggaggctgaggcaggagaatggcttgaacctgggaggtgggggttgcagtgagccactgcataccagcctgggggacacagtgagaccgtttcaaaaaaagaaaaaagaacagggcatttaagtcaggcatgctggcacatgcctgtagtcccagcactttggaagcccaaagcggtggatcacctgaactcagcagttccagactagcctggggaacatggtgaaaccctgtctctacaaaaaatacgaaaattagctgggcctggtggtgggcacctgtgggagaat

SEQ ID NO: 77401 - DNA, 650 bp, Homo sapiens
tttaacctctaagcatcagacttttgcagaatatttaaccttttattcctggaaatttatatgttggcatgtgccttgtgagcaaacaaagcaaaatgacaggttgacttttctatggttcttccccacaacccgccccccagggatctttactcctcagtgtgtaaaagccttgcaagtcccaaattcctggttttcttttttttttttttttttttgctgtgttttcccagcctgggtagaatagtacaaactgtaagccagaattttctatttccatgtcttaccttgataagaaatgttctaagacagaaaaagaatacatataagtagtggaaaatattgggtttgtctcaatgcgctctttttcccctatcttagtttgctttctgatgccttcaaactgcttcatctccawcagagcttgatggaaatgttttaagaaacattcaaagtgtagtgaattgatttggcagctggtaatgtaaactatcctcatcattaaaaaaaaaaaaaaaaaaaagtactgtgtgagccaaagtaacctatacgaattttggcttatttttagctaaatttggctaaatttcaatgaattacattaaaatgaaaagttacagtgctagtgtcttattggtaaaggtatacca

SEQ ID NO: 77402 - DNA, 650 bp, Homo sapiens
tttaacctctaagcatcagacttttgcagaatatttaaccttttattcctggaaatttatatgttggcatgtgccttgtgagcaaacaaagcaaaatgacaggttgacttttctatggttcttccccacaacccgccccccagggatctttactcctcagtgtgtaaaagccttgcaagtcccaaattcctggttttcttttttttttttttttttttgctgtgttttcccagcctgggtagaatagtacaaactgtaagccagaattttctatttccatgtcttaccttgataagaaatgttctaagacagaaaaagaatacatataagtagtggaaaatattgggtttgtctcaatgcgctctttttcccctatcttagtttgctttctgatgccttcaaactgcttcatctccatcagagcttgatggaaatgttttaagaaacattcaaagtgtagtgaattgatttggcagctggtaatgtaaactatcctcatcattaaaaaaaaaaaaaaaaaaaagtactgtgtgagccaaagtaacctatacraattttggcttatttttagctaaatttggctaaatttcaatgaattacattaaaatgaaaagttacagtgctagtgtcttattggtaaaggtatacca

SEQ ID NO: 77403 - DNA, 1054 bp, Homo sapiens
ttttcagtttaccttgcacttcaggaccaatttgattacaccacccatataattcatatgaagtgtcataaatataggtggcatacatgacattcaggtacagcttttatgtagttctaagtcattacctrtagagctgagtcaattactggaaattaacattcagggagtatttcatatctacagccatcatatgaactcttgcaatggagagaaaccttctccaatgggccctctgtgactgaggtttattacctcgatgattttgttgcttgttgtaacccaatacgtatgttagtataccttaaggaatatgttgtcatccgatttattagttggagtatcttacatctttcaatggtaaggaaaattttatattgacatatccagagtttttattgaagttatattagtcctatctatcagagatatgctagaaaatctataacttccaccaaaatgttgcccatgtgagcaattcagtttatgaagtgcaatcttctaaggcaggcttagggcttcgtgattcatttttcaacctatgtgatgtttaatgattttgtcaaaataaaaactaatatgcagttctatgtccatcatcaaattatgccattcaatttatagcttaagctatgaaaaaagacacctagatacggaggtctgaggagagggaaatagctccagtctatgcaattttcattcctctttgacacagatatttgtagtgggtaagaagttatttggcttattattacactgggaatttgttagaacagagtaatgacattgtttcattatgtcaaacatgtagatatctgtctagggtatactgttgagcaaaaaaaaaaaaaaaatgaaactatataaaacaagagggaaaagggttgaaaggtctttatcaccttgtttaaaccgatcttaaatcccattttctaaactactgaacagtaattcccgaacacattcatttttcttaactatcatagtcaacatagcaaggaggatgcttgcagggtacgtacatgtttgtgcatgtgcgtgcatgtgtgtgtgt

SEQ ID NO: 77404 - DNA, 2605 bp, Homo sapiens
ctagaggggacatacacagctgaagaagggaagggcagtgatggggttatggaggaagtatggcagggaaagcaggagggtgatgctggaagacaaatggtagatcccaggcggactggaaagaattgcaatagggggagccggggagtgcagtctgtgagaggctggaaatgtgaaagccaggagctctcagggatttgggttgcctcctgcacagtcaaggagagtgtcactcaggctagtcatagatggcatacctacaggcttgggctgattttagatagttgttcagagcagtcaggcaggcgccagaggcacaagccctgtgagaggtgtgtttggaatcacttggtatccaaatcacatgtcatccctaggagcaaggagaccggttggatttggggctggtctggaatgaagaagcatctctcagcttccgaaggctgcatggctcacggcagtatctcaatcatgccctgcccgtttgcacatttggtcctgttggtagttacctctctggtgactggcaaagtcagcaaggatattggggtggagcaccctggctaagcaccctcttgattatagagctatggagtagaagacagatggagaatgagaggcctgtgagaacaatcagtcagttgccatctttcagagctgctcgagttcaaaagtgtgtcatacagggtattttaccattgctacctttaagggattcaggtgggaaccctaggctgtggcttcacataatggaacttgggtgccatcctaccctgtgatgttgagctggccagcactggtgtaggaacctcaaggactctgtgcttctctggtttggggcctaggataaacacaggccctgcttgccccttggttctaggacacatcttcccatgccagcaaagttaatgaaccagtctacaagataactgttgaaagaattcttagagaaacaacccacaggaggggagccatgtcagagcccaagaaaaccatcccatcctgagctctgccttctgtgctgctctctgcatcctattctctgtcggaacaggaccccactgtgtccttgctcttctaggcagagttgtgggagagtgctaaatgcttttgagtggggcagcctgtggaatgggatctcatactggctccttagaccttgggcccatgaactcagtatggagcaggacctgcgatgttctgatggattatacccacagtgtattttggcacatctgccaaaagctacaaacaacccccaacaactacacactatatcttgtgagaagtgtcctacccaggagtcctgaatgtgatctgagtatgctctaaggcagccccaggaaaagcaattcagtccctctctctttgcctttagacctgcaggctgggacaatgaaaagaaaatagctattttacatgaaaattttacaaccgtgaagccggaagatgcatatgaagactttattgtgaaacctcccgtgagaaaggtagtcaaagacaattgctttaagggtttagggccgggcgcggtggctgatgcctgtaatcccagcactttgggaggccaaagcgggcagatcacatgaggtcaggagtttgagaccagcctggcgaacatggcaaaaccccatctccactaaaatacaaaaattagctgggtatggtggcaagcgcctgtaatcccagctacttgggaggctgaggcatgagaatcacttgaacctgggaggcagagattgcagtgaacccagattgygccactgcactccaacctggcaacagagtgagactccatatcaaaaaaagaaaagaagaaaaagggtttaggtgttttttaatgcaaaaagaagcctataaagatggggcgtggtggctgattcctgtaatcccagcagttgggaggctgaggcaggagaattgcttgaacctgggaggcggaggttgtaatgagccgagatcgggccactgtactccagcctgggtgacaagagcgagactccatctcaaaaaaaaaaaaaaaaaaaaaactataaagaaacaggtcttacacattgtatagtttgtggggggtagtggggagtagtaagtcccagggcctttttgttgatctttaaatgaggtctggcgttatgtaaatggctcagggctggtgggaaggagtgatggaatgctcacctggagttggtggtgtttcccattaagtcctgccagtgctgccgttgcctctggattactgttactggatcccctcatgtgatgtcctgcagaccctgaggtgtttagaacctgccagacttaaaaatgccagttggctacatgctgcggctggttttgggagaggtctgtgccaggctagaaaaatattactctgcagtctcagtagggatctcccagacctgtgttgaagcctgagcctcggactctcctttcggcatgaagtttgacagtggttaggagtattcttggcctgtggccacaaacatgtatgttgtttcacagctggtccacgacaaagagttggcagcagaagatgagcaggtgttcctaatgaagcaacaggtaagaagaccagtgaggttagaacagaggccttctcatgcat

SEQ ID NO: 77405 - DNA, 656 bp, Homo sapiens
cccaaattaatataaagactgccacttttatcacctcaaattctcttttgctcttttctaattaataatcccccttgcctaggaaactactgttctaatttctatcactgtagcttagtttttacctgttctacaactttatataaatacaaacctggacattgcaaaagacacattaaaaatgtttatttytgttaacgtcttcataaagtgttgttttgttcaaccaaacaaattatcaatagtcttgaacttgcagactctgctttgttgagtctatttcatttgtgtcattaattttttcagtcttttattctcaaagagtagcctttttggttgtttgaagacaaagcccaagctctgtaccaatcccctctaatttagtagatgggaaaacactgtgtcttctccattaagcagcagctaaaacatcagctcttctctttcaacattctgttttctcccgcccctggattcctggaattctcatccacacatggatacttcattgctcagctaagatttgaggtgaggttatacacagattttggattcccgttctatttcttcctccttttcagatcacactcagtttccaaattgaggactattggtcccaaacttttgaatccttcacacggtatgattatggcttt

SEQ ID NO: 77406 - DNA, 1326 bp, Homo sapiens
tgcatatgagatatgttacttctattctcagggatcacattctaggactccttattgcacaatagctgaaaacagttgttttatgtgtaattttccgattttctacttatatcaggtggaaaggcaagccagtatcagctcctcttaatcatagctggtaattgcaatttagaaataattaaaatatacctggaatcatttaagtgatatgcaataggctactatgtaaaaatatctgaaaagaaatttaatatttctagtttaattcttgatttattttaacatttttaatatttagaatcattaatataattatgggaaacctatctcaactatactttttactaaattataagaaatataaaatataattccttcataataaattataaactatgtaaatatatatcaaacatatcccacgtatttgaaatatgcccaagaaatatcactatttcataattctgcatcttcaattataatggtagaagaaaatatagtatacatcaacagtattattgagctacaactattttctaactgtactaggaacttgaaaaattttatgttactaatgcagtattctctcattttccattttttacttaacttccaaattgtggctcatttgtctttccatctagccccagtaaatatggtctataacctgaataatactgataaataatagaatttgccttgacattggaaatttaagaattttttcattcggaagagcaaaggcatgtaaatcctgggcatccatatatttggcattgctttattcaattatatttggcctgtttttcttctgtattattcttggtctctataaagtccttaagagggccaggcgtggtggctcacgcctgtaatcccagcactttgggaggctgaggcgggcaaatcacgaggtcaggagatcgagaccatcctgactaacatggtgaaaccccatctctactaaaaaaaaaaaaaagaaaaaaaaatagctgggcgtagtggctggcgactgtagtcccagctacttgggaggctgaggcaggagaattgcgtgaacctgggaggcagagcttgcagtgagcagagattgcgccactgcactccagcctgggcaacagagcaagactctgtctcaaaaaaaaaaaaaaatccctaagagaaggcacattgttcagatctagtctgccgctaaggttttgtatcattttwaaaatttttttaattctacagaataatataaatgattatatgaaacgttattgtaaagaccattttaaagaactacttgcctgaaaggaatgtcttggagtttactctggaggt

SEQ ID NO: 77407 - DNA, 1083 bp, Homo sapiens
ttcccatgtcctcggcgtctaggtttttaatttattttgttgttttgtttctgaggttatgtttagcacatttaaaagtagcccattaaaagaatttccaacttgtttctgaagtcataagcaaaaaaaatgacgaaagctttgccaaaataccaaggttgttaaagaagaggaaagatacaagactgggacactaactttaaatgtaaacatatactgttcaygtatgctcatcatatatacgcacatctttctataagtacaaacatgagttattttatctatcacattatatagcaggtgaaatacaaaagtgaaattagacctctctttgtgggtttgatattgtttttaattacccagtttccaccactctgaaataaaccacgtagttcgaaagttgcctgagttacctgcctggcaatggtaggcatcaaaattgcagtgagtaagtggtttccttcacactcccaagtttccacatttttttctgtattggttcagcccattcctaatgtctatgtttgaaaacattcctagaaaatttcctttcactagttttgatagattccctgacttcattccaataaagaaaatataactcatcttaaagtaattgtcgtgaaggacagtcaaatgattaaaatttgtcatcagccaagagaggagagaagaaaaaagcctatagcagcaaactcagtatatcatgggggaagacaaacaaacagttaacatattgaaaataaatgctgttttgtacagaatagcacaaccttgatgggtgtactactgtatctgaggctgacattacttcaagacaacagagtaaagaatttttgctaccaaggcgtttctttcacttaaaattcaaatcagaatacagcttttgtgttgtaacttttaaaatatggaatggaatgaagcagaagtttgttcaaaataacaccagcataatcttaatggcatacaacaaaattgaaacaacgttgatgcttgctttttagaagccacaaagcacttctattttgtaaggccctgtgacattgttgcacatttgaaacaacaatggcaattagggaagtg

SEQ ID NO: 77408 - DNA, 962 bp, Homo sapiens
aatcttactaaatgagccaaaagccacaaataaggccttgactcatttaacaatcatttcacatttccacactatgaccaaattaatattttatrgggccactcaattctacggccagactacttttccaaaaaattgaattttgtacttatttattttatgggtcatttgttgaaatagatttcaaaacaggtttaggctatttagatttttcagtgaactgcaaaagaaaaactcagattcagagttttagacctagagaggatattagcggtcatctaactcaaacttcttattttatgcctaacaaaactgaggttgacggaggcaaaatggcttggccaaacctcgctggctttcctctcttttaagatgtccctgatttctccagtgaaaacaaatttcacacacatgatctcagagaacactcttatggaacatcttgtttctacctaggaattatagatgccaatatccagatttttttcctgcaagttacgtaacacccatatcctacgtctttctttgccaccctatctttccccgtttgccacactgcattacaaatgcttgcctgtttgtctgtcttccctattagaccatatgtgccttgagagtagagactggctatccgtactttactaccagaagctagttcactgcctggcatttaagaggtaaccaataaatacgtgttgaactaatcaagtttgaaaaggtgacaagtgaattctttgcatccccaaaatactattttaaaattacagaaagggaagttagtggaggtaaaagccagatagaaaatgagaaggaagatttaggaacacaaagaggcagaaaataccaactttttatccacatcaaaattgaaatagtgaaaatcagctcttacttaaaacaagaataaaactttatacatgtaaagaactgggaagaaatggcaaatccagatggtgacaatg

SEQ ID NO: 77409 - DNA, 962 bp, Homo sapiens
aatcttactaaatgagccaaaagccacaaataaggccttgactcatttaacaatcatttcacatttccacactatgaccaaattaatattttatggggccactcaattctacggccagactacttttccaaaaaattgaattttgtacttatttattttatgggtcatttgttgaaatagatttcaaaacaggtttaggctatttagatttttcagtgaactgcaaaagaaaaactcagattcagagttttagacctagagaggatattagcggtcatctaactcaaacttcttattttatgcctaacaaaactgaggttgacggaggcaaaatggcttggccaaacctcgctggctttcctctcttttaagatgtccctgatttctccagtgaaaacaaatttcacacacatgatctcagagaacactcttatggaacatcttgtttctacctaggaattatagatgccaatatccagatttttttcctgcaagttacgtaacacccatatcctacgyctttctttgccaccctatctttccccgtttgccacactgcattacaaatgcttgcctgtttgtctgtcttccctattagaccatatgtgccttgagagtagagactggctatccgtactttactaccagaagctagttcactgcctggcatttaagaggtaaccaataaatacgtgttgaactaatcaagtttgaaaaggtgacaagtgaattctttgcatccccaaaatactattttaaaattacagaaagggaagttagtggaggtaaaagccagatagaaaatgagaaggaagatttaggaacacaaagaggcagaaaataccaactttttatccacatcaaaattgaaatagtgaaaatcagctcttacttaaaacaagaataaaactttatacatgtaaagaactgggaagaaatggcaaatccagatggtgacaatg

SEQ ID NO: 77410 - DNA, 731 bp, Homo sapiens
attccattcagcaaaattgatgagctcacaygcattcctttctttctttccctccttgttcatcctgtacaaacccgtcagcacctcttcatccttccatgcccctcgcacacgtgttcatcccgtcgtgttagtacctgccgcgcgttctttccgtcatttgtacgtccacaaatgtccactgggctctcctgcagttcatttgtttgctctgcacttgtttattaacccaggcaggtgagatgcgaggcttatgctaggatcaagagtgtggcctttgcagccagcctgcctgcctgtgctgaaatcctggctctttcaatttttaatcataagaccttaaaccagttggttaaactctctgagcctcagtttcctcatctgtgaatgagataacagcacctacctcaaagagtcattgtggggattaaatgaattagtccatttaaagaagttgctactcttgtgacatcattgttatgattcaaccaatgtttcactgaggcaacctgcagaggtagtaagctccccatcactggaggtatgtaaatcaaagtgggacagtattgggtgtgacctgtgccaaggactcccctgtgtttaccatttgccttttgtggtctgtactttgaagactgtcttgggcacagggaaaagtgttgcaggtggtccaggctgcaagatgtgagggaggcagccccccagctctgagccccccatgaagtggtgct

SEQ ID NO: 77411 - DNA, 731 bp, Homo sapiens
attccattcagcaaaattgatgagctcacatgcattcctttctttctttccctccttgttcatcctgtacaaacccgtcagcacctcttcatccttccatgcccctcgcacacgtgttcatcccgtcgtgttagtacctgccgcgcgttctttccgtcatttgtacgtccacaaatgtccactgggctctcctgcagttcatttgtttgctctgcacttgtttattaacccaggcaggtgagatgcgaggctyatgctaggatcaagagtgtggcctttgcagccagcctgcctgcctgtgctgaaatcctggctctttcaatttttaatcataagaccttaaaccagttggttaaactctctgagcctcagtttcctcatctgtgaatgagataacagcacctacctcaaagagtcattgtggggattaaatgaattagtccatttaaagaagttgctactcttgtgacatcattgttatgattcaaccaatgtttcactgaggcaacctgcagaggtagtaagctccccatcactggaggtatgtaaatcaaagtgggacagtattgggtgtgacctgtgccaaggactcccctgtgtttaccatttgccttttgtggtctgtactttgaagactgtcttgggcacagggaaaagtgttgcaggtggtccaggctgcaagatgtgagggaggcagccccccagctctgagccccccatgaagtggtgct

SEQ ID NO: 77412 - DNA, 581 bp, Homo sapiens
aaaccctcccaggcttctctggggttccccggaagcccgagttcccgcctcctcaggccagctctcaggtgtcaggtttcccgctgtgctcagctactgagccagcctcactcttccccagtgttggggcagaacagggaggggacactggaggcagggccctgatggtcagaaaggaggggaaggcccgagactccctctccaaaggcaccagggaggggcagggagaaagaagacaggacagccggccrcagggctggagaggctcagcctcaagagccggggttcagcgctggctcctttttgaaaagcccacacaagcagcaaagaaagccagccttttgaaaagcaggtctctgcccacagaggccagtgaggaaggcatcactaccaagaagtcttcaaagccaggcagagtcacccggtgtaaggtctctgtcccaaaggccagggcacttcccctcacagtcagacctggacagccccatggacttctccaggccctagtttcctggacttgtgacctgcagtgatgctgctgatcccacacacctgctgaaatctctttgctggcaggggcc

SEQ ID NO: 77413 - DNA, 710 bp, Homo sapiens
gagcatatctggatttggtccgtcggtctggttagtcctgagttgggagcagggacaaaatagggaagctgggggccattgcccaagtcctgaccattctggaccaatttctgtagagaccgtggtttcttgggatggtcgctgcagaggaggcagctcagagttctattatcatacatggtctggctactattgtttgcatattcagtctcctatagtctttacttctgtactgtgactctaatctctacccaaccccatattcctggattttctctgattaactatcccactcctacattccaacttgttttccagatgtacaaggcttaattgctggtggaagaggcatctcgtttctggaagtatctaaattccaaaaatgttgcttgaaaatcacatcattataaatacaaccatattgtaaatgctttgagccaccttgctagttaaaagattttttttttctgaataaagatttattttgtgaggggagccatcatttcttgattaccctggtttgcaagctcagrgctgttacccgagacatgttttgattttttcatttgcatgtggcctgatgtttcacctgtgtcttgaagtccttgttaagaatgtctgtatcttgactaggaagatagatagaaagacccactgggcatgtgtcatgggcacagcttgctattgtgcaaggtgatactttcaaatgg

SEQ ID NO: 77414 - DNA, 1081 bp, Homo sapiens
tgcatgcatgttttgcattgctttgaatatttgagcaactgcacccagatataaattactgaatagctaatgatgcaaatattgaaacaatgcctatatctgtgagttaaaagaaaatcagaccccagcaaattgctaatggtaaatgtctaattgctaatggtatcagtcttatgagtgaaatggagtctacatagttgatccagggatcacacagccagattgttcattcttgttgtcgtgtctggttgacacagattatcgtccaactcttttgagtgtaagcattaatatcaattccaaatatgggtaaagataatcttggggactctggtatgtactgctagattgtctttgaaatttgttcttcactttttactttagtaaaagacctctaaattttagccagacttaaggctgtctgagaaaaataaaagcgtacatttccagccttccatgaagctacatgtggccatgtggcaaactgctggccaatgagatgtaagtaaaagtgatgtaggcaactccccagtatttctgcagcagagactggagggcattgtgctcttccttctcccattctccacctttccagttaaaatgaatacatcatggagaaaattgaggtggtcattttggacaaggaggtgacttttagaatgaaagtcaastataataaagcaaaaagatagaaagagtgtgagttcttccaacattctgtaagagggtcaccagagccccttgatttgtttgaagtgggagaaattaatttcttattttcatcactgttacttggaattttactgttatgcacaatgcaacctggtcctaacatattggtcatattgcagttagatttggaggtcaagtataaacatggctttacagggatcttgttgccgctattagaaaacaataagattctggaaaaaatatttctttctaactgtagttgctcattatttagaatattttttaaaaagtttacaaagacaggaaaattcttcaagttatttgtgcctagttatagtattttttctgaagtacttttatatgactactagaatacatataaaaggaa

SEQ ID NO: 77415 - DNA, 1081 bp, Homo sapiens
tgcatgcatgttttgcattgctttgaatatttgagcaactgcacccagatataaattactgaatagctaatgatgcaaatattgaaacaatgcctatatctgtgagttaaaagaaaatcagaccccagcaaattgctaatggtaaatgtctaattgctaatggtatcagtcttatgagtgaaatggagtctacatagttgatccagggatcacacagccagattgttcattcttgttgtcgtgtctggttgacacagattatcgtccaactcttttgagtgtaagcattaatatcaattccaaatatgggtaaagataatcttggggactctggtatgtactgctagattgtctttgaaatttgttcttcactttttactttagtaaaagacctctaaattttagccagacttaaggctgtctgagaaaaataaaagcgtacatttccagccttccatgaagctacatgtggccatgtggcaaactgctggccaatgagatgtaagtaaaagtgatgtaggcaactccccagtatttctgcagcagagactggagggcattgtgctcttccttctcccattctccacctttccagttaaaatgaatacatcatggagaaaattgaggtggtcattttggacaaggaggtgacttttagaatgaaagtcaactataataaagcaaaaagatagaaagagtgtgagttcttccaacattctgtaagagggtcaccagagccccttgatttgtttgaagtgggagaaattaatttcttattttcatcactgttacttggaattttactgttatgcacaatgcaacctggtcctaacatattggtcatattgcagttagatttggaggtcaagtataaacatggctttacagggatcttgttgccgctattagaaaacaataagattctggaaaaaatatttctttctaactgtagttgctcattatttagaatatttttwaaaaagtttacaaagacaggaaaattcttcaagttatttgtgcctagttatagtattttttctgaagtacttttatatgactactagaatacatataaaaggaa

SEQ ID NO: 77416 - DNA, 1125 bp, Homo sapiens
gagaaggctggtacaagggaagtctctgtgctatttttacaatttatatgcctcgaactatttttaaagttatttaaaaattaaagaaaaggtgaaaaaaatgaataaatgaatgtgtgctgaaatgtacacttctttctcatttttaatagagtgtatttgatttccttgagggtagtaaacctcacaggttatagctctctatcccaggtgcttagtatagaaaaccttcaggaaatatttgaagtgttttaaggtaatttaagagcagctcagaagrcaggaactcatggatatgtattgaccacttagtaatctcttgaaagaaaagaagttacctttctccataaagcaataagcaaaagaagacgactaaggagaaaataaaaagaacaaggaagaaatttggattcctgaactcatttgatctatttaacaaagggaagcacattttaaagttgagaaagaaagaaaaatggaaggaaggaaggaaggaaggagtagggaggagatatggaaagaaggaagaaggaagcgaagggaagggaaaggaaaaaaagggaaggaaagggaggagggagggaaagaagggggaaggaaggagagagagaacagaggaaagctgaaagggaaaagaagttattcttataatgattctctgttataaacacattttgagcagattgtaaaaagcaattcaacagaaattagattacaaagagcacacagtacgctaagtgtgactgtattatacaaacagggaattaattagtttagaacatggtttttccattaagatctgcaaacatgtgagtcttattggtgacagtcttgggtctttcccttaaggtcatgtgagccctggcagcatgacgtttctaggctatggtcctggcccactagtatccactgcaattagtcacttgatctttaggcagtgacacctggattcgtggggggaatttctacatcattagaagaaaactgcttacttccatttcagcatttgtttaatcagtggacataggcagtgacatttcagttaggctggtacaaaatggtaatggaacacttcctcataggttttttggtcaaattttccctccaaaaataaagaaaatggtt

SEQ ID NO: 77417 - DNA, 1125 bp, Homo sapiens
gagaaggctggtacaagggaagtctctgtgctatttttacaatttatatgcctcgaactatttttaaagttatttaaaaattaaagaaaaggtgaaaaaaatgaataaatgaatgtgtgctgaaatgtacacttctttctcatttttaatagagtgtatttgatttccttgagggtagtaaacctcacaggttatagctctctatcccaggtgcttagtatagaaaaccttcaggaaatatttgaagtgttttaaggtaatttaagagcagctcagaagacaggaactcatgkatatgtattgaccacttagtaatctcttgaaagaaaagaagttacctttctccataaagcaataagcaaaagaagacgactaaggagaaaataaaaagaacaaggaagaaatttggattcctgaactcatttgatctatttaacaaagggaagcacattttaaagttgagaaagaaagaaaaatggaaggaaggaaggaaggaaggagtagggaggagatatggaaagaaggaagaaggaagcgaagggaagggaaaggaaaaaaagggaaggaaagggaggagggagggaaagaagggggaaggaaggagagagagaacagaggaaagctgaaagggaaaagaagttattcttataatgattctctgttataaacacattttgagcagattgtaaaaagcaattcaacagaaattagattacaaagagcacacagtacgctaagtgtgactgtattatacaaacagggaattaattagtttagaacatggtttttccattaagatctgcaaacatgtgagtcttattggtgacagtcttgggtctttcccttaaggtcatgtgagccctggcagcatgacgtttctaggctatggtcctggcccactagtatccactgcaattagtcacttgatctttaggcagtgacacctggattcgtggggggaatttctacatcattagaagaaaactgcttacttccatttcagcatttgtttaatcagtggacataggcagtgacatttcagttaggctggtacaaaatggtaatggaacacttcctcataggttttttggtcaaattttccctccaaaaataaagaaaatggtt

SEQ ID NO: 77418 - DNA, 1125 bp, Homo sapiens
gagaaggctggtacaagggaagtctctgtgctatttttacaatttatatgcctcgaactatttttaaagttatttaaaaattaaagaaaaggtgaaaaaaatgaataaatgaatgtgtgctgaaatgtacacttctttctcatttttaatagagtgtatttgatttccttgagggtagtaaacctcacaggttatagctctctatcccaggtgcttagtatagaaaaccttcaggaaatatttgaagtgttttaaggtaatttaagagcagctcagaagacaggaactcatggatatgtattgaccacttagtaatctcttgaaagaaaagaagttacctttctccataaagcaataagcaaaagaagacgactaaggagaaaataaaaagaacaaggaagaaatttggattcctgaactcatttgatctatttaacaaagggaagcacattttaaagttgagaaagaaagaaaaatggaaggaaggaaggaaggaaggagtagggaggagatatggaaagaaggaagaaggaagcgaagggaagggaaaggaaaaaaagggaaggaaagggaggagggagggaaagaagggggaaggaaggagagagagaacagaggaaagctgaaagggaaaagaagttattcttataatgattctctgttataaacacattttgagcagattgtaaaaagcaattcaacagaaattagattacaaagagcacacagtacgctaagtgtgactgtattatacaaacagggaattaattagtttagaacatggtttttccattaagatctgcaaacatgtgagtcttattggtgacagtcttgggtctttcccttaaggtcatgtgagccctggcagcatgacgtttctaggctatggtcctggcccactagtatccactgcaattagtcacttgatctttaggcagtgacacctggattcgtggggggaatttctacatcattagaagaaaactgcttacttccatttcagcattygtttaatcagtggacataggcagtgacatttcagttaggctggtacaaaatggtaatggaacacttcctcataggttttttggtcaaattttccctccaaaaataaagaaaatggtt

SEQ ID NO: 77419 - DNA, 1731 bp, Homo sapiens
caagaggcaggctgcaacatacctacttgcttatttctttgatatcacctataggatgagtcattcttctttttggtgggtggggagcaaggctaagaggccataatttttctccttcgaaattctttccctttatggaacttagaatagggtgattaccaattatagcttaatatctaagacggacctaactttgttcccagaatgcacctgcattgggtaatctgtgtaaaacacaacacatcatataattctttatatgaaatttttataatgtgttttgaatttttttggtggtataatctgtctttgatagcataggaaaggataattcatataaaagctgaagaatgatggtttaatgtgttgaacagaatataccatgagcaaaagcttgttgatttgggtaagtctctaccttgtttctttaggagaatgtcatttatgactcctcctgcatttgtataccttcgtaattctcagtaacatagaaatttgatttataggtatttttataatgtatatattttacataaaatattttgatgcatctcacttattttttaattgcataaattatattgaccacttacatctattattaatgacatacctccccaacttcccaaatccttatcattaacttttctttttttttatttttagacagtctctctctgtcgcccaggctggagtgcagtggtgcaatctcrgctcactgcaacttctgcatctgggttcaagcaattctcctgcctcagcctcccaagtagctgggactacaggcatgtgctaccatgcctaactaattttctgtatttttagtagagacgggcttttgccacgttagccagagtggtcttgatctcctgacctcatgatccacctgccttggcctcccaaagtgctgggattacaggcgtgagccaccgtgcccagcctatcattaacatttttatttatctcagaatcatagtatcaggatatcttgaaggatttggccaaatatatttcagcaacatattcaacaacattatgttaaacatgaaaaacatgaaaatcacataggtatgtatatattgagagactaaagggagcagaaaagcaaggtactgataatacagaagggctgttgttcctagaatggaaatagctgagattgcaaaggggcaattagaaagatgtcatggtgttaacataactttatatacgtatacacatgctgtgttcatttatgagcggcagtaaacctatagtgatgccgtctataagaaagaaacagagaaatcgagtaatatgatttagaaaataacaaagaatctgttataaagtaataattatcacatgaaatctgactttcatattttctcaagcactttgaaatgtacaaggttctgttccgagtataaagcttgctgaagaccatttttttcaaatttatagacaaaatgtaaaaacaatttgataagttctcatttcagaaagtttatgtcagtgacatgaaaacatatcagtaaatgcattgttaacaacttaatcgagtaatttgcctgtcatcatgactcctgggtaatgtcaagctgtttacagctaatgtaatttttggtagaaaaaaatctatccattggacatttttcatttcaccttatgggaaatattttattatagtagacaagtttccaaaaagagattattatgaaagtagttattctagcagtaacttctcagata

SEQ ID NO: 77420 - DNA, 1220 bp, Homo sapiens
tgtttgtcttctataccccaaagggctatgttgctgtgagatttttgtccaattaacagtatttacatagcatgctcatgcccctcctttccagtgatacatgaacaaccactctttaatctcccagtactgtttttatataagcacattttctttccagtatccagcattttagttttaaatcatccaggttatagctactgtgtgttatcaraaccagctgtttggctcttttcaactgttctgaacacactgaataggaatagaagcatagaggtatttctgatgaacatagaacacgcacacacacaaacacacacacaatcagaggtagcattaaaactaaacaaatctggcacagcattcatcagcttcataaataccaaaacacccacatgctttttgttcagcatgatatatgttttcaagagagatgctttaaatttttcattttgtgccaaggtaagttttatgcctctgtaatgtacaacatatggatcttatgatattatgcattatttgcctccccataaacagctcattaatcaaatagcctattgtaacctccagctgcagaggccacaaaacacacccaagaaggagagtcatttttaactcaaaatgtgtccttttaaaataatatttttctgatcatgttaaacagtggccaaatatatgagaaatgttagggcagtggaaaagaaatgatagcaaggacacagccagctccaaaacctacatgctgatttttcttcctgactttaggccacatgttctgctttcctctggttgattttgaatgttgttttcatatggagtcaaaacaaggtctttttgtaacaaccaacatttagctataatcatgtacagctaaatggagcagtttcattgttgaagagttcattagagaagtaaattggaattttacacccacatcaactattgcaaactcaccaaacctaatgaaatatgcaaacaagactatgcaccccattctactgattctttcgcatcagctcttgacacgcatgtcagccagggtcttaatggcaagcaataaaatccatctccaactgatttaatcaaaggaggatttttttggaaagatgttgaagggaaggtgctgctgttaacaatcagggaggaggcaaagaatcaggcttgggagtgagtaggaaaccagggagctacaaagggacctaaggctagcagcacaaaac

SEQ ID NO: 77421 - DNA, 729 bp, Homo sapiens
  misc_feature (1)...(729): n = A,T,C or G
ttaatttatttaaccagaaccaagagctctgtcaatactgaaatagatatgtcggtggtaagtttggttgctttggcacttacaactatttgatgcttgctttcaggtagtagtgtgtatgttttaaatccatttctgaatcaaattctgtgcttattaggtccccgctgtgtatatttttctctatggcaagagaaaaacagttatttaacgttttatatatttcaggatatgtaattttttgtaagttttctttcattacagasttgtaaggattttaataactgtattttgaaataaaaataagctaaaaaaagctaattaaccccaaagaggttaattaaactcaaggtcatagaacctaaaagtattgcataattggcaataaagccagctgccgttaccattctattcttagccatcgacctctctcacctgtcactccatctgcttcctaaccccatctccttgatttctctctgcactgcctccccaccccacatccctgagtcaagtttccacagagccatggaagtatcctttaaacatgtatcagctctgccccaccctgctctgaacccccacatagattcccatcattcttgcaataagtctccctcactttcaannnnnnnnnnnnnnnnnnnnnnnnnnnnnnnnnnnnnnnnnnnnnnnnnnnnnnnnnnnnnnnnnnnnnnnnnnnnnnnnnnnnnnnnnnnnnnnnnnnnc

SEQ ID NO: 77422 - DNA, 675 bp, Homo sapiens
ccctgcaacccttccagggaactcctgaaatatgtctccttctgccagcttatgttgaaggatggctttgatgtgacaagttcttgctatgtgccagataaggtacaacacactttgtgttaactaccttattgcatcctcatagcaaaactatgaggatggttttgtgattcacatttagcctgaggctttaaagcagctkggtattctataaaatggactggaaactcaaattcacgtttttctggctcccaagaaaaacacctggcttgaaatattacctcactacagttcatgaaaaactgtctgtcttttgccctgatctctgtgctgatgtccaacccaactagcaccccgctctctgtgcagctccaaattctctctccatttcttctgcagcattccctagctttatcactctcatccctattgtaccctcatcaatcaggtaaacacaaaaacttggtttgtttcttctcttttgctgcaataccttatcaatcacaaaaaccctgctaataaccatcctctactcccatggaaaacttctatttacctttttttttggagataggatctcgctctgttacccaggctgcagtgcagtggcacagtctcagctcactgcaacctccgtctcccaggctcaagcgattctcctgcctcagcctcccg

SEQ ID NO: 77423 - DNA, 2560 bp, Homo sapiens
  misc_feature (1)...(2560): n = A,T,C or G
tgacccattatttttagtgaaagggacaaagggacccacctccttctctttttgctgcccatgtgccacacacatgtaaatgacatgtgtacctattgttgcttgtccttgatgatgagtacacttgtacattgatatatttattagtgttttgcttttcactaatccagcatagttgtgaccccacccctgagacctaaaggaaggagacacctcatagggggtcttaacgaatctctgatgaaaccttagactaattataattctttcatttattataacttcatgccangtattntatctgcctcacctctaatcctctcataaccttgcatgtttntattcatcccgtattacaaatgagaaagctaagtttnnnnnnnnnnnnnnnnnnnnnnnnnnnnnnnnnnnnnnnnnnnnnnnnnnnnnnnnnnnnnnnnnnnnnnnnnnnnnnnnnnnnnnnnnnnnnnnnnnnntaaatttaaaggtaactagctcaatttagtactcaattaatgctactctgtttaatctgttggcaattgtgtcaacctgcttgtcaactactatcttctgatttttttttaacctcacctcaaaaaccattctacattctctttattttcttgagttcataccaagctccctacctgctattcagtatttcatacatatccttagggccatggttctcaaaacctgatttctaggcctctggttattagtcgtggtggcgggtgcctgtagtcccagctacttgggaggctgaggcaggagaatggcgtgaacccggtaggcggagcttgtagtgagccgagatcacgccactgcactccagcctgggtgacagaacgagactccgtctcaaaaaacaaacaaaaagcttctttagatgtataaatagttcaaagaatgagtcatacaaaaatggagatggggaatggtgaagaattagaagtattctctaatgtagattgatattatcatagaatcacagaacagaaagagtaggtcaaaatcccaacaatgttataattgatggggtatccagctattaacttactatcttcagtgctgggaaactgatagccatccaaaagcatgccttccaatcataacaatgctgtctcatacatcaagataataactgtcttcctgtagtttctaccattcaaatatttatcataagcctagtagagtgactaatctatagtagctaaccattgagccactgacccctttgagaatctaataaaaatgatgggccctgttcatagaaaactacacatgaaaaacaatttttctcacaatttcagaaagcttgcaagttatgtgaagccccttcatccacggacccccaggtaaagactccctcactcctgttttttactgagtagagaaatggagagataagccatggtttcctccctcaaggaccttactttctaatagcaaatgcatgtgaaacagttaatagtaataaggcaggatatggttaagtactaatcatacactgagagacagaaaattctacttctgacaacacagcaagataaaattcttgcaaatggccactgtacactcacattccataatggagataaagtctttgttgagttctsagaagcatcatctgacagcacagcaccagggagcagaagaaggttctggtcatggcctggtacatggtacttaacaaatttttaatgaataaataaacaaccatttacttatcagttgtttaaaatgctccctgaccttcctgagaagaaagttgaaaaaaacaataaaataatttaactacctccaagcttctttaggaacagcatttccatttatcccaccacttaatccaaaaatgtcagtctttctaaactcaaaataaaactctatgagacatgttttagatgagtgggaaaggttaaaagaaatgtgtccaaagttacaaaaacaacactgcagaatagaatccagaaggttctcattccaatgggatctcaagaaggaaccactggtacttccattttaatgtcttaataatgacatcttctaacagaataattggacagctttaagaaagtggttaattttctctgaaatccagatgttaccctgctttctttatatggggagaccttgaagattgggtaaggaaataccatcaaataaggtaacaggaaaaatggccagttcataatctttttttttttttttttttttttttttgagatggagtctcgctctgtcacccaggctggagtgcagtggcgtgatctcggttcactgcaagctccgcctcccgggttcacaccattctcctgcctcagcctcccgagtagctgggactacaggtgcccaccaccacgcccagctaatttttttgtatttttagtaaagacggggtttcacccatgttagccaggatggtctcaatctcctgaccttgtgatctgcccgcctcggcctcccaagggctgggattacaggtgtgagccacccgcccggcccatatcatttctatttgctctaaaaattgctctggaatgaacacaaattattt

SEQ ID NO: 77424 - DNA, 579 bp, Homo sapiens
ggtgtcattttgcttaagtaaaaggattttaactgaaggcaaaatcttgcaagagagtcraaggagttaacactctaccaactataagtgaaatatatagcttcatttaactccttataatgtcttttcccagataaatcaaagaattaatgtaatataaagagggatcagaatgtatgagttcaggtcccagctctaccatctaatcattacatggcctcaaatcaaatcaaatcagactgaggtcagtctgagcctcagttttgccaccagtaaaataaaactgataggataataagacttgcttcattgccctccatggttgaattgaggtttttgtgagattattcacacgaagatagtcctttaaaactctgtatcagtgttgagacaatatagtttcacccagaagagatgcttagttggttaagttagatctactgggatagttggatctacctccacccgtgtagtatcagagccttaggggtcaaattggagtagtgggtataggagttaagatcactgccacacatacttctccttcaccttctactgtacctcagcccagcactacta

SEQ ID NO: 77425 - DNA, 550 bp, Homo sapiens
gatccatctgcctcggccttctaaaatgctgggattacaggtgtgcgccactgcgccctggccttaatgcaaccttttctaaaaggtcttgtaagaatctcttagcctttgctgacaaacatttaatgatggagaaggacccttctccaggacccatgcaggcagctttgatggttagaagtttctccttactttgtaatccacaatctctgcctttgtaaatttctccattatcattccctctcccacatcacagccatttcaatatactgtcagccagcaatccaygtggccatgtattaaatgacgaagagtaaagatcctgtcctctctctgccaaaaaagtgaacacccgtctgcttggtaggtaaatacccagccagaagaagggcaatttatcaaacttaatgaaatatcctcaaggacacctctgtctatttgtacacgtatctgctcatcaagcaacttttttttcattctttaaagttgtggtaaaataaacacaatataaaacttgtatcgtaactattttaagtatataactcagtgg

SEQ ID NO: 77426 - DNA, 636 bp, Homo sapiens
cacatttagatttatacaatgtatttatatatttgcagattcacagacaattttcagatggattcagcattatcaagggagatactgtggaattattactatgtgatgatttcagggctgacatcatgttttactcttcgttaaattatcttccccaggatgaactagcttagaacttgaccgtcctttatttgaaacagtgatgaccctagatgtataccccttgaaaattcattgttataacaaaaatattaagtagaaattgtggtattccatctgctatgctacatacttcatatacatttacagaatctttacaattatactactaggttggcattattattgtgattctaaaatgtaggaaactaaggttgagatcatttcaaatgatgtgcagggttcacttacgtagcaatttgtgaatccatgactcaaactcaggtatttatactttagaacccaygttattttcttttttattatttaaataattttaaattgttttacctgttcagtacaggagtatatgtgcaggtttttttacataggtaaacttgtgtcacgagggtttgttgtacagatcatttcatcactcagatattaagcctaatacccattagttatttttcctga

SEQ ID NO: 77427 - DNA, 787 bp, Homo sapiens
gtgtatatatctctaggtaagagttattttgcaaccaaaacattaagagattctctaaaattaatctaatgaggaagaaaagcagaaaggctatcagcaaaaaaaacaaaacaaaacaaaacaaaacaaaacaaaamaaaaactgctgttggcagcaggaaaaggataaatggctcagagaagcgtgaaagagttaatttggtggcttgagcagggaaaggcaaaatgagcagaacttatcaagagccagctggaaaatagtgttggtggggaaggagaaaaagggaagaatttagactcataggggtcttataagggattgtagctgcaggtgcactgccactaagaaatggctggagatgtaattgagtttattactcattgtaaaatggaagttgaaagtgtgataagttgaaaatatgatgccatctagagtctagtaaataataagttattgctgtggtctgctagatgttagcaatatgagcactggcattatttttataacacagtagaattgtattgcaactgatgaaaatagtggaatagatatgtagatactgcattcaagacttactcctgtacattctctgtgttgatgcagtttattctcatgatccttcaaaaatagaaaagagcagaatttgtattgtagaagactattttacatattattttaattgacaaatcataattgtatacacttatgacataaaatgtgttttgatatatgtatacaatgtggaataaataaatcaagatatttaacatatccatcaacttgctt

SEQ ID NO: 77428 - DNA, 787 bp, Homo sapiens
gtgtatatatctctaggtaagagttattttgcaaccaaaacattaagagattctctaaaattaatctaatgaggaagaaaagcagaaaggctatcagcaaaaaaaacaaaacaaaacaaaacaaaacaaaacaaaacaaaaactgctgttggcagcaggaaaaggataaatggctcagagaagcgtgaaagagttaatttgrtggcttgagcagggaaaggcaaaatgagcagaacttatcaagagccagctggaaaatagtgttggtggggaaggagaaaaagggaagaatttagactcataggggtcttataagggattgtagctgcaggtgcactgccactaagaaatggctggagatgtaattgagtttattactcattgtaaaatggaagttgaaagtgtgataagttgaaaatatgatgccatctagagtctagtaaataataagttattgctgtggtctgctagatgttagcaatatgagcactggcattatttttataacacagtagaattgtattgcaactgatgaaaatagtggaatagatatgtagatactgcattcaagacttactcctgtacattctctgtgttgatgcagtttattctcatgatccttcaaaaatagaaaagagcagaatttgtattgtagaagactattttacatattattttaattgacaaatcataattgtatacacttatgacataaaatgtgttttgatatatgtatacaatgtggaataaataaatcaagatatttaacatatccatcaacttgctt

SEQ ID NO: 77429 - DNA, 1010 bp, Homo sapiens
cccccaaaatacgtacaacttatttttaaagtcttattcttaaggaattattttaacatttcctgctaatttgaaaaagagctacacaattttatttcattgatagaaattcattattatgagacatattcattattatgagacagaatcttgctctgtcacttaggctagaatacagaggcatgatcacactcactgcagcctcaaccacccaggctcaagtgatcctcttacttcagtctcccaagtagctgggatcacaggtgcatgccaccacgtccagatagcttaaaaaaatttcttttgtagagacaaagtttccctgtgtttcccaggctggtcttgaaacctgggctcaagcaatcctcccacctcagccttccaaagtgttgggattacaggtgtgagccacggtgtccggccagaatatcccattactcacagaatgccaggtactcgccagggctgtagtttgaaaatctaccatatctcttccaccactcctccaactgtcttagaaacatcatttatgtgacacacaccttcactctatatgcacaatcttgtaccacaatttgtctttttaatggatatggccatctggtctgtaaacctttggaggattgggaccatgttttatattccttgtaatctacatatacttattcactcaatactacttttttttttttttaaagacagagtctcagtctgtcgcccaggctggagtgcaatggcacaatctcggctcactgaaatctccacctcccaggttcaagcaattctccagcctctgcctcccgagtagctgggattacaggcatgtgccatcacgcctggctaatttttgtatttttagtaaagacagggtttcaccatgttggtcaggctggtcttgaactcttgacttcaggggatccacccggcytcaccctcccaaatgttgggattacaggcatgagccacacacgtgacctcactcatacttactgaacactactataatatta

SEQ ID NO: 77430 - DNA, 670 bp, Homo sapiens
tttatacactaaataaagtcaagtgcttttaaatcctttaaaacattcgtggttattgtttacttttcctcacaagtctttacataccacaggctttggaggcatacagatcagaacaagcatagagattagtgattaagagcacagacgctatagctccagaccacctgcatctgaatcccagcccttccagttaggatctgtgtgatcctgaactaattaattaatatctctgtgcctcgatctatatacctgtaaaacagcaatatcaataactccttcataagataaatggaattatctgtttagtgttttatccagtgccttgatggagtaactgtgtattataattatgctgtagtgtctagacaaacaaaagatggaggaggaaatagaaaagtgagcatgtttctgaggatatttatcttataggttagtgaaccatagttttaacaggccttaaatttgagaaacacttctcctactataatctcctgtcagacctttgcaatgcaggatagaatacctgtttggctttgttaaaatccacctgttaaatgcagatgttcctaagcttgtttgataatggtaccttagacacacagaaaacctattattatctctcaggaaacttttatttagagcygcacttctcaaactttaatatgca

SEQ ID NO: 77431 - DNA, 1048 bp, Homo sapiens
ccatatctgcatattacattaaaatcttcctttctaatmtctttttaaaggactagctttgtgttcaactcttactaagccctatatatccccatcatggttatttgtcacaggttgcaagcaaccagatgccggagacagagacaacatgattctcttttgtcaacgctcagcagagcactatagataatttacagcttttttgaatatgatgataatcctaatgcgcccttacattttaataacacctacgagttttttaatgattttctgcctgtgatattaccatcatcattctttattttagaaatatttgttgagtatttgctcatgaaaggcaccatggaaggcattcatagggattatgatgagtctctgccctcatttaagttatattcagtgaatgtttattgagcttctctgaggtgatatttttttaaagggttataaatttcttggtcgggtgtggtggctcacacctgtaatcccagcactttgagaggtagaggtgggtggatcgtttaaggtaaagagtttaagaccagcctgaccaacatggtgaaaccccgtctactaaaaacacaaaaaattagctggatgtgatgctgcacgcctgtggtctcagctactcaggaggctgaggcaggagaattgcttccattcgggaggtagaggttgcagtgagccgaggtcgcaccagtgcagcctgggcaacagagcgagatttcatctaaaaaaaaaatgttatagatttctccattatgtacatcagaaatgtgaggtccagaaatatttaatgattttcccaagtccacttagttagctctggtacaaaggatgtagcaaaccacaggttttgtgacagagattgattcgagcccagatggccagaagttgcctgcatcattgacaattagtttccaaactaagataacaaataaattataaggccttggcatactggaagaaacatcagactagcaatcaggatatttggatttggattccataaatataataaatttaaataataaatttcctaatgcat

SEQ ID NO: 77432 - DNA, 1180 bp, Homo sapiens
gtaatcccagcactttgggaggccgaagcgggaggaccacttgaggtcaggtgttcgagaccagcctggtcaacatggtgaaaccccatctctactaaaaatacaaaaaattagccaggtgtggtggcaggcacctgtaattccagctacttgggaggctgaggcatgagaatcacttgaaaycaggaggcagaggttgtagtgagccgagatcgcacactgcactccaacctcggtgatacagtgaaactcagtctcaaacaaacaaaaaagactgggaatcaaactttaaattgtactttagtgtgcctatagttagatcatggttttgtgccatataatgatattttagtctgacaaaacttgcaagacaattatcatgggtttatgtcccaagtggacaaagaaaaatgcaactcagtcgttatccttaaggagctcacagcttagtggaggagaccatcatgaaattagaaattataacaccagcagtattaactagtaatggaaaaccgtataaatgagtggcaggaagtcacaaaggaggaagagttactctgctgaacaagtcacagacttgagaggggagtgatatttgaactgagccataaaggataatagacacttgccagatgaaaacagaaaaggctttgggtgcttaaaagtttgcataagtaatactaaatagtaatttaaatataactgcacatatttttttcaactttctttttacattcaatgttattttttaaaatgtacccatctagttatatgatggattcacaagtgtctatgtgttttctagttgtttcctatgtttgaaatgtgccataatttaaattattttatttaaggaaacaaagaacgatgcctggctaccacaaaggatctgaagtggtgggaggtggattttggtaggtctgaaccagatcgagacagatgttacatgttggcatgaggaatttgtatttcatcgtttgaacaaaagagattaacatttaattattaaataggatcgaaatgatttttgttgtcactgttgttgtcagaaagctaagtcaagtggtagcacagaatgaataaatttgctgcaaccagtagagacttgaaccattcttaccctttgcttgctgtttccatgaacaatgccctctagattctaagagtaaaccagacaagg

SEQ ID NO: 77433 - DNA, 1817 bp, Homo sapiens
cttccttacaccttatacaaaaattaattcaagatggattaaagacttaaacataagacctagaaccataaaaaccctagaagaaaacctaggcaatagcattcaggacataggcatggtcaagaacttcatgactaaaacaccaaaagcaatggcaacaaaagccaaaattgacaaatgggatctaattaaactaaagagcttctgcatagcaaaagaaactaccatcagagtgaataggcaacctacagaatgggagaaaatttttacaatctacccatctgacaaaactattcttaactgatagaactaccctcattagccttccctaaccagttcaaaccaagaggcaatgtctawaatggatacaaacctgagttcttcaagccagtcaggtttgaatcccaggtctgtcacttactagctgtatgaacttggacaagctaactaatttccacaactttgttttccttatccaaaatataggaacaacagtgttctatgctcatataaatactaaatgagataatgaacatacaatgcttaacacactggctggcagataagtgtcaaatagcactggttttcctgttagaggtggttctatcatcctgcagcactcattgaagaccaagatttctgaaggtttcctgtctcccatagttgggcccattcacccagccctcagagccccatgttctgactccatagtgtgaatgtgaattcagagccatcatctcacccatctgccctgacctgcttcttgtgggcctccaacctggcacctgattggtcgtgataagctttcaaggttgctgttcttactcccacagctgatccagggcttcatcccattctgtccatcagtttcttaaagggaggacttgtagcagagagaggggaagaagagtgttatgagaccatttcgcatctctctgcctcccagcagcctacggctgggcagccaagaggctttggctgctgccatggcagtgggctctaggacactgcacagcagcctcttggtctccctcgcacttcaagaatgggaaaaataaattgttcaaagagtctctttaccgcttgggaactaaggattatgctgaaactttattattactttgaataaataaattactctcttgaggccagatgaaaacatgctcttattaatttttttaaagaaggaaaggaattggaggggaataaaatcaaaggtgcccaaatggattgaagtggcttctcagaagctgacataatagcaatttgtatgtatattatgtttctcatcaaaggagcacctcacaaagggcctgtttccctggagttgccccagagagctcaacttcagctcagaagagtctagagccttgaaggtctctgggtttccaaagccccacctcagggctctggcccaggcaattgatctcctgcctctggacctcagggctggctgagtcttagagtccttaagggagctaggagagggcacctgtgtccccactggtcagtgggaaagagtgctacctcccacataagtactccttggggagattagccatggaagcctagccaggggagggggtgtgtgtacctcccaccaacacacacatcatgaaaactaaccattggaaagaagaccctgtctgagagtgagtttcctctctgactatccattagtagagaccaggatttctgactgtgtttggttttccctaattatttctgacattcaggcaagtaataaatttttttcccttgtgttctaggtaggagaccacacacacagagacacacacacatatgcatctatcaaa

SEQ ID NO: 77434 - DNA, 1817 bp, Homo sapiens
cttccttacaccttatacaaaaattaattcaagatggattaaagacttaaacataagacctagaaccataaaaaccctagaagaaaacctaggcaatagcattcaggacataggcatggtcaagaacttcatgactaaaacaccaaaagcaatggcaacaaaagccaaaattgacaaatgggatctaattaaactaaagagcttctgcatagcaaaagaaactaccatcagagtgaataggcaacctacagaatgggagaaaatttttacaatctacccatctgacaaaactattcttaactgatagaactaccctcattagccttccctaaccagttcaaaccaagaggcaatgtctataatggatacaaacctgagttcttcaagccagtcaggtttgaatcccaggtctgtcacttactagctgtatgaacttggacaagctaactaatttccacaactttgttttccttatccaaaatataggaacaacagtgttctatgctcatataaatactaaatgagataatgaacatacaatgcttaacacactggctggcagataagtgtcaaatagcactggttttcctgttagaggtggttctatcatcctgcagcactcattgaagaccaagatttctgaaggtttcctgtctcccatagttgggcccattcacccagccctcagagccccatgttctgactccatagtgtgaatgtgaattcagagccatcatctcacccatctgccctgacctgcttcttgtgggcctccaacctggcacctgattggtcgtgataagctttcaaggttgctgttcttactcccacagctgatccagggcttcatcccattctgtccatcagtttcttaaagggaggacttgtagcagagagaggggaagaagagtgttatgagaccatttcgcatctctctgcctcccagcagcctacggctgggcagccaagaggctttggctgctgccatggcagtgggctctaggacactgcacagcagcctcttggtctccctcgcacttcaagaatgggaaaaataaattgttcaaagagtctctttaccgcttgggaactaaggattatgctgaaactttattattactttgaataaataaattactctcttgaggccagatgaaaacatgctcttattaatttttttaaagaaggaaaggaattggaggggaataaaatcaaaggtgcccaaatggattgaagtggcttctcagaagctgacataatagcaatttgtatgtatattatgtttctcatcaaaggagcacctcacaaagggcctgtttccctggagttgccccagagagctcaacttcagctcagaagagtctagagccttgaaggtctctgggtttccaaagccccacctcagggctctggcccaggcaattgatctcctgcctctgkacctcagggctggctgagtcttagagtccttaagggagctaggagagggcacctgtgtccccactggtcagtgggaaagagtgctacctcccacataagtactccttggggagattagccatggaagcctagccaggggagggggtgtgtgtacctcccaccaacacacacatcatgaaaactaaccattggaaagaagaccctgtctgagagtgagtttcctctctgactatccattagtagagaccaggatttctgactgtgtttggttttccctaattatttctgacattcaggcaagtaataaatttttttcccttgtgttctaggtaggagaccacacacacagagacacacacacatatgcatctatcaaa

SEQ ID NO: 77435 - DNA, 1020 bp, Homo sapiens
aatttgtggtgccttgtataaaaagaaaatgtgggttccttgttttaaaagtattaaaaatggaaacacagtgatgcagagaattaatctaagtgtagggtcctatgtaactagacagatcatatgtccatgaagcaggccctgtttgtggtggattaaatatggtcatcattctttacaaattctcccatatagctttaattttcccttctcttgaaatggaattagctctgtaactggcactgactattataatatggggagaatgatgctgaagcattgtacattcaccattctcaaaactatgggtgaagtttgaaaattctgagaccaccataccatgagaaagccaaggctagccatctagacagagagaaaggccatgtaaatgagcaaggtgagaaacatgtgagtgaagttttagttccccctcaccagacaaggcacccactgattgcagccaagttaatgaatccaacaaaccccaccgcccaaattcttgacctacagaatcatgaggacaaaagatgatatggttttaaaccattaagtcacagggaagtttgtaatagagtaataaatagccaaacaaatagtactgaatatttttataaactttcaataatattaataaagtaacattactttactattattctctctgggttgaagcaaacaatctggatttgttatgagctatttttgacctatagtagtcccctgaaattaaaagtattttgcatgatagtatcagtacagttgtagattacataatatcataggcaaaataatgaccttcaaaggtctgcaaatcgtaatttgcagaacctgtggatatgttactttatatagtaccttagttcctagaactgtcatataaaaaatgaccacaaagttaatatctttamataactgaaactttttgtctcatagttctggaggccagaaatctgaaatcaaagtattggtagggcaacttctgctgaagtttctaggggagattcttccttgcctcttcca

SEQ ID NO: 77436 - DNA, 721 bp, Homo sapiens
cgggcagagtttctcattaaacgtgggaattgacagtcagaaataactgtcatttggggcttttttatagtccccctactcrataatttttttttgcactagtgatattatctttagaataaaataataaaattgtgactatccggagactggtagatgcctgctttgtataaaaacagcagtttgctccttctgccttcctagtctgtctgtgagaagaaggactcgaagaacagttaagcccaatcaggaggctagtcactaatatgcccactttaagtcaaaataataggtaaaatagaccccctgctacctgtaatatgtctggatattaattataaagaaattcactgcaagggcttttcattctattagcatttaattcatgcgtgtatttcactttaactacagccaataaatcctttatggaaaattcctcttaatatgactatggaagaagggtcaaaaaattaacatctttttatgctcagaaaagtgacttgatgaaggaaaaagacacactcattacaaaaataccatttttcctcaaagatctgaggcccctaggtgacactgttttgcatcttaacataaaatatgtaattcagaaccttctggtgttaacagatagcgccagagtactctgccctgggcagtttgcaaagatgcaagatagttatgccttgaggtatgtaaagaaaatatttcttccataaatatg

SEQ ID NO: 77437 - DNA, 721 bp, Homo sapiens
cgggcagagtttctcattaaacgtgggaattgacagtcagaaataactgtcatttggggcttttttatagtccccctactcaataatttttttttgcactagtgatattatctttagaataaaataataaaattgtgactatccggagactggtagatgcctgctttgtataaaaacagcagtttgctccttctgccttcctagtctgtctgtgagaagaaggactcgaagaacagttaagcccaatcaggaggctagtcactaatatgcccactttaagtcaaaataatagrtaaaatagaccccctgctacctgtaatatgtctggatattaattataaagaaattcactgcaagggcttttcattctattagcatttaattcatgcgtgtatttcactttaactacagccaataaatcctttatggaaaattcctcttaatatgactatggaagaagggtcaaaaaattaacatctttttatgctcagaaaagtgacttgatgaaggaaaaagacacactcattacaaaaataccatttttcctcaaagatctgaggcccctaggtgacactgttttgcatcttaacataaaatatgtaattcagaaccttctggtgttaacagatagcgccagagtactctgccctgggcagtttgcaaagatgcaagatagttatgccttgaggtatgtaaagaaaatatttcttccataaatatg

SEQ ID NO: 77438 - DNA, 853 bp, Homo sapiens
tcctcctggccctccgcatttcaggagagggttccatcatcattcctgtaggctggaaccctgggagtccttctagataaccccctcccctacttctcactcctgttccatcttgaagtcctgtggattttaactcgcagtacctctccactctatccctgctgtcctgcctccatccaggtcctagacgtagcctccaccattgcttcccttgcttattccacagccattctcagcttattaatcgccaggttttttttttttttgacagagtctcgctctgttgcctaggctggagtgcagtggtgcaatttggctcactgcaacctccacttcctgggttcaggcaattctcctgcctcaacctcccaagtagctgggattacaggcgtatgccaccacacccggctaatttttatatttttactagagatggggtttcaccatattggccaggctggtcttgaacacctgacctyatgtgatccacccatcttggcctcccaaagtgctgaaattacaggcatgagccaccgcacctggcccccaatcagttcttcctacaataccaggaaattgagtcctgtcagcctcttgcttccctggcctctcagggaagggtcaagaccaaagcccccaacatgagctggaggtcctgcttggcctagcccctgctgacctcaccaggccccctgcccctcacacccccttgctctctggggccgctagccagactggctgtattgcattcccttccaccacagggtctttgcacatgctggtccctctgctttcaatgctcccaatgccccctcctccacaccccctgacaatggatttttcttcagctctc

SEQ ID NO: 77439 - DNA, 1175 bp, Homo sapiens
tgcatctagttcatgtttagtactgtgatagttttaaacacatttaaaaagacttgcaagtttatattaaatagtaatacatgtaaatattccggagactttggaaatattttctctgtacatgtgagaagaggtagaaatctatctattgtctcayaaagcagtcattgtgtttgaatgagttcatccacatggcaagaattcttattctgtgcctctcccctgcccagtagggcatattgcttcatcagcaccaaataccttcacatttttttcacatatactcactctcccagcaacatctactccatgatcctcactacagggaccaatgtagataaaggatgacatactgtctagccaagacggggaaatcagcagcatgatacagtcattcttcttcaatagctaaaaaagtaagtaaagtgagcaaagcaccaatgaaacaaattcagcaacagctaccaaacaaagtagaaaaatatgcctcataaacgtcaaagatggcagagaaagatgtaaggtgttccactatgaagaactgatccctcaccttcagtcccctgaagcaaagctaagcaaaaataaaataaaataaaaccaaaatatcttggaaattaccgtatatttagtcaagagagctattgaaaaggcaaactcagctagcatggacaaatattaaggaaaaatcccaaggctagaagtacaaacgtactatccacatagagacaagaaggttaccctggcctcgctatatccaggcaataaagatgaggttgggaaagaagacaaagagaaagacaaactaccatggtgggtggggggttgtgtggtgggttctgttgagacttcatggatactttgaaaagagagcagagctcacgtctccagtgagagctacaataaccccagagggtctcgcccaaaggacctcagcacttgcatcattcatgctgggttgaaaacactaggttttcattggaacaacagctcttagggaaaggcaatctttttcagaaaaagagcagcaaaaataataattcccacacactacatccagaaattagaataaaaactcagttcctcagagaagagcagtgtcttaatccatttcagtgtcaaagttacatttaggtgtatacagaacagattagtgtgtttcattttaacttttt

SEQ ID NO: 77440 - DNA, 742 bp, Homo sapiens
gcttcatgggtcttctaatttgattttgattgactccattccaggttcttttttatatttctccagtgaataaattggtgggtgcactgatgactgtgttatccctttttccaggtaagaaaacagcagtatctactctttcttttgtttaacttgtactggaacctaaacttttagaaataaagtttcaaagataaattcgttagggttatcctttctattttaatatgacrtcttccttttggaaataggtttctctcttttgtctgggcttctttctgttctttttgtttttaattaaaatgtgtacaagcatagcttattaaattttataggggagtctactaatatatagctctcaggttcttccatattattataagccaagctgttctttgatattgcatattttaggcatgattgaacatggtctcagtgactgttctcagtatagaccccggaaaagtatgtctgaagatggtgggcttcaggaaagtaacccatgtgcagatgattttgtttctgcatccactgctgatgtttcacataccaacttgggaactatcaggaaagtcatggcaggaaaccatggagaagatgctgccatgaagactgaggagcctttgttccaagtggaagacagcagcaaagggcaggaacccaatgataccaatcaatatttgaaacctccatctcgcccatctccagattcttcagaaagtgactgggaaactttggatcc

SEQ ID NO: 77441 - DNA, 946 bp, Homo sapiens
aataatatcgcattgtatatttcaaaataggtagaagaggagactttgaatgttctcaccacaaagaaatgataaagttatgaagtaatgggtatgctatataccctgatttgattattacataatgtgtacatgtatcaaaacatcataatgtaccccatgaatatggacaattatgtttcaatttaaaaaattaaaaatacgtgagttgtgtactgttttattacagtgaatttggctgtttaacatatattttgagagaaagccatgaatacaaatctgcctttatggattttatgtgtgagacaagcctaaaaaaagtgattcaaaaaggctaaaaataaataaatgggcaaaaatgtacaaggcaaatgcaaataataagaaagcagggtgtgtggtcctgatmgcaaacaatacagaattcaggccccaaggcattaaatgagacaaataagaactttgtgtaatgctaaaaactaaatttaccatgaatagttttaaatatctatgtaccaaataacatggccaccaacattataaatcagaaaatacaggaaatatagccaacaatatactgaaaacaggtgactcatacctctagtttctgacagatcccccaaattcaagacagatcaagttggggaaaaataaatcaagatgaatcaaactgtaaggctggttttatcttatattcaaacttttcaccatgacactagtgataatattttttctcctcatacatgtagaatcttcacaaaagtttgccatatggtagttcggcaacaccacgataatttcaaaaaaatgcaagctttttcttctaccagaattttaaaaaatctctttaaaaataatttatttgttgaataactcaaaggcccaagggaaaatacaaaccaaaattacaaaatttcaataattaattatcaataatcaataatga

SEQ ID NO: 77442 - DNA, 946 bp, Homo sapiens
aataatatcgcattgtatatttcaaaataggtagaagaggagactttgaatgttctcaccacaaagaaatgataaagttatgaagtaatgggtatgctatataccctgatttgattattacataatgtgtacatgtatcaaaacatcataatgtaccccatgaatatggacaattatgtttcaatttaaaaaattaaaaatacgtgagttgtgtactgttttattacagtgaatttggctgtttaacatatattttgagagaaagccatgaatacaaatctgcctttatggattttatgtgtgagacaagcctaaaaaaagtgattcaaaaaggctaaaaataaataaatgggcaaaaatgtacaaggcaaatgcaaataataagaaagcagggtgtgtggtcctgatagcaaacaatacagaattcaggccccaaggcattaaatgagacaaataagaactttgtgtaatgctaaaaactaaatttaccatgaatagttttaaatatctatgtaccaaataacatggccaccamcattataaatcagaaaatacaggaaatatagccaacaatatactgaaaacaggtgactcatacctctagtttctgacagatcccccaaattcaagacagatcaagttggggaaaaataaatcaagatgaatcaaactgtaaggctggttttatcttatattcaaacttttcaccatgacactagtgataatattttttctcctcatacatgtagaatcttcacaaaagtttgccatatggtagttcggcaacaccacgataatttcaaaaaaatgcaagctttttcttctaccagaattttaaaaaatctctttaaaaataatttatttgttgaataactcaaaggcccaagggaaaatacaaaccaaaattacaaaatttcaataattaattatcaataatcaataatga

SEQ ID NO: 77443 - DNA, 990 bp, Homo sapiens
ccattaaaccttaccccaggctggcctgtcttattcatgatggaaaactccacattgagcatacagcctaacctagggcaggcaatcattagatgtttgctcaatgaatttgctccaactctttgctcacaactgcctgatgataatttggctccccacatagttctgactacagggagagaatgacctagtctggtggatttgagaatgctggtcctcatgccagcaataagactcattgaagtagacaggtttagcatttgagtttccttactcgaaggttgttcccaaaggaagggtctgtgtgtgctgctgkatcaagtttctgagcccaaagggctggcagcaagtctctgggctatggtaactttaccaggataatgatgatagtggtagcgatgggaccaaccttggccatgaacagagcatcttgtgcgtactatcagacattgtactgtatgttttatacacttgagctcatttaattcccataataatccaataaattaggcattataagtattcacattttgtaaatgaggatactgagactcagaaagctttattaacttacccaaagacccatattcagagtctggattcagatccagatttgtctgactctaaagtctaatttttttaattgtaaaaaaaaaaatactacctttggagagatgaacccttatccttctctttgacacactcctctgcttcagcagtgtgctctcggccatcccagtccatcttcaatatgactattcatcaatgcgccactactgtacaagtcttcacataaaattacataggataccaatgcacccttaattagaagtgcacaaagtcaagccctgttgcaaggaacagcatcaccatctaccctatgccatcagtaccattagcttcacaagccaaaaatgggggcctctttaacgttttcctctccctcaccacgcctgccacaacccgtccaatcatgtacattttcctcag

SEQ ID NO: 77444 - DNA, 990 bp, Homo sapiens
ccattaaaccttaccccaggctggcctgtcttattcatgatggaaaactccacattgagcatacagcctaacctagggcaggcaatcattagatgtttgctcaatgaatttgctccaactctttgctcacaactgcctgatgataatttggctccccacatagttctgactacagggagagaatgacctagtctggtggatttgagaatgctggtcctcatgccagcaataagactcattgaagtagacaggtttagcatttgagtttccttactcgaaggttgttcccaaaggaagggtctgtgtgtgctgctgtatcaagtttctgagcccaaagggctggcagcaagtctctgggctatggtaactttaccaggataatgatgatagtggtagcgatgggaccaaccttggccatgaacagagcatcttgtgcgtactatcagacattgtactgtatgttttatacacttgagctcatttaattcccataataatccaataaattaggcattataagtattcacattttgtaaatgaggatactgagactcagaaagctttattaacttacccaaagamccatattcagagtctggattcagatccagatttgtctgactctaaagtctaatttttttaattgtaaaaaaaaaaatactacctttggagagatgaacccttatccttctctttgacacactcctctgcttcagcagtgtgctctcggccatcccagtccatcttcaatatgactattcatcaatgcgccactactgtacaagtcttcacataaaattacataggataccaatgcacccttaattagaagtgcacaaagtcaagccctgttgcaaggaacagcatcaccatctaccctatgccatcagtaccattagcttcacaagccaaaaatgggggcctctttaacgttttcctctccctcaccacgcctgccacaacccgtccaatcatgtacattttcctcag

SEQ ID NO: 77445 - DNA, 968 bp, Homo sapiens
tcctgttagtctactttttgttcctttgtaagttatttattttttctgtctgtcttcctccctccctcccttccttccttccttccttccttccttccttccttccttccttccttctttccttccttcctttcttccctccttcctycctccctccctccctccctccctccatctctttctctctttctttctttctttctttagagacagagtgttgcttggtggcccaggctggagtgcagtggtgcaaatctcggctcactgcaacctctgccttctgggttcaagagattctcttgcctcagcctcccaagtagctgggattacaggcatgtgccatcatgcctgactaatttttgtatttagtacagatggggtttcatcatgttggccaggctggtcttgaactcctgacctcaggcgatccacctgccttggcctcccaaagtgctgggattacagatgtgagccactgtgcttggcctctggttgcttttgaagtgttttctttgtctccattttcaactgcaatgtttcaagttgtattttcttttatatatgctgctccagggtgttttcttcaatttaagaattcatatcttttatcaatttagaaaaattctcagtcattcctaaaaatactcagtcattactaaacacctctctttaataatttaaaacatgttttacagtcttttaaagatctgctatatcaaattatgatactcctcttgtttacctactgactttttttgagagtagattatttccttttatggcttgtaatttttgtgaacctatctttaaaagagattttaaaagatttttgatataagctgtgcaaacctaggatatggatgtgtttatgtttgtgtctggcagacctcccaaggtaataccaatctaaaaccggtttttaaggtaattttactgcttggagatttcatccaatgtggaaactataa

SEQ ID NO: 77446 - DNA, 645 bp, Homo sapiens
ccactccacattgtccctgagaaaatcaaacgggcagcttaggggcctcacgtcctggctgcgggcagggtgagtcgctggcctaggagtttctctccccttggagagtgcctcgggtagggcagcttgactcgtggccggcggtcaggggcttttcggagtgctccgaggcggcgggacagagggtcagcgacaggccgggcgaaggggcagagtgattaccaggcattgtggtggaagacgcgcgccggatctctcaggaaccggcttccgaactgctgcctcttatcggcgaggactgcaggtgcaccttcagggtaggagccggccatgacaccggagccggaaacactttactttccgtaacgtgagaacttcctgcggaccacgccctctttcagaagacgcggagtctgggcgggaaaaagggtggcgggacagggcggcactggagtctggtccgggtggcgctcgggagctgtcgtttggggctgtcccagggttggcgaagggctctctaggagaggggaccaggcagggggaaattctccccggaggagtcgtttctcattgatgaggtgctgatggacgtgcaggttaggcagaaagygggagacattccacttgagacccagttcaatgctg

SEQ ID NO: 77447 - DNA, 748 bp, Homo sapiens
ccaccaaagtgcaacacacccaactccaactggagtgtgacctacctcagagggttcctctaggctagatgctgctgtccatccccacaggtagagacagttcctggaagatggagggaggsagcatggagacaggtaaagaacactgagagagagctctgtaaggaccagaccccagcgtgctgcctagcaacaaaagcaaacccttcatgaccccagaacactacctcaattctgcagctgcctcgggctgcaacttggaaactccaactctacccacgaggtgaggactaaagcgtctaacttcatctagcctatgaccaaaggagagggagcacttgggttctatatcagctgcacataacagaaaacctgactaacagtggcttaaccacaaatgtatttattcatctcacctgacaaaatgtctagagataggtagctccaaggttgtgtaacctccctgcaattgtattggccttcatctcagggtcacaaaatggctgccaaagctccagccatgacttcctcacaccatagtaatccaagtaggaaagaagaggactggtgggaaaggaccttctggtaatacaaacctctcttattacggaagaaaattggaagtcactcagcaaacatccccccttgtatctcacgggccagaaccaggtcatatgcccagttccctaaacaaatcactggcaaagagaaataggatactgtaattaccttaatcctgatttcttac

SEQ ID NO: 77448 - DNA, 1642 bp, Homo sapiens
ggtttttgtctttggctctgtttatatgctggattacatttattgatttgcgtatattgaaccagccttgcatcccagggatgaagcccacttgatcatggtggataagctttttgatgtgctgctggattcggtttgccagtattttattgaggatttttgcatcaatgttcatcaaggatattggtctaaaattctcttttttggttgtgtctctgcccggctttggtatcagaatgatgctggcctcataaaatgagttagggaggattccctctttttctattgattggaatagtttcagaaggaatggtaccagttcctccttgtacctctggtagaattcggctgtgaatccatctggtcctggactctttttggttggtaaactattgattattgccacaatttcagagcctgttattggtcgattcagagattcaacttcttcctggtttagtcttgggagagtgtatgtgtcgaggaatgtatccatttcttctagattttctagtttatttgcgtagaggtgtttgtagtattctctgatggtagtttgtatttctgtgggatcggtggtgatatcccctttatcattttttattgtgtctatttgattcttctctctttttttctttattttgactaatatatttttaagtctttttagtctacaggtattgcctgtagtttttgttttttttttttttctagtttgttagattctggatccaactatggtgcacagatggcatttgaccaacatatttttaaatctttttagtctacaggtattgcctccattcttttttattttccttgcaatttatttgagtgtattgtctttgagattgttttaaatttcttgcatgagaggaactggagcttggaggagtttatgaaatgatatagaagaaggtatttttctctttttcatatttgtcttattttagaaatatccatttgggagctgaaatgaaaacatccacttcctyactcccagtgtacccaactgaatatcatgacatcaatacaatctcctcaggtccatggttagataactattgtcttcttgaaaatcaacccaggatcccaaaggaccaaaatcactgagagaaggccccagtccagggagcaacagacaacaacaggagaacttttggcatattcattccgtttgcatttgcctgttttctttctcctctatgacttccaagatccctcccaaagcgtgattctatgattcttgtagagtcttaggacatctaaaacccccagaaaaaacttaactgccaaattatttcaggagaataaaatacaccagatgccaggccaactccttgagctttgatgaatatagatatttggccagtagtgataaatgtggagaaacctctttttcccttcatcaatcacaattgttggaatgctattatctagttgacacacagagatctctgcagttttctaactttaaaagtttgggccaggtgcagtagctcatgcctgtaatcttggtacttcaggaagtcaaagcaagagaatcacttgaggccagaagtttgagaccagtctgagcaacatagtgggaccctgtctcacacaaaaaaattttttaatattaactgagcatggtgatgca

SEQ ID NO: 77449 - DNA, 1642 bp, Homo sapiens
ggtttttgtctttggctctgtttatatgctggattacatttattgatttgcgtatattgaaccagccttgcatcccagggatgaagcccacttgatcatggtggataagctttttgatgtgctgctggattcggtttgccagtattttattgaggatttttgcatcaatgttcatcaaggatattggtctaaaattctcttttttggttgtgtctctgcccggctttggtatcagaatgatgctggcctcataaaatgagttagggaggattccctctttttctattgattggaatagtttcagaaggaatggtaccagttcctccttgtacctctggtagaattcggctgtgaatccatctggtcctggactctttttggttggtaaactattgattattgccacaatttcagagcctgttattggtcgattcagagattcaacttcttcctggtttagtcttgggagagtgtatgtgtcgaggaatgtatccatttcttctagattttctagtttatttgcgtagaggtgtttgtagtattctctgatggtagtttgtatttctgtgggatcggtggtgatatcccctttatcattttttattgtgtctatttgattcttctctctttttttctttattttgactaatatatttttaagtctttttagtctacaggtattgcctgtagtttttgttttttttttttttctagtttgttagattctggatccaactatggtgcacagatggcatttgaccaacatatttttaaatctttttagtctacaggtattgcctccattcttttttattttccttgcaatttatttgagtgtattgtctttgagattgttttaaatttcttgcatgagaggaactggagcttggaggagtttatgaaatgatatagaagaaggtatttttctctttttcatatttgtcttattttagaaatatccatttgggagctgaaatgaaaacatccacttcctcactcccagtgtacccaactgaatatcatgacatcaatacaatctcctcaggtccatsgttagataactattgtcttcttgaaaatcaacccaggatcccaaaggaccaaaatcactgagagaaggccccagtccagggagcaacagacaacaacaggagaacttttggcatattcattccgtttgcatttgcctgttttctttctcctctatgacttccaagatccctcccaaagcgtgattctatgattcttgtagagtcttaggacatctaaaacccccagaaaaaacttaactgccaaattatttcaggagaataaaatacaccagatgccaggccaactccttgagctttgatgaatatagatatttggccagtagtgataaatgtggagaaacctctttttcccttcatcaatcacaattgttggaatgctattatctagttgacacacagagatctctgcagttttctaactttaaaagtttgggccaggtgcagtagctcatgcctgtaatcttggtacttcaggaagtcaaagcaagagaatcacttgaggccagaagtttgagaccagtctgagcaacatagtgggaccctgtctcacacaaaaaaattttttaatattaactgagcatggtgatgca

SEQ ID NO: 77450 - DNA, 1642 bp, Homo sapiens
ggtttttgtctttggctctgtttatatgctggattacatttattgatttgcgtatattgaaccagccttgcatcccagggatgaagcccacttgatcatggtggataagctttttgatgtgctgctggattcggtttgccagtattttattgaggatttttgcatcaatgttcatcaaggatattggtctaaaattctcttttttggttgtgtctctgcccggctttggtatcagaatgatgctggcctcataaaatgagttagggaggattccctctttttctattgattggaatagtttcagaaggaatggtaccagttcctccttgtacctctggtagaattcggctgtgaatccatctggtcctggactctttttggttggtaaactattgattattgccacaatttcagagcctgttattggtcgattcagagattcaacttcttcctggtttagtcttgggagagtgtatgtgtcgaggaatgtatccatttcttctagattttctagtttatttgcgtagaggtgtttgtagtattctctgatggtagtttgtatttctgtgggatcggtggtgatatcccctttatcattttttattgtgtctatttgattcttctctctttttttctttattttgactaatatatttttaagtctttttagtctacaggtattgcctgtagtttttgttttttttttttttctagtttgttagattctggatccaactatggtgcacagatggcatttgaccaacatatttttaaatctttttagtctacaggtattgcctccattcttttttattttccttgcaatttatttgagtgtattgtctttgagattgttttaaatttcttgcatgagaggaactggagcttggaggagtttatgaaatgatatagaagaaggtatttttctctttttcatatttgtcttattttagaaatatccatttgggagctgaaatgaaaacatccacttcctcactcccagtgtacccaactgaatatcatgacatcaatacaatctcctcaggtccatggttagataactattgtcttcttgaaaatcaacccaggatcccaaaggaccaaaatcactgagagaaggccccagtccagggagcaacagacaacaacaggagaacttttggcatattcattccgtttgcatttgcctgttttctttctcctctatgacttccaagatccctcccaaagcgtgattctatgattcttgtagrgtcttaggacatctaaaacccccagaaaaaacttaactgccaaattatttcaggagaataaaatacaccagatgccaggccaactccttgagctttgatgaatatagatatttggccagtagtgataaatgtggagaaacctctttttcccttcatcaatcacaattgttggaatgctattatctagttgacacacagagatctctgcagttttctaactttaaaagtttgggccaggtgcagtagctcatgcctgtaatcttggtacttcaggaagtcaaagcaagagaatcacttgaggccagaagtttgagaccagtctgagcaacatagtgggaccctgtctcacacaaaaaaattttttaatattaactgagcatggtgatgca

SEQ ID NO: 77451 - DNA, 1073 bp, Homo sapiens
ctgaaagctggctacagaattcctcttgttcagcaaaatatattgatgtttacaccaaaacacctccataatgcaaaaaaaaaaaaaaaaaattggaatccagaaaaatccaattgtataaaatgctgagcaaggttaatgaaaagcaatatttttcagaagggtttccaattattgtgtaatgcatatggttttgggactgtgggctgctccttgccactgtttggtgtttcttggctgagacaaggaggcagggagatacattctccagtccaaaccctgcatggtatggatgtgacctggatggaaaatggaaatgaagagcaaggattgcacagggtttgggccctgcatctgaccagctgtataggcagctctgtggcctcccagccctggaagatagacagcgtcctggtgagactcagggatgctttacattaaactcagaaacttcccaacgatagcaagggagtcacttcctcaccccaccactcagccccatcgcacaagtgactggaagttaaaaaacaaaaacaggccgggcgcggtggctcatgcctgtaatccaagcactttgggaggccaaggtgggcgaatcacgaggtcaggagctcgagaccagcctggccaacatggtgaaaccctgcctctactaaaaatgcaaaaaattatcggggtgtagtggtgggcgcctataatcccagmcacttgggaggctgaggcaagagaatcacttgaacccgggaagcagaggttgcagtgagccgagatcatgccgctgcagtccagcctgggtgacagagcaagactcagtcccaaaaaataaaaccacctggacagagagaggaaaaagttgtcaattgtgttatatccaaattttatcatttctgaatttcagctagacagagggaagaacagcctccaatcaaaacactgcatgggagataacttggatgagaagaagaagcatgagccagtattgcacaggcctctttgtcatgtttgccttcccccatgatcctcttcctgcaatgccctccttcatatcagccatgggaacaactgataaggat

SEQ ID NO: 77452 - DNA, 1394 bp, Homo sapiens
gttctgaccatgtctcttgttcacagaattttagcccattagagcaggaagggcccacagaaaccatctaacccaacaacctcaggaaaaaattaagcccgaaagagaaatgacttgttgctcaaagtcctacagttggctaaaaacacaaaagttctttgaggaaaagtggaagaaactcaaggaaaaaagaaatccatagaaagaacccaaagtagtcactgggagttgtccatggcctaggggctctaggttacattatgaccaccaggcaccatccctcattccaagctacctgctcctctggccccctaggaaccactctgtagccagttccagccattcagtcacttactgccccagggtgaatccgatgaacttgttcctgctcatctccaagaagtgctcaatgtccttctgtctgagaggatggtggaaagaccaatcccagagaagggaagaaaagcaaactttgagagagaaaaactttccgggctcctatccctccaatcagaggactggagcagtggaaaaaggcagcaatcaacagaaggaatttcaaacccaggagttctgactgccagaccaacttaacgagccttgaatacatagactaccccatcttgggcctttggagactgaaaccccgaagcataggggtccctgatgctatcaaacctacctgacctttggggcccagggcaggcccttgggaaaagccacccgctcagcagagaggggtgcctgtgagggtggaggtggcaccagagggtcctgctctagcaggtctagctctccatccaaggttcgttctccatcaccagcagactcctcttcctcctctgtggcgggctcctcagtcttgaagagatccctttcattgtagatgtccaggctgtcctgcttagtgaggagttgctggaggggaaagaagggagggtaggcatgcagagatctcactctgggcatccttgtctgaggccaccccatatccacaggcctccacatttcagggaacatggaatctgaacacagcccttgcgaaaacatccaattccccaccttaacctactgtccccacccggcccaataacaggacaagaagttctcaggtaaccctgccattagccagggaacatagcatagataatcccaaagtcacaattacttagctttcagaaagcagtgatgcctttttttgccagcactttcyttcctaattatgctctgcttaggtgaacattcaattagtttgccttctgtgagcatacaccagctggctgactgaggaagaggaggacagaagcttgctgctaggcagagggaagcaagtttggaattttaaatcttgtgacaaagaaaaaaagattggacagaaataggccaaaaagtta

SEQ ID NO: 77453 - DNA, 741 bp, Homo sapiens
gaccacaggcaggcaaggctgtgttgtgcagaaaacaagcctctccagagggaagagaggcacctcacatgctgaggcctttcccagcatcaccaatcaatactcaccatcttccctggggaagagggagggagtgggcaagtgggctgagagaaaggtcacagttactctttccaacacttttggaaggatggaagttgctattaatagcccagagaagagaaagggaagagacagaggatcttcctcctcctcctctattagttccttttttttttttttttggttgagacagagtcttcctctgtcacccaggctggagtgcaatggtgcaatcttggctcactgcaaccaccccatcccaggttcaagcgattctcgtgcctcagcctcccacrtagctgggattataggtgcctgccaccatgccaggctaatttttgtatttttagtagagatgaggtttcgccatgttggctaggctggtcttgaactcctggtctcaagcaatctgcccaccttggcctcccaaaagtactgggattacaggcatgagccactgcacccagccctctattagttcctttttattccctctggtattcacctcctggagctctgtctacctgtaccagcctgcaagggtactctctagccctattatcctgggattttccctcattgtcaccttgtgaatttcctcacctccctcctgtgctgcatcccctgttccctacgttg

SEQ ID NO: 77454 - DNA, 628 bp, Homo sapiens
ggatccttgagcccagagaggtcgaggctgcagtgaacaatgattgcaccactgccctccagcctaggtaatagagtgagaatctgtctcacaaacaaacacatctaatttaacatggggactccagagacagaggaaagagtaatggatcatttccaggtttctggcttgagcacttgggtggctagtgttggcactctcctagaaaacactggagaaaaagacattcaatttttggatatgttgaattttgaggttaatagaatcttgaaaattaaagcttcctgattttgttaatccgttttctgacaccctttagcaattcttcaatgcaatgcttttcacattattatrtgcataagaatcaccaggggtgtggagatggggatgtgaaaatgcaggttcctaggcaaacaagccaagattctggataccaactgggtcccaggactcaaaacaatcagcctgagtaattctgatggagggagtctcctgacgacactaaaaaaacaacaaaaacgacccctctgccgggcatggtgtcctgtaataccagcactttgggaggctgagtcgggaggatcgcttgggcccaggagttcgagaccagcctaggcaacatagggtg

SEQ ID NO: 77455 - DNA, 658 bp, Homo sapiens
ccaaagtttctgcagtgtatttggctgtgcccaccagaacttgaagttgtttaaaaatcttaatacttggggggcttccagtgatatctgctccaaccagttggaggagctgttgcctgctctccattcttcttaagcattagattagaatatattaattgcttattttagagctggtrtcaatcgtgctgatttctttatgtggtcagagcaaaattcacatttttttaagtgttcagagactgcgtattgagagacgcataaggagaaaggtagtgtgagtgagcctgtcagcttgggcagtgttgggcagagcttttgtcccgggacatcatctgtgctcacagtgatcctttttcccattccatctcagcctagccttttaaaaaattatttttcctttgggcttgaccagtaagtaattgggaaaggggggtgctggagtcttggagatgctgtttgtgtgtgtgtgtgtgtttgattcattagtatcccgactccctaaaattgtatttgacagttcttgacaggttaccccgtaagacagtgaaaatatgactagttctctccgtgcatctgagtgtaatttccttattttatgagtccgaaagcagacataattatcacatgcaatgtagaatatttattcttaacttgg

SEQ ID NO: 77456 - DNA, 1447 bp, Homo sapiens
agttaatttgttcagggattggcatctacatcaagctcagccaataaggctctttccaaagatttttggacttggaaccagagagaccttgaattcagtctctcaagctgtgagacataaatctcaggagctgtcagcagccaagtttcttgctatgtcacaaaaatcagtctgagtgggaaagagtattgttgatatgcaaagaggagcaaacatgagtgacaagggagagccctgagcactcacggttctatttctactatggcccagctgcatctttggatattccgttgagttggctaagaagagttgaccctttcttagatgctaagaaccaatcagttccatgttttctttaagctgatttgaattgtgtttctgtcactagcaacccaaaagtcctcagtgatacaaagataaattttaaactcttagggatatattgtggaggctccagcactggttcttcctaagacattgttgggaaaccatggtggactttatggtatctctttaacatccagcatactcttccaccattggagaatagctatgctgtgtgggcagttttctgtagctccagggaagggcctggattgttgaaggcaatgataattatcctatctcctttgcagtgattgtcagaaatggccatgtgactcaatttgaggaagtctgccaaggaattctgggaaaagtttattcactcttaagagagacccacaggaggatatgttcttttcttattcagggctatgttgtatatgttgagaggctggaaactactgtagctatctctttaccagtctgaggataaaacaaagacatggagaaggtcaaagaaatggagttagaaccattctgtctggtcttccagtttagtgggtcaatgcattttcttataatttagctaatttggattgggtgtttttgttctgtttcgttttgctgctgaaagcatgctgaccaacacaaaactctcagccaatggatcacaggaataatctctgttcatatcaagtctttcatatccagaatctgtttcctctgttccatttgtcctatgtcattctcattctactgggattaaccccagtcgatgkttgcctggggtggttgtggggggaggggcgggtgttaggccatttttgtgttcctataaagaaatgcaggagactgggtaatttttaaagaaaagaggttttattttggttcatggttctgcaggctgtacatgaagcatagtgccagcatctgcttctggtgagggcctcaggaagcttacagtcacggtagaaggcaaaaagggagccagcacatcacatggtgagagaagagagcaaggtgggaggtgccacactcttttaaacagccacatcttgtgtgaaccaccagagcaagaactcactcaccacaaaggggttggcactaagccattaataaggga

SEQ ID NO: 77457 - DNA, 1447 bp, Homo sapiens
agttaatttgttcagggattggcatctacatcaagctcagccaataaggctctttccaaagatttttggacttggaaccagagagaccttgaattcagtctctcaagctgtgagacataaatctcaggagctgtcagcagccaagtttcttgctatgtcacaaaaatcagtctgagtgggaaagagtattgttgatatgcaaagaggagcaaacatgagtgacaagggagagccctgagcactcacggttctatttctactatggcccagctgcatctttggatattccgttgagttggctaagaagagttgaccctttcttagatgctaagaaccaatcagttccatgttttctttaagctgatttgaattgtgtttctgtcactagcaacccaaaagtcctcagtgatacaaagataaattttaaactcttagggatatattgtggaggctccagcactggttcttcctaagacattgttgggaaaccatggtggactttatggtatctctttaacatccagcatactcttccaccattggagaatagctatgctgtgtgggcagttttctgtagctccagggaagggcctggattgttgaaggcaatgataattatcctatctcctttgcagtgattgtcagaaatggccatgtgactcaatttgaggaagtctgccaaggaattctgggaaaagtttattcactcttaagagagacccacaggaggatatgttcttttcttattcagggctatgttgtatatgttgagaggctggaaactactgtagctatctctttaccagtctgaggataaaacaaagacatggagaaggtcaaagaaatggagttagaaccattctgtctggtcttccagtttagtgggtcaatgcattttcttataatttagctaatttggattgggtgtttttgttctgtttcgttttgctgctgaaagcatgctgaccaacacaaaactctcagccaatggatcacaggaataatctctgttcatatcaagtctttcatatccagaatctgtttcctctgttccatttgtcctatgtcattctcattctactgggattaaccccagtcgatgtttgcctggggtggttgtggggggaggggcgggtgttaggccatttttgtgttcctataaagaaatgcaggagactgggtaatttttaaagaaaagaggttttattttggttcatggttctgcaggctgtacatgaagcatagtgccagcatctgcttctggtgarggcctcaggaagcttacagtcacggtagaaggcaaaaagggagccagcacatcacatggtgagagaagagagcaaggtgggaggtgccacactcttttaaacagccacatcttgtgtgaaccaccagagcaagaactcactcaccacaaaggggttggcactaagccattaataaggga

SEQ ID NO: 77458 - DNA, 1447 bp, Homo sapiens
agttaatttgttcagggattggcatctacatcaagctcagccaataaggctctttccaaagatttttggacttggaaccagagagaccttgaattcagtctctcaagctgtgagacataaatctcaggagctgtcagcagccaagtttcttgctatgtcacaaaaatcagtctgagtgggaaagagtattgttgatatgcaaagaggagcaaacatgagtgacaagggagagccctgagcactcacggttctatttctactatggcccagctgcatctttggatattccgttgagttggctaagaagagttgaccctttcttagatgctaagaaccaatcagttccatgttttctttaagctgatttgaattgtgtttctgtcactagcaacccaaaagtcctcagtgatacaaagataaattttaaactcttagggatatattgtggaggctccagcactggttcttcctaagacattgttgggaaaccatggtggactttatggtatctctttaacatccagcatactcttccaccattggagaatagctatgctgtgtgggcagttttctgtagctccagggaagggcctggattgttgaaggcaatgataattatcctatctcctttgcagtgattgtcagaaatggccatgtgactcaatttgaggaagtctgccaaggaattctgggaaaagtttattcactcttaagagagacccacaggaggatatgttcttttcttattcagggctatgttgtatatgttgagaggctggaaactactgtagctatctctttaccagtctgaggataaaacaaagacatggagaaggtcaaagaaatggagttagaaccattctgtctggtcttccagtttagtgggtcaatgcattttcttataatttagctaatttggattgggtgtttttgttctgtttcgttttgctgctgaaagcatgctgaccaacacaaaactctcagccaatggatcacaggaataatctctgttcatatcaagtctttcatatccagaatctgtttcctctgttccatttgtcctatgtcattctcattctactgggattaaccccagtcgatgtttgcctggggtggttgtggggggaggggcgggtgttaggccatttttgtgttcctataaagaaatgcaggagactgggtaatttttaaagaaaagaggttttattttggttcatggttctgcaggctgtacatgaagcatagtgccagcatctgcttctggtgagggcctcaggaagcttacagtcacggtagaaggcaaaaagggagccagcacatcacatggtgagagaagagagcaaggtgggaggtgccacwctcttttaaacagccacatcttgtgtgaaccaccagagcaagaactcactcaccacaaaggggttggcactaagccattaataaggga

SEQ ID NO: 77459 - DNA, 1447 bp, Homo sapiens
agttaatttgttcagggattggcatctacatcaagctcagccaataaggctctttccaaagatttttggacttggaaccagagagaccttgaattcagtctctcaagctgtgagacataaatctcaggagctgtcagcagccaagtttcttgctatgtcacaaaaatcagtctgagtgggaaagagtattgttgatatgcaaagaggagcaaacatgagtgacaagggagagccctgagcactcacggttctatttctactatggcccagctgcatctttggatattccgttgagttggctaagaagagttgaccctttcttagatgctaagaaccaatcagttccatgttttctttaagctgatttgaattgtgtttctgtcactagcaacccaaaagtcctcagtgatacaaagataaattttaaactcttagggatatattgtggaggctccagcactggttcttcctaagacattgttgggaaaccatggtggactttatggtatctctttaacatccagcatactcttccaccattggagaatagctatgctgtgtgggcagttttctgtagctccagggaagggcctggattgttgaaggcaatgataattatcctatctcctttgcagtgattgtcagaaatggccatgtgactcaatttgaggaagtctgccaaggaattctgggaaaagtttattcactcttaagagagacccacaggaggatatgttcttttcttattcagggctatgttgtatatgttgagaggctggaaactactgtagctatctctttaccagtctgaggataaaacaaagacatggagaaggtcaaagaaatggagttagaaccattctgtctggtcttccagtttagtgggtcaatgcattttcttataatttagctaatttggattgggtgtttttgttctgtttcgttttgctgctgaaagcatgctgaccaacacaaaactctcagccaatggatcacaggaataatctctgttcatatcaagtctttcatatccagaatctgtttcctctgttccatttgtcctatgtcattctcattctactgggattaaccccagtcgatgtttgcctggggtggttgtggggggaggggcgggtgttaggccatttttgtgttcctataaagaaatgcaggagactgggtaatttttaaagaaaagaggttttattttggttcatggttctgcaggctgtacatgaagcatagtgccagcatctgcttctggtgagggcctcaggaagcttacagtcacggtagaaggcaaaaagggagccagcacatcacatggtgagagaagagagcaaggtgggaggtgccacactcttttaaacarccacatcttgtgtgaaccaccagagcaagaactcactcaccacaaaggggttggcactaagccattaataaggga

SEQ ID NO: 77460 - DNA, 2242 bp, Homo sapiens
tctgtctctaacagctttaaatttcccctgcacatggaaaagagatataacactgatgactggacctacgtaaggcttcctctgccaacaacacggtttggttgaacaccctctggcggtgttattttagcacttttcacaaatgctaatgaacactcacttggtcagagcagacaaacacaatctgctggctttgtttgggcattactcacactggctaatgaacagtgactcacttggctctgcagagagcagagctgagcccagtctcaggagtgaaagactagcactgcaggcaagcaacgtccccagaaccaggattagaaatggtgccggaggccagacacggtggctcatgcctgtaatcccaacttctgggaggctgaggcggacggatcatttgaggccaggagtttaagaccagcctggccaacatggtgaaaccccacctctactaaaaatacaaaaaaaaaaaaaaaaaaaaattagccaggcgtggtggtgcatgcttgtagtttcagctacttgggaggcaggaggattgtttgaacctgggaggaggaggttgcagtgagcagagattgcaccactgcacttcagcctgggtgacagaacaagactctgtctcaaaaaaaaaaaaaaaaaaaaaaaagaaaagatatggtgcctgggaagtcgtgatggagccccgacttccccaacttgagattgtagatgataccacagagaagaaatcattcttttataaggcatggcagaagaatgtgaaaagaggcagttagagtctcagtatttcagaagggcatggagaaggggtagaaacaaatcttcagattgcatgccaacactgatgtattggcagggtttgcctggagttctggattgagaaggattctgaggttcggtacggggaatggtcagcagtgcctcctggggtgggtaatagagtgggcaccagcatgaatgctgggtactggctactctggcatttctgtgggctgatgaagtccctctccatagcctctgggctccctgcacccagttctcaagtctgataccttagtggccaggagtcgggtcaggtagatttcagacaccatcttgctcccccggtccccctccttctggtctccgtgctcgtggttcttcactaggtgccacatcttgactccactctccaggtcaggagtgatcataggtgtccgtgagcggaggctgtcggggctgcccgtgtaccggatcatgttttctgccaaggcaaggatcaccccccgacatatgtgaggccacacagccttagcccatcacttaccatgcatcccttgctccggcagaagccaacgactgtctgatcattcctgccattggtcggtgctgtcaccttgccttggtttggtgcattccctgaaactgggatgcctttctcaccacctccaggaaactatctgtggctaattctacccactcagatctcccccttcttcctgtactctgcatcgtgtcaacccttaattattcaatttgtaaaaatataagcctgtacttttttaatgcttttccttgtaagagttctcaagtcacgtctcaggatgtgttctgtgcagccaattaagtacatacttaagagcaggtagcctgtctccctcaataaccgctgatcggatgagtaatcactgggtaacctgctcaccttcgtctgtcctcccctctggcctgcgccaattattcctgtttatttgctgaaattcctgccagtgtttgtgaagtgttgtgaaatgagtactgagcaggaaaaagaaatggcggtcctactgtgtgcaggcactattctctgtattcatctattgattatctagaaygatcctgttcagtcggtagatttttcagtctcttcttctggtaaataaataaataaccaaggctcatagtggtcagatgactagccccaaagcacacagatagggcagaacagggcttcttctggcttctaccccacctccagcaccctctcctcaccactgcagagcctcgcacctggtctgtacctgcactccactgcaaaataacagtggctcttacaaatcatttagcctctgtgcacctgagttataatgtactaatctgcataatagggggaaataataattatttaattcactagattgttatgaacatgatgtgagataatagctatcacacagcctggaagacattcatgaaagttggctttacttcttttgct

SEQ ID NO: 77461 - DNA, 2242 bp, Homo sapiens
tctgtctctaacagctttaaatttcccctgcacatggaaaagagatataacactgatgactggacctacgtaaggcttcctctgccaacaacacggtttggttgaacaccctctggcggtgttattttagcacttttcacaaatgctaatgaacactcacttggtcagagcagacaaacacaatctgctggctttgtttgggcattactcacactggctaatgaacagtgactcacttggctctgcagagagcagagctgagcccagtctcaggagtgaaagactagcactgcaggcaagcaacgtccccagaaccaggattagaaatggtgccggaggccagacacggtggctcatgcctgtaatcccaacttctgggaggctgaggcggacggatcatttgaggccaggagtttaagaccagcctggccaacatggtgaaaccccacctctactaaaaatacaaaaaaaaaaaaaaaaaaaaattagccaggcgtggtggtgcatgcttgtagtttcagctacttgggaggcaggaggattgtttgaacctgggaggaggaggttgcagtgagcagagattgcaccactgcacttcagcctgggtgacagaacaagactctgtctcaaaaaaaaaaaaaaaaaaaaaaaagaaaagatatggtgcctgggaagtcgtgatggagccccgacttccccaacttgagattgtagatgataccacagagaagaaatcattcttttataaggcatggcagaagaatgtgaaaagaggcagttagagtctcagtatttcagaagggcatggagaaggggtagaaacaaatcttcagattgcatgccaacactgatgtattggcagggtttgcctggagttctggattgagaaggattctgaggttcggtacggggaatggtcagcagtgcctcctggggtgggtaatagagtgggcaccagcatgaatgctgggtactggctactctggcatttctgtgggctgatgaagtccctctccatagcctctgggctccctgcacccagttctcaagtctgataccttagtggccaggagtcgggtcaggtagatttcagacaccatcttgctcccccggtccccctccttctggtctccgtgctcgtggttcttcactaggtgccacatcttgactccactctccaggtcaggagtgatcataggtgtccgtgagcggaggctgtcggggctgcccgtgtaccggatcatgttttctgccaaggcaaggatcaccccccgacatatgtgaggccacacagccttagcccatcacttaccatgcatcccttgctccggcagaagccaacgactgtctgatcattcctgccattggtcggtgctgtcaccttgccttggtttggtgcattccctgaaactgggatgcctttctcaccacctccaggaaactatctgtggctaattctacccactcagatctcccccttcttcctgtactctgcatcgtgtcaacccttaattattcaatttgtaaaaatataagcctgtacttttttaatgcttttccttgtaagagttctcaagtcacgtctcaggatgtgttctgtgcagccaattaagtacatacttaagagcaggtagcctgtctccctcaataaccgctgatcggatgagtaatcactgggtaacctgctcaccttcgtctgtcctcccctctggcctgcgccaattattcctgtttatttgctgaaattcctgccagtgtttgtgaagtgttgtgaaatgagtactgagcaggaaaaagaaatggcggtcctactgtgtgcaggcactattctctgtattcatctattgattatctagaatgatcctgttcagtcggtagatttttcagtctcttcttctggtaaataaataaataaccaaggctcatagtggtcagatgactagccccraagcacacagatagggcagaacagggcttcttctggcttctaccccacctccagcaccctctcctcaccactgcagagcctcgcacctggtctgtacctgcactccactgcaaaataacagtggctcttacaaatcatttagcctctgtgcacctgagttataatgtactaatctgcataatagggggaaataataattatttaattcactagattgttatgaacatgatgtgagataatagctatcacacagcctggaagacattcatgaaagttggctttacttcttttgct

SEQ ID NO: 77462 - DNA, 455 bp, Homo sapiens
tcatctgtctttaatctttttttttttttttttttgaaaaggagtcttgctctgtcgtccaggctggagtgcagtggtgtgatctcagctcactgcaacctccacctcccggattcaaatgattctcctgcctcagcctcccsagtagctgggattataggtgcccaccaccgcaactggctaatttttttgtatttttagtagagatggggttccactgtgttagccaggatggtctcgatctcctgacctcatgatccacccgcctcagcctcccaaagtgctgggattacaggcatgagccaccacacccgatcatttaatcattttctaactgggatccttttctgtccactttgagggatagtaagaaggcctcttccccatggtgcacaggaacctcccaataacctaaatgctttcaattcctgcagccacgctctccacttttagca

SEQ ID NO: 77463 - DNA, 1018 bp, Homo sapiens
acagcactattcacaatagcaaagacacagaatcaacctcaatgctcatcaatgacagattggataaagaaaaagtacatatacaccatggaacactaaacagtcataaaagaaaatgagatcatgtcttttgcgggaacatggatggagctggaggtcattatccttaggaaactaacgcacgaacagaaaaccaaataccgcatgttctcacttattagtgggagctaaatgatgagaacacatggacacaaagaggagaataacagacacttcagcgtacttgagagtggagggtgggaggagggagagtatcagaaaaaataactactgggtactaggcttagtacctgggtgaccaaataatctgtaaaacaaacctccatgacacgagtttacctatgtaacaaatctgaccgtgtacccgtgaacccaaaagtttttcaaaaagctttgctcttatgcccaactgcccaagtaattctatttttgaaaattagcttatagaaatatgaaatatggaaaaaaacttcacatctctgccctttaataaaacctttatacatactcccacttccagcctgctgtcctctaataatagagagaaactggagacagggacaatagctcattratttttttaaaaatagaggatgttatcatagcacttatcgccacgttgaaactgcctttttaaccgcacacctatgtagacatttactctctgacctatctactttggcccattcctactgtaagacacaaatctatcctaaatacagcaaagccaaaatataacaaaaacatgaagggatgtttccacaaaactattcatcaaacactatttataatagcaaagattgcaaataactcaaatatttgtcaatatgaggttggatgtcacagtttatgcactgaatgaattagtatgcggctataaaaaggaatgaagatctctctctactcctatggagtgacttcttagatatttacatgaaattttgttgaaaaacaatgt

SEQ ID NO: 77464 - DNA, 1337 bp, Homo sapiens
atgaggggacatgtatgaggatacttgtttcaatattgtgtggggttgtgggaacctggtaaacaacatatttgtaaactgctttgtagaaatgggactcaataaactgaatttacacaaacccagataaatccttaatactttgtattgaataaaataatttcaaaatagaatgggttctaaaggtaataacatatcttttacatagaataaaaacagattcatgcatgaagcaataccacatattctacaagggtattgtagaatatgtacaatattctacatattctactgaatataagtcaaatatatatccaataggtatatataaaatagaggagagaaataggagtgagaataaagaatgaaagacaacaaggggatttccatggaccagaaatgatagttttccatgaacagtagagtacaattagttcaccccactgtgctcagaaaataaatatgtgattacctgtggttgcagtgttatggttaggttttacttttttgtacttttctgtattttcaaatgagcatgtattatttttatatttaatgagcaaagcatagttgttccttaagtttttctagtcacataagtataatttacatacattaaaattcacccttttaatgccacagattgatgacttctaacaaacatgaacaagattgcttagatttttaagtgacttgcttcaaccaaattttctatacccaaagatagtgctctttccactacatcaaaatactttggaagatcactcaaaaactttcgttcacttctgtttgtatttcataatacaccacactcttttttgccttgaaaaattaattactataataaatgcctctgtagaactgcatgtgggaggaaatcattagacatgtcctttgttaggtgaaacaatggaattgaaggaaaataattttcagcagtgaaagagcagaggaccaggcaggaaatcaggaaaccataagcctgacattttctttagtgtattttaatgcctagcctttttttctggatagcatttgacctgtcttaaaagtatgcgaaggtaagtcttcatgtatttaaaatcatgccattctagcaggagtgacaatttccaattcatttatgtttgtttttcttttcacttgccatggatagttktgaggctccagggaaatttttggtggagctaggagcagagaaaagcagctagacagacacgtaaaataaaagtaatgttgaagggtaagaaaaatgagctgctcaggtccaactgccagtgcatggttaatctggacacaggaagatggatatgatatgaggtcagccacccagaaga

SEQ ID NO: 77465 - DNA, 721 bp, Homo sapiens
ttggcaactatagagaaatctagtgaggggtttgctataaagagaacataagtttagatgagagattttttcattgtttgtctgttttgcttttaattttttttttctacttttaaaggaaggggatacaaagtgcatggttgggaataacccagcagaaaaaatagtaattacaagatcagggactttgaagaaaaaggaaagagggataggatttagtagaggtgaccttggccttggtgggaagaggctgttcactgtaacaaaagagggtagtgtgggtgcagatgcaggtagcaggcagatttgttggaaaattaatgaaaatttcctccagtggtctctacattttcagtaaaatatgaagcaagctgagaatgaggaaagggaaaatgtgctggaggttagaaaagaggagaggcatagaataaccattttagaaagtgagagagtaaatatactrgaagaatatcgtaggattatcaggcagtattgagtatccattggaagtctgtagtagtaggctcacccaatatggcaagcatcaccattagacccagagaagagcagtagcttgagaccagtcctttagagagcactgttctggccctttctgatatgacctctaatgagacaaagaatctatgagcttgaggggacatggccaccaggagctcttatcctctcctcctctatctagattatgttctgtgtacttggg

SEQ ID NO: 77466 - DNA, 721 bp, Homo sapiens
ttggcaactatagagaaatctagtgaggggtttgctataaagagaacataagtttagatgagagattttttcattgtttgtctgttttgcttttaattttttttttctacttttaaaggaaggggatacaaagtgcatggttgggaataacccagcagaaaaaatagtaattacaagatcagggactttgaagaaaaaggaaagagggataggatttagtagaggtgaccttggccttggtgggaagaggctgttcactgtaacaaaagagggtagtgtgggtgcagatgcaggtagcaggcagatttgttggaaaattaatgaaaatttcctccagtggtctctacattttcagtaaaatatgaagcaagctgagaatgaggaaagggaaaatgtgctggaggttagaaaagaggagaggcatagaataaccattttagaaagtgagagagtaaatatactagaagaatatcgtaggattatcaggcagtattgagtatccattggaagtctgtagtagtaggctcacccaatatggcargcatcaccattagacccagagaagagcagtagcttgagaccagtcctttagagagcactgttctggccctttctgatatgacctctaatgagacaaagaatctatgagcttgaggggacatggccaccaggagctcttatcctctcctcctctatctagattatgttctgtgtacttggg

SEQ ID NO: 77467 - DNA, 717 bp, Homo sapiens
ccagcaagactggggaattattcaaataagccaaatcacatcctctgtgggaacccagggggcaccccaccctcctaatgctacaaagcctgcttcccacagcccctggttgctcactgtgttcctgagagcaagcctgtgtggccccgaatggcgtgcagtgctcttctcccctggactgtgaatatatgtggagctcatctgtccactgtcaatgtcacatgctcaatcgtctcataaccctagggcaggagtcattgcctcaccaacagggtaaatagacagcaatcaaaacatatatagaacatatccatcacttgtcccctaatctataaaacaggaactaaaatataaccccatccaaagtcaaacaaactatcttctaatgtttctgtccaacagatattgcgtccagctccctaaagatgagggcctcaggtgcagcgcaacagccacttcttcacagtgacttagctctcctttcttggaactcttacagcaattatgtctaccactctaacaatacatacattatcttttcagatgtttctagcattattgccactcccgaactgtaatagagcaaagrctatatcttacacttcttttctgtgccccaaaacctgttatacagtttcatgatcatagtagatgctgaataaataaaaataatagctaacatttgttgagtgcttactgaccttcacattgaaagta

SEQ ID NO: 77468 - DNA, 662 bp, Homo sapiens
ttctttccactagacttgtactagttggggaacaatatttagtcaaatattcttttctgggactttaacccttgaggaaatggtacaaggctttaaaaaaaaaatggtgatattccattccttcagaagcagtacccccatctgacttttcctatcttgagaaattttctttagttcttattttcttgactcacccaaaactattggtttctgccaatttcaagaagcagttctcgaatcttcaagtttgttatatcttaaaattttgccaataagtttcctttttgcttaagttaggcaatatttgtttctctgcaatcaaagaaagctaactgatataccaagccaggatctcaacacagggcagcccaaaatccaaagcccatgcattggcccataaattacaccattcattaagagatcatacatttcaagtattaaaatatacagtgcttctcttctctaacctacagttatattaatccatgatcttctgccttctaaaaataaatgtgaaaattatctctcaggcgataatttagaaattcttstaagcgtcatggatttaagacgaaataattgagtcatttgggatattgaattacagagctgatagaaacctatgaggtcatttttacctaactttgtataaataaaaacat

SEQ ID NO: 77469 - DNA, 796 bp, Homo sapiens
ccagatgatgggccattcatttctttgtgatctccatagggtcatctttctctccaataaaaccagccttgggaaagcattcaggatttccttctccctgctaccctcttccttctctgcctctctgccctcctgccagggcccaagcttcattttgttgccactctgtgggccaaagccactacatcagtctccactcacccctatacaggaacgggctccagtcttgtcaatattgatcacatctcacagcataagtatgacgttttattgtaggggaaatcccccctggcaggggtgaggatggaaaagaacaaataggtgaaacagacaaagaacaatgcctgtcataggtgaaacagacaaataacaatgcctatcactttatttagtctcataatatttgtgataatagtgaattatgaaacacagattttacagatgggaaaacttgcactaartgtttgagtcacatgctaatactaacatggaccaacagaatgaggatctccaggatcacattagctgtggacttacaatggggggactaaccttatattttacttaaaatagtactaagcaatacacagagagagtgttaataatgacctttcatatatgtctacaaatgtttgtttacaaagagtttatgaaggcttacttataggggaactaatttaaaataaaacagctatgattatttatattcatatttactctaccccattctgatagggattaaaagaagcctacaaaaatgcatatgaggtagcttatatagcaacataaaaataaa

SEQ ID NO: 77470 - DNA, 1312 bp, Homo sapiens
ttcagcatacatgttttaagcacatctcatgtacctagcattgcccttggccctgcccatatgtatatgaacaaagtcaattctcacccaaccaaaaagtggcctgctcagctttttcctcttcaggttaccgtgcagttcaaataccaacacagaactatttgaacatgaatattttaacctcccaaagtttgtaagcctaccttgaatcatttgtgtgtaaaatagtggtattctaaaaatagagtttcttcagagaaaataattctctttgttctgagtaagtacacagtaaaagaatgagatatttcctagtctatagtctgctttcagctcccttcttaaggaaagtaattgtccttcataaataaattatattattctgatgcaaagcacagtgcatagcaaattatatcctctcatcaaaaaataatattttcatggaagcttatttcatctttttcagaagtttctcatcccccataaaagtctaaatttcaaacaagtgcagagagttacattttagaaaggaattattgttaacaccctcatcctgtttgtttcatacacttgagtttttggaattccttttatatatatcactttgtattctatatcatagaaaattttgaagttaaatgttaaagactcttttaaagaacaattcttaatctaagtgtatgaatctatttaatttgcgtatgctaaaataaatccttcttcatagatctgtcttgttcagcatgtcaatattgaattctccaaagtcaatttgtggaaaatcattgatgatctaaaagtatcatcctagcccttaaagatttgtatcagagatggcataagagaagggatgaataatcgatatgtacatcaaacacctaaaaatattgaatcactatggaatagaatggagtgtaaatattggcttaagtcccctaaactgcataaggaaacctgcaaggaggtttagcataagaaaagtaagcatattgctaaaactgaaggattttatttttaaaattctatgctactctaaggtaattctggctaatgagtctaggcatttaagtttggtctccctctgcaaaagagacatgatattcctcatggctgttttttacttccattgactaaatgtatgcacagcaacatgactgtcatrgtatataattgctctggaagtcaagttttcatttcctgtcagtttatcattttatttattgaatcatttatcttttcattcaacatttcattagtttcttctaactaaagagttgtacttagaaacgctccaagattagtgaaaagtgga

SEQ ID NO: 77471 - DNA, 620 bp, Homo sapiens
tccactttttaaaagtttgttctgtgcttgattgatgattttaattattgtactyaactttttaattaatattgaatttcttttgagttatgatataaagtttaactttattttcatattagtattagtataattaatgatatcgtttggctctgtgtaccattcaaatctcatctcaaattgtaatcctcttatgtcaatgggaggaacctggtgggaggtgactggatgatgggggcggtttcccccatgttattctgatgatagtgagtgagttctcacgagatctgatggttttataaggagccctttccctttcattcagcacttctcctttctgtcaccttgtgaagaaggtgccttgcttccccttcaccttctgccatgactgtaagtttcctgaggtctccccagccatgcagaactgtgagttaaacttctttcctttataaattaaccagtctcagtatcgttacagcagtgtgaaaatggactgatacatagaatttgtaccaagagtggagtactgctagaaagataatctgaaaatgtggaagcaactttggaactgggtaacacgtagaggttggaacagttcggaagacaggaaaatttgggaa

SEQ ID NO: 77472 - DNA, 666 bp, Homo sapiens
atgacgtgtcaatgtgggttcaccagtggcagcaaaggtagcactctggcggtgggagggggtgttgatgatggaggaggctgygcacgtcggggcagagggtgtatgggatatttctctgccttttcctcaattttcctgggaacctaaaactgctttaaaaataaatacagtcttaaaaaataaatgtaagttgaaacctcataatcagaaggtagaaataaatccacactagtctggaatcacattaatcataatgggattaaactcttcagttaaaagacagagaattgggaatgatttttttttaaatcaaccatgtgcttttcctgaggcatacataaattaatagaaagttgaaaattaaagattaaaaattctaaataaatacgaatcaaaaggaagctggttttgtaatatgaatatcagacaaaataaagtttgtggtaacccagctttctgtgacatcaaactatgggctctcactcttggcacacagggccaggcctctatgatcagacatccagggcattgcaggtggggttgtgaactcagatttcacaaccagtttttcatgaggcacccattaggcaaccactctctcttaccccttgccttttggtttctcaccctgcgctatgagacctattttctggtaatgatgca

SEQ ID NO: 77473 - DNA, 666 bp, Homo sapiens
atgacgtgtcaatgtgggttcaccagtggcagcaaaggtagcactctggcggtgggagggggtgttgatgatggaggaggctgcgcacgtcggggcagagggtgtatgggatatttctctgccttttcctcaattttcctgggaacctaaaactgctttaaaaataaatacagtcttaaaaaataaatgtaagttgaaacctcataatcagaaggtagaaataaatccacactagtctggaatcacattaatcataatgggattaaactcttcagttaaaagacagagaattgggaatgatttttttttaaatcaaccatgtgcttttcctgaggcatacataaattaatagaaagttgaaaattaaagattaaaaattctaaataaatacgaatcaaaaggaagctggttttgtaatatgaatatcagacaaaataaagtttgtggtaacccagctttctgtgacatcaaactatgggctctcactcttggcacacagggccaggcctctatgatcagacatccagggcattgcaggtggggttgtgaactcagatttcacaaccagtttttcatgaggcacccattaggcaaccactctctcttaccccttgccttttggtttctcaccstgcgctatgagacctattttctggtaatgatgca

SEQ ID NO: 77474 - DNA, 1160 bp, Homo sapiens
ctttgattgctcatgcagtaatgaggggaaggtcattccaggcagaggaaacagtaggagcaaagtcaaggaggtggggatgcactgtgatttggggaaagtggggtagtccatatagtctggaaaaaaaagttttctaatgtagggagataaatacaagactgaatggccagactaaaatcaaaccgtggaggatcttaaatgttgagttaatacatttgagcaccattcagaaagcaacagggagctagctgttcacagtcttttaacagaggagttaaaacagaggacaccatcgtagacataaatgctatagtaataggtccttattttcattaattttccaactaggcttagagcaaggatttctcagtttaggacggaagctagaaggtgatacttacaaggtagttatggcaagaatcaccagaaacaataagataaggatcctatcaattaatatttgtagtacaacaaaccatctcaaaatttaatggcttaaaacaaccatttacttagctctaggggtcagtactttgagctgggcttagctgggtctggagtcagctgccaagtcagctggatttattgttgaccagggcaccatgggtctcgtccaagtggcttctcatcttccagtaggctaggctggacttactcacttggagaaagcagggattctaggagagtgagttgtggtgtgcaaagtggcttcttgaaatccaggcttgagactggcatgtcataactcctgccacttgctgtttgtcaaagcaactcacggggtcaacccacatttaaggggtagaggaagagactaatttcttggcaagtgaamctgcaaagtcacattgcacatctaccataaagaaagagttctaatatgtagccattttttgtaatctacaacatgactattgggatttaacaaatataaggacaccctgtatagttacatccattcctggttacatattcaagcaaatagcaatagtgaatcccaacagaccataaacatggggcattcagaaatcctaatgtgagtctattgcagtaagttctaaagaggagtaaagggcttatggctcactggccagatgtaaccaaatgtgtttgtgacttcttactcaggacaaaaaagcaaaatttaatgggctatg

SEQ ID NO: 77475 - DNA, 1111 bp, Homo sapiens
ctcaaaatgtagcaaatcccttagccctttttcagagcaaacatttagaaattaaaaacttatgggaaatacaggtcaaatgcctttcttcttttctaactaggctttgtattatttctgcgagagcttatttaacctccaatcttaaacacataacctgagtagactctactaaattcctttattcataagttgctgagcttcctacccattcatagtttaaccgttagtagacagatactgagcttcctacccattcatagtctaaccattagcagacagacactattagcttctccagattaatcctacctctgcttgctctgggtctttctaagagaagattttctcatcacatggttcctctgttgtccaactaggcctacattttccttggctttcttctctctattctaccaatgggaactattaagagaaagtgtgtgctttgtcttctaagaagagttcatgactccttttacacctcctgtctctccctgacttgaataagaatcatgaaaataatagttattcaactataaggttaaattgtggtatggttttggtatatgtgaaaaaaagtaaaatctgaacatgcacgaggctgcatgctttcttcctctttccctctctttttcctctgttcctccattcttccctttcctcttctgsctttccctcttctgcctcctcttttcttgaacttttgtcttattttgccttgacattggaagtgcttttaataaggggtctcagtcttgctcccactagggataaggattcttcccttccactttcatctttttagaaaacaagaaggattctggagggtttgtgggcatgccagataacactgtttttgtttgtttgttttattttgttgtgttttgtcttgagcccaacttctacaagcaaaagaagttgtgtggattcatatagcccagactattaattaaaacctcctctatcagaagaggatacaaggaaatagctaagagaatggacactggactcaagctaccagattcagtcctagctcactagctctatgtcctggattaaagtgaataacctctttgttttttccatttataaccgtaaaatggggatg

SEQ ID NO: 77476 - DNA, 1267 bp, Homo sapiens
tgtttcaccagctatttgcttctgtaagtagcttctgtcatgttttacatcagaaccgaatattcttaaaccatctggcctgcacacagtacatggagacactgggaaaggctgctgcaggtgtttgacccagacttcatcttctgacatattcttgcctctccttccagtcaccactcttctggatttcctgctacaacaacagaataccacagacgcggtaatttacaatgaaaagaagtttacttggctcactcatctggaggcttccatcacatccaagaccaaggggcacatctggtgagggccttcttgctttgttgtaacatggcagaaggcatcacatgggggagagagatgtkgggggagagagatggggagaaagagagaggaaatcaggccaaacttgcccttttatcaggagcctcttgataccttccttctggatacccaggcctctgctggtggccatgaccgaggacctcactccagcatcaggcagggactactcctttcccctttagcccagcctctgaaacccaggacaggcctcccagctgccattggaagtggctacccttgtagcccacacaccccaacctgcttggtagggccagctcccttactagcacagcttgccgcacaggccagagaccagctcgccaacctgaaagtgttcccagcagagccaagccaggctcaacaaagacctccccattctcagctctgggcctgcctcgtttcctgtggggctagccatagccatgccttttaaagggaactccagtagggtgtggttggcccctgtcctacaaaagagtccccacagcccagcaatgtccttccaggccctggtttatgcagtcacgttcctgcatggtgtcactaaccacccttcccacgctgtgctgtgcaaaggccatcccagttcttacctaggtcttttcttgagtgcaaggtaaagagggcctgcctcaccccttcctcaaccatattgcctcctatgagcaaaggcttctgtttaattcagtcacctgacatttactgagcatccactatgtgccagacaccattctagcatctggtgattcagcagtaaacaaaacagacaaaatccctgccctcatggcctttacattctagtgggggagtgttatgaactgaatgtttgtgtcccctcctaattcatatgttgaaataaaatccccaaggtgatggtatttggaggatgcctttgggaggtgattaggtcatgaggggagagccc

SEQ ID NO: 77477 - DNA, 750 bp, Homo sapiens
tcatgcctgtaaccccagcactttgagaggctgaggcgggaggatagcttgagcccaggaattcaagaccagcccgggcaacacagtgagacaccccctacccacggcaactctacaaaaaaactaaaaaatattagctgggcatggtggtacacacctgtagtcccagctcgtcaggaggctgaggtgggaggaacatttgagcttgggaggctgaggctgcagtgagctgtgatctcrccgctgcactccagcctgggcaagagtgagaccctacctctctatatatatatgcaaacatatatatcttgtttatcacatatatcatatatgatatatatcttgtgtatcatatatataacttatcggactcttaggagtttgttagtgcaggcacttaagaaatgactaatgactttggtgcccacagagccagggagtaacgggccagacctcttggtggttttcctcccagcacaccattttctgaacttgtcgaagcctccaaatctctttctccagttactccagcataacgtgcattgacagtaaacaaagtcctcgatgatgtcatgttgccacacttcatttcacaggatttagcaaccagagagccacaccgggggcggccctccctccaaacagagaacattatctcttcttcctcagtgaaaattcatgagaaagttcctaagcttgtaatgcttagccctagacaacggaaaaaggtgtttgaggaaggaggaaatg

SEQ ID NO: 77478 - DNA, 750 bp, Homo sapiens
tcatgcctgtaaccccagcactttgagaggctgaggcgggaggatagcttgagcccaggaattcaagaccagcccgggcaacacagtgagacaccccctacccacggcaactctacaaaaaaactaaaaaatattagctgggcatggtggtacacacctgtagtcccagctcgtcaggaggctgaggtgggaggaacatttgagcttgggaggctgaggctgcagtgagctgtgatctcaccgctgcactccagcctgggcaagagtgagaccctacctctctmtatatatatgcaaacatatatatcttgtttatcacatatatcatatatgatatatatcttgtgtatcatatatataacttatcggactcttaggagtttgttagtgcaggcacttaagaaatgactaatgactttggtgcccacagagccagggagtaacgggccagacctcttggtggttttcctcccagcacaccattttctgaacttgtcgaagcctccaaatctctttctccagttactccagcataacgtgcattgacagtaaacaaagtcctcgatgatgtcatgttgccacacttcatttcacaggatttagcaaccagagagccacaccgggggcggccctccctccaaacagagaacattatctcttcttcctcagtgaaaattcatgagaaagttcctaagcttgtaatgcttagccctagacaacggaaaaaggtgtttgaggaaggaggaaatg

SEQ ID NO: 77479 - DNA, 750 bp, Homo sapiens
tcatgcctgtaaccccagcactttgagaggctgaggcgggaggatagcttgagcccaggaattcaagaccagcccgggcaacacagtgagacaccccctacccacggcaactctacaaaaaaactaaaaaatattagctgggcatggtggtacacacctgtagtcccagctcgtcaggaggctgaggtgggaggaacatttgagcttgggaggctgaggctgcagtgagctgtgatctcaccgctgcactccagcctgggcaagagtgagaccctacctctctatatatatatgcaaacatatatatcttgtttatcacatatatcatatatgatatatatcttgtgtatcayatatataacttatcggactcttaggagtttgttagtgcaggcacttaagaaatgactaatgactttggtgcccacagagccagggagtaacgggccagacctcttggtggttttcctcccagcacaccattttctgaacttgtcgaagcctccaaatctctttctccagttactccagcataacgtgcattgacagtaaacaaagtcctcgatgatgtcatgttgccacacttcatttcacaggatttagcaaccagagagccacaccgggggcggccctccctccaaacagagaacattatctcttcttcctcagtgaaaattcatgagaaagttcctaagcttgtaatgcttagccctagacaacggaaaaaggtgtttgaggaaggaggaaatg

SEQ ID NO: 77480 - DNA, 750 bp, Homo sapiens
tcatgcctgtaaccccagcactttgagaggctgaggcgggaggatagcttgagcccaggaattcaagaccagcccgggcaacacagtgagacaccccctacccacggcaactctacaaaaaaactaaaaaatattagctgggcatggtggtacacacctgtagtcccagctcgtcaggaggctgaggtgggaggaacatttgagcttgggaggctgaggctgcagtgagctgtgatctcaccgctgcactccagcctgggcaagagtgagaccctacctctctatatatatatgcaaacatatatatcttgtttatcacatatatcatatatgatatatatcttgtgtatcatatatatawcttatcggactcttaggagtttgttagtgcaggcacttaagaaatgactaatgactttggtgcccacagagccagggagtaacgggccagacctcttggtggttttcctcccagcacaccattttctgaacttgtcgaagcctccaaatctctttctccagttactccagcataacgtgcattgacagtaaacaaagtcctcgatgatgtcatgttgccacacttcatttcacaggatttagcaaccagagagccacaccgggggcggccctccctccaaacagagaacattatctcttcttcctcagtgaaaattcatgagaaagttcctaagcttgtaatgcttagccctagacaacggaaaaaggtgtttgaggaaggaggaaatg

SEQ ID NO: 77481 - DNA, 910 bp, Homo sapiens
ttgcacctgcattagaaaataaactgaagtgcaagcaaggcctcatctgcttaggaagggacttgaaagcaggtggctgttgtctcaggtgcttccaggaaataagcactgaactggcctcccatggctgctayatttatgacaagtcagatatatactcattttgcgtcttgtcattgtaaagttgattccctgtctgactatgtctgctgagaagaataaagtgctttctcataatactgaataatgtgtgtcaatcattccaagaagtgctgacgtgtaactctgaaactcaaaatgtttaccatacaaaatcatatctttaagcttggcatggaaaactatattggtcacaggttgattctgctcactaacctcgacatcgctgacctagctgtaattaattcaacctgtaataaaacattgcagatattttttttttttttaagatggagtccctctctgtcacccaggctggagtaaagtggcgcaatctcagctcactgcaacctccacctcccgggttcaagtaattctccagcctcagcctcccgagtagctgggactacaggtgcccaccaccatgcctggctaatttttgtatttttagtagagacagggtttcaccatgttggccacgttggcctcgaacccctgatctcaaatgacccacccaccatggcctcccaaagtggtggggttacaggtgtgagccactgtgcctggccagccaataaactttgaaccaatgcaccctcctgagttgtctcagccttcacagcactctgcaaaggtggagaaacttaagagtggggaaacgatgttcagggtttctcagtgttcagaagaacacgggtcccaggctgcttctgccatgaacaaatactcatgatattttaagtaaaaacac

SEQ ID NO: 77482 - DNA, 640 bp, Homo sapiens
atccacgtccagagatgccagtctcattggctgagttacagtcctgctgtcccacataaagtttcttgggtcattctaccaatctctggggtgagagtcgctgctccactgtgtcttggtgaccagctgagtctctcttcctggttctccagcatgactcctaactagtgcttatgtttcttgcagagaaaccaaagatctgcccttaacaacagtccaatgagttaagaggaaataaagtgctttcaagaaaatgcctttttaagcacccatggcatccaggaggcccctatgctgtgtatggtttgatttgtgtgaattttagtttgcctattcttctcttctctttgtgaactctggcaggatgagaacaacttcacaaatgtgtaaggaaagttgttctcaagcggtctgggacggagyctttttgcttgatatacttcaaatctccttctgggaatatcatttattcctgataaaatgcttaagaaattttctcactagatttagaaagatgtgtcctgagaaagcagtcacctactagctgtcagtcacacacggaggttctggaaaccaaacatgctgacctttctgtatctggcctcatactaattatcttaacattttattcctggacaca

SEQ ID NO: 77483 - DNA, 734 bp, Homo sapiens
ttttgagatggagccttgctctgttgcccaggctggagttcaatggctcgatctcggctcactgcaacctctgcctcccggattcaagtgattctcctgcctcagcctcctaagtagctgggattatagacatgtgctaccacacccggctaatttttatatttttagtagagatggggtttcaccatgttggccaggctggccttgaactccttacctcaagtgatttgcccgccttgtcctcccaaagtgctgggattacaggcgtgagccaccatgcccggcctagttattgtttttttaactctaaaagttaagtctaccctgccttcttctttttttttttttttccacgacagagtcttgctcaggctggagtgcagtggcatgatctcggctcactgcaacctctgcctcccaggttcaagcaattctctgcctctgcctcccaagtagctgggattacaggtgactgccaccacacccagctaatatttgtatttttagtagggattgggtttcaccatcttggccagaggttggtcttgaactcctgacctcgtgatccacccgcctcggcctcccaaagtgctgggattacaggcgtgagccaccgcgcctggctaccctgccttcttttctaatacacatttaaggcattcataacttgtttaatcctttaaytgtatcccacaatgattggctgtaggctgggcaaaaagtttacctattta

SEQ ID NO: 77484 - DNA, 736 bp, Homo sapiens
tgtaagttcccttattccctgcatgtatctggaggggatagggacagaatgagtagtgttgattaaacaaagctctttctccctgcaggagagaatgaacatatgccggtgaataatccttccacgcagatttaccaggtaaagacaaatcgattgtttcaaatgctcccatgtataatagcaatgactgactattctttatgtgtacacgtttttagcactcacaagtgcttccacatatatcgttgcacttgttctcttaacagggctgtgagacaggcacctcagtgggtcccgccactcacagtgtactttggagagaactgatttttttttgagacagggtcttgctgtgttgcccactctggtctttaactcctgggctcaagctcagcttcctgagtagctgaggctataggtgagcaccactgtgcctggctgagaactcattattgaaagacaagttatctcatttatamagtgcagcactaccacgcccaccccaactctgcgcctcttggctgcggcacccatcgccacggccattacactgcaagataacattccccatcaagaagcagagtgcaaaatctgtcgcacttacttttctactttagcagggagaattgagaatgaaaaggggggtaacattgcaaatgttcaaatatctgtaccaggaaaaactttcaagctctttttaaacaatggaaacaatttgctttacaaggaagataaa

SEQ ID NO: 77485 - DNA, 764 bp, Homo sapiens
ctatttatggatctagttatttaaagcacagatggtgacattctgtacatattctgcattttgctttttaagtctattttattatgacgtacgatacatatagaaaagtggaaaaaactgaaatgaatgaattttcatgaagtgagcattggtgtaaactgagccagtacattgggaacccccttcattctccctcccagttactgcaccatccctcctgccacaggtaaatactgccctgaccttcatggtaactacttgctttgcttccattagatattctatttttgtttcagctgtgcttttgaactttatagaaatggattcatacagggtgtattccttcacattgagctggctgtgtgcagcattgtgtgcagttgtttcatattgtagccgggaacagtgactcatcttcattgctctttagcattccattgtttaattgaatcccagttttcttttccactgttgrttgtgtttagatttttttcagtttggggttactatgaaggatgctataaagagcattcttgtacatggctcttgtagcacagtgaacacatttctgttgggtgtagagatgtacgtatatgtgtgtgtgtgtgtgtgtgtgtgtgtgtgtgtgtgtgtgtgtgtgtatatatatacaccccaaggggtaaaattgttggatgtacatacctttgacttcagtaaatcatgccaaactgctttccaaagtggttgttcacctttttttccttttgtttttcagtggatcc

SEQ ID NO: 77486 - DNA, 764 bp, Homo sapiens
ctatttatggatctagttatttaaagcacagatggtgacattctgtacatattctgcattttgctttttaagtctattttattatgacgtacgatacatatagaaaagtggaaaaaactgaaatgaatgaattttcatgaagtgagcattggtgtaaactgagccagtacattgggaacccccttcattctccctcccagttactgcaccatccctcctgccacaggtaaatactgccctgaccttcatggtaactacttgctttgcttccattagatattctatttttgtttcagctgtgcttttgaactttatagaaatggattcatacagggtgtattccttcacattgagctggctgtgtgcagcattgtgtgcagttgtttcatattgtagccgggaacagtgactcatcttcattgctctttagcattccattgtttaattgaatcccagttttcttttccactgttgattgtgtttagatttttttcagtttggggttactatgaaggatgctataaagagcattcttgtacatggctcttgtagcacagtgaacacatttctgttgggtgtagagatgtacgtatatgtgtgtgtgtgtgtgtgtgtgtgtgtgtgtgtgtgtgtgtgtgtrtatatatatacaccccaaggggtaaaattgttggatgtacatacctttgacttcagtaaatcatgccaaactgctttccaaagtggttgttcacctttttttccttttgtttttcagtggatcc

SEQ ID NO: 77487 - DNA, 787 bp, Homo sapiens
ggatcctaaagtgggactacttagaaaatctgcaaaaatcatgcgaagaaaatcatgtaaaatcatgatctttacttaggcacttacaggtgaaatgacgaggtatctggaattgcattaaaatagatcaaggtgaaaaagactgacaaaaacattaactgttaaaacttggggctatatatcaaagacattagtttctctatgagtatatttcaaactttcctcaataaattttttaaaaattcaatttaaaattcaagccacaaataaatgctttttaaaaatttcttagattatacaaatagtgccataacatcaagaataatccyaaatcattccatatacttcaaaagatacaaaaccaggctgggtgcggtggctcacgtctgtaatcccaacactttgggaggccgaggtgggcggatcacctgaggttgtgagtttgaaaccagtctgaccaacatggagaaaccccgtctctaccaaaaatacaaaattagctgggtgtggtggtgcatgcctgtaatcccagctactggggaggctgaggcaggagaatcacttgaactcgggaagtggaggttgcagtgagccgagattgtgccattgcactccagcctgggtgacaagagcaaaactccatctcaaaaaaaaaaaaaaaaaaaaaaaaaaaaaaaaaaaaaaaaagacacaaaagcaggaactcttttccaggagcaatcccatttagttaagaaaaagaagaaaaaaatattccctagattcagccagttccttatctctactg

SEQ ID NO: 77488 - DNA, 787 bp, Homo sapiens
ggatcctaaagtgggactacttagaaaatctgcaaaaatcatgcgaagaaaatcatgtaaaatcatgatctttacttaggcacttacaggtgaaatgacgaggtatctggaattgcattaaaatagatcaaggtgaaaaagactgacaaaaacattaactgttaaaacttggggctatatatcaaagacattagtttctctatgagtatatttcaaactttcctcaataaattttttaaaaattcaatttaaaattcaagccacaaataaatgctttttaaaaatttcttagattatacaaatagtgccataacatcaagaataatcccaaatcattccatatacttcaaaagatacaaaaccaggctgggtgcggtggctcacgtctgtaatcccaacactttgggaggccgaggtgggcggatcacctgaggttgtgagtttgaaaccagtctgaccaacatggagaaaccccgtctctaccaaaaatacaaaattagctgggtgtggtggtgcatgcctgtaatcccagctactggggaggctgaggcaggagaatcacttgaactcgggaagtggaggttgcagtgagccgagattgtgccattgcactccagcctgggygacaagagcaaaactccatctcaaaaaaaaaaaaaaaaaaaaaaaaaaaaaaaaaaaaaaaaagacacaaaagcaggaactcttttccaggagcaatcccatttagttaagaaaaagaagaaaaaaatattccctagattcagccagttccttatctctactg

SEQ ID NO: 77489 - DNA, 1066 bp, Homo sapiens
catgaagagtacataagatagtatataaaaataaatgctcagtactcagtatctatcaccattgaagggggtctcaaagggcagagcagaaagttttggtggataagttgggtgagaagaggaaagctaaatgggcatgaatgtataggaggggacatggcagggcagcctttattttggaactgacccaggtggatggggatgagggagacrgagggatgaactcatctcaatcttcctaatggcattttgttttcttttgctgctggaacaaactaccacaaacttagtggcttaaaacaacacagatttattatcttgcagttctgtaggtcagaaatccaatacaggtcttattggcctaaaatccaggtgtcagcagggctgtgattctggaagctttggggagaatccttctccttcttttttctgcattccccagcttatggtccccttcttccaactccaaagccagcagcattgatttcccctgatcctttttccatcatcatgtctctttcttttttatttaattaaatgtacttatttatttgaactgttggtttgtttgtttgttgtagagacagggtctcactatcttgcccaggctagactcgaactcctgggctcaagcattcctcctaccacagcctccatccatgtctctttctggccacagctgggccaatttttctgtctttaagaatccttgtgattacattgggtccacctaaaaaatctaggtcactttccccatctcaaagtccttaacttaatgacatctgcaaagtcccttttgccatgtaaagtaactactccccagttttggggatgagaaccagaatgtcttgggagtgggggagataattattctgcctgccacatatttggataaagaggttagctgcaacttctgtctgcagacccagattcctgctatactatcagcggcatgaagcaggttggaaattcactcagacctccaagtgaaatggaggtgcagagttgttttgatgtctgtgcactgttctggccaggcagagggcagctgggttaggaaagaagg

SEQ ID NO: 77490 - DNA, 685 bp, Homo sapiens
tgtatctttatgtcttttatgtaagctatttractgcatttaaaaataatcaattcttcaggatacacaaaaaggcatactcaattgaattttccatatatgaatctttgaaacatcttcctctaagtggaaaggaatgcttttgaaacaaactattttagaaattacttgggccagatggaaaccattgagatgtcaggccacgccagtctgttgtctcccccacttggtttgggtttgttagtgaagttgttgcataactaaaaaaaaaaaaaaaactttataatacttcttagtaatgggctctgctagcccccaaagtgggttctggaagatcaaattagcttttgtgataaatattgccatgaaaccagtaattagcttctaatgatcctgcatttttcatcggctgtgaagccataaacagatgaagattttggctccttggcaaattatttttgacatagatacctgggaaaagaaaaaaagaaaaggtcttttgtggtgccccaggccatagaagcctggcaaggagttcatatgcttcccctcccctccgggaagcacagcaatttacccaccaatattttttaactcactccaaaattgtgactgtaggcactgcaggtcaagcaaatgagtgaagtttttctgagttaatcctaaaaaaaaagaaaaaggactg

SEQ ID NO: 77491 - DNA, 987 bp, Homo sapiens
aagtaatggacacatgagcaaaatgttgaggatttagaattccaggtgcctctcagtgaaagtggcaatggttaattgaatagaatacataatcaaatagtacaagtaggcccggtgcggtggctcacgcctgtaatcccagcactctgggaggccaaggtgggcgatcatgaggtcaayagatcgagaccatcccggccaacgtggtgaaaccctgtctctactaaaaatacaaaaattacctgggcatggtggcatgtgcctgtagtcccagctactcaggaggctgaggctggagaatcgcctgaacctgggaggcggaggttgcagtgagccgagatcgcgccactgcacttgagcctggcaacagagtgagactccgtgtcaaaaaaaaaaaaaaaagtacttttttttctttagaattcaacatcagctaaaaggcttctactgtttatgttttattacctggtttgttacacatctattgtaaagtgctattaaattataataaattagttttccctccacagaagtgtcacctgaacatacttagctggctcatcagtgccacaaatatgtaattatttatcttattaagcagttttgttaccttttacacattgcatagtgctttttcattagctttacctgaaaaaaaaaagaagaagtaaactattgtaaagtgagaagttcttagccatggttatatactcactaaattctaaagtttcttgagcctctggatcctgctaagaattttgcctttgatctacagatcaaagaccacagcaagaatctcattaaagctatgaaacttctctctagaaaatgaatgtaaacagagaatgctatataaaatttcaggggttttatggatccccagaaagccagtcggtggaaccccagattaagaaactctggtttttaaaaggattttgaaaattcttgataaattatgtacaacaataaattttctgatactctaca

SEQ ID NO: 77492 - DNA, 987 bp, Homo sapiens
aagtaatggacacatgagcaaaatgttgaggatttagaattccaggtgcctctcagtgaaagtggcaatggttaattgaatagaatacataatcaaatagtacaagtaggcccggtgcggtggctcacgcctgtaatcccagcactctgggaggccaaggtgggcgatcatgaggtcaacagatcgagaccatcccggccaacrtggtgaaaccctgtctctactaaaaatacaaaaattacctgggcatggtggcatgtgcctgtagtcccagctactcaggaggctgaggctggagaatcgcctgaacctgggaggcggaggttgcagtgagccgagatcgcgccactgcacttgagcctggcaacagagtgagactccgtgtcaaaaaaaaaaaaaaaagtacttttttttctttagaattcaacatcagctaaaaggcttctactgtttatgttttattacctggtttgttacacatctattgtaaagtgctattaaattataataaattagttttccctccacagaagtgtcacctgaacatacttagctggctcatcagtgccacaaatatgtaattatttatcttattaagcagttttgttaccttttacacattgcatagtgctttttcattagctttacctgaaaaaaaaaagaagaagtaaactattgtaaagtgagaagttcttagccatggttatatactcactaaattctaaagtttcttgagcctctggatcctgctaagaattttgcctttgatctacagatcaaagaccacagcaagaatctcattaaagctatgaaacttctctctagaaaatgaatgtaaacagagaatgctatataaaatttcaggggttttatggatccccagaaagccagtcggtggaaccccagattaagaaactctggtttttaaaaggattttgaaaattcttgataaattatgtacaacaataaattttctgatactctaca

SEQ ID NO: 77493 - DNA, 987 bp, Homo sapiens
aagtaatggacacatgagcaaaatgttgaggatttagaattccaggtgcctctcagtgaaagtggcaatggttaattgaatagaatacataatcaaatagtacaagtaggcccggtgcggtggctcacgcctgtaatcccagcactctgggaggccaaggtgggcgatcatgaggtcaacagatcgagaccatcccggccaacgtggtgaaamcctgtctctactaaaaatacaaaaattacctgggcatggtggcatgtgcctgtagtcccagctactcaggaggctgaggctggagaatcgcctgaacctgggaggcggaggttgcagtgagccgagatcgcgccactgcacttgagcctggcaacagagtgagactccgtgtcaaaaaaaaaaaaaaaagtacttttttttctttagaattcaacatcagctaaaaggcttctactgtttatgttttattacctggtttgttacacatctattgtaaagtgctattaaattataataaattagttttccctccacagaagtgtcacctgaacatacttagctggctcatcagtgccacaaatatgtaattatttatcttattaagcagttttgttaccttttacacattgcatagtgctttttcattagctttacctgaaaaaaaaaagaagaagtaaactattgtaaagtgagaagttcttagccatggttatatactcactaaattctaaagtttcttgagcctctggatcctgctaagaattttgcctttgatctacagatcaaagaccacagcaagaatctcattaaagctatgaaacttctctctagaaaatgaatgtaaacagagaatgctatataaaatttcaggggttttatggatccccagaaagccagtcggtggaaccccagattaagaaactctggtttttaaaaggattttgaaaattcttgataaattatgtacaacaataaattttctgatactctaca

SEQ ID NO: 77494 - DNA, 684 bp, Homo sapiens
caaactgatagcactcccatcttcccagtgcatgttagggaaaagcagggaggacttttattataaatgcttggctgataacctttttgaatcccagaacaccaaatgcctcacatgaaatttcattattctagaaaagaattcggctcatagatgcttccttcccatgaagtaaagctcaacctagctcaatggtctttacttctgttaggtctttcagggaattttgaaataaataaagaaaataacagataatcaggtggatagaagtagtctagttatagaggcatgaaactcttaaatgaaaatggtctcagagttaaaactgttgttatcaatcaaatttctggatacattgttagatttgagctttgtcttctgttttagtgacaaatacagtcaaaaacaagtaaagacaccattscgagggaagagaggtcacaaactctggactcagattctaaccctctctaattttatgatttattacctagcatagctcctgattggactaagtatattactctgcaatgtttgataagttaaagagcaaatgaatgagtgaatatcacattactttcgtttctaattcatgaaatgaaagtagtcatagaattttagagtgaaagataactttgtaattacgtattttagggatgagaaagatgaaaaatggaaagaagt

SEQ ID NO: 77495 - DNA, 1274 bp, Homo sapiens
aagtgttttatgcatattaattcatttaagcctcgcaactatgctttgaggaagttaaaagaggagaggattagtgcccataaaacctgaagggcatagactccattagtaaatttgtgaatattggaatgaggatgatacaccaggacaagatgctaagagtttgcatagatgacatttatgtagcactttctgtttaccaggcaccatgctctatacctcatacacaggacttgaaccttcacaacagcaccatgaaagatcactatcattattttaagaatggggaaaatgagacgtagagagcctgagccactagtccaaagccacacattgtgtatatggtgactctgagagtatagcttaggtgcgtttgaccccaagtctaggctctcacccattatgttaacctgtgaaaagttgacattaaatattcctcatacagtttatgtcctggtaaatactggtaaaatggagggaaaaaatggatctttttatgtgtatctcaattagagccacaataatcgttcttgaaataaaatggaactttgtatgtactgagagtgtcgaatccttaacctttaagcatatttccatgtaacagcttcctgttcaaagggtgagctgaagaccagcagcgtgggcatcacctgggagcttgttaaaaatgcagagtctcaggttccatcccgacctattgagtattggaatctacgttttaatgatctccagatgatttgcatacacacttatgtttgagaagctcagatctagcacaagttaaaagaataggcttccagccctggttgtgatgctaacygaccagttgtttgacctgcccagattttctttgccttttcagtggaaatgacctcagctctcttcacagaggagtcaggaaccccccaacagaagagcctggggaggaagattccacagaaactcagagactcttttttacctctggaatcagtttctcactaagtagtccaaggaccacctacatgaaaatcatctggggagtttattaaaaatgatgttcagattaaaagtagacctgtcagaatggcaataaatgccaaaaatagggtgtcataatgtcttcaaacaccaagagaaaatggctgttagatgagaattgagtatctctcccaaggtgtttatctgggataaggatgcaataaagtcattatcagacaaacattaaatgacatctaaacttcacatttgattaatctccttttgggaggaactgacactggaatgggtacttt

SEQ ID NO: 77496 - DNA, 1274 bp, Homo sapiens
aagtgttttatgcatattaattcatttaagcctcgcaactatgctttgaggaagttaaaagaggagaggattagtgcccataaaacctgaagggcatagactccattagtaaatttgtgaatattggaatgaggatgatacaccaggacaagatgctaagagtttgcatagatgacatttatgtagcactttctgtttaccaggcaccatgctctatacctcatacacaggacttgaaccttcacaacagcaccatgaaagatcactatcattattttaagaatggggaaaatgagacgtagagagcctgagccactagtccaaagccacacattgtgtatatggtgactctgagagtatagcttaggtgcgtttgaccccaagtctaggctctcacccattatgttaacctgtgaaaagttgacattaaatattcctcatacagtttatgtcctggtaaatactggtaaaatggagggaaaaaatggatctttttatgtgtatctcaattagagccacaataatcgttcttgaaataaaatggaactttgtatgtactgagagtgtcgaatccttaacctttaagcatatttccatgtaacagcttcctgttcaaagggtgagctgaagaccagcagcgtgggcatcacctgggagcttgttaaaaatgcagagtctcaggttccatcccgacctattgagtattggaatctacgttttaatgatctccagatgatttgcatacacacttatgtttgagaagctcagatctagcacaagttaaaagaataggcttccagccctggttgtgatgctaactgaccagttgtttgacctgcccagattttctttgccttttcagtggaaatgacctcagctctcttcacagaggagtcaggaaccccccaacagaagagcctggggaggaagattccacagaaactcagagactcttttttacctctggaatcagtttctcactaagtagtccaaggaccacctacatgaaaatcatctggggagtttattaaaaatgatgttcagattaaaagtagacctgtcagaatggcaataaatgccaaaaatagggtgtcataatgtcttcaaacaccaagagaaaatggctgttagatgagaattgartatctctcccaaggtgtttatctgggataaggatgcaataaagtcattatcagacaaacattaaatgacatctaaacttcacatttgattaatctccttttgggaggaactgacactggaatgggtacttt

SEQ ID NO: 77497 - DNA, 1274 bp, Homo sapiens
aagtgttttatgcatattaattcatttaagcctcgcaactatgctttgaggaagttaaaagaggagaggattagtgcccataaaacctgaagggcatagactccattagtaaatttgtgaatattggaatgaggatgatacaccaggacaagatgctaagagtttgcatagatgacatttatgtagcactttctgtttaccaggcaccatgctctatacctcatacacaggacttgaaccttcacaacagcaccatgaaagatcactatcattattttaagaatggggaaaatgagacgtagagagcctgagccactagtccaaagccacacattgtgtatatggtgactctgagagtatagcttaggtgcgtttgaccccaagtctaggctctcacccattatgttaacctgtgaaaagttgacattaaatattcctcatacagtttatgtcctggtaaatactggtaaaatggagggaaaaaatggatctttttatgtgtatctcaattagagccacaataatcgttcttgaaataaaatggaactttgtatgtactgagagtgtcgaatccttaacctttaagcatatttccatgtaacagcttcctgttcaaagggtgagctgaagaccagcagcgtgggcatcacctgggagcttgttaaaaatgcagagtctcaggttccatcccgacctattgagtattggaatctacgttttaatgatctccagatgatttgcatacacacttatgtttgagaagctcagatctagcacaagttaaaagaataggcttccagccctggttgtgatgctaactgaccagttgtttgacctgcccagattttctttgccttttcagtggaaatgacctcagctctcttcacagaggagtcaggaaccccccaacagaagagcctggggaggaagattccacagaaactcagagactcttttttacctctggaatcagtttctcactaagtagtccaaggaccacctacatgaaaatcatctggggagtttattaaaaatgatgttcagattaaaagtagacctgtcagaatggcaataaatgccaaaaatagggtgtcataatgtcttcaaacaccaagagaaaatggctgttagatgagaattgagtatctctcccaaggtgtttatctgggataaggatgcaataaagtcattatcagacaaacattaaatgacatytaaacttcacatttgattaatctccttttgggaggaactgacactggaatgggtacttt

SEQ ID NO: 77498 - DNA, 448 bp, Homo sapiens
tgctgtctaacccatcagcttgcccttgaatcctttccttggcaaagccaaggaccctcccaggctaggcctgtcctgcatcactggcacatagtcagtagctcattaaatattaacttttctttactccagagaggtcagcatactagggaggataatttaagagcttgacaatcctagcctcctctcttagctgatttgagataaacactgacaacaawatatctccagaaaggcctggttaagacaaaggtgtgttaggctctgagacagtgagggatgggggtggggaggaactgaaatatgcgggtcagtcagaaaatcatctaatgataagtgcccattttaggtgttaagctcaaaagagagagagagagaacgagagagagggagagaaggagatattaaaaccaagcttacaatggataaagaaatttggttaacaaat

SEQ ID NO: 77499 - DNA, 1099 bp, Homo sapiens
gtcaaattcaggggtaaagaaactaataaataatattttaacagttggcatattatatttaaaaattaattacgtgtctgattaatttcacttgagataatggcctccagtgtcatccacattgctgcaaatactgcatattctcacttataagtggaaggtaataaggaagccaatgtgtacacatggacatagaatgtagaatgacagacaatggagacctgcaagggtgagggagtgggaaacgggtagatgatgagaatacttaatgctacaatgtatgttgttcaggtgatggataccctaaaagccctgacttcaccactatacaatctatgcatgtaacaaaattgtacttgtaagccatacatgtatacaaataaataatgtgtgaaatcaagcagtctccctgtcctcccaccccctactcctggtccccttcactgatcctcagagcatgaaaagaatatggttccgacttcatttctttcctccttttgaatctcatgccaaatgtttcccgcagtccacagtgaaccaaactatgcaaaaaataaaattgtgggaaatggggctccaccttgactaaattaacccaaatccatgagcaattccacctctaaccatttatcatcaggaggctgagcatgagtacataaccagtcacattcaaagatgtctattgcaacattgtttgttattggaaaaaattagggaaataagtgaataatctgcagcctttaataagaagagatacttgcaattaacaagttacartgacatccgtaattgtaaagtagaatggcaagttgcagaagatgatataaaatatgatacaatttttgttgaaatacaaaaagtaaataaatgtttgatgagtataaaaagtttcatacgaaactaataggagttacttctgggcgagaagattgggaaacagaggtaaaagaaaggagccactctcccttttttactttgcatgtatcctttcattttattgtaacaaaaatgtgttatttttgtaataaccccaattaagtctttaaaagaaagagactacctaaaaatataaatcatgggaattgataaaatgctaaca

SEQ ID NO: 77500 - DNA, 1099 bp, Homo sapiens
gtcaaattcaggggtaaagaaactaataaataatattttaacagttggcatattatatttaaaaattaattacgtgtctgattaatttcacttgagataatggcctccagtgtcatccacattgctgcaaatactgcatattctcacttataagtggaaggtaataaggaagccaatgtgtacacatggacatagaatgtagaatgacagacaatggagacctgcaagggtgagggagtgggaaacgggtagatgatgagaatacttaatgctacaatgtatgttgttcaggtgatggataccctaaaagccctgacttcaccactatacaatctatgcatgtaacaaaattgtacttgtaagccatacatgtatacaaataaataatgtgtgaaatcaagcagtctccctgtcctcccaccccctactcctggtccccttcactgatcctcagagcatgaaaagaatatggttccgacttcatttctttcctccttttgaatctcatgccaaatgtttcccgcagtccacagtgaaccaaactatgcaaaaaataaaattgtgggaaatggggctccaccttgactaaattaacccaaatccatgagcaattccacctctaaccatttatcatcaggaggctgagcatgagtacataaccagtcacattcaaagatgtctattgcaacattgtttgttattggaaaaaattagggaaataagtgaataatctgcagcctttaataagaagagatacttgcaattaacaagttacagtgacatccgtaattgtaaagtagaatgrcaagttgcagaagatgatataaaatatgatacaatttttgttgaaatacaaaaagtaaataaatgtttgatgagtataaaaagtttcatacgaaactaataggagttacttctgggcgagaagattgggaaacagaggtaaaagaaaggagccactctcccttttttactttgcatgtatcctttcattttattgtaacaaaaatgtgttatttttgtaataaccccaattaagtctttaaaagaaagagactacctaaaaatataaatcatgggaattgataaaatgctaaca

SEQ ID NO: 77501 - DNA, 549 bp, Homo sapiens
atcccagtccatgtgtcttcctgtttacgtgtcccgtccactccatagcccctctgtcaggtgtctgcctgagtttgtagagccgatgctgtttatgtgcctccattgctgtcagcctctctttgcactacaatgagtctgtgtgtgtctatctgcccacctgtcactctgtgtgtctccttgtccaactctaggaaactgcagcctttctctaagtctatctgcttgtgtgcgtgtgtgttgtgtgtgtgtatgtgtctaaatctctagaattctcccctmccccaatgcttctttaagcaaatgtacatctacattcagtcccacctctcctttgctcctcccaaggagggactccctggggctgttttttgtggctctttagaatgctactggccaaatctaactccttctgtccttgaccctctctaagattcaaagtcctccttttcctgaatgccctgagtcccctctctttgctgtggctgaggcagaaggggctgcccgacatcactgtgggactgcagatttatgactcctgcatctcag

SEQ ID NO: 77502 - DNA, 634 bp, Homo sapiens
tgagtgactgtgtggagcagagcctcttgctcacccrcaagggacatgtaacctgagccagaaataaactactttttgtgtttagcctaccaggtttattgttacaataaaaagacctagcctatcccgattaacacagatcctctgtatgatggttactctgcagccacaggccagccacatttaacaagaaatacaatgtagccactgtcctcatggaccacttaatctaatgggggttacacttacataaatgatcttagaggaagggcacctctgcttgagggggtaattggggtacagatggactccttcaaaccttcagatgaggctaaattatattttaacatcattttagttccaaattgtatctcctagctgatgtggccttgagtaaagcacccatcaaataagattgtgtatcctcttgatttgtcatctctaaagagacagggtccatatcttccaacatgctttgtaagtgcactcagctccatgctctacttggtgctgatgatgccagctagcttctgatttcagcagagagatactattgaattcatctgacctctgcactgaaaatagatctttgctgaaaagaaggcaatgtaaaatgggaccctcatttttatcc

SEQ ID NO: 77503 - DNA, 1869 bp, Homo sapiens
gtattagaaaattagtgacttcaataattagcctgacttccatattccattttcagaatgagttatgaaacagtttagtcctcttgtgtactatgggaagcatgtttgtttgttgtcttttacttgtttctgatgtctgtttatctctttcattttctggatcaagttgctgtacaatctgtcatttctatcttcaacttggtaaatcctttccagtctttatagttagatttgaattagaaaacaaaatgtgctagaaaaagcaataagagagtgatgaagatgggcagagacttgggtggagaccttgattcagtagtttggtctttcaaggagaaataattctctttcttcttgcttggatgtttatgcaatgggatgaacctttttaaaaattagaggcagggtttccctcattcaaaagttggggtacagaacctcatttcaatgtttgtgtgtaccctcagctttatcgccctaacattcccctgggcttctctagggaataattatcactcttttaagttcttcattttccagcataaaaccttctttaaccgcttttaaaacatttctcatgagaggaagctaattagatacacccttctggttattatttaatcattatttttggagcacccaaaatgttctaagtataagcaatttctagcaccaaatccttattcagaaattagttatttcttaatttgggcccttgaaaccacattgcttatcccatttattaatatttattagcacccgcaaaggcaaggtgctcaccttttttgagaacatagaaccaccatagttcctttcctgtgagggctctttgtgccttgcctcatctcgcttttccagtcaaaccaatgtgttacttcaaaataatctctttgacccaagtttgtatgaaacactttcccctcctttcacatgcatctactagatttttgttgcccatgaatgaaatttaaattcatttgcatttcaagcatttatttaattttttcctgctatttctgcaacagtgaagccatttcctaaaattcatgcctttttcagaatgtctgctacttaaatgagaagtaaaaagagggaaagataccttcaggcttggatttttgtgtctactcatatccctctggctagaaatccactttccctaaagttgtgatggcagctatttagcttaggagtcagtgatgacatgtttttatacaagatatgtgtcttaggaaagcaacacgcctctgttcrgaagaatcagcacattttcaccttctactttccaaaacgcagccacagcactcagctctaagggtctcctgtgttcaggaaggtagagagaatagttgctccagctagaaatgtagatcatattctcagaggttgaatattattacaattacttttttccagtttatgtttccatttcaatgataatacatatataattctgaatgatctgcctgccaaccttataactaggtcctgcccataggatgtcagtgccagttatgatttatgttgatgaatagattggtgcccattgctttcaaaagggatagaatttaattttaagcctatggtgttaaataagtactgccactacgattaatgctgggtggctaactgatgtgcatgtatattcttaaagatgcaagaattatccaacttgggcaaccttggttaattaaaggcatggaccctgagaaagacactccggtattctaattcaagttctggcaatttactagcacattcgctgtttcgaaaatctctttgcatttgtgaacttcggtttcctcacctatgaaaggaggtttacaaaagagctactacgactataggagtgcagtaaagattcagata

SEQ ID NO: 77504 - DNA, 793 bp, Homo sapiens
aataaagtgcagtacatttatatggtgaaatattatgtaactattaaaaaacatgtgataaattcacatgtatagacctaaaggaatatccatgttatattattaatgcaaaaaagttaagtcatgagtagtgtggagtgatcacattttattaaaaacaaagaaccaccacaaaaaatttaaatatataaaatatttttatatctttataagcatagaaaaatgtggaaacaagataggaaaagtttgtgagtgggaagagatgactaacttcattttatgcatcttcacattattccactagataaaatgagcacgtatttctttttaggttcaaaatttcacaatggaaatttaaccaaaaattatttccagttgtaaaactagcataattcaaacatgtaaatgtacaatacacataccaaataaatcctgtatgaatatagctacaaagctctcaatgaaaacaaatgcattgtatatgtgtatatatatgtatatatgtgtgtgtgtgtgtgtgtgtgtgtgtgtgtgtgtgtgtgtgtgtgtttcttatttcattcaggttactctaacaaaataccacagactggatcacttgtaaacaacagcaattcatttctcacagttctggaggctgggaaatccaagatcaaggcaccagcagattcagggtctggtgggggcccatttcctcatttatacacggcaccttcttgttgcatcctcacatggtagaaagagaagcaaattatctcgggatttttataaggacacttattccacttwtgag

SEQ ID NO: 77505 - DNA, 528 bp, Homo sapiens
tatatrtgtgtacacatatatatatagccaggcatggtggcatgtgcctgtagtcgcgcatagttggtaggctgaagtaggaggattgcttgagcctgggagatcaaggctgtagggagaaatgattgtaccactgcactccagcctggatgacattgtctcaaaaaaagaaaatttaaaaagaagacagtcactacattttgcatttatttgtgactaaaaattactaagctataaaagtagtacattctcatgattgacaactattccaaacccagagccaaagttataatgcaaaacgcacgtcgttctcattaaaactgtgaataagctagaatgcgatcactctaattatttgacaatattctagatgattcagccatgacaaaacactgttttaaaaattatgcttatcagagagaccagtgaacaaacgttatttatacatgtataattttttacttagaaaactccagaactgaactctaaaaaattactaaattcaatatgaacacttcattttatagc

SEQ ID NO: 77506 - DNA, 660 bp, Homo sapiens
aggctgtccgtgcaaagctgccaccaggtcaggcttgccgggtcagcaggcatggaggaggaggctgagccagtgtcacggggatggtggtacctctgccttcgagcctcccactaaacctcccattggcagaaccctaccacaatccgggtgtcctgggttcctgagaagcatggcttgtgtggtttggagtcagtgggggagacaagagatctgttggaaacgagacccaggacaggctgacatcttagctcctttaatgctttattggtgagagctattactatgctcattttaaaagggagggacctgggacccagagaaggaaaggactgtcccaggtgtgaagctggttgcagcaaagccaaggcagaacccctgtttccttcatcctgtaggccaaagtgtctctacttataattgacacaataaagccagggcaccacacacacacatacgcacacacacttgygactgtcttacacttgtaccactatttttatgtaaacccgggtgttcttgtttaaataggcactctctcattggtctaaaaaatagttaacattgatatgaacttacatgtgccaagaaccacgttaagctctttgcctggttctcgtatttaatcttcataagaaccttgtcaggactactattact

SEQ ID NO: 77507 - DNA, 660 bp, Homo sapiens
aggctgtccgtgcaaagctgccaccaggtcaggcttgccgggtcagcaggcatggaggaggaggctgagccagtgtcacggggatggtggtacctctgccttcgagcctcccactaaacctcccattggcagaaccctaccacaatccgggtgtcctgggttcctgagaagcatggcttgtgtggtttggagtcagtgggggagacaagagatctgttggaaacgagacccaggacaggctgacatcttagctcctttaatgctttattggtgagagctattactatgctcattttaaaagggagggacctgggacccagagaaggaaaggactgtcccaggtgtgaagctggttgcagcaaagccaaggcagaacccctgtttccttcatcctgtaggccaaagtgtctctacttataattgacacaataaagccagggcaccacacacacacatacgcacacacacttgcgactgtcttacacttgtaccactayttttatgtaaacccgggtgttcttgtttaaataggcactctctcattggtctaaaaaatagttaacattgatatgaacttacatgtgccaagaaccacgttaagctctttgcctggttctcgtatttaatcttcataagaaccttgtcaggactactattact

SEQ ID NO: 77508 - DNA, 864 bp, Homo sapiens
taataaatatgccacattcagagaatggtttaatcaaatatttttatgctaatagaaaattaaaggataaagccctacatactgtcaaattatgcccccagttgacaggcaagatggactccctgtggctcaaaagtaagagcagagccaagaggccatggcgggccgaggaatggtcaagttctgtgtgtcctacaaagtgttgtaaaacttgtttttctgccaccaagtcaaataaccatttctggaaacaactgcagctggaaatttccctagtgatcrccagcagaccacctggtgccaactgacagaccacctggaaccagccaactaagaaagagactggcgatttggggcttaatggtcgtccagtcacaactctgtccctcactcccctgaatcccctcccttgccttccggtttttgctttaatcatctctcactctccatcctgctccttggagtacactcacttttgtaaaacagaggctatgtctccctaatctgcagctttttttttaatagaaaatagaggtctccctttatgctctgcagatcacatggtctgttgttaacaaaaccaaagattaccttgtgtagaacagagtatacattttacctattatagaataaaattttgaacaatattgagttataagtgtataatatcagtacattgggatattcgtgacatagaacaatattgaatgaaagtactaagaaaacaagaaagaaataaaaagcttcagtggtgatataagacatgttgatacagaatgagggcatagtgtgtattaaagtaatgtcacagaggccttgcgtagaaaaaaaggtctgcttctgtatacaaaatgggattaagat

SEQ ID NO: 77509 - DNA, 864 bp, Homo sapiens
taataaatatgccacattcagagaatggtttaatcaaatatttttatgctaatagaaaattaaaggataaagccctacatactgtcaaattatgcccccagttgacaggcaagatggactccctgtggctcaaaagtaagagcagagccaagaggccatggcgggccgaggaatggtcaagttctgtgtgtcctacaaagtgttgtaaaacttgtttttctgccaccaagtcaaataaccatttctggaaacaactgcagctggaaatttccctagtgatcaccagcagaccacctggtgccaactgacagaccacctggaaccagccaactaagaaagagactggcgatttggggcttaatggtcgtccagtcacaactctgtccctcactcccctgaatcccctcccttgccttccggtttttgctttaatcatctctcactctccatcctgctccttggagtacactcacttttgtaaaacagaggctatgtctccctaatctgcagcttttttttwaatagaaaatagaggtctccctttatgctctgcagatcacatggtctgttgttaacaaaaccaaagattaccttgtgtagaacagagtatacattttacctattatagaataaaattttgaacaatattgagttataagtgtataatatcagtacattgggatattcgtgacatagaacaatattgaatgaaagtactaagaaaacaagaaagaaataaaaagcttcagtggtgatataagacatgttgatacagaatgagggcatagtgtgtattaaagtaatgtcacagaggccttgcgtagaaaaaaaggtctgcttctgtatacaaaatgggattaagat

SEQ ID NO: 77510 - DNA, 664 bp, Homo sapiens
atggtggcacatgcctgtaatcccagctactcaggaagctgagacaggagaatcacttgaagctgggaggcagaggttgcagcgagccaagatcgtgccactgcactgcactccagcctgggcagcagagtgagactctacctcaaaaaaaaaaacaaaaaaaaaaagcaaaaaaaaagaaaggtgaatgtgtctgaggactgaaggggcaagcctctaaatgcttaggggtagagtttatagtcagagggaccttcctgcagctgggccagagactcacccaccctctagaaacctcagcagctgaggatgaacaaaacccacaggaagtggtggaagtgaaacttggtgtcagtgttgttgttattaaaagggggaagtgacaccgggtgagtgaagggtgggtggaggtgaagtctctataggcagcgaggtcattcggcagcgccccccttcctgctccgctaagaatagttacggttgtgataggggtgtggtttgtctgaggctgggggaatgaatctcgcttgatgtctggatggggcagagcagaagtagcactggggtggtcrgagcttcaagtcaggtggcagcaaaacctaagaagcatttttgggtttggaaataaacaaataagtggcctcagaagcagctcagaggagaa

SEQ ID NO: 77511 - DNA, 591 bp, Homo sapiens
cttctgggaactatgatggggcttcaagggagtcaggtgtcaagaaaggaggggtaagtactctctacttgctggaaaatcattgtaagtctgttgtgtatgaaattttaggaaaagtcttatatagttccctttccagactgttttcttttgactctaactataatcataagtctgtgcttccattatgaaggtcacattcctagcattcttgggaagtattagctcatactctcattcacatatgggaggttagatttttttcctctacccagagtccctttttagtttaccccacggcttagtttgctgtcagataccagttctctagcagattccccaacagttttttccccagtggggagggtggaagggagggactgatataagtaaggagatgagtagttgtgttacagttcattttctttaaaaaaaagtaytttgagaaaaggtgcaaaatattcttgaaagtctctaggccagccaaagtccacatatggatatttggggatgttatttaaatactcagcaggctgagtgcaggtatacgtgtgtatagagtgtgtatactttgcttttgttttataacat

SEQ ID NO: 77512 - DNA, 676 bp, Homo sapiens
tgtgttcttaatgttacttagcaataacaaattttttaaaaatatgcatactttcttaaaataatgtctggtccatgtgaatgtaaacatcatgatggcaaggacatcatatatcttgtacatataatccaagtgtctgggacagtggcacgattagaggaaaatttagcaatatatgctcaataatgagatcttgtatgtgaggaggcctagaaaaaagcttgtcatacaatgaatcctcttgttattatttttctgctaaaaaggaagatgtaactgttaattttgattattagttttcataccacactataccacaatactggaaataaacattatcagttcaaagttagggtgttttattggatcaaccttttaaaaaaatctgtagttttcagagatcagatattttggtgcaggatatagatcgaatcactgatcttgagggttggctctggggactctgagatgacacacgaaaatgaaaaccacccagaggttttcttgtgtaccaattttttggatatatatcattaaatgagtctggggtaggcatttgaaaaggcatggaatctgctacccaaaatatcagtctaataagagagatgggcacatgaaccaamcattgaagtgtggtgtgataaaaacctcaatgaaaggaataactaaatgctca

SEQ ID NO: 77513 - DNA, 676 bp, Homo sapiens
tgtgttcttaatgttacttagcaataacaaattttttaaaaatatgcatactttcttaaaataatgtctggtccatgtgaatgtaaacatcatgatggcaaggacatcatatatcttgtacatataatccaagtgtctgggacagtggcacgattagaggaaaatttagcaatatatgctcaataatgagatcttgtatgtgaggaggcctagaaaaaagcttgtcatacaatgaatcctcttgttattatttttctgctaaaaaggaagatgtaactgttaattttgattattagttttcataccacactataccacaatactggaaataaacattatcagttcaaagttagggtgttttattggatcaaccttttaaaaaaatctgtagttttcagagatcagatattttggtgcaggatatagatcgaatcactgatcttgagggttggctctggggactctgagatgacacacgaaaatgaaaaccacccagaggttttcttgtgtaccaattttttggatatatatcattaaatgagtctggggtaggcatttgaaaaggcatggaatctgctacccaaaatatcagtctaataagagagatgggcacatgaaccaaccattgaagtgtggtgtgataaaaacctcaaygaaaggaataactaaatgctca

SEQ ID NO: 77514 - DNA, 518 bp, Homo sapiens
tttaatagtcttaatttgcctgtctttggttagcagtgagaacaaacacttttacactgcatcttattgtctaacactctgatgcatgtaaaaactattggcctctgcttcctcagacctaggttatctctgacaatgaaccttttgctagcaatccacaccttcaacaagaataagcaatgtgtctgccagactcctcttcacatatctgcccttctagagrgatatttaggagctcaagtagctgtgggtggtggagttgtctatgcacttcgacttcgttctttctgtaacccaggcttttatggaccacagggacaggaaagaacagctcatatcattagcagatgcttcattggctgggggataagagtagggaggtaatcactcaaactctttctgcaatgctgactacaggatgttattagaaagagcagatggggtttggatggtttgaatcaggaatctgaaaccctagtgttgtgtccccaaaatacactagcatcaaaggcagacct

SEQ ID NO: 77515 - DNA, 677 bp, Homo sapiens
ggatccagtatagtccctgcatacagctggctctcaggatttattgaatggctgattgcttcctgaattagtataagaatgccagccaggcatttttcagctgggtgtggtggctcstgcctgtaatcccagcactttgggaggctgaggtgggcagatcacgaggtcaagagttcgagactggcctggccaacatggtgaaacccacccccgctccccgtctctgctaagaatacaaaaattagccaggtgtggtggcgtgcgtctatagtctcaggtactcgggaggctgaggcaggagaattgcttgaacccaggaggcagaggttgcagtgagccaagatcacgccactgcactccagccagggcaacaagcaagaccctgtctcgaaaaaaaaaaaaaatgccaagcaccatggtgagcacatgggtgaccctgcatcactgcttgctgacttggtcttagtaaatatgacacttctggggctcctggtgaatgtcctgacagaggtggcttggcttgaattgaaatctgggagtgctacatgaaggcactgtgagacaacttatgccaaccctgactctcttcatggcatctcactgatgccacctttcttgctttcattcacagtattttttttttaagaaatgatcttattttattttttaatttttat

SEQ ID NO: 77516 - DNA, 677 bp, Homo sapiens
ggatccagtatagtccctgcatacagctggctctcaggatttattgaatggctgattgcttcctgaattagtataagaatgccagccaggcatttttcagctgggtgtggtggctcctgcctgtaatcccagcactttgggaggctgaggtgggcagatcacgaggtcaagasttcgagactggcctggccaacatggtgaaacccacccccgctccccgtctctgctaagaatacaaaaattagccaggtgtggtggcgtgcgtctatagtctcaggtactcgggaggctgaggcaggagaattgcttgaacccaggaggcagaggttgcagtgagccaagatcacgccactgcactccagccagggcaacaagcaagaccctgtctcgaaaaaaaaaaaaaatgccaagcaccatggtgagcacatgggtgaccctgcatcactgcttgctgacttggtcttagtaaatatgacacttctggggctcctggtgaatgtcctgacagaggtggcttggcttgaattgaaatctgggagtgctacatgaaggcactgtgagacaacttatgccaaccctgactctcttcatggcatctcactgatgccacctttcttgctttcattcacagtattttttttttaagaaatgatcttattttattttttaatttttat

SEQ ID NO: 77517 - DNA, 677 bp, Homo sapiens
ggatccagtatagtccctgcatacagctggctctcaggatttattgaatggctgattgcttcctgaattagtataagaatgccagccaggcatttttcagctgggtgtggtggctcctgcctgtaatcccagcactttgggaggctgaggtgggcagatcacgaggtcaagagttcragactggcctggccaacatggtgaaacccacccccgctccccgtctctgctaagaatacaaaaattagccaggtgtggtggcgtgcgtctatagtctcaggtactcgggaggctgaggcaggagaattgcttgaacccaggaggcagaggttgcagtgagccaagatcacgccactgcactccagccagggcaacaagcaagaccctgtctcgaaaaaaaaaaaaaatgccaagcaccatggtgagcacatgggtgaccctgcatcactgcttgctgacttggtcttagtaaatatgacacttctggggctcctggtgaatgtcctgacagaggtggcttggcttgaattgaaatctgggagtgctacatgaaggcactgtgagacaacttatgccaaccctgactctcttcatggcatctcactgatgccacctttcttgctttcattcacagtattttttttttaagaaatgatcttattttattttttaatttttat

SEQ ID NO: 77518 - DNA, 786 bp, Homo sapiens
agtgggaattgaacatgagaccacttggacacaggaaggggacatcaccgcacatgggccgttttgtgggtagggggagggggaggaatagcattaggagatatacctaatgtaatggcccagttaatgggggcagcacaccaacatggcacatgtatacatatgtaacaaacctgcactttatgcacatgtaccctagaacttaaagtatgataaaaaaaaaacatatatgcaggggtccagctatgccccttaagcttctgatttgtacgtcaggggtgaagtgcaggatgttctgcgcttttgtttgttgtcactccatgtatgatacttatgtgagaaacactgaaagggaagacagtagcatcctaactgaacagaacccaatcactaatttaatagttcaactcttaatattttgccttgactatrtcttcatttgattgtgcagatcttgttttctagctcttaattttaaaactgacttttctttctgtatcagcctatctgcgctaaagagaaggaaatttggttgcggaaagggaacaggtggcaggaacatagcgatggaaaaaacagagaaccctgattagaatacacagactactttaaagaaagtgaaacaagattgtatttttggaaccaaaaagatgcaaggaattctgaagagtgagttttcagataatgaatatgcagctactgaattatgaaggctggagttatgaaagtctgttactttactcggttgtgattagtaagatctgatctgctgaaagtaaaacacat

SEQ ID NO: 77519 - DNA, 1510 bp, Homo sapiens
gcagggaacacaatgcaaattgtcccctaaagatccaaatgagctttgatggagagaagttttggaaccctaacttaacagatgcttggagttcctcccagaaccaaacacctcaggtgggcactttctttcccagatcactttcttcgtcatcaaaaataccctgaaccctggtgcagaggttcacacctgtaatcccatcactttgggaagcccacacgggaagatcgcctgagcccaggagttcgagaccagcctggtgaaatagtaaaaccgcatctctacaaaaaaaaatttaaaaaattagcatggtggcatgcatctgtagtcccagctacttaagaggctgagatgagagaatggcttgagcccaggggttcaaggctgccgtgagctaggatcactccactccagcctgggtgatagagcgggaccctgtcacttaacaagataataataataaagtcccctgagcccagaaggagggagagaagggaagtggaaggagcaaagtcatccctttggatcctggggaagactagcarcagttctgaagagatacaaagccctgatttccatcaggggctgtaatggggaagacactggacccctccctaggacctgctttccctggcacctcccacttcccctgagtggaaaagcaggcccagggctggctcctagggcccacagcccagagcctgctgcatgggattttaaattgtctctctcaaagtcgttgccaataccaatattaacaacggctcactcttaatgaactgcttactcttctctggccatgagtcatggagggcattttacagacatttgctcatttcttttcaaccctcacaacaaggccttgagaaaagtataatattatgctcattttacagatgaggaaactgaggcccagagagttatgatagattattgcagtaatggcccccaatttgttcatgcactaccctgggcagtgcccttccaccctggctcaggacttgaccatgggacttactttggccaataagaaagaagcaagcatattccaggcacagtggctcacacctgtaatcccagcactttgggaggccgaggcaaatggatcgcttgagctcaggagtttgaggccagcctgggaaacatagcaaaaccccatctctgccaaaaatacaaaaattatccaggcatggtggtgcacgcctgtggtcccagctgcccaggaggctgaggtggaagagctgctggagcctgggaagtcaaggctgcagtgaaccatgatcatgccactacactccaacctgggtgacagagagagagcctgtctcaaaaaataaaaagaaaggagcaagcataatgcctgcaggggctcgaaaagtgcttgcacactggggcttctctctcactgcctctgaagcccttttaccactctgtgaacaggcgcaggcttgtggagagagccccatagttcatcatcccagaggaagccaaattaatcagccagttccag

SEQ ID NO: 77520 - DNA, 1058 bp, Homo sapiens
tttctttctttctttcttttttgagacggagtctctctctgtcgcccaggctggagtgcagtggtgcaatctcggctcactgcaagctccgcctcccggcttcacgccactctcctgtgtcagcctcctgagtagctgggactacaggtgcctgccaccacgcctggctaatttttttgtatttttagtagagatggggtttcactgtgttagccaggatggtctcaatctcctgacctcgtgatccgcctgcctcggcctcccaaagtgctgggattacaggcttgagccaccgtgcctggcctgaagaggatggttcttaagagattgcctactcttgcctctaaagccagaaaacttcagtaggtcacctatggtctcttagctaaaatccggggcctttcttgctacgatgctgtttccattcttccaccatgcttccttttaagagtgtgctagttctcactcaaaccagcttrctgattgttaaatttttaggaatgttgtgaggtaattgctaaatacagccactattaaacattaaattatacaaatttacaattaaataaatttccaactccacgtttggtggtatcatcttggcagcctaacattggctatggtggcggtatttatactgctgaaattggcaaatgctacattttttttgagagatgattgttaaacatttaccagtacagcattggttgaacattgatccctttttttattgcagaagtgagatattaagtattaaattaagccgaaaaccgttagaaagctgtgctgaacagatgatttcagggcagtaaaatacacagaatgggaaattgattttaacccctaatgaattctaatgaacagcaatgctagagtactgatctcctgatgttcattgatccctcatgaagggctgtttagatcaatgggtgagatgctgatgggaaatcaaggtttttgttttgtttttgaccagtgctcttgctgaaaacagcaagcactagagagaagtaacaaggaagatttggactgaccacaaaaggagtttattttcttgt

SEQ ID NO: 77521 - DNA, 717 bp, Homo sapiens
aatacaaaaaaattagccgggcatggtggcgggcgcctgtagtcccagttacttgggaggctgaggcaggagaatggtgtgaacctgggaggcggagcttgcagtgagccgagatcgcgccactgcactccagcctgggtagagcgagactctgtctcaaaaaaaaaaaaaaaaaaaaaaggagtaagaaatcatcatattgtatttgttcccataatttattactgatacctcttatgatccttgtcttgatgacgcagggcttcatgggccaataccacagaagaaggccacataagaaaaaatgagtaataagagctaacgtgtatatagtgcttcctatttgccagaccctattctacatgcagtttgcatgttgtttaacaggtataaagatatagacaagcttcactaacaaaagaaaaataatcaaataaaacatattcatgcttccaaaraaagagaaaagaaatagacaaaaagaatttaaggagtagggatacttgggatagctatttttggatctctggtgaaagtcagtgatattgacagctagaaggcaatagtacacaacggtgctatagaagatttgaaagcaaagttgtatggaatgaatacaaatgtttctagcacattccagcaattagcatccctgaccatgggtcccaaaataaatgctgactagcacattgaacctcactgtaaattcactcaagt

SEQ ID NO: 77522 - DNA, 962 bp, Homo sapiens
tgcattggtactattttagattcttggaaattagcatgactttaggaagatggaagaactccagattaaaatgccattgagtttccaaaaatctagtggatgggggtggggtggagtttgaaacagaaattaagatgtttggacagataaggacagttacatttcttgtacagccaaggtcatggactaacatccttgctataggcagattattttctctttattcctgttacataacttattcatttattgaacagtagcttatgaaggatctctggaagccagaccctggtacaaggttgatatgagaacacaatcttggatgtaacacattcttgagagtcagattttagtatggaaattataataaaaaaacaacaacagtaggccaccttttgtaggaagagaacaaaattaccatgatgtttagactctcatactttaaaggtaaacctttggcatttttgagccttctgggaaaaaacagaagttaatagkacttgttaaaagaaagcaaagttttcttccttgtaccacttcactgttattcattaatctcttcttattaagtgttaacttgcaaaattaacaatccagtgttttaatggggaaaggaacaaagaagttgaaaatggagcattgaaattgctagtggaaattttaaaattggaatcattgactggattgcatttaaaattgatattataatagccaccttaacttctacacaatttactttgacacatttttgttatgggactattttggaaaattctgatttgggccaaatgtagattctgtgaactctaagcaatatttattcaggctccctcttcatgaacttcaatttctgtatccatagagagactcaccctctcctgccacccactacgccaccaccctgaaatcttatccgtctccagacgcagaagccatttcctgggctctattttttctatgca

SEQ ID NO: 77523 - DNA, 962 bp, Homo sapiens
tgcattggtactattttagattcttggaaattagcatgactttaggaagatggaagaactccagattaaaatgccattgagtttccaaaaatctagtggatgggggtggggtggagtttgaaacagaaattaagatgtttggacagataaggacagttacatttcttgtacagccaaggtcatggactaacatccttgctataggcagattattttctctttattcctgttacataacttattcatttattgaacagtagcttatgaaggatctctggaagccagaccctggtacaaggttgatatgagaacacaatcttggatgtaacacattcttgagagtcagattttagtatggaaattataataaaaaaacaacaacagtaggccaccttttgtaggaagagaacaaaattaccatgatgtttagactctcatactttaaaggtaaacctttggcatttttgagccttctgggaaaaaacagaagttaataggacttgttaaaagaaagcaaagttttcttccttgtaccacttcactgttattcattaatctcttcttattaagtgttaacttgcaaaattaacaatccagtgttttaatggggaaaggaacaaagaagttgaaaatggagcattgaaattgctagtggaaattttaaaattggaatcattgactggattgcatttaaaattgatattataatagccaccttaacttctacacaatttactttgacacatttttgttatgggactattttggaaaattctgatttgggccaaatgtagattctgtgaactctaagcaatatttattcaggctccctcttcatgaacttcaatttctgtatccatagagagactcaccctctcctgccacccactacgccaccaccctgaaatcttatccgtctccagacgcagaagccrtttcctgggctctattttttctatgca

SEQ ID NO: 77524 - DNA, 1530 bp, Homo sapiens
gggtcagctgtgtataggggcccacacagaatttggaatccaaatacatctctggatccccaggcctgtgtttgactcgccaggtagtaatgagatgtctccattttctgcaggctgaatgattccctcagagcagaagtataagcatatttattgtttttccttctatcataaacagttattagttgtggccctttctcccttccaaataggtgcccaaatttctggaagtggaaagggcccaactttcccatatcagggggtgggccccactgggcgtgagccaatcagtgtcttctgtcctgtgagctcccgatttatgctggtctataacctgagatggccttctcaggatggacctccagggattgctggaacttggactcttgtcagcctggtaaatggtatgtcttagatctgctgcagccgtcgtggaaaacttgaagctgccaggagagaggggttccaacatgtggtggctaaagaatgaatccaactcaaaggaagcagagccaagaaatggatccatgctgtttgaatcttggatcaaattgtgcctggatctccagtgagacaataaattcctgtattactcaagcctatttgagattgttttctttcacttgaaacattaaacttttaaattgatacaccctagttaaattataaactgtgtgacagcagrgactgtgtctctctcttttttttctttcttttttttttgttttgaaacagagtttcactaccgtcacccaggctggagtgcagtggtgtgatcttggcttactgcaacctccgcctcctgggttcaagtgattcttgtgcctcggcctcccaagtagctgggaccacaggtgtctgccaccatgcctggctaattttttgtatttttggtagagatggggtttcaccatgttggctaggctggtctcaaactcctgacctcaaatgaccaaccaacttggcctcccaacatgctgggattacaggcgtgagccattgcgcccggcccaagactgtttctcttgatcacttatgtgtcccctggcacgtggtaaggattcaataaataacttttgaatggatgcattttagctgcaaggaacacccataaactctcttttactcagctgacagctaaggaatctggtgttatataagaaagtgatgatgtggatctataagttggaccttaccccaacactgggatttttctaatcacaggaaatcttccagtaaatatgttggggtctttgaggaggccccaaaatagcagtctgctcccttctctgtgaattttgaattgaatcagaagatagcagcaagctagatgaggaccaaaaataaccttttctactgataaagctgatattagagaacgtggcttatatcatcagacaatcgagcttcccgatactcaacttcagagttaggcagacttggcggctcgatgacaggcagctgagctggaatgggcctactcttcccaccccacgggagcgaagcttgctcccaagaagaaaagagagg

SEQ ID NO: 77525 - DNA, 673 bp, Homo sapiens
ccctttccagcctttaatactcccaatgattaagagaatttaatgtggccagacatggtggctcatgtctgtaatcccagcactttgggaggctgaggtgagcagatcacttgagcccaggagttcaagatcagtctgggcaacatggtgaaatctcgtctctacaaaaaatacagaaattagcagggtgtggtagtgtgtacctgtagtcccaagctactcaggaggctgaggtgggaggatagcttgagcccaggaagtcaaggccgcagtgagctgtgatcacgccactgcactccagcctgggtgacagagcaagaccctgtctcaaaaaaaaaaaaaagtttaatgcttctaaagtgcttagaacagtgctacaattgttagctattgtggcaatagaaatgacatttatattggcttatctagctcatggcttatctagtaagctgtcccattcttaccaggcacctcacactacctgcctttgtcttgtggttgtcaagcatctgggcttttgagtgtaggctagaaagaaacaagagactgctgtgctggagttcwgaaatagaggttgcaaacagatcaacagctcctgatgtagatgactatagccagcttctcagtttggattaactttacggtttctgtagcggccttgataactaattga

SEQ ID NO: 77526 - DNA, 416 bp, Homo sapiens
atcctacgagtttccttactttcatcaaactcagctatctatttaaaaggaatttattgctttttgaatccaggctttatacatgcctcctagtgtttaaaaggatagctattgtataatattgccagaaatgaaagcatagttcttgttctgtacatttattaaatacatcgcatgtacatagtttttctttagccccacgtctatcttattttgttgctttaccaccttgccttgagttcttcctttattaarttcttctaaagcctaaaatactcttgtggggattttcttttctattccttgttatgaggtattattcatccagtatgttgccaggttcagttattttattttatttttgagacagagtctccctctgttacccaggctggagtgcagtgatgtgatctcag

SEQ ID NO: 77527 - DNA, 495 bp, Homo sapiens
atgttctagacccaacaaacgaacacgtgcagttcccaagccttcctcactccctgtttatgggagactccttgtttctcacatttcttttagtcttagagacaatttggtcaggagacatgggtttaaatgaaggcacagagcctgggcacagcagcttacacctgtaatcccagcactttggaaggccaaggcagaaggatgacttgaggtcaggagatcaagaccagcctggccaacatggtgaaaccctgtctctatgaaaaatacaaaaattagctgggtgtggtggcacatacctgtaatcccagctactcgggaggctgaggcacragaatctcttgaacctgggaggtggaggttgcagtgagctgagattgctccactgcactccagcctgggtgacagagcaagactccatctcaaaaaaaaaagaaaagaaaacaagaaaaaaaaaagtccgggcatggtggctcatgcctataatcccagcac

SEQ ID NO: 77528 - DNA, 740 bp, Homo sapiens
agccaccgtgcccggccttaattttttatttttaatagagataaggtttcaccatgctggccaggctggtctcaaactcctgaccttgtgatctgcccacctgggccttccaaagtgctgggattacaggcgtgagccaccggcccttttttttttttaaataagatagagacggggtcttactatgttgcccaggctggtctcaactcctggcctcacacaaccctcctgcctcagcctcccaaagggctgggattacaggtgtgagccaccacacccagccaagatcagactcttaactcttgcccactattcttggactaacgttcctttacatgttatccaggatctcttagtatccacaaacttaatagtcttactataaacactgttttagacttctggtatgaattatttgcgtatgacttttagttttaaaagagaaaatccttttaactcatcaaaggcaatgccattatttctctctgttgttctataaagtcatattatgtaaaataggtatcagcgagatcctttaaaaaaaaattgacatagtttttctagaataactggtcatcagtcttggggtgaatttcaaattggaattgttaaagtactccaagatgtgtcactcagcatttttttttctytttttgagtcagggccttgctctgttccccaggctggagtgcattggtgtgatcacagctcactgcagcctcaaactcctgggctcaggc

SEQ ID NO: 77529 - DNA, 649 bp, Homo sapiens
aagctcaataggctaacaccctgtgaacactcaacctgcaaacactcagaagggtctaaaagagtgatacagggtttcaccatgttggccaggctggtctcaaattctggcctcaagtgatccgcctgcctgggccaacatggcaaaaccccgtctctacttaaaaataacaaaaaaaattagccaggcatagagtcacatgcctgtagtcccagctactcaggaggctgaggcacgagaatcctttgaacctgggaggtggaagttgcagtgagccgagaccacgctgttgcattccagactgggtgagagacactgtctcaaaaaaaaaaaaaaaaaaaaaaaragtgataggggaagcatgcgcctgtaactctaagataatcaggtagtaattagatgagttagactctcatgggtaacatgactccttttacaaatagtctgccatcatcatcaaatacaaggcgcaaaaagaaaaaaaattcccattatacggctcatgttttttgtggtttgttggttgagacagggtctcaatctgccacccaggctggagtgcagtggtgcattcacggctctctgcagcctcgacctcctgggctccatccatcctcccacttcagcctcctgagtagctgggaccaca

SEQ ID NO: 77530 - DNA, 649 bp, Homo sapiens
aagctcaataggctaacaccctgtgaacactcaacctgcaaacactcagaagggtctaaaagagtgatacagggtttcaccatgttggccaggctggtctcaaattctggcctcaagtgatccgcctgcctgggccaacatggcaaaaccccgtctctacttaaaaataacaaaaaaaattagccaggcatagagtcacatgcctgtagtcccagctactcaggaggctgaggcacgagaatcctttgaacctgggaggtggaagttgcagtgagccgagaccacgctgttgcattccagactgggtgagagacactgtctcaaaaaaaaaaaaaaaaaaaaaaagagtgataggggaagcatgcgcctgtaactctaagataatcaggtagtaattagatgagttagactctcatgggtaacatgactccttttacaaatagtctgccatcatcatcaaatacaaggygcaaaaagaaaaaaaattcccattatacggctcatgttttttgtggtttgttggttgagacagggtctcaatctgccacccaggctggagtgcagtggtgcattcacggctctctgcagcctcgacctcctgggctccatccatcctcccacttcagcctcctgagtagctgggaccaca

SEQ ID NO: 77531 - DNA, 541 bp, Homo sapiens
aatctcttcctctcctccctcggccttcctctccccacaaaccccagggtctagaaagtagaaggttctcccctcttctctccttcctcataatgaactcgatggagctggcccgagtgcagtggtggttacagttaattgatcacaacgacttacagatttttttgttccttctccactcccactgcttcactggacgagccaaacacaaattaaataaataggcaggtcacagtggctcatgcctctagtcccagtgctgtaggaggccaaggtgggcggatcactcgagcccaggagttcgagaccagcctgggcaatrtggtgaaatcccatctctaccaaaaaaaaaaaaaaaaagaagcaaaaattagccaggcatggaggtacaacctgtagtcccagctacttgggaggctgaggtaggaggatctcttgagcctggaaggtttttttttttttggtgtttttttgtttgtctgtttttttaaacggagttttgctcttgttgcccaggctggagtgcaatggtgagatctca

SEQ ID NO: 77532 - DNA, 376 bp, Homo sapiens
tcattgattccagtgagatctaaaaattggttgaatgacccccattttcaggtgaatgataagactcagagaataaattacctgccccaagatcacacactaatgtagaagccaggaacaaatttgagtcttctgtttcckgaactagtaagccttttctactcttacacattatacattagatacattattctcacattgacgttatgaaaattttcatttcttttgaaaggggctttgagaattctcaagtgtccgtgtactatattaaacgatgctttgttggaagagtaatattattgtattttcagatgctttgcaaaagtttatctaccactgcagaacttactttcacccttatcaaacctgcaagcaa

SEQ ID NO: 77533 - DNA, 581 bp, Homo sapiens
ctgttccatatccctacagaaagaccagtgcttcctttccctcctgtctgtcttggtccccacactcagttcaaattctatcccttttctgctgctgcctcaggaagctccttttccttgtgtgagattcccatcagggcccctaggtttggcactgacagctattccacagtctcccacctggccctcrgtagtcacgcatgtattcttcatgtagcagaactagatgtttccaccaaagtctctttgcttctccatactcaccataaatttcctagtgctcctccagtgttggtttcccttagctccccagtactggtgggctcaccgtgtgccctccagttacaacacgcacactcagaggagcatcctgactccttccaacataagtaaagtaagacaggagagctcacactgccaacaaatacaaagtgttacaggaaaacctcggtgtttagttccctccttaaaggcagctgcatttgcctgccctactcccataccagggccaaccttgaagtgctactactgtagggcctggtgtaacagatgttttcattgaaccacacctggctcccaaa

SEQ ID NO: 77534 - DNA, 581 bp, Homo sapiens
ctgttccatatccctacagaaagaccagtgcttcctttccctcctgtctgtcttggtccccacactcagttcaaattctatcccttttctgctgctgcctcaggaagctccttttccttgtgtgagattcccatcagggcccctaggtttggcactgacagctattccacagtctcccacctggccctcagtagtcacgcatgtattcttcatgtagcagaactagatgtttccaccaaagtctctttgcttctccatactcaccatraatttcctagtgctcctccagtgttggtttcccttagctccccagtactggtgggctcaccgtgtgccctccagttacaacacgcacactcagaggagcatcctgactccttccaacataagtaaagtaagacaggagagctcacactgccaacaaatacaaagtgttacaggaaaacctcggtgtttagttccctccttaaaggcagctgcatttgcctgccctactcccataccagggccaaccttgaagtgctactactgtagggcctggtgtaacagatgttttcattgaaccacacctggctcccaaa

SEQ ID NO: 77535 - DNA, 933 bp, Homo sapiens
cactgagtgaaccagactccgtctgcaatcctggcatctcgggaggccgaggctggcggatcactcgcggttaggagctggagaccagcccagccaacacagcgaatccccgtctacaccaaaaaaatacgaaaaccagtgaggcgtggcrgcgcgcgcctgcaatcgcaggcactcggcaggctgaggcaggagaatcaggcagggaggttgcagtgagccgagatggcagcagtacagtccagcttcggctcagcatcagagggagaccgtggaaagagagggagacggagaggtagaggtagaggtagagaggtagagaggtagagaggtagagaggtagagaggtagagaggtagaggtagaggtagagggagagctcccttacatttttacgagatcagcactggttatattttcccagcttttaaaggtatacatggagtggggagaaggggatttcaaattcactagaaggtctccatcctaaactgcaattgtataaaaatatcagtaaacaataaaaacagatgcatttaaggcctgggattagagatgaagcccttctgttgaaaactgtttttgatattggtaatgaaacacagttcaggaaaaaagaaaaagccgacaaataaaatgattacctaagctgataaaaagaaaaacaggatccacggtgcaagtttagggggttaaatgtttattaaatcaagcttttaaattatatatccacctacagtctataaacaaatatagtacacatgtatgtaaaaggctagcagataagaaccagtggaaaaactaaagttccctttgcacaccggcacctcatcacaacaccctcttggtgtggatgccatggggccatgctgtagtcaaaagttaaatgaaaaaccacaagtttagtttgactccgtctcctagggtggattt

SEQ ID NO: 77536 - DNA, 933 bp, Homo sapiens
cactgagtgaaccagactccgtctgcaatcctggcatctcgggaggccgaggctggcggatcactcgcggttaggagctggagaccagcccagccaacacagcgaatccccgtctacaccaaaaaaatacgaaaaccagtgaggcgtggcgkcgcgcgcctgcaatcgcaggcactcggcaggctgaggcaggagaatcaggcagggaggttgcagtgagccgagatggcagcagtacagtccagcttcggctcagcatcagagggagaccgtggaaagagagggagacggagaggtagaggtagaggtagagaggtagagaggtagagaggtagagaggtagagaggtagagaggtagaggtagaggtagagggagagctcccttacatttttacgagatcagcactggttatattttcccagcttttaaaggtatacatggagtggggagaaggggatttcaaattcactagaaggtctccatcctaaactgcaattgtataaaaatatcagtaaacaataaaaacagatgcatttaaggcctgggattagagatgaagcccttctgttgaaaactgtttttgatattggtaatgaaacacagttcaggaaaaaagaaaaagccgacaaataaaatgattacctaagctgataaaaagaaaaacaggatccacggtgcaagtttagggggttaaatgtttattaaatcaagcttttaaattatatatccacctacagtctataaacaaatatagtacacatgtatgtaaaaggctagcagataagaaccagtggaaaaactaaagttccctttgcacaccggcacctcatcacaacaccctcttggtgtggatgccatggggccatgctgtagtcaaaagttaaatgaaaaaccacaagtttagtttgactccgtctcctagggtggattt

SEQ ID NO: 77537 - DNA, 933 bp, Homo sapiens
cactgagtgaaccagactccgtctgcaatcctggcatctcgggaggccgaggctggcggatcactcgcggttaggagctggagaccagcccagccaacacagcgaatccccgtctacaccaaaaaaatacgaaaaccagtgaggcgtggcggcgcgcgcctgcaatcgcaggcactcggcaggctgaggcaggagaatcaggcagggaggttgcagtgagccgagatggcagcagtacagtccagcttcggctcrgcatcagagggagaccgtggaaagagagggagacggagaggtagaggtagaggtagagaggtagagaggtagagaggtagagaggtagagaggtagagaggtagaggtagaggtagagggagagctcccttacatttttacgagatcagcactggttatattttcccagcttttaaaggtatacatggagtggggagaaggggatttcaaattcactagaaggtctccatcctaaactgcaattgtataaaaatatcagtaaacaataaaaacagatgcatttaaggcctgggattagagatgaagcccttctgttgaaaactgtttttgatattggtaatgaaacacagttcaggaaaaaagaaaaagccgacaaataaaatgattacctaagctgataaaaagaaaaacaggatccacggtgcaagtttagggggttaaatgtttattaaatcaagcttttaaattatatatccacctacagtctataaacaaatatagtacacatgtatgtaaaaggctagcagataagaaccagtggaaaaactaaagttccctttgcacaccggcacctcatcacaacaccctcttggtgtggatgccatggggccatgctgtagtcaaaagttaaatgaaaaaccacaagtttagtttgactccgtctcctagggtggattt

SEQ ID NO: 77538 - DNA, 933 bp, Homo sapiens
cactgagtgaaccagactccgtctgcaatcctggcatctcgggaggccgaggctggcggatcactcgcggttaggagctggagaccagcccagccaacacagcgaatccccgtctacaccaaaaaaatacgaaaaccagtgaggcgtggcggcgcgcgcctgcaatcgcaggcactcggcaggctgaggcaggagaatcaggcagggaggttgcagtgagccgagatggcagcagtacagtccagcttcggctcagcatcagagggagaccgtggaaagagagggagacggagaggtagaggtagaggtagagaggtagagaggtagagaggtagagaggtagagaggtagagaggtagaggtagaggtagagggagagctcccttacatttttacgagatcagcactggttatattttcccagcttttaaaggtatacatggastggggagaaggggatttcaaattcactagaaggtctccatcctaaactgcaattgtataaaaatatcagtaaacaataaaaacagatgcatttaaggcctgggattagagatgaagcccttctgttgaaaactgtttttgatattggtaatgaaacacagttcaggaaaaaagaaaaagccgacaaataaaatgattacctaagctgataaaaagaaaaacaggatccacggtgcaagtttagggggttaaatgtttattaaatcaagcttttaaattatatatccacctacagtctataaacaaatatagtacacatgtatgtaaaaggctagcagataagaaccagtggaaaaactaaagttccctttgcacaccggcacctcatcacaacaccctcttggtgtggatgccatggggccatgctgtagtcaaaagttaaatgaaaaaccacaagtttagtttgactccgtctcctagggtggattt

SEQ ID NO: 77539 - DNA, 933 bp, Homo sapiens
cactgagtgaaccagactccgtctgcaatcctggcatctcgggaggccgaggctggcggatcactcgcggttaggagctggagaccagcccagccaacacagcgaatccccgtctacaccaaaaaaatacgaaaaccagtgaggcgtggcggcgcgcgcctgcaatcgcaggcactcggcaggctgaggcaggagaatcaggcagggaggttgcagtgagccgagatggcagcagtacagtccagcttcggctcagcatcagagggagaccgtggaaagagagggagacggagaggtagaggtagaggtagagaggtagagaggtagagaggtagagaggtagagaggtagagaggtagaggtagaggtagagggagagctcccttacatttttacgagatcagcactggttatattttcccagcttttaaaggtatacatggagtggggagaaggggatttcaaattcactagaaggtctccatcctaaactgcaattgtataaaaatatcagtaaacaataaaaacagatgcatttaaggcctgggattagagatgaagcccttckgttgaaaactgtttttgatattggtaatgaaacacagttcaggaaaaaagaaaaagccgacaaataaaatgattacctaagctgataaaaagaaaaacaggatccacggtgcaagtttagggggttaaatgtttattaaatcaagcttttaaattatatatccacctacagtctataaacaaatatagtacacatgtatgtaaaaggctagcagataagaaccagtggaaaaactaaagttccctttgcacaccggcacctcatcacaacaccctcttggtgtggatgccatggggccatgctgtagtcaaaagttaaatgaaaaaccacaagtttagtttgactccgtctcctagggtggattt

SEQ ID NO: 77540 - DNA, 650 bp, Homo sapiens
tttcttttatcacaggtgaaaactcatgccctcccaggatacatttgccctgccaatttggctgtctgactgatatcccttgggctctgcccagaaaaaccttggataaatttttattcagtttcctctctgagactcagttactatttactcatcatttttgttttgagatctttcttttaatgtacacattttaaaagcctttacttgtggatcaatttaccctcttttgtttaagttattgcctaaaccaatttttctttgaaaaaacaaaacaaaacaaaatattttaaagcccttagttcgttgtagtttgtgtctcctccaccatgtaatttycagttcttttgatacagccaggggtctgattggcacttctctaagatcctgtaactcaaaaaacccattgtattttgataggaagcactagctaatctggttgaatctcagcattattatcttttttttttttttttgagacagggtctccctctgtggcccaggctggagtgcagtggcacaatttcggctccctgcaacccccacctcccgggttcaagcgattatcccgcctcagcctcctgagtagctgggattacaggcgtgcaccaccatgcctggctaatttttgtatttttagtagaggcagg

SEQ ID NO: 77541 - DNA, 620 bp, Homo sapiens
tctggaccccgttgggaccatggacatggttttctccctcatcaggcagtttggaaattctttctcaggtgaaaggcagaggcttgggcrctgactaaggccctggggtaactggcttaatgttcctgacatcaccctctgtgtctatcagagctaaaaatgcaggtactatcagaagactcaggtgaccagtgctgaagtcaccactcagtccaggaatcacacaatcaaaggctctgctgtgggatttaacacccatcagagcactcagtaaaacgtatgtgaataaggttgggtcaccaaggcccagacaagagctacgatcttcagcattggcatttttaaaaccttttcactgaagtataacacacatacagaaaacgtacctgtacctatgcaccctgaacgtagagcctgatacatcttcacatcgttattttcacattcttgttactgggatgaatagctctgtgtatactttgaaaataaacaaaagctaagcacatttgattatctatcattaaaacgaaaaaaaaaatacctagaagtatacatagcttttgccttttagcggaggctcattcacagtgaatgtccagtttttggatctgggaaacccc

SEQ ID NO: 77542 - DNA, 620 bp, Homo sapiens
tctggaccccgttgggaccatggacatggttttctccctcatcaggcagtttggaaattctttctcaggtgaaaggcagaggcttgggcactgactaaggccctggggtaactggcttaatgttcctgacatcaccctctgtgtctatcagagctaaaaatgcaggtactatcagaagactcaggtgrccagtgctgaagtcaccactcagtccaggaatcacacaatcaaaggctctgctgtgggatttaacacccatcagagcactcagtaaaacgtatgtgaataaggttgggtcaccaaggcccagacaagagctacgatcttcagcattggcatttttaaaaccttttcactgaagtataacacacatacagaaaacgtacctgtacctatgcaccctgaacgtagagcctgatacatcttcacatcgttattttcacattcttgttactgggatgaatagctctgtgtatactttgaaaataaacaaaagctaagcacatttgattatctatcattaaaacgaaaaaaaaaatacctagaagtatacatagcttttgccttttagcggaggctcattcacagtgaatgtccagtttttggatctgggaaacccc

SEQ ID NO: 77543 - DNA, 749 bp, Homo sapiens
tgtgatgtgccaggttgtaaagtggtaacaaacattccccaaatatcagtgkcttcatataccaaagtctgtcactctcactctatgtccagtaaggggcagcaggggccctgctcatcagtgtcgtgcaggagccccttggagcaagggaggaccactctctacatatgcatagagatctccaaggactgaagagggggcctcttgaggctctcacactggtcatcaaatcgctggctctggagatacttcctcttacaactaatccaatgactacacctgcacgcaggctcagcctctgatgaccaggagaaagaagacaaccagccagccaccagtccggatgctgcacaccttctcagggatacccagggagttaaataagaaacagacgagcaaaatattttcaagactttaactgaataataaaaatcagtcgtacttagttggctggagttttattgcaatacaaatctaagatgagcatttcagataaaagttggaccaaggttcaggaattaaacattttgaacacgacatgatcagccccagcctccactctcaagtgagctgcatggttcaggcaaattacctaaacttttgggcatccatttaatcacccagatagtgaatctgtgggcttcagagttactgggagcactttttaaagcatcactgtgggacctcatctgcagaactgctgattcagcaggcctggggtggggccagggaatttgcctttctaccca

SEQ ID NO: 77544 - DNA, 749 bp, Homo sapiens
tgtgatgtgccaggttgtaaagtggtaacaaacattccccaaatatcagtggcttcatataccaaagtctgtcactctcactctatgtccagtaaggggcagcaggggccctgctcatcagtgtcgtgcaggagccccttggagcaagggaggaccactctctacatatgcatagagatctccaaggactgaagagggggcctcttgaggctctcacactggtcatcaaatcgctggctctggagatacttcctcttacaactaatccaatgactacacctgcacgcaggctcagcctctgatgaccaggagaaagaagacaaccagccagccaccagtccggatgctgcacaccttctcagggatacccagggagttaaataagaaacagaygagcaaaatattttcaagactttaactgaataataaaaatcagtcgtacttagttggctggagttttattgcaatacaaatctaagatgagcatttcagataaaagttggaccaaggttcaggaattaaacattttgaacacgacatgatcagccccagcctccactctcaagtgagctgcatggttcaggcaaattacctaaacttttgggcatccatttaatcacccagatagtgaatctgtgggcttcagagttactgggagcactttttaaagcatcactgtgggacctcatctgcagaactgctgattcagcaggcctggggtggggccagggaatttgcctttctaccca

SEQ ID NO: 77545 - DNA, 938 bp, Homo sapiens
aactgaacaacaattatttttcatgcgtgggatcattttgattccatccaagccagtttgttaaagacaaaataccctgacattctcatgggatgtatcctgagacctttgaaaatctgcaaatctgtgaataccactgtagaataaagtttccttctgacaaaaaacaagaacagaaaagtttaaggaactcaaaacttctactggtttggacctgtttsgcctccatttcgatcaccaacatgtttctagccaatttttttagtataaaaaattagttttttaactgattctttggagttaccttgttcattaaaaaaaaaaaatagaaattggccggtggctcacgcctgtaatcccagcattttgggaggccgaggtggacggatcacgaggtcaggagatcgagaccatcctggctaacatggtgaaaccccatctctactaaaaatacaaaaaaaattagccaggagtggtggcgggcgcctgtagtcccagctactcaggaggctgaggcaggagaatggagtgaacccgggaggcagagcttgcagtgagccaaaatcacgccacggcactccagcctgggcggcagagcaagactctgtctcaaaaaaaaaaaaaaaaatacaaatcaataaagcaatcaagtaaatacaaaattgattattgcagaaggccaataaaataggcaaatttttgttagtttgactaaagaaaatacaaataatgttaaggtagaatcaagaaagacaatataatgatatcaacctaaaacaatcaaaaaggtcaaaatttagtttaaagagagtttgttcaaaggcaaagtttgaggagggcctaccaagaaatacagattccaaagaatggaagtcagcgttcctaagtgtagaagtttggggtcatttatatacaaaaagtttaagaaaacagaacag

SEQ ID NO: 77546 - DNA, 938 bp, Homo sapiens
aactgaacaacaattatttttcatgcgtgggatcattttgattccatccaagccagtttgttaaagacaaaataccctgacattctcatgggatgtatcctgagacctttgaaaatctgcaaatctgtgaataccactgtagaataaagtttccttctgacaaaaaacaagaacagaaaagtttaaggaactcaaaacttctactggtttggacctgtttcgcctccatttcgatcaccaacatgtttctagccaatttttttagtataaaaaattagttttttaactgattctttggagttaccttgttcattaaaaaaaaaaaatagaaattggccggtggctcacgcctgtaatcccagcattttgggaggccgaggtggrcggatcacgaggtcaggagatcgagaccatcctggctaacatggtgaaaccccatctctactaaaaatacaaaaaaaattagccaggagtggtggcgggcgcctgtagtcccagctactcaggaggctgaggcaggagaatggagtgaacccgggaggcagagcttgcagtgagccaaaatcacgccacggcactccagcctgggcggcagagcaagactctgtctcaaaaaaaaaaaaaaaaatacaaatcaataaagcaatcaagtaaatacaaaattgattattgcagaaggccaataaaataggcaaatttttgttagtttgactaaagaaaatacaaataatgttaaggtagaatcaagaaagacaatataatgatatcaacctaaaacaatcaaaaaggtcaaaatttagtttaaagagagtttgttcaaaggcaaagtttgaggagggcctaccaagaaatacagattccaaagaatggaagtcagcgttcctaagtgtagaagtttggggtcatttatatacaaaaagtttaagaaaacagaacag

SEQ ID NO: 77547 - DNA, 736 bp, Homo sapiens
agggaaactgccctctttggggaagctgctgatgagcatgagggtaggaggcttccatacccacctggctcacaaagatgtttccagccacactcagggtctcagtggctgtggtgcccatggtgacttgcatcagccaggcaatctagaaggaagcagaatgttctttgtgggctgacatcagcaaaccccagagtcagagggggctggagtggaagaccttacacagtttyctcccaactcccagcccagtgtaggaccccttcatctacattttcccaaaaggtccattcatcttcttcttccacaccttcattgatgggggcttaccccttcccaaggccattcatttcaccgtaggaatgcagaaaggatttcctggcccaatatatttgagaattgtgaaatgcacacacacacacacacacaccccttggagattaccaatacacattagcttagtaaagcctctgagaagtcctgcattaagcctatttaaattttcatagcataatgtctagcctagtttccctaaattatttgaccatgggattaggctacctttacctggtaacatttactaacatgctgtggaactagagttttgtggaaaaggttttgggaaacattctattagaaagcccttccccttccccttcctcttcccctttcctttcctttcctttccaagacagagcctcgttctgtcacccaggctggagtgcggtggcacaat

SEQ ID NO: 77548 - DNA, 1453 bp, Homo sapiens
tgacatttataccagctaagtctggccaacatggtccactgctacagtctctcaatatcttttcggtataaattattttcttccctctacaccttttcagtgccgcctcaaaactgcaacctttcctctagcaaggaccacattagactttggtgctatttctctttagtatcatgacaggagaccctgggaaaggacatttggtcagcactagattctgtgagggtgaagatcctggaagcaggggattcagggaaggtatgggcctcaggagcaaaggattctaggaaggtgtgaactctaagagccaggggttcagggaagatatggacttcagaagcaagggattctaggaaggtgtgaactctaagagttggggattctgggaaggtatgggcctcaggagcaaaggattccagaaaggtgtggaacttggcagctggggattctgggaaggtggaggcactgggaacaggggaytctggaagggtgtgggcttggggagcagtgtgtctggggaggtttgggctctgggagcaaggcattctgggacagtgtgaaccctgtgagctggtgactctgggagagccctggccatgggcactgggaacttaccttcaggatcacccactgcatgaggcccacgtggtagagaacggatatgacacagctgaaaaagacaatgatgggcagaacctgccgggaaggagatcataggaccgcaggttagaggcaggcaggatgcagggtgccaggcggggcccaggagaccccagacagcccactccatcccaggccttgccactcagatgcctgacaggatccgggaagatgctctgagatcagtgcatgaagtcccagggttccacatgcagggcctctttggaggcagccttgtcctctcggctcccctctaaatagtgaccagccgccagaccaccccctctcctcagcacaggtaggcctgtgctgtggtagggtggggcctgagtgtaccacttttatctcctgcttctttgtctctaaaaggggagtaaaatgcccacatctgagggtcgttgtgaaggtggcagtgtgcacccttctccatgagctcaatccttggcctcagactctggccttaacctccctctcatgctttgggcctgaatgaggggaccctcatcattttggtgctccacttctgctcagcaccaacatgctcagaattaggcttatcccggacctgagccagcatctcctcccatcaccccatttcctattattagtaccaggcttaacactcctcttccttcactccaagctcacccattctccctttagaatttctctcacacccattccctcttttccaggcccatggaaaaggaggttgcttttctgcaccctagtctttctttactgtagtctgatgtttagtaacaaactggcaaaaaatggagaggtcttttag

SEQ ID NO: 77549 - DNA, 1453 bp, Homo sapiens
tgacatttataccagctaagtctggccaacatggtccactgctacagtctctcaatatcttttcggtataaattattttcttccctctacaccttttcagtgccgcctcaaaactgcaacctttcctctagcaaggaccacattagactttggtgctatttctctttagtatcatgacaggagaccctgggaaaggacatttggtcagcactagattctgtgagggtgaagatcctggaagcaggggattcagggaaggtatgggcctcaggagcaaaggattctaggaaggtgtgaactctaagagccaggggttcagggaagatatggacttcagaagcaagggattctaggaaggtgtgaactctaagagttggggattctgggaaggtatgggcctcaggagcaaaggattccagaaaggtgtggaacttggcagctggggattctgggaaggtggaggcactgggaacaggggactctggaagggtgtgggcttggggagcagtgtgtctggggaggtttgggctctgggagcaaggcattctgggasagtgtgaaccctgtgagctggtgactctgggagagccctggccatgggcactgggaacttaccttcaggatcacccactgcatgaggcccacgtggtagagaacggatatgacacagctgaaaaagacaatgatgggcagaacctgccgggaaggagatcataggaccgcaggttagaggcaggcaggatgcagggtgccaggcggggcccaggagaccccagacagcccactccatcccaggccttgccactcagatgcctgacaggatccgggaagatgctctgagatcagtgcatgaagtcccagggttccacatgcagggcctctttggaggcagccttgtcctctcggctcccctctaaatagtgaccagccgccagaccaccccctctcctcagcacaggtaggcctgtgctgtggtagggtggggcctgagtgtaccacttttatctcctgcttctttgtctctaaaaggggagtaaaatgcccacatctgagggtcgttgtgaaggtggcagtgtgcacccttctccatgagctcaatccttggcctcagactctggccttaacctccctctcatgctttgggcctgaatgaggggaccctcatcattttggtgctccacttctgctcagcaccaacatgctcagaattaggcttatcccggacctgagccagcatctcctcccatcaccccatttcctattattagtaccaggcttaacactcctcttccttcactccaagctcacccattctccctttagaatttctctcacacccattccctcttttccaggcccatggaaaaggaggttgcttttctgcaccctagtctttctttactgtagtctgatgtttagtaacaaactggcaaaaaatggagaggtcttttag

SEQ ID NO: 77550 - DNA, 849 bp, Homo sapiens
ctcatgactaaaaagaaaaagcatagtttgctcatttttctctcatctttcagatgctgctgtcttcagatggagttttgtttgcagatttattgcagtatttcttacttgatctctccctaacgtgactgactttctcgttcattgtttaatgtctgtgcttttgacttcctgtctctcaagttatctgatctcccaggaaaaggaccagagttctccatgtagctttcccaggtgcaagtttcctaagttggctggggtgaacttttaaggatatatagaatttacttcctcttttcctatttcttgcttacatagattgagctgttctttcctaaaaataaatcttagctttcatgaaccaccttcatagacatctttgcccaacagatgagagaagccccaccttttatatggacatagatgagccagtcagagtctattttggagtaactaagacgtagaatgtttactatatttttatgtctagaaattttgtcttacaggtgcttctttaattgaacttttgggacttttcaaaaggcttttgtgaaaaaatgtaaattttacctggaaggaaattgaggaagtgaatttgtttctcattagaacacacaaattcataagattgactcattactgcattaacagcctggagagtgtagacaaagttctagtaaagcatgttgagaatgacgatgtgacctctagatctggcttagtcactgattttgctgtgagtctttggaaaagcattgtccccctctgrgtcttggtattgttctctttaggtgaaatgatttacatggttctttccagttctgctaattatattcatgaacttatgca

SEQ ID NO: 77551 - DNA, 1594 bp, Homo sapiens
ttgggaaagttctggtttcttgcggttggaatgaagccagtagctagttctggccagcgaatcgataacaaaaaagtcatgtatacattctagagatgaccattaattactaatttaagacctcccagaagtcagcttccctttggaacagtgacctactccatcagcctcggttcttgagagtgaagtcatcagctcctctccaacatatgctggataaataatgtggatgacaaataaacctttgctgttttaasctactgaggtcttgggactggttggcagcagaataacctagattatctagcagaaatatctcctcaattatattttcagattttctgtttctgggccagttctgattgagtaaaaaccacaattatttcaacagctttattctccccttaatacagtaaaatcaaatccatgcttcaagatgcagggtctatgtcttattttacctcccataataggatctctactctctgtggctctctggttatattagttccttatattctcactccctgctttctcacatctggttttgaatacatctatagatttgtaatcatctttcagttctcaatggttattttaccagtccagctcttttctaggaccagagtcttcctggaatgcccactttaatgtcagtgagcccactgcctgcctttgccaggaaaaggtctggagctctgccgccaggttttggagttctgctttctttggatagagttcccacatttagcaccagcagtcagtctcattcctggctggaagctctgcctaattggaagtgtcggtgccaacctgtgctgaagcagggactatgagtagggtgcttccttggacttggtgtttggcctatgtagctgtgtctctagagccaagtgctgaagctagatccattttccaaatgtcagctttaccacaccgttcaactctgcacttgattctggctctttcttctttcacgctggttccatatgggaaaatgtgacccatgatggttcagaagcaagttcagaatggaaaagtgattccctgacgagctaatctggaaatagaaagcttagtaaatagaccaacaaaagagcattattaacaagatctggagagacaaaaagagaatgaatttcaggttctaattgctcagaatcaacaggcagactggccaaagcccatgcccagagcgcagaaaggtaatctgagataggtggctggacttatcatataggaccttggagcactagtccaggaatctaaagaaaactccaattcttcatatttccagggaaattagacagaaaggtcagcctgatcctcaagaaaaaagtaaagtaaatcatttcaaaagaaaagcaaaaacagagacaacttataagggtggctgtgatagtacagcagctggatttctgactctagcattctatttagaccaatatttctcaaagtggcatccacacatcagtggcctcagtaccatgggtgggggcaggttgacaatgtgaataaatgcacctagcaaataataatacttagataaccaagatgaatgtgtgaagattctgctgcctgttaagaaggacat

SEQ ID NO: 77552 - DNA, 896 bp, Homo sapiens
attgtcttcaaagtagaaaaatcaaaagtacccaagttttgcagagttctgatctctactctgatattgatttgttacatggcctagggccagatgttgaacctcccatagtttcttctccttcttatctgtgaaacagagatgaaaattctgagcctcaaagtgatttggtggaaattaaataatagcttaaagccttttgaaagggtgaagtgataagtgtttccttttggcttctttcggatgttatgcaattttccatttaagtgaaaattaacttcaaacatatcacacttcagttttgacctaatcacctgttgattagtggttctaagctattaattgtgggatgtctaaaacagcaaatgtgagtggacacactgcatgctcgtatccagagtagcctagaataaagccttgcccatgattgtacctgcccccatagcccctttcacaactcctgtgtgcacaagcagataatataaagagtttaactaaaatttaaaacattgtatcctttgtgttttcattgcctctaggcaaatataggatatgtgtttttaaatgttcatgaataataaaawataaaacaagagcatccagagaatgctagcttttcttttcaaataattttttatttatagttcataaaagatctagaaagacttaaagagcaaggtgaagtcccgacatatgtcatttaaaagcaggatggcatagtagttaagcatttgggctctggaatcaaactcagcttgagttcaaatctcagatcagtcaactactgacagggtgtaattggataaaagaaagacttatatttgtattttcttttttccataaagaggtccctgagatcggagaaaatgtcttgttgcctgtcacatctgaagcat

SEQ ID NO: 77553 - DNA, 896 bp, Homo sapiens
attgtcttcaaagtagaaaaatcaaaagtacccaagttttgcagagttctgatctctactctgatattgatttgttacatggcctagggccagatgttgaacctcccatagtttcttctccttcttatctgtgaaacagagatgaaaattctgagcctcaaagtgatttggtggaaattaaataatagcttaaagccttttgaaagggtgaagtgataagtgtttccttttggcttctttcggatgttatgcaattttccatttaagtgaaaattaacttcaaacatatcacacttcagttttgacctaatcacctgttgattagtggttctaagctattaattgtgggatgtctaaaacagcaaatgtgagtggacacactgcatgctcgtatccagagtagcctagaataaagccttgcccatgattgtacctgcccccatagcccctttcacaactcctgtgtgcacaagcagataatataaagagtttaactaaaatttaaaacattgtatcctttgtgttttcattgcctctaggcaaatataggatatgtgtttttaaatgttcatgaataataaaaaataaaacaagagcatccagagaatgctagcttttcttttcaaataattktttatttatagttcataaaagatctagaaagacttaaagagcaaggtgaagtcccgacatatgtcatttaaaagcaggatggcatagtagttaagcatttgggctctggaatcaaactcagcttgagttcaaatctcagatcagtcaactactgacagggtgtaattggataaaagaaagacttatatttgtattttcttttttccataaagaggtccctgagatcggagaaaatgtcttgttgcctgtcacatctgaagcat

SEQ ID NO: 77554 - DNA, 812 bp, Homo sapiens
ggatccacttatagaaagagcagtattagggtaataaacttaagaaaaagtgttgacaaggagttaggagccccgggtgtgtgtccttgtaccatcattatctagctacagtactttaaggaattcattacctttctttgagctttgwttttctcctaggaagaatgaaaatgctgtactacctaatctctatactgactcaattatctctcctgtttcctccaagccatctataaatgctcactcactgaaaggacgttagccttatgctataaaaaaatttttttccaggaaaaaaatcgacattcatttctgcatattatcttcatactcagtcctgcaataacacaactttggaaatgatattcctgctctcttcccagaagatgagatagtaagacagtgaatacctaaagaaaatggaaaatatatgtgaaggaggtgtccagccaagaaactgcctaatgtactggagatctaaagtgaccttttaaggttaagcacagagcctcctaatgaggtcctcatgcagtttattacctgacatccaggctgttccctctaaagcagagctacatagactgtcaaggacattgagtatcaaatacagtcaccagctgggtgacctcatctgaaaagggagcatgagccctacctagctgggtgtctctcagggttgcaaaccacactttatgtaaaagtgcttacccaatactcagctcacaataaatgaccagtacatttgaatctaaattgagtggactgttcccattaccatatggaaactgccacttttaccataagagtttctg

SEQ ID NO: 77555 - DNA, 812 bp, Homo sapiens
ggatccacttatagaaagagcagtattagggtaataaacttaagaaaaagtgttgacaaggagttaggagccccgggtgtgtgtccttgtaccatcattatctagctacagtactttaaggaattcattacctttctttgagctttgtttttctcctaggaagaatgaaaatgctgtactacctaatctctatactgactcaattatctctcctgtttcctccaagccatctataaatgctcactcactgaaaggacgttagccttatgctataaaaaaatttttttccaggaaaaaaatcgacattcatttctgcatattatcttcatactcagtcctgcaataacacaactttggaaatgatattcctgctctcttcccagaagatgagayagtaagacagtgaatacctaaagaaaatggaaaatatatgtgaaggaggtgtccagccaagaaactgcctaatgtactggagatctaaagtgaccttttaaggttaagcacagagcctcctaatgaggtcctcatgcagtttattacctgacatccaggctgttccctctaaagcagagctacatagactgtcaaggacattgagtatcaaatacagtcaccagctgggtgacctcatctgaaaagggagcatgagccctacctagctgggtgtctctcagggttgcaaaccacactttatgtaaaagtgcttacccaatactcagctcacaataaatgaccagtacatttgaatctaaattgagtggactgttcccattaccatatggaaactgccacttttaccataagagtttctg

SEQ ID NO: 77556 - DNA, 639 bp, Homo sapiens
gatgatttccactttcatccatgtccctacaaaggacatgaactcatcattttttatggctgcatagtattccatggtgtatatgtgccacattttcttaatccagtctatcattgttggacatttgggttggttccaagtctttgctattgtgaataatgccacaataaacatacrtgtgcatgtgtctttatagcagcatgatttatagtcctttgggtatatacccagtaatgggatggctgggtcaaatggtatttccagttctagatccctgaggaattgccacactgacttccacaatggttgaactagtttacagtcccaccaacagtgtaaaagtgttcctatttctccacatcctctccagcacctgttgtttcctgactttttaatgattgccattctaactggtgtgagatggtatctcattgtggttttgatttgcatttctctgatgaccagtgatgatgagcattttttcatgtgtatgctgggtcatttttatgtagatgtggagtaaaggcagcgcaggtgcactgctctgcttctacatacgtcattatgtatacaaagtggcggataagctcctccctggacaggaattttcatgtgataataaggggagttctctaaagt

SEQ ID NO: 77557 - DNA, 639 bp, Homo sapiens
gatgatttccactttcatccatgtccctacaaaggacatgaactcatcattttttatggctgcatagtattccatggtgtatatgtgccacattttcttaatccagtctatcattgttggacatttgggttggttccaagtctttgctattgtgaataatgccacaataaacatacatgtgcatgtgtctttatagcagcatgatttatagtcctttgggtatatacccagtaatgggatggctgggtcaaatggtatttccagttctagatccctgaggaattgccacactgacttccacaatggttgaactagtttacagtcccaccaacagtgtaaaastgttcctatttctccacatcctctccagcacctgttgtttcctgactttttaatgattgccattctaactggtgtgagatggtatctcattgtggttttgatttgcatttctctgatgaccagtgatgatgagcattttttcatgtgtatgctgggtcatttttatgtagatgtggagtaaaggcagcgcaggtgcactgctctgcttctacatacgtcattatgtatacaaagtggcggataagctcctccctggacaggaattttcatgtgataataaggggagttctctaaagt

SEQ ID NO: 77558 - DNA, 997 bp, Homo sapiens
acaccctgcatattcccaaataagctcatttgtcctgtgggaagaaaaactgtcataggtgtttgcaaaagtttgtatacctagaatatgttacaatagttggaaaaatctaatactgatgatgactaatttcaactggctaatagccaactatattagggttctctagaaaaaaaactgaactaataaaatgaagaagggggaagggattgagagaggtgtctatgtatctagatatagatagatagatagatagatagatagatagatagatagatagatagagataggtgatagaaagatgatagatagataagataggataaatagctatctagatatctttatagatatattcatgtctatagatagagatagagaggcagagaaagaggcagagaaattgattgattttaaggaattgtaacatgcaattgtgagggctggcamgtacaaactacataggccaggccagcacgtatagtcgaatgagagttgctgttgcagtcctgagtccaagttccacaggaccacaggctggaaacccaggcaggatttctatattatagagaagaattccttctttggaaaatcactgtctttgttcttaaggcctcaactaatgggatgaggcccacccacattttggagggtaatctgctgtacccaaagtctattaattagctatcaatcacatctaaaaaccaccttcacaaaaatgtctagattggtgtttgaccacataatgggacactacagcctaaccaagttgacacataaaattaatcactgcaccagctaaccctaactttgcttctcacaaccagaggaattatttaatattgtcatataatgaaattatattactttttaaagtcattgcttcaggttgacatacaaaaccatttcaactttttaaattgatctgaattgctaatatgtgcctaatttttataaataatcccttaattttatttaaaatgcaacaaaaattgat

SEQ ID NO: 77559 - DNA, 1509 bp, Homo sapiens
caaagacttagtgtgctgtttggtgagaaaatgtcttcactatgaatggcattttcactcattttgcaatggaaagctcttagcagttcaaatggtttttaaagcttccatttattcctctacacttttattaattcaacaaatattttttgtgcgcctaatatgagccaggcattgggctgattctgagaacagattgataaacgataagagagagcccttctttcaagaaaacttcaatctagtagtgcaagcagaaaagaaaacaagaagttacaatataaagcttgacagcattaaaataaacatttattttcaattgagtccttaatcttttctctcaggtatttgagattattaatagtctaatttttcaaatttcctggaactcttgtacctttaagagcatcacgctttcaaataagttttaattttctctatgatcttgaagtggctataaaatttctcataaattttctgttatctaacatataattatcacatgaagctaactgatatataaaaatctgaaacattcttacactgtgtgccaacattgatttaagatactaaaagtctacacacttttttgtttcctgtttgcaaaataagactttattttccctgcactttttctatcaataaggaagaaatttcctctataggacattcccatccattttatgtctttaactctgtctttcaaacactagctggagtgtagagaaggtataaatctttagtagacgtaatgatgtctgaagtcatacatattagaaaataccaaagacataccaaagcatggaagtattagatgcacacttaaatattctttttagattgtaaaaacaggcactttgtcttagattagagcctccattgttagtacctcacttcataccagatggagtgagaggaatacataaaagggagataaaaccaagccattaaacacagaaaaatcttcccatcactatctgacttaccttatctgttttgagaatactaacactgacccagtactgagtcattaatccaactggaaaacacatccttacattcagacatgactctaatgacataaaggtggatagacctggtccttccacttgaaggtgttatatatacatagaaatttctgctttgataagataaagataaaacttcttaaggtttcatatactaacaaaccccataactcagccggtgatccatgatcacttaaattctctgcttgtgtttcttctgatctcagacaatctaaggccacattttgtcctgtttcttaatgctgtttttaacctacttaacaaggacgacccaattctgttttctattaatacttaatttcttacttttgtctcctaaccattcaagtatggactctctaatcttgtcatttatatacaragccatttctctttacccattttgccttaaatattagcttctgttttaagtatctgttttccttcttgtgatattttagactccaccttgtacctaaaa

SEQ ID NO: 77560 - DNA, 687 bp, Homo sapiens
ttttttcaaataaaaacaaatttcatactgggaaaaattcaaacaaatgcaaacaaaaaataacaatacctaaaattcatgtttcactaaaagagaaactcatgcagatattcttgagtccttttgatatttgaatttccttgaggcaagtttttcaaatcacaccctataagacatacctatatttttcttttctcccccttcttttgtctctttcttcttgaatatcctacatttctttatcccatgatttcactaagtaagtccttcatgaatctctaaattaatgttatacagagatccctgaaattgtggtattttcatgctatcaaattgaggacaataaaatacttaataattatgtatctctagcatatggaaatttaataaaatttaacaagatttgtattttctctttaaatacattaaaattattacatattttttgattattataacrtgtttctctagagtgttttctcaaaaatctttatatccagtaattaaatatgctcacagatcatggcataggtcttatttaatgaaactttcttaattaaaaattataatattactattacccattcttattataatagctagaaatttgctacataccaaggttgtgggtacctactgacagttagcaatcatcagttttgctgtcatgtggctacttactgaaaa

SEQ ID NO: 77561 - DNA, 2021 bp, Homo sapiens
ttccaccattataatagatgagagaaatgaggcccaaggaggtttctaaacacctacatgacagagctgaaatttgaaacagacatcctggtgccagaactcatccttctaaatgccataatgtatcatttttcatatgacctgaaggattaggtacaacctaattaaatgtgatccaataagtaatttttatgacttaattgaatataggtattataaacatgaaaaacattatttgttattataaacaatgttaattaaatgattgtctacattctaccaatttgatgggggattccttcacagaatgttatggtttcccatgtctaatcatgtttcaaataaaggcatcacttaattagttgtagaaaaacagttaaacagaaggttacactgacaatttttaaaaattaacacatggtaaattactggaacgttttaatttgtgctatgacatactatgtatggtaatgtggacataccatgaagtatataataaatggtttaaattactaagggaataaaatgaaacataatttaaagtttacatttatattgagttatatatcagtgtgtattactatataggttgctatacagtagtatacattttatatatttgataatattttgaaaattatttctgagttctctcatcgaggctattgctttttctgcgttcttgctttaggaagaggtctccaaactgatctcattttctgggtccaaagtttgtctttcatctagtgcatggcccatgaaaattcaggctctaggatattacgtaccaacgagacaactttttaaaaaattgttatttttgacccctcggagatttgtcagttttccaacagctcagtcattcatgacaaatgatgtttttttttcatattttagcatatatttaaaaattgttgttgaactacgttgtgttcttatgcattgattgcctgaaattttgttgtaggttaaggttccctacatctctttgaggggaatatatgttacatttagatgacacttacatgttcattagccatttttctttttaatcagagattaattggatacttactacgtttaaggcacttcactagataatatacaccataaagataaaatgcatttcattttctggcagtttaatgaaagatgcaaagaaaaatggcgcaatagtatctaagtggcttgaccagcatggtttctttttgccttgtcaattctctttatttcagkgcctgtctcaaagctctgttcctaggtccctctccactgtgaacctttagctctttaaaatttactggttttatcacaaatagtcacattttcctatcacctattctcaattataactgttctgttccctatttcatcatgctcttctttccaggtgttgcttatctcagccatgtatgaagtcattgaaatttagatggaaataactggtagaattactctcccagaagacattttgtaggggccaagggagaactttcttcttgactctctgaaggtttgctgaaaaatcaattcacaaaaggcagtttaattggagaaaaggcatacaaatttatgtaacatgtatccataagagtcttcagaataaagaccgaaagatagagaggaaattgttcattttttatgcttaggtttaacaaaatatggacaagcacatagaaatatgactggacaaaaaaagtataatccgatgttaacaggctgagtggggaaacccggcaagatctgtctgtctaaatgtatgtccttgtgtgcatacatttctttcttctgggcatgggaggtgagccccccaaaatttatttacagaaaaggaactggacaccaagtgagactttaatttatagactgcatccatgagagatttggggtagtgaaagtcttgctgtgcatctttcctaatcccaggtggttgacctgaccctccaggtggtacactactcattggttttctagagaaagtaaaaagcattaaattgatattgtttgaagggtagccattc

SEQ ID NO: 77562 - DNA, 640 bp, Homo sapiens
ctttattcatctatagtatatgtgataaagagcaaaggatctgtgtatattccttatgaatgtcacgtttttctacatataatttttttttttgagatagggtctcattctgtcacccagrctggtgtgcagtggagcgatcttggctcactgcagccctgacctcccatgctcaggtgatcctcccacctcagcttccagagtagctgggaccacagacgtgcaccaccacacccagctaatatatttttcttttttttttttttttgagacagagtctcgctctgtcacccaggctggagtgcagtggcgcaatcttggctcactgcaagctccaccacccaggttcaagccattctcctgcctcggcctcccgagtagctgggactacaggcgcctgccaccacgcccagttattgttttttttttttatttttagtagagacagggtttcaccgtgttagccaggatggtctcaatctcctgacctcatgatctgcccccctcggcctcccaaagtgctgggattacaggcgtgagccatcgcactcggccccagctaatatatttttttattattatttataaagatgggagtctcactatgttgccctgactgtctcaaactcctgagctcaag

SEQ ID NO: 77563 - DNA, 640 bp, Homo sapiens
ctttattcatctatagtatatgtgataaagagcaaaggatctgtgtatattccttatgaatgtcacgtttttctacatataatttttttttttgagatagggtctcattctgtcacccagactggtgtgcagtggmgcgatcttggctcactgcagccctgacctcccatgctcaggtgatcctcccacctcagcttccagagtagctgggaccacagacgtgcaccaccacacccagctaatatatttttcttttttttttttttttgagacagagtctcgctctgtcacccaggctggagtgcagtggcgcaatcttggctcactgcaagctccaccacccaggttcaagccattctcctgcctcggcctcccgagtagctgggactacaggcgcctgccaccacgcccagttattgttttttttttttatttttagtagagacagggtttcaccgtgttagccaggatggtctcaatctcctgacctcatgatctgcccccctcggcctcccaaagtgctgggattacaggcgtgagccatcgcactcggccccagctaatatatttttttattattatttataaagatgggagtctcactatgttgccctgactgtctcaaactcctgagctcaag

SEQ ID NO: 77564 - DNA, 640 bp, Homo sapiens
ctttattcatctatagtatatgtgataaagagcaaaggatctgtgtatattccttatgaatgtcacgtttttctacatataatttttttttttgagatagggtctcattctgtcacccagactggtgtgcagtggagcgatcttggctcactgcagccctgacctcccatgctcaggtgatcctcccacctcagcttccagagtagctgggaccacagacgtgcaccaccacacccagctaatatatttttcttttttttttttttttgagacagagtctcgctctgtcacccaggctggagtgcagtggcgcaatcttggctcactgcaagctccaccacccaggttcaagccattctcctgcctcggcctcccgagtagctgggactacaggygcctgccaccacgcccagttattgttttttttttttatttttagtagagacagggtttcaccgtgttagccaggatggtctcaatctcctgacctcatgatctgcccccctcggcctcccaaagtgctgggattacaggcgtgagccatcgcactcggccccagctaatatatttttttattattatttataaagatgggagtctcactatgttgccctgactgtctcaaactcctgagctcaag

SEQ ID NO: 77565 - DNA, 640 bp, Homo sapiens
ctttattcatctatagtatatgtgataaagagcaaaggatctgtgtatattccttatgaatgtcacgtttttctacatataatttttttttttgagatagggtctcattctgtcacccagactggtgtgcagtggagcgatcttggctcactgcagccctgacctcccatgctcaggtgatcctcccacctcagcttccagagtagctgggaccacagacgtgcaccaccacacccagctaatatatttttcttttttttttttttttgagacagagtctcgctctgtcacccaggctggagtgcagtggcgcaatcttggctcactgcaagctccaccacccaggttcaagccattctcctgcctcggcctcccgagtagctgggactacaggcgccygccaccacgcccagttattgttttttttttttatttttagtagagacagggtttcaccgtgttagccaggatggtctcaatctcctgacctcatgatctgcccccctcggcctcccaaagtgctgggattacaggcgtgagccatcgcactcggccccagctaatatatttttttattattatttataaagatgggagtctcactatgttgccctgactgtctcaaactcctgagctcaag

SEQ ID NO: 77566 - DNA, 640 bp, Homo sapiens
ctttattcatctatagtatatgtgataaagagcaaaggatctgtgtatattccttatgaatgtcacgtttttctacatataatttttttttttgagatagggtctcattctgtcacccagactggtgtgcagtggagcgatcttggctcactgcagccctgacctcccatgctcaggtgatcctcccacctcagcttccagagtagctgggaccacagacgtgcaccaccacacccagctaatatatttttcttttttttttttttttgagacagagtctcgctctgtcacccaggctggagtgcagtggcgcaatcttggctcactgcaagctccaccacccaggttcaagccattctcctgcctcggcctcccgagtagctgggactacaggcgcctgccaccacrcccagttattgttttttttttttatttttagtagagacagggtttcaccgtgttagccaggatggtctcaatctcctgacctcatgatctgcccccctcggcctcccaaagtgctgggattacaggcgtgagccatcgcactcggccccagctaatatatttttttattattatttataaagatgggagtctcactatgttgccctgactgtctcaaactcctgagctcaag

SEQ ID NO: 77567 - DNA, 2248 bp, Homo sapiens
tcagatgaaaatataaagaaaatattttttccttaagataaactcctagaaatggaattcctgatcaaaagtcttgcataatttgtaaggcttttgatacatataaactttcctccaaaaacagctctgctttttattaacaggttaaattattttatgctgccaacaatagtgcatgattgcttatgttttcacattctcactagcaagagatataatgatcattttaaattttggccaggcacggtggctcatgcctgtaatcccagcactttgagaggcccaggagggcggatcattttaggtcaggaatttgaaaccagcctggccaacactgtgaaaccccatctctactaaatatacaaaataattagctgggtgtgggtggtgcatgcctgtaatcccagctacttgggaggctgaggcaggagaactgcttgaacycaggaggtggaggttgcagtgagccgagatagcgccactgcactccagcctcagcaacagagcaagactctgtctcaaaaaaaataaataaataaaataaaaaataaatttcaccaatttcatgaacaaaaatgacaattcagctggacacagtggctcacacctataatcccaacactttgagaggccaaggcagcaggatggcttgggcccaggagtttacaaccagcctgggcaagatggtgagaccctcactccagcctgggtgacagcctgactccatctcaaaaaaaaaaagatagacccagtctccaaaaaaaaaaagaaagacaattcactgttaccagagtaaacactgcttacctgtttattagccatttttgttccttttttagcatgaattgcctcatcttgtcctttgcccatttctgttggaagagttatcatctcttagtgatttttaaaagcaatttcattattaattataccaatcctttcatatatgtagaaaaaatgtttgagttggtcatctgtcttttattgaagatgcatttcaaatatcaaatatatttgaaagataaaatagcatctgtgaaattgaatattattttatgtgcgcttggctatgccctaaaatgtcagtttattatccctaaagacgtatttattgatgtttaccaagaatagaagttggctgggcacaatggctcacgcctgcaatcccagcgctttgggaggccgaggcgggtggatcacctgaggtcaggagttcaagaccagtcttgccaacatggtgaaaccccctctatactaaaaatacaaaaaattagctgggcgtggtggcagccacctgtaatcccacctactcgtgagactgaggcaggagaatcacttgaactcgagtggcagaggctgcagtgagctaagaccatgccactgtactccagcccggccaacacagcaagacctcctctcaaaaaaaaaaaaaaagaggataggaaaagaggccaggtgcagtggctcacgcctgtaatcccagcactttgggaggctgagacaggaggattgcttgggtctaggagttcaagaccagcctaggcaacatagtgagaccctgtctctatatttaaaatatatatatagaagaagaaatcaaacacaaaagaagtggagacaagcaaaaaaaagtacacacattgaaaccaactctaggggccgggcattgtggctcacacttgtaatcccaggactttgggtagctgaggtgggcagatcacaaggtcaggagttcgagaccagcctgaccaacatggtgaaaccccatctctactaaaaatacaaaaattagccggtgtggtggcacacacctgcagtcccagctactcaggaggctgaggcaggagaatggcatgaacccgggaggcggagcctacaatgagccgagatcgcaccactgcactccagcctgggcgacagagcgagactttgtctcaaaaaaaaaaaaaaaaagaaaagaaaagaaaccaagtgtagcactctagctgaaacaaaaaaggaagtggtgaagggtgcagactttaataataataataacaattttattatattatatattgcaaaatattataattgttatatttatgttataaatagaatgtattataatatttacatttatattatagatatgatatatagtcattgtatttaaaatagtatatgtattaaatatattattatatttaatataataattataataactaacctttattcagcattttactatgcactttatatgcat

SEQ ID NO: 77568 - DNA, 632 bp, Homo sapiens
ggatcacaaggtcaggagatcgagaccatcctggctaacacagtgaaacccagtccctactaaaaacacacacacaaaaaaaaattagccgggcgtggtggcgggagcctgtagtcccagctactctggaggctgaggcaggagaatggcatgaaccccgggaggcagagcttgtagtgagccgagattgtgccactgcactccagcctgggtgacacagcgagactctgtctcaaaaaaaaagaaaaaaaagaaatactattcttcagtttatttactttgttcatcaaatatttagtgagattcaattatctgtcagtgcctggagaataaggtgaaccaggtcccacctccatagaaatctaatgtgcaaacaggatttatgcactctaggtacagtctaagccgggtctagctcatcgtcaaataaccttcaaatatccaatacatatttccaatgagacatgacttttgcragtgttttactggatcatagttgtcatggaaataggagtgagttaatattagtattacctagcatatggtaaaactatgattatgaagaagatgttattcatgcaattgtttaaattgtttaaatttctgtgaaatgagcctatgtcctggatccc

SEQ ID NO: 77569 - DNA, 2049 bp, Homo sapiens
attgcaacagggacagtagccagtcccacagagagagctctatagctagaatagaccttcagagctgtactcaatggaggcaagggggctgggactctgcatctccccatagagcagtcattgaatttatattgcccctagagagacagagtaactttgaacaaggcaactaccttaggccaaggacaattcttgtggaatattcatctgtgagtattcagagggcaacactcttgagaaatggatacctaggccctaaagaggcagaatctgagaagccatgctaacttggattagtgagctgagctctggttcttggagagaatcaggaagaacagctattaggtgtgggcttaatacctgggcgatgggttgatctgtgaagcaaactaccatggcacacatttacttatgtaacaaacctgtgcatcctgcacatgtacctggaacttaaaataaaaattgattttaaataatgctttgggctcaaactataaaaagagaccaccatatatacatatrtaaagaactggcttatatgtgaggcttatatcatcaatagaattgtaaactcttgacaactacagaaggtatgttaaacttctcctgtttattcataagtccagcataatgtttcataagtattaggtgctcaataatacctgctgtttaatttgacaaaatcctgcctcttagttttatgaagcaccacctgtccccacattcactttctcacctatagctgccatattagtctaagcattcataatttcttgccttgactattgcttaaatcatataaataattcttacattttacctctttgataaaatctctctggtataacagcaatatggtggaccgtatctttgtggttaatcagtgtggttactgaactttaaacataatatcttatagtgaagccgtgtattaaatatgaactttctcctcttgtatgacctatatatttacatggtttggttttatgcatctgatgcaagacctgtgttcgctaaccttctttgtttagcactgatgtacaaacatgttttcttctagatgaatagtttacaatgtgcttctgtaaagtctcagggtaaaagctgagagagaccagataaagctgaagcaacagatattagaggcaacaaccatacaagtattctggcccaagtctgatcacaggcatggcccttagggaccaaccctactgctttcctataattttcatcttaaaatcctagttcttcagcttttctccccaaatatcagaagtcacagctgtgtcaggtctctgttaatagggaagatgatatttagaaaacccaaagaggggtacatgagctaccatccaggaggcagatgagtcagggtacatgtggaatccaatgtacactctgacttgactctgcaaaaattcaaaattttatccatttctctatgctccaagcatttatatgtttggagacacagcatataaattttccatcatctgatcaaataaaattgctaaattcattgtatttgtttctgtctttctctcattttatcttcctccattcattcttttaagatactccttgcctgttatgaaccagacaccacatcaattgcaatacaatcaacatctcaatgttgatatctatccttattcatgattattccagttatacagtaattgaggctcaaagagattttgggttttaccaaaggtcacatttctagtaagttaaagaagtgaaaaagtatggaatagttcatacttttgccagtgccccatcctgtctgtccacagacatctggaagggaaattatctttgtggtccaaaaatataaatgaagtatgtgcccagttgtttggcactgctttagatctgcccactgtagaatctgcctgctccatcaggatagaggcctgctaagtgtgtgtccttgggttggcgggtgagaaagaggaagccctatctggaacaaagcaacgtaataacaatgtcagacatgaattgcaccttacacatgttccattatagatatctgccacagacgat

SEQ ID NO: 77570 - DNA, 1060 bp, Homo sapiens
gtgaatgaatgaggtacttctgactgccatatactgtgcaaaagcaaatagatttcttatttccctcagaaaaaaaaataaaaataatacatgggttcccgaaatagttgacagaattatatttattattcatttggaaaactgagtatgctacaaaaatcacgaatggttctaaagtgtttggctgcaatgattgagactgtcatgaaaggagatgatggcaaactaagagttcctaatccacccaggatgaagaacaggtgcagtgtggaacaatggtagttgtttggcctaggaccttgggctaaataatacaagagattttaataagactgctttttctagaaggtgaataattagatatatggacttgtcttttctccactttgactactccaactctaagggcatggtttctggacactggtaggttcaagtcctggttcgagctgtacataactgagcttcagtagtatgtgaatgcttcagtgaaaaggttttccaattttccctttgctgatggcttgtaagctccagagatttcactggccaggagaacacccagcttggttccagggaggccatctgggaagaacacagagctttaccagtcttgaaggatttgttctccaggtactacctttgctcactgatgaaaggccctctgtgctggaggtgtcttccttgctgtgggccatatcatcaaaggtgaggcaagtatacctgtggcctgtctgccacaagcatgcttggtacaaagggaccaagcacccttgttctcgccatagtccctgtctcataggaattcctaaagtaagagcataatggctctagtaaacttcctgttgttagaacatatgtgcctagaaactatgtttttaagaggagaaaaaagaaatatcctgggttcagaaacaatgaaaggagttcacattcaatgttcacaatctgcacggtgctggattagcagcaaattaaggatcctgagttctttcctgaaactttagtttaacaaacagaaatgttatgagtaacaaaaraagactggaggaacgctttg

SEQ ID NO: 77571 - DNA, 1566 bp, Homo sapiens
  misc_feature (1)...(1566): n = A,T,C or G
tagtagggcaagagtgcatttgagccatatcttaatatgaccagaagcccaatacacttggccactactcaaatgggaaaatggagaatacacaaaacctctttggatacagtcaaagaaattgattggtatacttgtcttttctctcagaaagttagtcttgtgctgaaaacctggaccaaaattcaggagatgtgtcctgaatccctttctaccagccagctgcatgacaatgcataggataaaatggtggttaggagcagagactctggcatgagactgggcttgaaggaagcaacctctgcttctgtgtagctgtgttacatgagaaaggagccccatttatgacataattttttttccactagaattattttccatgaagccagagagttttctgttttgctcagtgctgtacctgaagaactttgaataatgcctgatatgtagtgaacactcaaaacctttactcgatgaatgggcatatcattttcaagtctctgggcctctgcaggctcatctgtaatttggaaatagtaccacacggcttacagagttcattcacaacgttgctgtaatggccagataagccgctggttctctaaagccctttagaaaggtctcaggggccagatcaatgggaaactctgcaacctttgagtagttttcagtagaagggtagcccaggagagagagtgttaataagaatgtcctgagggtacagatggtgcttatgaagacaaatcctatttttccatttgcagagatgattagctaggatcctactgagttcactgcatgggccactgctagttttaattgtaccaataggatggagggatggactttaatgaggatctgtgtttnctaatcatgggcaatgttcgaggaagtggaagagggggcagggaggtggcagataattgggagattcagaagatggggctgtttcttggggatggatggatgctttgctaccttccaaagctagaatcctattgtagtgattctcacctggctgaagatgggggtggggaaatcatcattaygcacagaaacaggtagcatgaatattccaagtacatgctccatgatgagacatctgggtttgccactttaccatgtgagcttttaggttctgtttccttatttgccaaatatggaagacaattatatttatatcataaaattattgtagtaagtatgataataaaaataaaggactaagaataatgccttgcatgtataaagttttcaataaatttctgtaacttaagtttgtgaaattattttagttataaatgcccacccatctggagaaaatagcacagtatcccctaaccctagaaagtcacttctttcaatatagcaacacccattccttgaatgtccctttctcatggaagaaaatggggtatgtgtactgtgataaaagactactgagtgattttgttgttattctccatctttaatatcagttaagaatcattccatgttaacagtggagaggtctgtgatgagtgcattgctggagcggtagcaatacatagattcaaaccatcaagg

SEQ ID NO: 77572 - DNA, 700 bp, Homo sapiens
ctgtaccaccacctttgaagaggctgtcagaatagcttattgaattaggtcaagcttatagatctaactaccagtttacaagaactaaagggggacagacagaggaacagtttaaaggataccacagagatgcaagcagcaaaatgcagactgcagggactcctataagataaatagcccagtttcttcaacaaacaaatcgaaggggaaaaaaaaaaaggagggcagaagcttatgtataaaagagacttaggagacgcatgagctgtatgcagtacgtggaccttgttttgatcctgtattaaacaaaccaactatagaaagacgtaacatcagggaaatttgcaaaccaactagatrtttgatgatattaaggaacaatgttaattcttctgggtgttataatggtatgaaagacgcacaaggggcagggccttccacccctaagcttaccgtggggctggtggagactagagcccagggagagagaggaggggctgagccattgaagcccagtttattcttccaaactcatggataaatcatttctcctccattggagaggaatgtgtaatatgaaaaaacaaactcactgttttttcctctctgttcacacatgcaacacagaatacttctgtgaccaaatgtgtggggcagggaggggggctccccgacaagcaattctccagcaccagcctgg

SEQ ID NO: 77573 - DNA, 666 bp, Homo sapiens
tttttgcaaactgtaaaacactgagcaaacagtctctggtctcaacctccgcctaaaatatgtccctgtcccttcacccctctctttataatagcagcccccattttggggagaagctcaatatgccaggcccatatattctctcatttattcttgacagcagcctctgagggaagccttggggtccctcctttcagatgaggtgcccaagctaagtaattcgcccagaatcacaggccatggagcagtacccctaggtctgtggattcagcacccagaccctgggtcctcttctgcctcttgctccctctcttctgctttctgtttcccagtctcctctcccagcctcatccttctcccagcatgagctgccacccacaggccaagggctcacagctgggcagcagaaagggaaaaaaatgagcraactgctcaagtgattgattttctgcagcataaacagcctccaccacctggggacaaacacctgagccttccctcaggtacgggctgcctgctctgagcaggctccttgttgtactccttctcagggccacagcagtggcagtgagggctgcgctcactttctcacactccccaaagacccagccacagcagggctctctgtcctggagcacagcacacaccatgctctgtcctgccttg

SEQ ID NO: 77574 - DNA, 763 bp, Homo sapiens
tccaagtcctagggatgcttcttgctagctacatgttattagccagttgctctgagcctcagttattgcatctgtgaaatgggaataacaacaacagcctcactgacacgcacttaggattaaatggtacaatgtataagaaaattacctgtaacgtaaatatttaataattttaatatgtttctcaaatgtttaatttcccttgatctttcatgttttctttttcttttttttttttttttttttttttttttttttttttttkgagacagacgctcactctgtcaccctgtctattctcctgcctcagcctcctgagtagctgggactacgggcacccgccaccacggccggctaattttttgtatttttagtagagacggggtttcactgtgttagccaggatggtctcgatctcctgacctcatgatctgcctgcctcgacctcccaaagtgctgggattacaggcgtgagccaccgcgcctggccatgttttcttttttttttttgagatggagtttcactcttgttgcccaggctggagtgcaatggcacaatctcggctcaccgcaacctctgcctcccgggttcaagcgattctcctgcctcagcctcccaagtagctgagattacaggcgtgtgccaccatgcctggctaatttttttgtatttttagtagagacagggtttcaccgtgttagccaggatggtcttgatctcctgacctcgtgatccacccgccttggcctcccaaagttctgg

SEQ ID NO: 77575 - DNA, 763 bp, Homo sapiens
tccaagtcctagggatgcttcttgctagctacatgttattagccagttgctctgagcctcagttattgcatctgtgaaatgggaataacaacaacagcctcactgacacgcacttaggattaaatggtacaatgtataagaaaattacctgtaacgtaaatatttaataattttaatatgtttctcaaatgtttaatttcccttgatctttcatgttttctttttctttttttttttttttttttttttttttttttttttttttgagacagacgctcactytgtcaccctgtctattctcctgcctcagcctcctgagtagctgggactacgggcacccgccaccacggccggctaattttttgtatttttagtagagacggggtttcactgtgttagccaggatggtctcgatctcctgacctcatgatctgcctgcctcgacctcccaaagtgctgggattacaggcgtgagccaccgcgcctggccatgttttcttttttttttttgagatggagtttcactcttgttgcccaggctggagtgcaatggcacaatctcggctcaccgcaacctctgcctcccgggttcaagcgattctcctgcctcagcctcccaagtagctgagattacaggcgtgtgccaccatgcctggctaatttttttgtatttttagtagagacagggtttcaccgtgttagccaggatggtcttgatctcctgacctcgtgatccacccgccttggcctcccaaagttctgg

SEQ ID NO: 77576 - DNA, 763 bp, Homo sapiens
tccaagtcctagggatgcttcttgctagctacatgttattagccagttgctctgagcctcagttattgcatctgtgaaatgggaataacaacaacagcctcactgacacgcacttaggattaaatggtacaatgtataagaaaattacctgtaacgtaaatatttaataattttaatatgtttctcaaatgtttaatttcccttgatctttcatgttttctttttctttttttttttttttttttttttttttttttttttttttgagacagacgctcactctgtcaccctgtctattytcctgcctcagcctcctgagtagctgggactacgggcacccgccaccacggccggctaattttttgtatttttagtagagacggggtttcactgtgttagccaggatggtctcgatctcctgacctcatgatctgcctgcctcgacctcccaaagtgctgggattacaggcgtgagccaccgcgcctggccatgttttcttttttttttttgagatggagtttcactcttgttgcccaggctggagtgcaatggcacaatctcggctcaccgcaacctctgcctcccgggttcaagcgattctcctgcctcagcctcccaagtagctgagattacaggcgtgtgccaccatgcctggctaatttttttgtatttttagtagagacagggtttcaccgtgttagccaggatggtcttgatctcctgacctcgtgatccacccgccttggcctcccaaagttctgg

SEQ ID NO: 77577 - DNA, 763 bp, Homo sapiens
tccaagtcctagggatgcttcttgctagctacatgttattagccagttgctctgagcctcagttattgcatctgtgaaatgggaataacaacaacagcctcactgacacgcacttaggattaaatggtacaatgtataagaaaattacctgtaacgtaaatatttaataattttaatatgtttctcaaatgtttaatttcccttgatctttcatgttttctttttctttttttttttttttttttttttttttttttttttttttgagacagacgctcactctgtcaccctgtctattctcctgcctcagcctcctgagtagctgggactacgggcacccgccaccacggccggctaattttttgtatttttagtagagacggggtttcactgtgttagccaggatggtctcgatctyctgacctcatgatctgcctgcctcgacctcccaaagtgctgggattacaggcgtgagccaccgcgcctggccatgttttcttttttttttttgagatggagtttcactcttgttgcccaggctggagtgcaatggcacaatctcggctcaccgcaacctctgcctcccgggttcaagcgattctcctgcctcagcctcccaagtagctgagattacaggcgtgtgccaccatgcctggctaatttttttgtatttttagtagagacagggtttcaccgtgttagccaggatggtcttgatctcctgacctcgtgatccacccgccttggcctcccaaagttctgg

SEQ ID NO: 77578 - DNA, 658 bp, Homo sapiens
tattctacatttttacatctacagcatacagaggtacccttttttatgttttgggggagagggctttacaatctcatctttattgtaaagcactttttcaaacatggtaggacctaatgcagtctgtctctcaattcagtaaagccttcctacataaggaaaaccaggaataaagttgggcttatttaagatgaattagatgtatttaattctttatcaagaaaagcagttttattggtttcaattaataatctcaaatttattaatcaagtgttgacaatctacaatatttggaaaattgttttgataaaaagatacataatttataatttattatgaggcatttctttgcaagcaattgcttattatatgttcaaaccctttttatgggtcaaataatgtcacagtaatgttatttaaattgtgttttgctctgctacctcatagatacattgagtcagttgataaatatttgtcttgcatattaataataaatgtcaagcaatcctatgaaacatgaagaaagaatatgaacagccacttaacatgagaagtaatagaaataatcaataaacactttaagaatgcttacagtttgaataagaaggaaarttaaaatgaggccttgataaatgtatcatattgctgctgcagtgtt

SEQ ID NO: 77579 - DNA, 842 bp, Homo sapiens
aggcagtggtaaggaagggggctctgtgtcctggggagaaatagagaaagtcttggaaagtaagttcatgtcaccttacagggccttgaatgtcaggcgaaataacttattcaacttcgtaggtgatgagagctgtggaaggctttgagcaggagagcaacatggttatagctgagtggaaatcatttgagtccagaagttgctggattaccatatggagctggagactatagctgcagaaatcrtgtggctgttgaaataatctagtggagagggctgttggggacatgtacagttagttatcttattttcattttcctcctgttgatgtaatttctgtgaccagagtcttgttctattttaatctgcaaagcatgctgttcagtatgacatgtaataaatgttgaaccctctttggggagtcagtcaatcatgaagacaattattttgacttgagacaaagaaaatgaaagtcctgaggaaaagtgttcacatttgctattttaagctgggagagcaaatgttctcagaactctgcggtcccttggattgggtgcagtttgctctgctgagcgtgagttggcagccctgcctgcttgaacatggctgccgcttgttgttcaggttgagtggactttcctggtggggccgaacacccctcgcatttcggcagcacccacgtgggcctcttgttcacaggagtgtcctgaacagaacagtttctgtaagaaagaagccttcataaatatttgttaaagaagtttcaggccgggtgcggtggctcacacctgtaatcccagcactttgggaggccgaggcgggcggatcacgaggtcaggagt

SEQ ID NO: 77580 - DNA, 1152 bp, Homo sapiens
  misc_feature (1)...(1152): n = A,T,C or G
tgcattaaaaaaataaaaggtgaaaggtaatacaccattggtataccatggcataaaaggcaaaaggtaatgtaccattgataatataccaatttatcaaatttcctttagacacgaggaataagttttagcgatctattgcacagcatggtgacccagttaatagtgatacatgnnnnnnnnnnnnnnnnnnnnnnnnnnnnnnnnnnnnnnnnnnnnnnnnnnnnnnnnnnnnnnnnnnnnnnnnnnnnnnnnnnnnnnnnnnnnnnnnnnnncctctgagttcagggattctccccccctcagcctcccaaggagcgggactataggcaatcccgtgactaacacgcctggctagtttttaattttttttgtagagacagagtctcactatgttgcccaggctggtctcaaacgtctgggctcaattgattctcctactttggccttccaaagtgctgagattacaggcaaaagccactgcacctgacagatatatttttttttttttttttttttttttaactgagcctggctctgtcacccaggctggagtgcattggcgatctcagctcactgcaacttccgcttcccaagttcaagcgattctcctgcctcagcctcctgagtagctggggctataggagcccaccactatgcccggctartttttgtatttttagtagagatggggtttcactatattggccaggctggttctgagctcctaacctcgtgatcctcccgccttggcctcgcaaagtgctacgattacaggagtgagccaccgcgcccggtcttttgcctaaatattcttaaccatacaaaatgagaagtcgatgagatgataaatatgttaattagcctgatgtaatgtttctacagcatatacaactatcaaaacaccacactgtaccccataaacatataaaattatttgtcaattaaaacaattttaaaaattacgttaaaaaataaaaaagtttgaaaagataacatgccaaaacccaaagggtggttctgtaggagtcatggggggcagggcggaggaagacagcaggaatactatccgtaaggggaaaggacatgcaaccttcttctagtgtttcctttggtgcaaaatggtacctccatggagcagtctaatgtatt

SEQ ID NO: 77581 - DNA, 972 bp, Homo sapiens
ttgttgaagaccctcttccaaatgcagtaacagagagtcagaggaagtttagtgttctatccaagtcacacaagatagcaccagtagaaccagaattctgggctctggacttgccatgtgttctttcagtcattcaccacaaatgtattgggcacctactagattagatgctgggaatataatggtgagcaaaatcagccatggtccctgtgttcctggggtttacattctattgggggatgccaacaccagtcaaataatcacaagtaaatttattatttatattttcaaacattactatgttttcaagatgccaaacatttttgttttctgaagtaaagaaacagttctacaagtgtgcataacataggaaatgtgatcagtcttggaggtcagtaattgtagtctgcaccaaacaaccagcttatatccagggactcccccatgatygtgttcatggaagatgttactacaattcttccctatcaactggtctcatatggacactgagtgaagggaaaggaaagtaacaaaatcctctatttaaaattcgtgaatatcactcagagagacatttaagtcttaatttaaagccttcttctgctttgcaaatgattttcataaacattcttatattgtgcttctgaaaatagtagatttgaagaagcaaactaacagtagattgaattgttgttagagatagccacagcaacaattctggagacatctgacaatctgataatgaaaaaggaaacaataattatcaaatatagatgtaacaaactaaaaagcacaggagtctgagatcatttagggtagagaatatcagtgccacacatctcaaagtctgagagcatcatgtgtatgacaacagaacacattaattcatgttctcattaaatgaacatccttatcaaagattaaaattatttaagaacattctaatttaagagtgcagaggaagtgtatatg

SEQ ID NO: 77582 - DNA, 779 bp, Homo sapiens
tgaagaatcacaacagaggctaactataatgtgagaaataaaagtatgggcatttagaacaacagagagttgatgctggagcaaaggttgatgtgggaaatgtcagaagacgctttcttccatccttccccaaagcgcggcagggctagtgacctcaggccacaggataaggacacagtgagatcatttttccccagagctagtgatctgttaacctgattaatattacttttattcctctgtaaaagaacatttttgtagctgaggatcattcctgaggaatcccatttaatagcaaaccaaatattttgttcaaagggaagagagaccattgtcagattttgagatgctctcgatgtaaaaattcgtcatatgttattatgacasaaattatccaattaacaattcctcactcccatcacttgttttacaaatgttattattaagctcttgatcaggtcatttggtttcctattgctgctacttgagaaattccataacaaatggccctggtaggttgtaattctgcagttacagtgcttaacacaacctctctgagaactggctcaaaaatgttgatgaagatctgtttatattttagtggcattctcaggcaagccttgttgtggctcaagctcctttcaagtctgtgctttacatttatttttcagcagaagcatttgattatatatcccctactgcttattcatttccaatgcatcttaggaaactagtaaagtcttgatggacttatttatattctaatattagcaacattt

SEQ ID NO: 77583 - DNA, 2121 bp, Homo sapiens
atcatatagacataatacactgtcatctctgcagtgaaatttgagactccagagaaaaactctatcctaattcctttccactctactccaatgacagcattgaaaattcaactttagacatcactcatttaggtgtttcttctaggattattttataaaatgtaaataccaggaggagaataatacatcaatctggttcatgtgaagtcttacgttccaccagaatttagaaggcaatctattcattcactttttcattcatttaattaattcactaatacagtatcaactttgggccaggtactagggattccaagatggataagatgctctttgctttcagaagtttagtaaaaatcttgactgatctagagccaatttatgttagaaaacagctttaaccaaatagccttaaacatttgccgcagagctgagacccataatgaaacatattccttcagctagtatgtcccttcagaatagagagaaaagtaaagttggtcatgatctgaaactttggattttaattctgactccggtcatttctagttttgtgatctggaggaagtcatgaaatttctagcctcagtttctccatctacaagacgaagacaaggctgatcacatcaccaggtgttgtaagaactaggtgaataagatattacaatggcccgtaatcccaatgatttgggaggccgaggcaggaggatagcttaaagccaggagttcaagaccaacctgagccacatggcaatatctggtctcaaaaaaaatatttttaaaagtcaggcatggtggcacacacctgtagtcctagctactcaggaggctgagagcccagttcaagatcacagtgaggtatgacagtgctactgcctgcctggatgacagcctggatgacagagtgaggccttgtctcaaaaaaaaaaagtgacatatatatacaacaatgtttagcaaatgagtacaaaattctgttctagcattgtaaatgccaggactgaaagctgtagcatttgtttttatcaatgcatagtatttaattttaacaggcaaagttattcctcttttcctgaaaagaaaataatgcactatgctgggatagctttgcaacttgctacctgggtaactttatgcaaattatttgacccttctggacttctgttttcttacagtattgtggggagggctgagtgagatctggcatgtatgtgagagtgcccagcacataacaagtgatcaatacgggcttgctatttttactattttgaagagatgttaacatggaaacactttctgtttgagtgtccagttgaagccctactgggaagtcctagacacagatgataactatacccacattaccaaaatgaggtaagagagcatcagtgcagaacgtccaggggaagtggtcacgaacccgtgctgaccactcaccaccagtacgaagaagagactgaagaagaaagaaagaaatgggtagagactttcttaagagagagctatattgtaccgtgagttccatgtgggaccgtggagttctccctcaccttaagcctgtggagaagggattgcacagaactacctagagggcttgaggagtaccttcttgttgcttgggaagtggtagattggactctgtcatcacctgcaagatccaaatggctagagactgtggtttgttatcttccctggtggcaaagtataaaaggtgacagaattgggcrtggcctgtgttctcagagcttgtcagaagaaaggatatgtgaaagcttctcacagactgtgtgtaccctgtatgaaagaagctgatttgatgacttcttagatactacccaaaagggctgcctgaagttgagggcaatgatacttcagcaaaaagatgctgaaagtgttcacctggctaatctaggtgcttaaagtgataccagaggagctacttagcccgtattaagtaatgacaagtctgtgaaaaagtcatgaaattgtaaaccaaaaagtatctgagacaggtctcaatcaatttcaatttagatagtttattttgccaaatttaagcacgcatctctgacacagcctcaggaggtcctgaggacatgtgcccaaagtggtcagggtaca

SEQ ID NO: 77584 - DNA, 2121 bp, Homo sapiens
atcatatagacataatacactgtcatctctgcagtgaaatttgagactccagagaaaaactctatcctaattcctttccactctactccaatgacagcattgaaaattcaactttagacatcactcatttaggtgtttcttctaggattattttataaaatgtaaataccaggaggagaataatacatcaatctggttcatgtgaagtcttacgttccaccagaatttagaaggcaatctattcattcactttttcattcatttaattaattcactaatacagtatcaactttgggccaggtactagggattccaagatggataagatgctctttgctttcagaagtttagtaaaaatcttgactgatctagagccaatttatgttagaaaacagctttaaccaaatagccttaaacatttgccgcagagctgagacccataatgaaacatattccttcagctagtatgtcccttcagaatagagagaaaagtaaagttggtcatgatctgaaactttggattttaattctgactccggtcatttctagttttgtgatctggaggaagtcatgaaatttctagcctcagtttctccatctacaagacgaagacaaggctgatcacatcaccaggtgttgtaagaactaggtgaataagatattacaatggcccgtaatcccaatgatttgggaggccgaggcaggaggatagcttaaagccaggagttcaagaccaacctgagccacatggcaatatctggtctcaaaaaaaatatttttaaaagtcaggcatggtggcacacacctgtagtcctagctactcaggaggctgagagcccagttcaagatcacagtgaggtatgacagtgctactgcctgcctggatgacagcctggatgacagagtgaggccttgtctcaaaaaaaaaaagtgacatatatatacaacaatgtttagcaaatgagtacaaaattctgttctagcattgtaaatgccaggactgaaagctgtagcatttgtttttatcaatgcatagtatttaattttaacaggcaaagttattcctcttttcctgaaaagaaaataatgcactatgctgggatagctttgcaacttgctacctgggtaactttatgcaaattatttgacccttctggacttctgttttcttacagtattgtggggagggctgagtgagatctggcatgtatgtgagagtgcccagcacataacaagtgatcaatacgggcttgctatttttactattttgaagagatgttaacatggaaacactttctgtttgagtgtccagttgaagccctactgggaagtcctagacacagatgataactatacccacattaccaaaatgaggtaagagagcatcagtgcagaacgtccaggggaagtggtcacgaacccgtgctgaccactcaccaccagtacgaagaagagactgaagaagaaagaaagaaatgggtagagactttcttaagagagagctatattgtaccgtgagttccatgtgggaccgtggagttctccctcaccttaagcctgtggagaagggattgcacagaactacctagagggcttgaggagtaccttcttgttgcttgggaagtggtagattggactctgtcatcacctgcaagatccaaatggctagagactgtggtttgttatcttccctggtggcaaagtataaaaggtgacagaattgggcatggcctgtgttctcagagcttgtcagaagaaaggatatgtgaaagcttctcacagactgtgtgtaccctgtatgaaagaagctgatttgatgacttcttagatactacccaaaagggctgcctgaagttgagggcaatgatacttcagcaaaaagatgctgaaagtgttcacctggctaatctaggtgcttaaagtgataccagaggagctacttagcccgtattaagtaatgacaagtctgtgaaaaagtcatgaaattgtaaaccaaaargtatctgagacaggtctcaatcaatttcaatttagatagtttattttgccaaatttaagcacgcatctctgacacagcctcaggaggtcctgaggacatgtgcccaaagtggtcagggtaca

SEQ ID NO: 77585 - DNA, 1162 bp, Homo sapiens
atgataaaatctagattcccaggcaaaacttygggagattctgatactctaagctttggtttggggcttggaaatgtacaagaagtttcagatcataacccccaatctcaccatacacctgcactttacaaagaatactcccataaaaatcatactccttttgggaacttaaatttgtcagaacaatactggacctttaaaaaaaaagctattccataaaaaagtgctatagttatactgactttccatttcacagggattcatgattcagtaagattattacggtccccaaacccagaggctataacttatcactaccagtgtgtgagtttttaaatgcttatccaggtctgacccattctcctcttctaagcatggaatcagaatactaaaaccagcttcagggtttatttcttccagagttctccattaatcttgtcataataaatattaactactatttatatgggtcttcttcaggctacaggctaatcaaagttctcataacaaatagaggttcagcttgcaataggcataaatatttatgtttaaaaatgggcatttttaagaactccaacaaatctaaaacatattctgatctgttgctttccataacagttctcacgctctgcagccagaggcgtgggcaggaaatatttggcactttattgcgatgcaaactacagggattataaattggaaaggcagtgcatataaacaagaacaaagacagagaaggggcagaggagtcctcccccacgcatgacacagtgtccttggtgggaactgtgctttattaatgcacagttgaaatcctaattactttggtattatatgagtcttcttttccttagagaaccagaacatcttattaaaccaaaaaatgctaacttccttgttcaattcattttcagcgcaacaccatattaagagtatcctaaaatttctgccgacctaaaggctatttctgcaggattgcctaatatgtgttagaaaaacatagttcctacctgcaaggacctgtcagacaatccagttggagacagaaaacagatatagaagtagcaacaattcaaggtagaccattaaaagtattacaatgaggatgaagtgaaatgttacaggagctagaggagaggagattgtttctaactcagaggat

SEQ ID NO: 77586 - DNA, 1162 bp, Homo sapiens
atgataaaatctagattcccaggcaaaacttcgggagattctgatactctaagctttggtttggggcttggaaatgtacaagaagtttcagatcataacccccaatctcaccatacacctgcactttacaaagaatactcccataaaaatcatactccttttgggaacttaaatttgtcagaacaatactggacctttaaaaaaaaagctattccataaaaaagtgctatagttatactgactttccatttcacagggattcatgattcagtaagattaytacggtccccaaacccagaggctataacttatcactaccagtgtgtgagtttttaaatgcttatccaggtctgacccattctcctcttctaagcatggaatcagaatactaaaaccagcttcagggtttatttcttccagagttctccattaatcttgtcataataaatattaactactatttatatgggtcttcttcaggctacaggctaatcaaagttctcataacaaatagaggttcagcttgcaataggcataaatatttatgtttaaaaatgggcatttttaagaactccaacaaatctaaaacatattctgatctgttgctttccataacagttctcacgctctgcagccagaggcgtgggcaggaaatatttggcactttattgcgatgcaaactacagggattataaattggaaaggcagtgcatataaacaagaacaaagacagagaaggggcagaggagtcctcccccacgcatgacacagtgtccttggtgggaactgtgctttattaatgcacagttgaaatcctaattactttggtattatatgagtcttcttttccttagagaaccagaacatcttattaaaccaaaaaatgctaacttccttgttcaattcattttcagcgcaacaccatattaagagtatcctaaaatttctgccgacctaaaggctatttctgcaggattgcctaatatgtgttagaaaaacatagttcctacctgcaaggacctgtcagacaatccagttggagacagaaaacagatatagaagtagcaacaattcaaggtagaccattaaaagtattacaatgaggatgaagtgaaatgttacaggagctagaggagaggagattgtttctaactcagaggat

SEQ ID NO: 77587 - DNA, 666 bp, Homo sapiens
gctcggcagacacaagagcttgcatggccaggcccccacagtgaaaatgaccccgagttggggcaagctccccatcaagggagatatgtaaataaaagtgcctggtagggatcctagccccaactaagttatgttatgggtggtccctgaagacccctttgcaacctgagacactacatattgcctggctgagctgctcctccccactctgcgtgtcaattacactgaattgatccggctcaagccacttatacccacttatcttccggactctggggcctgcacctgtgaggacagggactcactcctggagatcyggaactcaggaatgacgggcagattcccaacctcctcccaaaggaaaggatgaccccccccaggtttcaaaagccttctctcttcacagtcccctccatttgaaggaagaaacacaacagccccctttcagtgtgtggttacttcatgctaaatctctgacacagcacgtgtggttaagaacactaaagtcactgtgtgaccttggattagtttcttaccttctctgtgcctcagtttcctcaactgcaaaatgtagttaataaccgtgccaacctcctagatgagtgagacgctgaaatgagaccctgaaatgtgacagctcttagcattttaaggtggacacagaac

SEQ ID NO: 77588 - DNA, 793 bp, Homo sapiens
cttgagttcaggaggttgaggctgcagtgaggagagcatttataggcagaaaacataagaatgcctataattttttttttcagrtggagtctcgctttgtcgccaggctggagtccagtggcacgatctcggctcactgcaacctccgcctcctgggttcaagcgattctcctgcctcagccttctgagtaactgggattacagacacccgccaccacgcccagctaaattttgtattgttagtagggacggggtttcaccatgttggccaggatggtctcaatctcttaagtcatgatccacccacctcggcctcccaaagtgctgggattacaagcgtgagccactgcgcccggcctataattttttttttaacccagtagaaaacaatccagcaggaaaatgggcaaaggaaggaaatggcaagttcacagaggaggagacaaacaggtcaatacgcacatgaagagatgcctgaccaccctgtcatcaaagaatgcaaatgaaaacaacaataaaccatcatttctcccaatgagattggtaaaagttagagaaaattgatgacgtcccgtgttgaagagggcatggggaaatgagtggtgtaggcagataaaatggtaccacctttggaggaggcaatttggctataagttttcttttctttttcttttttcttttttttctttttttgtgagacagagtcttgctctgttgcccaggctggagtgcagtggcacgatcttggctcactgcaacctctgcctccctggttcaagcaattctcatgctt

SEQ ID NO: 77589 - DNA, 1376 bp, Homo sapiens
tggtgaaagctccagtgaggatgaagagcctttagcagaattgtcaaaggaagaattgtgcgccaaaataaaaagcctgaaagaaaaactaacaaacacccggaaagaaaacagccgacttcgacagtctttggtcatgcttcaaggtaaactttgagaaaattgacattttagataaaagggaaagtatatgatcagtggaaagtattgcaaattagctgtcaagaatgaagaagaaaatccacacctctgggagctcaaaaaatcacagttttagaaaaaatcactgattatataatttaaatacaaaagcactctattgaaggatctagcttatggcttgaaaatttttagattctcctacaaaatactaaatattatattcatttaatagtttttaagagattatttattgagcatttaatatacacgactcacagtgctaagccctagagacmaaagattattaagacagagcaaatatgataagttactcatgatgtacttaggtcacccctgtctgctagggaaatctctagaaaatggagcttattgtgattcttcatgaaatcactggaattagagtccatatagtacattttcatttttttctgttgggaagagtgtcttgggaaaataataaaaataatagcattccactggaaacatataaagaagaaagatcatcacaaaatactccagtggctggaaaaaaaatgaaaaaaggagaaagacagcataagcaaattaaaaactacttggcttaatgcctttttgtaggatcctatgtgatgttcatgtgtttattttttcaaaaattatgctttccatttgtagttaagcactatatattttttatacagctgaatattttataataaggatactatgttggcagcactcagttgtaaaacagtaaatacacagaacattttgaaaataagtccttccagttgctgtgtacagaatgagtacaagtggtacaagaaagtgaggcagaaccaccagaaaggccatacaattgtccagtctcacatcggtagcaacctaccctagaacaatggcttatgaaaatagaggggttcacaatgcatttggagacagaatagtaataagagacagatagaacacagtgatgaatgaggttgagagtaatgattcacatcctttcctaagaatatttgttaaattaaaggcttcatacttttaagtagaaatagccacatgtaagtagaaagatgttattcaattgacaaggcattacctctttatttcttcacttcatttttttatttgtttgttttgtagaaacagggtcttgctctgttgcccaggatggagtgcagtggtgagatcatagcttactgcaacctcaa

SEQ ID NO: 77590 - DNA, 2282 bp, Homo sapiens
tgcatggctttctcaccaaagtgttctgacttctagagggaaaactactgggtttactaaggtccattaggcagcatttcaacttactgtctgtttatacttccttcattctcttatctttttttttttgagacagagtctgactctgtctcccaggctggagtgcagtggcgccatctctgctcacacaacctccgcctcctgggttcaagtgattctcctgcctcagcctcccgagtagctaggattactggcgcctgccaccacggctggctaattttttttatttttattagagacggggtttcaccgtgttagccaggatggtcttgagctcctgacctcgtgatccgcccacttcagcctcctaaagtgctgggattacaggtgtgagccaccgcacctggccacttccttcattttcaaatgacataaatattttcagtttccaagttgttctggcaatatcatgattaaaaaaatggtcagtgtgcttcgggatggttcgacaatgctgccaaactgttatggcataacttggactggattagagattatgtaggagcctaagaaacgttatgtttgggccaagtgcagtggctcacaccactgtggctttgggaggctgaggtgggaggattgcttgagcccaggaatttaagaccagcctgagcaacatggtgagaatccatttctacaaaaaataaaaaaaaaattagccaggcatggtggggcacacctacagtcccagctactggggaggctgaggtgggaggatcacgagagcccaggagtttgaggctgcagtgagctgtgttcctgttgctgcactccagcctgggtgacagagtgagaccctgtctcaaaaaaaaaaaaaaataaaaaaaaargaaaagaaagaaagaaagaaaaagaaaagaagcattatgcttgagggggctatagacctgaatcattttatattttccatgaagggaaaggaaagaaaaacattcttatctttctggagtttgtggatgtactttcactgaagctaattgaatgaataagcagtgatatcatgtgttttcatatgtgtaaccattatctagaaaagaaattaatttagttccctatactgacctatatgacatccttggatctctccaattctgcctccttcacttaataaaaataaaaacatagctaacatttactgaatatttagtatatataaggtgctattctatgcatttaacctctactaactcatttaatcctcacagacaccctttgtggtaggaacaagtattatccacactttacagatgagggagctgaggtccacggtggaacctggcaaccactcctagttggtaatccataagcacgctcaagccagaacttagcagctaatcatcaagtcagctttgtagcaggttgtcaattccaataatgagatttttgcttttttcacttcaagtagtcccttacagggccctccttgcctaagtttgccctgtagtaccattcccacagagactggagtcttggcttgttcatcagtgtttattaggactatagtcctggttagatgctagagaaggagaccctttctttggccctccagatcctttccctagctgtctctatttcactctctgagtctggagtttgacctgtttgggctcccgaactctcttttcagctgagttcagctgatttcagccaatgagtgtccaggcatgagatcagagggagggaggacagcgagtcaggagaatttatcctcccggctcccttcctgtggggtcacttcagatttcatgtgcccctctcctttcaggttgcaataaccatgcctttcctctccctttggtccagggctggtaacatttccactatgactagccctgaggtacagcatgatctctcatggtttccctatactcagcccacactttcttaaatagtcccttagttaaagccttttcaaatcatcctaattttagtgggccatctatttcttgccagaactctgactgatacaacatggcagggctcctcatacctcctgattgcctgtgtgtctatttgttgcccagccgatagattccttccgttgccaatacttccatctgctatctttttatggacatctgatactgacaatgtacctgatctacactatttgtttgctgggttattactgttctataggatatggcttgtatttctaatttccatgttctgacatgatccatcctaccactgatcaagctctatttccagtggcaaagggg

SEQ ID NO: 77591 - DNA, 274 bp, Homo sapiens
aagttacttgaccaatctggacttccattattcatgactccaggagctccttcactcatgaactgtgtacctagacagagacacagctcagggcaggcatttttattacctttgtgtcccaaggagagggcctccttttttgagaggcatagcatatgggacaagaatgtggttctgcagctgggcagcttgggtttatatgctggctcctctactgcctactgattgaccactagcaagttattayatttaacctctccgtgccttcattttc

SEQ ID NO: 77592 - DNA, 736 bp, Homo sapiens
atacttaaaattagggcatcatttttggggttttgtttttttatttttattttttgcccaaaactttcacactgagtcttagttgtaaaatcctcatacaaatggaattttattattttgtttttggggtttttttttgaggtaaagttttactctgccacccaggctggagtgcagtggcatgatctcggctagaatcacaggcgygtgccaccatgcctggctaatttttgtacttttttttttaagtagagacggggtttctccatgttggccaggctggtctcgaactcttgacctcaagtgaaccacctgccttggcctcccaaagtgctgggataacaggtgtgaggcactgtgctccgccacaaatggaattttagagagtagcccaagaggttaatggagctgctctgattagccacagacaaaactctccctatccccacaactccccgaaaagtgtattttgaaatgcactaatttacacaaaatttatcattgaccaaatccagtcatacagtctgtgggggtcaggaaaaacaagaaggaaaatagatggtgcactcaaacaaggataatgggaggaggttttatttacaaagggacctttttcgaaggcatggtgaagggtagggagccatgaggggtaagcacgggaattcaggccaacagctgcaagactgccatccagctcccacctccaggcctggcgggaggaggggagggagacatc

SEQ ID NO: 77593 - DNA, 736 bp, Homo sapiens
atacttaaaattagggcatcatttttggggttttgtttttttatttttattttttgcccaaaactttcacactgagtcttagttgtaaaatcctcatacaaatggaattttattattttgtttttggggtttttttttgaggtaaagttttactctgccacccaggctggagtgcagtggcatgatctcggctagaatcacaggcgtgtgccaccatgcctggctaatttttrtacttttttttttaagtagagacggggtttctccatgttggccaggctggtctcgaactcttgacctcaagtgaaccacctgccttggcctcccaaagtgctgggataacaggtgtgaggcactgtgctccgccacaaatggaattttagagagtagcccaagaggttaatggagctgctctgattagccacagacaaaactctccctatccccacaactccccgaaaagtgtattttgaaatgcactaatttacacaaaatttatcattgaccaaatccagtcatacagtctgtgggggtcaggaaaaacaagaaggaaaatagatggtgcactcaaacaaggataatgggaggaggttttatttacaaagggacctttttcgaaggcatggtgaagggtagggagccatgaggggtaagcacgggaattcaggccaacagctgcaagactgccatccagctcccacctccaggcctggcgggaggaggggagggagacatc

SEQ ID NO: 77594 - DNA, 689 bp, Homo sapiens
tccaaggtcagtccccgagtctgggccaaagccacttgttacatctcccatcttctggcctcattttacctcctcagtcctggcttcctttccaatctgcctccttcctctcatgatctctcctgcccattccaatcccttctcttcccctatcacctccctctaacccccaactcccttgcactgttattgtttttttttttttttttggcacgatcttggctcactgcaacctctgcctcccgggttcaagcaattctcttgcctcaagcctcctgagtagctgggattacaggcacacatcaccatgcccagctaatttttttgtattttttagtagagacagggttttaccatgttggccaggctggtctcaaactcctgacctcaggtgatcctcccacctcggcctctcaaagtgctgggattacaggcatgagccacagtgcacagcctgctgtttttttttttttwttttgttttgtttttgagacagggttttactcctgtcacccaggctggagtataatggtgtgaactcagctcactgaaatgtccacctcccagcctcaagcaattctcctgccttagcctcccaagtagctgggactacaggggcatgccagggcacccagctaatttttttgcattttttgtacagacggggtttcaccatgttgcccaggctg

SEQ ID NO: 77595 - DNA, 689 bp, Homo sapiens
tccaaggtcagtccccgagtctgggccaaagccacttgttacatctcccatcttctggcctcattttacctcctcagtcctggcttcctttccaatctgcctccttcctctcatgatctctcctgcccattccaatcccttctcttcccctatcacctccctctaacccccaactcccttgcactgttattgtttttttttttttttttggcacgatcttggctcactgcaacctctgcctcccgggttcaagcaattctcttgcctcaagcctcctgagtagctgggattacaggcacacatcaccatgcccagctaatttttttgtattttttagtagagacagggttttaccatgttggccaggctggtctcaaactcctgacctcaggtgatcctcccacctcggcctctcaaagtgctgggattacaggcatgagccacagtgcacagcctgctgtttttttttttttattttgktttgtttttgagacagggttttactcctgtcacccaggctggagtataatggtgtgaactcagctcactgaaatgtccacctcccagcctcaagcaattctcctgccttagcctcccaagtagctgggactacaggggcatgccagggcacccagctaatttttttgcattttttgtacagacggggtttcaccatgttgcccaggctg

SEQ ID NO: 77596 - DNA, 574 bp, Homo sapiens
aaaatcaaaatcagaaacccaattccaggacttggtgactgcagtacttcctgcctgtcaccatctagggcagctcagatgtgcagtccagcatgaacacaccttgaggatgaggcagckcatccctgctgctgccgccgctgatggcaccatcagggcagactaggtttgctgaccaggctaggtgtggaccagcacacctacctttccctaaatgggcccgtggcatgtgtcctttcaaaatgttcccttggcagtgtgctccttgcatggctttgctcctaggacacatccaaaagggtcccctgcacactgcgaagggcttctggggcgtgacctgtctttagtggttctgagtctcaggacttggggctgatgcagggcctctagctgaagggactttgatggaaatgtgcagacacaaatgttgcccaaggaccacgagtacagcaggtgctgcagttacggggcacgcccattcctaatcattgtgctttgtgtctcctcagggagaaacaaaggcagcgctgccctcgggggagcattggccctggcggaacgcagcagccgcgaa

SEQ ID NO: 77597 - DNA, 574 bp, Homo sapiens
aaaatcaaaatcagaaacccaattccaggacttggtgactgcagtacttcctgcctgtcaccatctagggcagctcagatgtgcagtccagcatgaacacaccttgaggatgaggcagcgcatccctgctgctgccgccgctgatggcaccatcagggcagactaggtttgctgaccaggctaggtgtggaccagcacacctacctttccctaaatgggcccgtggcatgtgtcctttcaaaatgttcccttggcagtgtgctccttgcatggctttgctcctaggacacatccaaaagggtcccctgcacactgygaagggcttctggggcgtgacctgtctttagtggttctgagtctcaggacttggggctgatgcagggcctctagctgaagggactttgatggaaatgtgcagacacaaatgttgcccaaggaccacgagtacagcaggtgctgcagttacggggcacgcccattcctaatcattgtgctttgtgtctcctcagggagaaacaaaggcagcgctgccctcgggggagcattggccctggcggaacgcagcagccgcgaa

SEQ ID NO: 77598 - DNA, 574 bp, Homo sapiens
aaaatcaaaatcagaaacccaattccaggacttggtgactgcagtacttcctgcctgtcaccatctagggcagctcagatgtgcagtccagcatgaacacaccttgaggatgaggcagcgcatccctgctgctgccgccgctgatggcaccatcagggcagactaggtttgctgaccaggctaggtgtggaccagcacacctacctttccctaaatgggcccgtggcatgtgtcctttcaaaatgttcccttggcagtgtgctccttgcatggctttgctcctaggacacatccaaaagggtcccctgcacactgcgaagggcttctggggcgtgacctgtctttagtggttctsagtctcaggacttggggctgatgcagggcctctagctgaagggactttgatggaaatgtgcagacacaaatgttgcccaaggaccacgagtacagcaggtgctgcagttacggggcacgcccattcctaatcattgtgctttgtgtctcctcagggagaaacaaaggcagcgctgccctcgggggagcattggccctggcggaacgcagcagccgcgaa

SEQ ID NO: 77599 - DNA, 627 bp, Homo sapiens
cagtagatacagagatatgtcgacatgcaaagatgtactttgctataacaagtgagaaaaaaaatcggttacacatatacacgaacagaatctgctcgtgttagctgaaaacatgtagaaaatataatcaaacttgtttctggggatttgtaagtgaagtttttccctttctcttatctgtgatttctgcaatgaacatctgaagttttagttaaagttcattagtaatgcaataatccttgggaagagaaggaatatgcttcttgcatagatgcaaataatttgtcacattctattatttatttttctatctgtggttggctatcttccgtgaacttttaccctcttcagaagtagagggattgtgtttacctgttcctgtagattttattgtatatacattttattacataattatcttttcattagatatagattaacatgtaaaaagtatgaattaatcattttagttgagttatatgtttatgaaaattaaaatagcaaatrtaagtgattattactattgcaaatgtattgcattactcgacaggagttttctttgaaaatattgaacttccaagctgtgttcatcctatctttcaatccatttagtcatcagacataagc

SEQ ID NO: 77600 - DNA, 500 bp, Homo sapiens
tgttcccagtttctccctcctgctggacacttgcccctcaattgctcatctcagcctgcagtgcatacacccctactccaggcctgtccctcagcccctctccaccctcccttgggtcygagctctgggtggcagtgaggtgggcgctgtcaggaagtgcacgcaggaggtgcaaccaaagacccctgggctctcacaggaccctggctctgagcccctgatcacacctgctgacacctggaaagtgtgctaactcaggagtgaggtgggcaagggggctgagtgctggagtgtggccacggggcagcatatggcatctgtgtggcactgcccaggagactctgggaaggtgggagtctctgtttcagcctccagacttcctgtccagataagggacaacttctaagaggccgaggtgtttgtcacgcctggggctgtgctctccagcacagcacaccgcactctggccggctgtcttcccttggagaggggctctttac

SEQ ID NO: 77601 - DNA, 966 bp, Homo sapiens
  misc_feature (1)...(966): n = A,T,C or G
tgtaaaaatataagcatcaccttcgcactgaagagtggagagagtctactgkatgactggccaggaactttctctctgaattggacatttggatgtcttctttcttccaagaaatggtggttcacattaaagtatcatggccttatgtatgctcaaatggaatcttatgtaagtttcttaatttaattttggtctgctatttttagataaaattgaaaggaattgtataaatcaattaacatattagctaagttgtccaacacatgttataaatgaattacaacagtaaactattatacatttccaaaaaaaagatatattgcacaatgttcactgctatatagtgtacaatatcaaaaattggaaactatcttatatattataatttatttcagttatgagtggtagaaaaaccattgtagctcttgtcaaaacctgcataggcagtctaaggtaaatataacacttgattttatcagggcccaggttccttctgtcttgtggccactgtatgagccgcaaccccaaggtggaagatggcagtatatgtttatacacagcaatgaggaagggagataggaaagcaaagtgtgtccctttaggaaagatcttggaatctgccatgccatatttctactacatcctgttactaagaacttaggaacatgattgcacctttattggtagtctttattctgggcagccatctgcctagcttaaaatgtggagggtccattaccatagaggaaacagagaatgaattttagcaaacaactagtggtttctgccacatgactaaatgaccaacaaggaaacatattacaagacatcatacaattaacctctattcagttgttacagactcaagcaactctacatgaattggcatgtgaactttctgcaaacagggtgtntattaacagnttttagaagtgtgtgagaagctgcatatgtccacganagaca

SEQ ID NO: 77602 - DNA, 579 bp, Homo sapiens
atatacgtatgtgttttatctaaactaacgttatattttttttaaaaggtgtatttacagcaattatcagttaaaagatataagaccctcatacttctaaattatgtaaaaattggcctacataatgattgctaatggtctattcaagaaggggtgccaaattctggacaaacctttattttcctagtataatgtatctcttcattgtttgttattcatagccagaagttttctacagatttgaatccttgggcatacatagaatttgaaaggagtaaattatttaaactaaaggtgtgagtcattcatctcgygcctttcatgttgtaagggataatgcattttattttgtatatttccacatgtctaggtgctgagtttccactttcttacattagacagaacagcccccatctcactccgagatgtgcctttaggaaacattcagtcttggatttcagaagactattcccgtatcttttctctctccttcttcctctcatctctaagaatgtttacctgtcctccacacgctatccactgaaacagtgtgaagccctcaatttggggcatttcccc

SEQ ID NO: 77603 - DNA, 579 bp, Homo sapiens
atatacgtatgtgttttatctaaactaacgttatattttttttaaaaggtgtatttacagcaattatcagttaaaagatataagaccctcatacttctaaattatgtaaaaattggcctacataatgattgctaatggtctattcaagaaggggtgccaaattctggacaaacctttattttcctagtataatgtatctcttcattgtttgttattcatagccagaagttttctacagatttgaatccttgggcatacatagaatttgaaaggagtaaattatttaaactaaaggtgtgagtcattcatctcgcgcctttcatgttgtaagggataatgcattttattttgtatatttccacatgtctaggtgctgagtttccactttcttacattagacagaacagcccccatctcactccragatgtgcctttaggaaacattcagtcttggatttcagaagactattcccgtatcttttctctctccttcttcctctcatctctaagaatgtttacctgtcctccacacgctatccactgaaacagtgtgaagccctcaatttggggcatttcccc

SEQ ID NO: 77604 - DNA, 670 bp, Homo sapiens
tttttaagaaggtgtttttctggttgttcacatggtattgactttgacacaaaactagttttcttaatattttattatgttcaaccaagatagagtggcaaccatagtgatgcaaccaagaaaatataaccaaatgtaatagtgaaatgaatcaaataatttctctttactgctgtttttgtagttgagaaaataatgcaatattatttttcaacaggtatattcctatttaccagccttggggaaaactggtgtgcttgggtctggaaagattcaggtgtcaaagaaaataggacagcggccttgttttgactctcagagaaccttactaatgctgaatggtactaaacaaaaacaagtcgaagggctgccagagttactgtaagtgatgctgatatcccagctgtgctttgttttggagtacagctctttctctgatgyatttcttgaacttaatggttatctgtgatactgtctgaattatactgattagatcaaaactcaattttagatctatttgatcaacattttctgtttctgtaattcaaggtacatgctttctaagtgcttcccaaaagaaataaaactgctcatcaaattattgatgaattattgatgaaatacagttccacacaatttttgccctatgatttgaatgactactttgcca

SEQ ID NO: 77605 - DNA, 679 bp, Homo sapiens
tccctcatgaatttcttagtgtcaaccccatagcatcctcatagtttctgtgagagctggttgtttaaaggagcctagcgcttccctcctctctctctttcttgtttcctgtcttgccatgtgatctctgcacatgccagctcccctttcctttccaccgtgcgtggaagcaccttgaggccctcaccagctaccagcaccatgcttcctgtacagcctgcagaactatgagccaaataaacctcttttctttataaattacccaccctcaggccttcctttatagcaacacaaacggactaagaaacacgctattatataatttgccatacaaatttctgcctaagtaattattactttgacagtrttatctaatcactggaatgacattttgtgtttgataaataacccccaaataattaaaggtcatagcaagactattttatacattattacttgaaaaatcaagataatacttcatattttctagaggactttttttttcaaaatccggctaattccattaaaaaataagttggttagaaatttccaatctgacattttacatgctcagataaataaaatagtttatttctgaagattcaattaaaatcattattccatttcatttttgaaaacatataaattttccattgtttcatcaaatatttaggtatgg

SEQ ID NO: 77606 - DNA, 761 bp, Homo sapiens
tttgaggggagtcagctaaatgatagaaatttatattttggtgctcaaacttagcttgtttcttaattagaataccagcttcttggtggagccctgtggtgaatatgggaaggaaacatgtagattttagggcctaatatttaaatacgtgagaagaaagcacagctggaaggcagaacacagatcccccaaaaatcaagggtcctatttttacatcaaatcttgggttcctccaaagaggaaaatgccacaggataaaatgctttcacagtgtacctgactgtaaggacatatccctgaggctagctgcaatgcaatgcaatgcaaaagaaactaaagatagcagaaaggaggaataaggtggattaaaaataaatagaacaattttaagaaaggaagtaaacagacgtgccaagtacataattgtttaaaaatgttttagctgccgggtgtggtggctcacatctgtaatcccagcactttgggaggcccaggcaggcggatgatgaggtcaagagatcaagaccatcctggctaacaaggtgaaaccccatctctactaaaaatacaaaaaatttgccgggcatggtggcgagcrcctgtagtcctagatactcgggaggctgaggcaggagaatggcatgaacctgggaggtggagcttgcagtgagccgagatcacgcctctgcactccagcctgggtgacagagcaagactctgtctcaaaaaaaaaaaaaaaaaaaaaaaaattacccaaaaca

SEQ ID NO: 77607 - DNA, 761 bp, Homo sapiens
tttgaggggagtcagctaaatgatagaaatttatattttggtgctcaaacttagcttgtttcttaattagaataccagcttcttggtggagccctgtggtgaatatgggaaggaaacatgtagattttagggcctaatatttaaatacgtgagaagaaagcacagctggaaggcagaacacagatcccccaaaaatcaagggtcctatttttacatcaaatcttgggttcctccaaagaggaaaatgccacaggataaaatgctttcacagtgtacctgactgtaaggacatatccctgaggctagctgcaatgcaatgcaatgcaaaagaaactaaagatagcagaaaggaggaataaggtggattaaaaataaatagaacaattttaagaaaggaagtaaacagacgtgccaagtacataattgtttaaaaatgttttagctgccgggtgtggtggctcacatctgtaatcccagcactttgggaggcccaggcaggcggatgatgaggtcaagagatcaagaccatcctggctaacaaggtgaaaccccatctctactaaaaatacaaaaaatttgccgggcatggtggcgagcgcctgtagtcctagatactcgggaggctgaggcaggagaatggcatgaacctgggaggtggagcttgcagtgagccgagatcaygcctctgcactccagcctgggtgacagagcaagactctgtctcaaaaaaaaaaaaaaaaaaaaaaaaattacccaaaaca

SEQ ID NO: 77608 - DNA, 1052 bp, Homo sapiens
tggccgggttaaatgagcagtcttcagctgtacacctcagtggaaacaactctcaggcaaaggctggtggtgaggattcaatgatttggacttcctgtgattcgctaaactaagagaatctttccttctagaaataaatttgcaaatatgaagtcatccataagctgttcttttatttgggactatataatgtatacacagtaatcaaaaactattgattgattaccctgtattttccattgaatgcctagatatctcggttcctgtgatagttaattttatatattaccttgactgcatcatggggtacttgtatatgcggttaaacattattcctggatgtgtctcagagaatgtttctggataatattaacattaaaccagtagactgaataaagcagattgccctcccttatgtaggtgaatctcatccaatccattgaaggtccaaatagaataagagtctgggtaagtattaattctttcttcccttagttgtctttcagctgggacatcagtcttctgacttcgcacttagcctcagagcagaacttacgtcagtcttacctcttttgttaccagcttgcctactgcagatcttgaactccccagcctccacagtcttataaatcaattcctcataagaaatctctctctctctctctgtctctctctctctgtctctttctctccacacacacatacacacacacacacacacacacacacacacacacacacgtatataggttctgtttctctggagaaacrttggttcccattgtttctatctccctggagaacaccgactaatatggctcctttccagcttttgcattaattttctataagagcatcaacatattttatagcttacactaagtctcagttttctcatctgtgaaatcagattattatatctgtggtttatatatcacaggatttcaggaattttactatcaataaacataaagtcaatgaacataaaagtgtttgctatttgaaaggtgctttgaaaagtaggtcatataatattaattattatagattaa

SEQ ID NO: 77609 - DNA, 1103 bp, Homo sapiens
tgcattctttcaaatgtagtgcctttggcacaaagcagacaaataatatttatttttatacattttttagtatgctatatgacactatttatttcaacataacgcttccttatgttcttttgttggacttgtcttaaaatatgtaattacctccatggataggcacctttgctaaatgacagattgtagtttatgactactgagaagaaaaagtacttaaatatgagtagacatcgtattttttccattagagaaatggtacactgtgtctacctaatattgcgaatatgccatcttcaaaagtctagcaatacaatttaatatattaaaagagcagaagtggatcacaatactcatacatatctaacactaaaagatttagtaatggatttaaatacatttctggtaagtactttttagactctaaatgtgagtacctctcctgcaaaatgttggcaactgagatttccatttaggtgggaaacagagcaagatctacttttgcaaaaagtctaaatgtaatcatccttctttttctgtccatgattatggcacctgctcataaactatgtcagaaaagtaaggttttcttaagtagcctacaatcagggtaatgtagagtagctttctgggaagtagtgatatgacatttaccatcactataggtttccattagcccagccattgtatttcttctgaggctctacaactcagttttttcttatcaggtgtagagtgtgtcctctagttaagtttacatgtgccaaatctaagatttctgcaggtaagagtgaatgcgatacagatgttaacgaagagtcttagtggtatacccatacaattcagtgctgatatatgttacaacactgatgaatttcaaaaacgtcatgctgagtgaaagaagtcagtcacaaaagatcacatattgtatgatttcatttatatgaaatcacaaggatggataaatctatagagacaaagtagattaatagttgtctgaggtrggaagtagtgggagggagatgataaatgacagctaataggtacgaggtttctgtttgaaatcatcaaaatgttctaaaattgatggttgcgtaacgcca

SEQ ID NO: 77610 - DNA, 645 bp, Homo sapiens
acaatcattggcaaaaggaaagtaattccattctgttataacaacaagactttttaagccatcagtgcttctcgaactattcaatattaataccaccaacagcagagacataacgtggtcatgaggaaactttgagtctagcctgacattagtttctaaaacagaaagtgtccttgaatttgagttttgtcttttaaaatgatagtcaattatataatatgtagtagccatttttggtttaactttaaaataatttatattatttgccagttaaattttacacccaattttctcttgatactttctagcgatcttgacaactcactaaaagtgtgctgttagccccatgactatactgattccgcagcacatgctgcagatcacctctggggaccaaggaagcacaggtgaaccagtactcaagttctagtccttatggcaacccttagccaggacctagrttccttaaattttggggtattacaaaaaacacaggtttggaagtgaaaatttctgcggtctcaccaaaccaccaaagttaaagtggctttgaaaagcagtttaatctctgattcttgatttccttgctgtagcagtggtagtacctccctggtagaactgaggaggctttagatgtgagaatgc

SEQ ID NO: 77611 - DNA, 551 bp, Homo sapiens
gaagctggaagaggtaaggaaaaggattcctctctggatcttccagaaactatttcagccctgtcaaccccccgatattagcccagtgaagcccatgttagacatccaaygtgcagaactgtaagataataagtgtgtgttgttctaagccactaaatttatagtaatttgttatagcagcagcagtaaattaattccccaacctaggatagaagttgaagaaaacaaagcttaattgaggaggcggtgaattatagtaacagaagcagatggtaacttgaggaaggaacgataatttggggaaggaacagaagttaattctcatgtaggatccatcccagatgttggggaacaatagtgggtactatcagataattttattttttcctctttggcctcttgctcatgatagatctgagaagacacttccacattgcttatgctggctggatattaaaatatgttgcaagtgtctcattctccaattagtagaaagggttataaccagatacaacaagcaagtatgtaaccaaagctgctaaataatgagc

SEQ ID NO: 77612 - DNA, 551 bp, Homo sapiens
gaagctggaagaggtaaggaaaaggattcctctctggatcttccagaaactatttcagccctgtcaaccccccgatattagcccagtgaagcccatgttagacatccaacgtgcagaactgtaagataataagtgtgtgttgttctaagccactaaatttatagtaatttgttatagcagcagcagtaaattaattccccaacctaggatagaagttgaagaaaacaaagcttaattgaggaggcggtgaattatagtaacagaagcagatggtracttgaggaaggaacgataatttggggaaggaacagaagttaattctcatgtaggatccatcccagatgttggggaacaatagtgggtactatcagataattttattttttcctctttggcctcttgctcatgatagatctgagaagacacttccacattgcttatgctggctggatattaaaatatgttgcaagtgtctcattctccaattagtagaaagggttataaccagatacaacaagcaagtatgtaaccaaagctgctaaataatgagc

SEQ ID NO: 77613 - DNA, 1294 bp, Homo sapiens
tgcatttgtcaaaaattgcagaactgtaccctaactgggtgaatagtactgtatgtaaattatatcttcatttttaaaatggaaggaaaaatgcaaagatgattaggattacgttagttgctttacataaactcattagaaatatcctaacttacaattttttggtgtaatttgaaaaacagaatggattcagtcccttaataaccaacttcctcttawtattgtacatgtgacccacagaaaccctagagtatcccacataccatatttcttcaaatttataacataaccattctgaaattcagatatttcttacaaccaatgataagagaaaatcacagttgcatgtagaacagttaagtcttggtgtagttattatctacaaatgtacaaaatgtacagaattagcctttgaacaattaatattgagccttagttaaacttagatttgttgagtgttgcttaaaatgctctcaaaatgattatgcttgggtacatgtcattatgattgaccgacacctgccaggtgatcaaatttaagacagaagaaattgctaaattctgaacaaacaaaatatttcaaagctaggagagtttgggagtcatctattgatgtacgtgaagaatcattactcaagccccaaatatctacccttgataggacaatatcaggtcactggtgaggagaagacaaagccagcttggcgattcacactgagaaggagagagggtttcttaggaagagaaaaagaaatcctaaatcagaatagaagggagaggagaacagtcaactgaagggatgggctttagaaactattagggagctgtttgttttatttctgtttgggtcagagtagagggagaagagtgagagagagatggagaaagagtatttaaaatgtttttgtatgtcatataaataaaatatttcaggggcattttttaaagattacactaaatttaaattgctttttgattacttctggactttaagattggtttttcttgggaaggtgacaccatgccaagatgggctgtgaagagactcaacttttatgagtaacatatctgtcaaaagctttggactgactttcaagaaaagctgtttaatttccagtgatatggaatttaatgaaagaaaaatatgaaactattagtttaacaaaatggaaaatgcagaagaaatgctgatatgtttcaatatccctcagaattatactgtcaatcttcaagagcaaaaggaaccaaaatgatgggcactggttatgaaaaacagcctgtcaccataatgcca

SEQ ID NO: 77614 - DNA, 682 bp, Homo sapiens
aggctggtgctaggcaatatcttgaagtaaaaaatgtgttgtgtacagctgtttactttagcttgctctccccttacctccccagccccgactcatatatacactgtggagtttccagtatgactctcctaatcccagtgagyttgcccgcttattagatgactgcaagcctgggacccaggctttttttttgacctggggctgtggagagagcccccttccttccctggctgtcaaactttatgaatgtatgctagagctaactgaagccattgctctggcctcttgtggatggccagtttgagagaataaggcccaacaagaacattccaaaaatccagagaggaaggtgtgagagggagaccatgaaaggaagagcactcaggaaagttggaggagagcgtaaccaacaggaagtgaccgtacccctgaagccatttccaagcccactctgtctctggtttggtcaataaaaaccttttttaatttaaaatagttcaagttaggtttcaatttgagatggaaagatgcagccaagagtcttgccttgagagacagtaatgatcccaaagggagtgaaaaagtcaatggtgggtttttagatgttgtaacacttggacagaggacatttagagcagctttcctttgtgacctactgtcatagttgccgaagggaaaggga

SEQ ID NO: 77615 - DNA, 714 bp, Homo sapiens
tctacttttacaaaatgttcatcccatcaaaacgttatctcctacacatttgcagtgaatcttcactcccactcccagccctagacaaccctagatctgctttctgtctctacatatttgcgttttctagaaatttcatataaatggaataagaaaagatgtagtcttttgtatctggcttttttcacttatcataatatctttgaggtttatctgtgctgtagtatgtatcagtcatttgttcctttttattcctgagtagtattcaattgtatgtattcaattatatgcatatataacaytttatctatttgccaattgatggacataaatagtttctagttttcaaatactgtgaataatgttactacaaacactcatgtgcatatctttgtgggacatatattttcatttctcttaggtaggtacctaggaatagaattattggggtgcataagtatatgcttaactttttaagaaatgaccgaactcttttttcaaagtggctgttctattttatattttcatcaacaaaatatgagggttccggtttctctacagttttcttcaacaagattcaagtcaaataactaccatgctagtacatgtggccttttactctggaaaactgaatcagggatgggcccttggctgataggtgctctgccaggaaagctctgcccatgaggactgacagaaatcaattggggatcc

SEQ ID NO: 77616 - DNA, 578 bp, Homo sapiens
gaacttgatgtgcttatttgacctttttcccctactccctcattctggagagaatatgcatctgaaccatctcactctgtccaccagtctcttcacatcactgccacattttccttaactttgtgttttgcagtttttttcaaatctaccaaccaactccccacttctgtcttcggctatactaaaccatctctttaactgatctattgagttgttaatgttattttttttgtttgtttcttgaaatctgattattgttcacgtttgtcttttatgattcttttcttagttwatctttttaatgttttaatcatatttattttatgatttctctttttcattgttaaattctagattgttcaatcatttctagttcttggaataagagtcctctttttgttgactctattcaagattgttttaattgtaaggaacagaaaagcccacataaacagacctaagaaaaggtgaattaattgtcttaatgaccgaaaagtccagagttgtagttacagttagtccatttgattcaggaccaaaacccagggcctaatttctctgtttctcgacctcctgga

SEQ ID NO: 77617 - DNA, 578 bp, Homo sapiens
gaacttgatgtgcttatttgacctttttcccctactccctcattctggagagaatatgcatctgaaccatctcactctgtccaccagtctcttcacatcactgccacattttccttaactttgtgttttgcagtttttttcaaatctaccaaccaactccccacttctgtcttcggctatactaaaccatctctttaactgatctattgagttgttaatgttattttttttgtttgtttcttgaaatctgattattgttcacgtttgtcttttatgattcttttcttagtttatctttttaatgttttaatcatatttattttatgatttctctttttcattgttaaattctagattgttcaatcwtttctagttcttggaataagagtcctctttttgttgactctattcaagattgttttaattgtaaggaacagaaaagcccacataaacagacctaagaaaaggtgaattaattgtcttaatgaccgaaaagtccagagttgtagttacagttagtccatttgattcaggaccaaaacccagggcctaatttctctgtttctcgacctcctgga

SEQ ID NO: 77618 - DNA, 696 bp, Homo sapiens
gagctgggatccgatcaagatcacatattacatttgctggttatggttttttgtctttagtcccttttaatttagaaggatttagctgggcgtggtggctcatgcctgtaatctcagcattttgggaggctaaagtgggtggatcacctgaggccaggagttcgagaccagcctgaccaaaatggtgaaacccagtctctactaaaaatacaaaaattagcyggcatggtggtgcacacctgtagtcccagctactcgggaggctgacacaggagaatcacctgaacctaggaggcggtggttgcagtgagcccagattgtgccactgcactccaacctgggtgatggagagagacagtctcaaaaaaaaaaaaaaaaaaaaaggaaagaaaaaaaattaaaaggattctctagcctttttttaaaaaaagaaatcttcatgtcattgacattttcagagcatgcagatcaattgtttcgcagacattctctcactttgactctgttgggtctttttccttcgtgactagaatcaggttttctgcacaaatcctatgtggggaacgtggggtccttcttggtgcatggcttcagaggcacatgaggccaggttgttggactaacagtgatgctggtgacatcccctggttagggtgatgttaggcagatcgatgtgtcatctccatcagtattgtt

SEQ ID NO: 77619 - DNA, 1086 bp, Homo sapiens
ggtctatttatatagtgtcacttttccatttgtgttcgcatgcacataatagctatttacatcttcccttgaatcttcaagaacagaggctatgacttttttttcccttttcctctctgctttgagccgggtacggagctctacataggtcacctcaggggaacagcattcataaatgtcaatcagtgccatctggtgtctcattgtccctgttgctttctaagtccttccctgtcttgaccctcttttctctgtgctatgtacttctctttcttcctctccagtgtgtgtcattgaaaaagccagcaactgtgggtaaacccaatccatcccgcttcagcatgtgaggcagaagagtgttaagagcccagaatttgggtcctttgagaaagtcctgaatgagttcaaatcccactttcacctcttctgtttgaatcagttattttgcctctctaagactctttcctcgtaaaaaggggatartggtgtcaaactcaagcagttatagggtttgaaaaaatagctcatggaaagcacttaatacagtgcctagcacagagtaaaactgcgtagctttaagaaaattatgtagggcagggcgcagtggctcacacctgtaatcccagcacttagggaggccaaggcgggcagatcacctgacgccaggaggttgagaccagccttgccaacatggcgaaaccccgtctctactaaaaataaaaaataaataaaaaataaattagcgggagcctgtaatcccagcgacttgggaggctgaggcaggagaatcacttgaacccaggaggcagaagttgcagcgagccaagatcatgccactgcattccagcctgggcaacagagccagactctgtctcaaaaaaaaaaaaaaaaattatgtaaaccctctgcgtcttgattccctcgtgggcaaaataggaataatagtacccatcttacagggcatttgtgaggatgaaatgaaacactgcatgtgggggttgcctcaagactcaacccacactatctcctcttgattatcccctctgcccagtcccctccgccatgtgcgtggaattcctgaggttg

SEQ ID NO: 77620 - DNA, 1086 bp, Homo sapiens
ggtctatttatatagtgtcacttttccatttgtgttcgcatgcacataatagctatttacatcttcccttgaatcttcaagaacagaggctatgacttttttttcccttttcctctctgctttgagccgggtacggagctctacataggtcacctcaggggaacagcattcataaatgtcaatcagtgccatctggtgtctcattgtccctgttgctttctaagtccttccctgtcttgaccctcttttctctgtgctatgtacttctctttcttcctctccagtgtgtgtcattgaaaaagccagcaactgtgggtaaacccaatccatcccgcttcagcatgtgaggcagaagagtgttaagagcccagaatttgggtcctttgagaaagtcctgaatgagttcaaatcccactttcacctcttctgtttgaatcagttattttgcctctctaagactctttcctcgtaaaaaggggataatggtgtcaaactcaagcagttatagggtttgaaaaaatagctcatggaaagcacttaatacagtgcctagcacagagtaaaactgcgtagctttaagaaaattatgtagggcagggcgcagtggctcacacctgtaatcccagcacttagggaggccaaggcgggcagatcacctgacgccaggaggttgagaccagccttgccaacatggcgaaaccccgtctctactaaaaataaaaaataaataaaamataaattagcgggagcctgtaatcccagcgacttgggaggctgaggcaggagaatcacttgaacccaggaggcagaagttgcagcgagccaagatcatgccactgcattccagcctgggcaacagagccagactctgtctcaaaaaaaaaaaaaaaaattatgtaaaccctctgcgtcttgattccctcgtgggcaaaataggaataatagtacccatcttacagggcatttgtgaggatgaaatgaaacactgcatgtgggggttgcctcaagactcaacccacactatctcctcttgattatcccctctgcccagtcccctccgccatgtgcgtggaattcctgaggttg

SEQ ID NO: 77621 - DNA, 2556 bp, Homo sapiens
cccacttgctgccttgactgggacaggtgaaggaggcattgcctggccccccatccccagagcctctgcctgtgactgtcccgtgttacggcctctgtggtgtctccacacctcccatctcctggggaattcctctgcattagaaaatggacttggaatacattccttaaaacatgtttttgtatgtctgacatctccttcttcctacagaaagggtaatgattccccattataagaaacccaaactgaaaccacacatcctcacagtcctgagggctcacacacgccccacaacagcatggacgtccactgcacagcacaacaggtgccaagaggagccgtgcctgcccctggcccaggcctcacccccagtacatacacacacacacacacatatactacatacatgcaccacagacacacacacacacacacacacacacacacactgcatctatacatacagaatacatgcatacacatacaccaacagatacatcacaccacacgcacacagatacacagatactgtacacaccacatgtgtatacacacacaacagacacacagatacacagatgctgtacacatgtgcacacttgcacacaccacaggcgtacacatacacacacatcacacagatagatactgcacatgtgcacacatgtacatagacacatgtgtatacacacacaccacatatacacagatacacagatactgtacacaccacatgtgtacacatacacacatcacacacagagctagataccacacatgtgcacacatgtacatacacaccacatgcttacacacacaccacagatagataccgtacacatacacacatgtgtacacacaagcacctacaccgcacacacgtacacagaggcaccgctgtgtgtctgcggatgctgcctggtgatgagggagggcacagcacacaagcccctcacagggaaatgtgctctgggtcaagctccattcactggatcccacggcctggaccacgtcacaggcatctgacaaacaggcactgaaccaggagctctgagtgtgtaaatccctgtgtgagctgcacctgtgtctacccctgccgtgccggtgaccacacactgggtgtctaaagcgatctatatccgtccggagatgcgatgtccaaaacggactccctgggctgaagcacaytgtccccaggacctggcttccttctggaggctctggagaatcttcctccccttccaggtcctctcggcgtcttcatccaatccttgaagccctgcaggaacagaaggccgtcccttcccgaggaaggggagccccctgccccacggcccctgagcgggagagagctcctgctggttccagggtcgctgagggcctcacacctgcgcggggatgctggggacttcggctctgtggttgggacctgccagcctccacaatcacacgcgtgcatgcacccctggttctgcgtctctcgagaaccctgatggacaaggggctccctacgcagcggcttcagcctccacagggctccgtggcatcctcctcttcctcccacggctccaggcctcggggacggggagcagcctccccagtgctggtctctgggcatctcggcacccgcctggccgctcacgccacactcacctctaggtgtgggtccctaacggtggggtccggggagacagccgcgccttctttccctaaggccgagcgcagcgccccgccgtgcacaacacgctcctggagctgaatcgcgcaccgcccggaggcggcgtggagaaaccgagcacgggagccagcagcggacgcatcgttcgatgccaaaccgatatgtgggaacggaaaacaaagcgaaagctgccactctccattctctcagagtcttctggaagcttccgtccagcaagtcaggaacccgtgttattacagctctgtaagtccgaatccaggctgatttcaacgtgtctctaaataagatccaacctttgaaggtcaagggctgtgcgctcccctgaggctttgtcaaaccaacatctgcagtttgccgtccagcgcaagtgacgctttggtgacgctaatggacgtggcagtgggacgtgcaggcgggaggctctttccggaggtccgaggagctggcgggtcagaccagagaacaatcagcatccaggcccttcagcccccgaggagcacgaggccagatggatggtttatgaggaacaagcatcgcagtgtgaacggaaacaccatgaatcatttcagaacaactgctagtgactgtccttgaggaaatacatcggaaagcacagttttaacaagctctgaagatgaattaggagccggggccacgggactgagctcagtgagaaaagaacacgcaggaccccggagcaagaggctggagacggcgcatgaagcctcgatggggaaagaggcagtgaggaaaagacacgaagctgtcccaggaggaaggtgacacccggtgctgcacggtggggaggagagcacgggggccagggaaacccagcctctcctgtgggcctgtgcagg

SEQ ID NO: 77622 - DNA, 611 bp, Homo sapiens
agatttcccttcttatgatgtgcctttcacaaaacagcgctagcctgattctttccattttctattttctgtgtctaattttttccatatccattttccacctggttcatttagtgataccgatttttaagccttatttttttaaggatttgtgaatattgtacaacttgttaggataacagtggaatactggctccaaggatgtgtgcaattttgatttattttcctaatatgtgtgtgtatagataaatgtcagtgaagtgaatatgtgtgtgtgtcaataaaagaaatatactyaatcacccagttatttagtcaaacatttaaaaagtgacatgtccttctgacctggccctgcaagctgcaggaggctccctggcctgtgagtttagggaactcgtgtcagtctggttaagtgggtggtttgggtgccgtgctggctgtacgtggtttctcgtcagtgtgctgtacattggccggccagcgctgcctgggccttgaaggcagaaatggctgcagacaccactcggatcagggagtggatgatctttggctccgtcctgccatgaagtcgtgcttagagttagttgtgccaccaaccaccgtcaagg

SEQ ID NO: 77623 - DNA, 611 bp, Homo sapiens
agatttcccttcttatgatgtgcctttcacaaaacagcgctagcctgattctttccattttctattttctgtgtctaattttttccatatccattttccacctggttcatttagtgataccgatttttaagccttatttttttaaggatttgtgaatattgtacaacttgttaggataacagtggaatactggctccaaggatgtgtgcaattttgatttattttcctaatatgtgtgtgtatagataaatgtcagtgaagtgaatatgtgtgtgtgtcaataaaagaaatatactcaatcacccagttatttagtcaaacatttaaaaagtgacatgtccttctgacctggccctgcaagctgcaggaggctccctggcctgtgagtttagggaactcgtgtcagtctggttaagtgggtggtttgggtgccgtgctggctgtacgtggtttctcgtcagtgtgctgkacattggccggccagcgctgcctgggccttgaaggcagaaatggctgcagacaccactcggatcagggagtggatgatctttggctccgtcctgccatgaagtcgtgcttagagttagttgtgccaccaaccaccgtcaagg

SEQ ID NO: 77624 - DNA, 963 bp, Homo sapiens
cacgtctcttgcagagcctgctggggacgctcctgaaggtgtggacagcagggagctgagccttcccagaaagctggcagcacaagtgtccatcgactgcacagtcagagtcccccagcgaagcactccctccacccacagcctcagctggtgcctggccaccttggcacaggcgaaaatggggggtgggggaatgagagagctgagtgctcacccacccccactctgcatctaaggcctctgaaatactcagccatcccatctcccaaattgcaaagtggagaaaaacaacaggctttgccatttactttctttgggcacttgagggattaaagaaattaagtccctgaaacactccaggcactttggtatcgtaaacaggtgtagaaaagtcacttgatgcttcttttaaagcctgtttaagtgtgcacatgctcttaaaactcaaccccttatagaagctgggagttttacagcaggggctcgaaattaatctgtagggacctaaagctggtgaactggagacgagaccagggcggcgtgggccccaggtgcagaggccggtgtgcccaggctgaaggggcaatggtgtggggcaggggggctcctaactgaaagagcagttgcagctgaatcacacccacaccctcttgtgagaaaccagggtggacagatgctggcggtgggcacagctgacctgggtcttccctggaattggcagagaatcattgcaggtaagactgtctctgagccaaaggggaagaaaagcactgcccagcagttgctaaaacttctacattttgtgcacttcccaaaatccattcaaggtgggtttgagagctgagctgcatttatacttcagaatctgggcaaaattaagtaggagctaagcttacctaaaaaaaaragagatgtctaactttgcctaaaaaggtgcctttcgttaaatcccagttgaaacca

SEQ ID NO: 77625 - DNA, 963 bp, Homo sapiens
cacgtctcttgcagagcctgctggggacgctcctgaaggtgtggacagcagggagctgagccttcccagaaagctggcagcacaagtgtccatcgactgcacagtcagagtcccccagcgaagcactccctccacccacagcctcagctggtgcctggccaccttggcacaggcgaaaatggggggtgggggaatgagagagctgagtgctcacccacccccactctgcatctaaggcctctgaaatactcagccatcccatctcccaaattgcaaagtggagaaaaacaacaggctttgccatttactttctttgggcacttgagggattaaagaaattaagtccctgaaacactccaggcactttggtatcgtaaacaggtgtagaaaagtcacttgatgcttcttttaaagcctgtttaagtgtgcacatgctcttaaaactcaaccccttatagaagctgggagttttacagcaggggctcgaaattaatctgtagggacctaaagctggtgaactggagacgagaccagggcggcgtgggccccaggtgcagaggccggtgtgcccaggctgaaggggcaatggtgtggggcaggggggctcctaactgaaagagcagttgcagctgaatcacacccacaccctcttgtgagaaaccagggtggacagatgctggcggtgggcacagctgacctgggtcttccctggaattggcagagaatcattgcaggtaagactgtctctgagccaaaggggaagaaaagcactgcccagcagttgctaaaacttctacattttgtgcacttcccaaaatccattcaaggtgggtttgagagctgagctgcatttatacttcagaatctgggcaaaattaagtaggagctaagcttacctaaaaaaaagagagatgtctaactttgcctaaaaakgtgcctttcgttaaatcccagttgaaacca

SEQ ID NO: 77626 - DNA, 706 bp, Homo sapiens
cacatgctgacctccctgtgggcctgggaggaggcaggaggccacagccagggcagcctgggatgctgttgaggaagagraggtgggctctgccccctcacagtcgagggatcttagggaagggagacttacttgcattctgagtgtgtctcccagccttcaatgtgttgatatttcgatgttgtgtaataaacacaggcattggtgaaccatggatacttctctatgttgggcaaccatggcagttcccccacgtgggcagaggaacgaattccctgatgcaccctacacctttccagcatgaagaacccatccaccaggtctgttttccaggaagattctcatctgatttggtagacctggcgctgtcctttgccagccagccttgttcgtggtgagccattctgtggaatcgtcgcccatccctcgtgaactctttgggtcactggaatagttgcggggaaattttagaagattttatgatgaaaatatgcccgaacacctgccttactctctccaatgtaggcccaactgtggtttctaccatcagctttctttgtaggcctgggcggtgtggaagctgaaatgtgtgtagaaatgagtcccagctcatcggctcatccacgtgttcgttgagggaaaaccacgctgccagttagaatttacagttataactctgcagcccatgagctgtggaaggatcccg

SEQ ID NO: 77627 - DNA, 706 bp, Homo sapiens
cacatgctgacctccctgtgggcctgggaggaggcaggaggccacagccagggcagcctgggatgctgttgaggaagaggaggtgggctctgccccctcacagtcragggatcttagggaagggagacttacttgcattctgagtgtgtctcccagccttcaatgtgttgatatttcgatgttgtgtaataaacacaggcattggtgaaccatggatacttctctatgttgggcaaccatggcagttcccccacgtgggcagaggaacgaattccctgatgcaccctacacctttccagcatgaagaacccatccaccaggtctgttttccaggaagattctcatctgatttggtagacctggcgctgtcctttgccagccagccttgttcgtggtgagccattctgtggaatcgtcgcccatccctcgtgaactctttgggtcactggaatagttgcggggaaattttagaagattttatgatgaaaatatgcccgaacacctgccttactctctccaatgtaggcccaactgtggtttctaccatcagctttctttgtaggcctgggcggtgtggaagctgaaatgtgtgtagaaatgagtcccagctcatcggctcatccacgtgttcgttgagggaaaaccacgctgccagttagaatttacagttataactctgcagcccatgagctgtggaaggatcccg

SEQ ID NO: 77628 - DNA, 1520 bp, Homo sapiens
cgtgccctgcaggggtgctgccattggaaccagggccgggggtggggggtcagttatgccagtttcccttctttggcctcaagtggccccagactcacttctaaaatattcccaaggcagtagccatggcaagagggaactaggccccagagggagcccctccatgccataccccacctgccakagaaacttctctgtacactccccactcagtgggcctgtgctgtgcttgctgggggcattctacgtttcagcagagctgagctgcctgcccgcctcagggcttgagcccctctccttccccccacacactcctgctgctcttgaatgaacatggaaactctttaacagggtcagccctcaagacatctcaagttcccctgctgcaggctgcatccagtttcttaaaacactgcactggtttcatctggccctggacacatgcccttccagacaaccaaacctccctgtcatcagctgaatccctgccatgcttccaacatcaccctgccctaagccagcctctccaggaaggtcacctgagccctggacggatgggacccttgtcacatgcccagcagagcccactccacagagcctggcctggaacctggggggtgacgtgtaaatctggccaccactaaacaccaatcaaggcccagcacccaccctacctgggattaagtcaatcacaggctcttaggctcaggggttgtaagacactggggcgaggtggatgactgagcaccatgactgacactgaatcctggagattatgaaactggcaaattatttgagttgctaaaaagataaaatttctccagttgaaagtggtcaagcaccgctgatgacacgccgtttctcagggagggaggtgggattacgagggggtaggacatgcctgggcgttctgagtggcttctgtggaagagtcctaatatctcagtgagctgtgacaacttaggatacagacaagtcagaccatcacagttgtgcaaaataagctcacttatgactaattcctggaaaaacacctttaaatgttttcctttgattataaaaattactcattaataacacgttcagacattctaagagtgcttggaataggaggttactctcatgacatcacctaagactaattacctccctaaaaccccatctccaaataccatcacattgggagtttgggcttcaacataggaatttattagagtagtatagaaacggattaattgtatttatgaaaatgattcactcaagaaacattgacagaacagctgatgcccaccatgggaccagcacagatctaggactacatatgcaatgatatatcacaaatctgattgtctttttggaatttaaaatgtagggaaggaaaaagctaataaacaaataaacgaacccataaagaaaaattacactctatttctgggtcctctattctgttccattgctctacatgcctatttttatgccagtaccatgctgttttggtgattatagccttatagtatagt

SEQ ID NO: 77629 - DNA, 1520 bp, Homo sapiens
cgtgccctgcaggggtgctgccattggaaccagggccgggggtggggggtcagttatgccagtttcccttctttggcctcaagtggccccagactcacttctaaaatattcccaaggcagtagccatggcaagagggaactaggccccagagggagcccctccatgccataccccacctgccagagaaacttctctgyacactccccactcagtgggcctgtgctgtgcttgctgggggcattctacgtttcagcagagctgagctgcctgcccgcctcagggcttgagcccctctccttccccccacacactcctgctgctcttgaatgaacatggaaactctttaacagggtcagccctcaagacatctcaagttcccctgctgcaggctgcatccagtttcttaaaacactgcactggtttcatctggccctggacacatgcccttccagacaaccaaacctccctgtcatcagctgaatccctgccatgcttccaacatcaccctgccctaagccagcctctccaggaaggtcacctgagccctggacggatgggacccttgtcacatgcccagcagagcccactccacagagcctggcctggaacctggggggtgacgtgtaaatctggccaccactaaacaccaatcaaggcccagcacccaccctacctgggattaagtcaatcacaggctcttaggctcaggggttgtaagacactggggcgaggtggatgactgagcaccatgactgacactgaatcctggagattatgaaactggcaaattatttgagttgctaaaaagataaaatttctccagttgaaagtggtcaagcaccgctgatgacacgccgtttctcagggagggaggtgggattacgagggggtaggacatgcctgggcgttctgagtggcttctgtggaagagtcctaatatctcagtgagctgtgacaacttaggatacagacaagtcagaccatcacagttgtgcaaaataagctcacttatgactaattcctggaaaaacacctttaaatgttttcctttgattataaaaattactcattaataacacgttcagacattctaagagtgcttggaataggaggttactctcatgacatcacctaagactaattacctccctaaaaccccatctccaaataccatcacattgggagtttgggcttcaacataggaatttattagagtagtatagaaacggattaattgtatttatgaaaatgattcactcaagaaacattgacagaacagctgatgcccaccatgggaccagcacagatctaggactacatatgcaatgatatatcacaaatctgattgtctttttggaatttaaaatgtagggaaggaaaaagctaataaacaaataaacgaacccataaagaaaaattacactctatttctgggtcctctattctgttccattgctctacatgcctatttttatgccagtaccatgctgttttggtgattatagccttatagtatagt

SEQ ID NO: 77630 - DNA, 621 bp, Homo sapiens
tactcttgtaattataatggtgatactttacctgcctatggtgcttcatcctcccaagtgagtagggcaggcatatgcagcttggaaaacagagtcttcgagataggaagcascatggccgggatcacccagccaggcacagaactcaggtccttgactgccaagccagcgcccaagctaccataccatgagcttgtattgggtcaaaacattttctttacagaaatagagtagtggatagttttgtgaatatcaaaatactttttctgcctaagtaagttgtatatctttgactctgtggaagattcacaatccacagagagattcttctcatgtcagtcaaccaaatgagtgaagttagagggagacctccttagcccctgcaaaggggactggagtttttgccaatatccttatctctcgtagattctttcccagatagctcaacctcagcgtggctcctaggtggataggggccatgaactgtgactctaccttttaatactcctggaaagatcacagacctaccaggaaattgacagccctggttccagtctctgccatgccacttactaacctaaccacctggtaggccttttccccatttgaaatgacaggatc

SEQ ID NO: 77631 - DNA, 621 bp, Homo sapiens
tactcttgtaattataatggtgatactttacctgcctatggtgcttcatcctcccaagtgagtagggcaggcatatgcagcttggaaaacagagtcttcgagataggaagcagcatggccgggatcacccagccaggcacagaactcaggtccttgactgccaagccagcgcccaagmtaccataccatgagcttgtattgggtcaaaacattttctttacagaaatagagtagtggatagttttgtgaatatcaaaatactttttctgcctaagtaagttgtatatctttgactctgtggaagattcacaatccacagagagattcttctcatgtcagtcaaccaaatgagtgaagttagagggagacctccttagcccctgcaaaggggactggagtttttgccaatatccttatctctcgtagattctttcccagatagctcaacctcagcgtggctcctaggtggataggggccatgaactgtgactctaccttttaatactcctggaaagatcacagacctaccaggaaattgacagccctggttccagtctctgccatgccacttactaacctaaccacctggtaggccttttccccatttgaaatgacaggatc

SEQ ID NO: 77632 - DNA, 621 bp, Homo sapiens
tactcttgtaattataatggtgatactttacctgcctatggtgcttcatcctcccaagtgagtagggcaggcatatgcagcttggaaaacagagtcttcgagataggaagcagcatggccgggatcacccagccaggcacagaactcaggtccttgactgccaagccagcgcccaagctaccataccatgagcttgtattgggtcaaaayattttctttacagaaatagagtagtggatagttttgtgaatatcaaaatactttttctgcctaagtaagttgtatatctttgactctgtggaagattcacaatccacagagagattcttctcatgtcagtcaaccaaatgagtgaagttagagggagacctccttagcccctgcaaaggggactggagtttttgccaatatccttatctctcgtagattctttcccagatagctcaacctcagcgtggctcctaggtggataggggccatgaactgtgactctaccttttaatactcctggaaagatcacagacctaccaggaaattgacagccctggttccagtctctgccatgccacttactaacctaaccacctggtaggccttttccccatttgaaatgacaggatc

SEQ ID NO: 77633 - DNA, 621 bp, Homo sapiens
tactcttgtaattataatggtgatactttacctgcctatggtgcttcatcctcccaagtgagtagggcaggcatatgcagcttggaaaacagagtcttcgagataggaagcagcatggccgggatcacccagccaggcacagaactcaggtccttgactgccaagccagcgcccaagctaccataccatgagcttgtattgggtcaaaacattttcttyacagaaatagagtagtggatagttttgtgaatatcaaaatactttttctgcctaagtaagttgtatatctttgactctgtggaagattcacaatccacagagagattcttctcatgtcagtcaaccaaatgagtgaagttagagggagacctccttagcccctgcaaaggggactggagtttttgccaatatccttatctctcgtagattctttcccagatagctcaacctcagcgtggctcctaggtggataggggccatgaactgtgactctaccttttaatactcctggaaagatcacagacctaccaggaaattgacagccctggttccagtctctgccatgccacttactaacctaaccacctggtaggccttttccccatttgaaatgacaggatc

SEQ ID NO: 77634 - DNA, 621 bp, Homo sapiens
tactcttgtaattataatggtgatactttacctgcctatggtgcttcatcctcccaagtgagtagggcaggcatatgcagcttggaaaacagagtcttcgagataggaagcagcatggccgggatcacccagccaggcacagaactcaggtccttgactgccaagccagcgcccaagctaccataccatgagcttgtattgggtcaaaacattttctttacagaaatagagtagtggatagttttgtgaatatcaaaatactttttctgcctaagtaagttgtatatctttgactctgtggaagattcacaatccacagagwgattcttctcatgtcagtcaaccaaatgagtgaagttagagggagacctccttagcccctgcaaaggggactggagtttttgccaatatccttatctctcgtagattctttcccagatagctcaacctcagcgtggctcctaggtggataggggccatgaactgtgactctaccttttaatactcctggaaagatcacagacctaccaggaaattgacagccctggttccagtctctgccatgccacttactaacctaaccacctggtaggccttttccccatttgaaatgacaggatc

SEQ ID NO: 77635 - DNA, 621 bp, Homo sapiens
tactcttgtaattataatggtgatactttacctgcctatggtgcttcatcctcccaagtgagtagggcaggcatatgcagcttggaaaacagagtcttcgagataggaagcagcatggccgggatcacccagccaggcacagaactcaggtccttgactgccaagccagcgcccaagctaccataccatgagcttgtattgggtcaaaacattttctttacagaaatagagtagtggatagttttgtgaatatcaaaatactttttctgcctaagtaagttgtatatctttgactctgtggaagattcacaatccacagagagattcttctcatgtcagtcaaccaaatgagtgaagttagagggagacctccttagcccctgcaaaggggactggagtttttgccaatatccttatctctcstagattctttcccagatagctcaacctcagcgtggctcctaggtggataggggccatgaactgtgactctaccttttaatactcctggaaagatcacagacctaccaggaaattgacagccctggttccagtctctgccatgccacttactaacctaaccacctggtaggccttttccccatttgaaatgacaggatc

SEQ ID NO: 77636 - DNA, 603 bp, Homo sapiens
ttaccaaattaagaagaaattctgacattctgcactacagaaaggatgaaccatattgggcttaccattctgcatcctaatttttaatatctattgatgttgatacatatggatctaattactttgtctctttttgaaacagagtcttgctctgttgcccaggctggagtgcagtggtgcaatctgggctcactgcaacctccgcctcctgagttcaaacgattctcctgcttcagcctcccacgtagctgggattacaggtacctgctaccatgccggctaatttttgtatttcaccatgttggtcaggctggtttcaaactcccaacctcaagtgatccacctgccttggccttccaaagtgctgggattacaggcatgagccaccacacccrgcctgggtccgattccttttaaccactatacattattcagttgtgtgaataaaccatgtttttctttatccatacctctttcacttcatgttcttaagttagtcacatcattctggacctctgctataaaggagagccagcaatctgtatgtcctttttttttttttcttgagacggagctatgctctgtcacccaggctggagtgca

SEQ ID NO: 77637 - DNA, 481 bp, Homo sapiens
taaaaatacaaaaattagctgggcatggtggcgggcgcctgtagtcccagctacttgggaggctggggcagagaattgcttgaacccgggaggtagaggttgcagtgagccgagattgtgccactgccctccagcctggggtgacagagcaagactccwtctcaaaaaaaaaaaaaaaaaaaaagatttaaatatttattagtcaaaaagttagaatttatcatgttcaaaccagtaaaggaaaaatgaagcaaagacagtttggtgaatccaacaaaagttaggaaaaggtgaaaaagtaaatagccagcaagcttggtgaagaaaagtacaaaataaatatgaggattaatctaaatatattcataatcaaaataaacacgaatggaccaactttacccaggcagctgaaaggaaaaagaaatgactcatttaaacctgagagaggacaagacaatctgccattatttggatactctga

SEQ ID NO: 77638 - DNA, 734 bp, Homo sapiens
gtgtattagatatatataatccttttcttaccacaggaagatttagattattaacaatgcgtgtactaaaactagcttttcaatatasttagaaatgaaaatcagagaagctggagcactgtgaagtccttaggttcccccatttcatttaccctgaagaaggggatgaagtaaacttttcaattgatttgcagtttgtatattttccaggtgtactttttttcttctgcctttgccatttttacctcttctgctctctgttgactttttcctagcatccaacttaagagatatcagggtaaagaaggacagaatagtaataatcagaatcattatcataccaggtttagaagaaagttttattttgtattcttacaatttttaaattgaggtaaaattcacaaaatataaaattaatcaaactattgttaatgtgaataattcagtggcgtttagtgcattcagttccaagacattttaatcacctcaaaagcaaactccatacccattaagcagctactcccacaccctagcaatcaccaatttgcctctgtctgtgtggatttacctattgtaggtatttcatataaatggaatcatacagtatgtgaccttttgtttctgacttttacttagcatagtgttttgtggttcaccaacattgaagcatatgttagctctttattcctttttatggctgtgtactattccattgtatatatagctctctatat

SEQ ID NO: 77639 - DNA, 717 bp, Homo sapiens
ccaaaattaatctgtrgtttgtaaataatttttaaacatgaaacagatcaatctcagtcatctacaacaaggtagccagacgctttcttctttcaaagtgtgctcactgtttcaaacccagagacctagggactgagaactagcaaaagactaccaagcgtctcacctttcaatggttgggttgtgggaggtggagagagacattggtctgtggaccagcagcaagcccatcgcttgctgtaagaaatgaggactcttagatccaatcctgacctctgaatcagaatctgcatttgaagaagatccacagatgatttgattactcattaacgtttggaaagcactgcccagaactttgagatcatcttctaatacactgcatcaataaataaaatgttgaaagagaaaattgtagatgttgatgatgacaattttaaccgaacttggtggtgttctgtttcacctgatgctaacaatttttaggttaggggacctaggaaaaatgtccttttgtctctaccagttgctggttaagtggaacagtgaagtgtccttttcctcctttttaaaatttccggggtacttgactaactgatttctgcatgtttaaacttacattaaatgacctaagagatgacttttgctttaatttgatggagacaatccagtggcagttatctgtcactgatttcatcttaacttccttttcatttaaga

SEQ ID NO: 77640 - DNA, 590 bp, Homo sapiens
tcccaaacaacattgacgaatgaatgatcaaaagccaatgaatccactttgcaggtagagaagcaacacttacaaaagccttggtgaaacaaaaggtttgaacgatgcaatgagagagagccagtgcaaagggagcacagtragagaattggcagagggtcaaggtgggcagttccagggtgtacaagacctgacaggtaaagagtctgtgtctcatctttactgcaatgaaaagttatccagggatgttaaactaaagagtgatgtggtttcatttgcatttgagatgactcttcctgctgtgagaggaacggcttgtaaggtagaattgggaggaccaattaggaggctgatgagaaagaagacagcatcctggaccagggtcatgaaattaggagacgggaggatatcatcagatttaaaatacattaaaggtgagctcaggacttgaaaagcattgtcaggcgtgggggtggccagtgggttggaatgctttgtagcactgaacaaagcttgttctatttttctctctctcagcaaagaaatgctattttttatacacataagccatatttggtgagagcaaaggg

SEQ ID NO: 77641 - DNA, 853 bp, Homo sapiens
atcctctacctggtaagtatcaaaatcccagactctgagaaggcaagtgtatgtctggacctgcgtctgcatagaaaatattgtgcaaaaagcctgtgcacattgagaaccactcttatcatttagggaaattttttattaacatagaaaaccacttaccagccaggttcccagacgtcagccaagggccaaccttgcaaggagcctttccaaggaaagcagtctctggtctgctgtgttaacttttctgtgcagatgcctgccttatccattggaaataaaatagtggttctccatttctctttatctccccaaatcttgtccttaccactcttactattgcctgttatgtgtgcatgtgwttatacatatattggcacacatacgtacactgtgaaactatttgccttgtaacaccttctctgcagtgtaagtcccatgaaggtgagggttgagtttgctcactgctgtattcccaacacctagcacttaatagataggctggggagagcttatcatggcatgagagccaatggtgtgcctttcttgccaaatccaagttcggtggcatcaccagcattgactgaaacaagtcacagtgatggtatttatactacagaacttggaaaatgctacaaattagcgagcttttattttttattttttgtttccagatagcaggcttattagcacactatctgtaggcatatagaaatacatagtgaatgatggactcgttgtaccattatttactttgtttccttaaattgactttttaactgcaatgagcttattaaacgatacttgtgcctttacaccacagtaaatgaaaagccacgtctcttgccaatga

SEQ ID NO: 77642 - DNA, 853 bp, Homo sapiens
atcctctacctggtaagtatcaaaatcccagactctgagaaggcaagtgtatgtctggacctgcgtctgcatagaaaatattgtgcaaaaagcctgtgcacattgagaaccactcttatcatttagggaaattttttattaacatagaaaaccacttaccagccaggttcccagacgtcagccaagggccaaccttgcaaggagcctttccaaggaaagcagtctctggtctgctgtgttaacttttctgtgcagatgcctgccttatccattggaaataaaatagtggttctccatttctctttatctccccaaatcttgtccttaccactcttactattgcctgttatgtgtgcatgtgtttatacatatattggcacacataygtacactgtgaaactatttgccttgtaacaccttctctgcagtgtaagtcccatgaaggtgagggttgagtttgctcactgctgtattcccaacacctagcacttaatagataggctggggagagcttatcatggcatgagagccaatggtgtgcctttcttgccaaatccaagttcggtggcatcaccagcattgactgaaacaagtcacagtgatggtatttatactacagaacttggaaaatgctacaaattagcgagcttttattttttattttttgtttccagatagcaggcttattagcacactatctgtaggcatatagaaatacatagtgaatgatggactcgttgtaccattatttactttgtttccttaaattgactttttaactgcaatgagcttattaaacgatacttgtgcctttacaccacagtaaatgaaaagccacgtctcttgccaatga

SEQ ID NO: 77643 - DNA, 853 bp, Homo sapiens
atcctctacctggtaagtatcaaaatcccagactctgagaaggcaagtgtatgtctggacctgcgtctgcatagaaaatattgtgcaaaaagcctgtgcacattgagaaccactcttatcatttagggaaattttttattaacatagaaaaccacttaccagccaggttcccagacgtcagccaagggccaaccttgcaaggagcctttccaaggaaagcagtctctggtctgctgtgttaacttttctgtgcagatgcctgccttatccattggaaataaaatagtggttctccatttctctttatctccccaaatcttgtccttaccactcttactattgcctgttatgtgtgcatgtgtttatacatatattggcacacatacgtacactgtgaaactatttgccttgtaacaccttctctgcagtgtaagtcccatgaaggtgagggttgagtytgctcactgctgtattcccaacacctagcacttaatagataggctggggagagcttatcatggcatgagagccaatggtgtgcctttcttgccaaatccaagttcggtggcatcaccagcattgactgaaacaagtcacagtgatggtatttatactacagaacttggaaaatgctacaaattagcgagcttttattttttattttttgtttccagatagcaggcttattagcacactatctgtaggcatatagaaatacatagtgaatgatggactcgttgtaccattatttactttgtttccttaaattgactttttaactgcaatgagcttattaaacgatacttgtgcctttacaccacagtaaatgaaaagccacgtctcttgccaatga

SEQ ID NO: 77644 - DNA, 563 bp, Homo sapiens
  misc_feature (1)...(563): n = A,T,C or G
tgnnnnnnnnnnnnnnnnnnnnnnnnnnnnnnnnnnnnnnnnnnnnnnnnnnnnnnnnnnnnnnnnnnnnnnnnnnnnnnnnnnnnnnnnnnnnnnnnnnnntactttatattaacttttatactatagaaaacatgtattttatatacagtgctaggcacatagtagacgcttaaatatattttgatgtcttyattgtctaatagtgaagaacacatcatgatctgttttagctattttgaaaataaatctgaataactgacattttatagctttttttcagtaattgagaattacctagtttacaattgggaagccctgagggacctttaatattttttctcttcttatgtgaaataaattgtattttaattttcttaaactgaaaccacctaaatgggccgatgggctttgggttgcctcgcaatgaaataaatgcacagtcggtaaaagcactgcgctgtcttctcccaaagtatttccctcctcttggggatccaggatctggtatgaaatggcacccttaattttggggatctgtctttgccttcagctgcgattag

SEQ ID NO: 77645 - DNA, 563 bp, Homo sapiens
  misc_feature (1)...(563): n = A,T,C or G
tgnnnnnnnnnnnnnnnnnnnnnnnnnnnnnnnnnnnnnnnnnnnnnnnnnnnnnnnnnnnnnnnnnnnnnnnnnnnnnnnnnnnnnnnnnnnnnnnnnnnntactttatattaacttttatactatagaaaacatgtattttatatacagtgctaggcacatagtagacgcttaaatatattttgatgtctttattgtctaatagtgaagaacacatcatgatctgttttagctattttgaaaataaatctgaataactgacattttatagctttttttcagtaattgagaattacctagtttacaattgggaagccytgagggacctttaatattttttctcttcttatgtgaaataaattgtattttaattttcttaaactgaaaccacctaaatgggccgatgggctttgggttgcctcgcaatgaaataaatgcacagtcggtaaaagcactgcgctgtcttctcccaaagtatttccctcctcttggggatccaggatctggtatgaaatggcacccttaattttggggatctgtctttgccttcagctgcgattag

SEQ ID NO: 77646 - DNA, 563 bp, Homo sapiens
  misc_feature (1)...(563): n = A,T,C or G
tgnnnnnnnnnnnnnnnnnnnnnnnnnnnnnnnnnnnnnnnnnnnnnnnnnnnnnnnnnnnnnnnnnnnnnnnnnnnnnnnnnnnnnnnnnnnnnnnnnnnntactttatattaacttttatactatagaaaacatgtattttatatacagtgctaggcacatagtagacgcttaaatatattttgatgtctttattgtctaatagtgaagaacacatcatgatctgttttagctattttgaaaataaatctgaataactgacattttatagctttttttcagtaattgagaattacctagtttacaattgggaagccctgagggacctttaatattttttctcttcttatgtgaaataaattgtattttaattttcttaaactgaaaccacctaaatgggccgatgggctttgggttgcctcgcaatgaaataaatgcacagtcggtaaaagcactgcgctgtcttctcccaaagtatttccctcctcttggggatccaggatctggtatraaatggcacccttaattttggggatctgtctttgccttcagctgcgattag

SEQ ID NO: 77647 - DNA, 1017 bp, Homo sapiens
ttgttttcttctataaggatattaaaataagatagagtcagctaattgaatagtagtgttaagttcatttagtgtttctttatggtctcaggttacatgttttcttttttttttctttttcttcaagtttggattttctgttgggcttggtttcattttggtttatttacaaggggcattacagctttgaaactagttgacaaaactgaaatgagcttgatattgataattgcaaataattgtatgcccactattagctaaatctggccaatctggcataaattaggccaatgtaacatagagatagattgatttgcaataatactaagtaatcacagtaatagcataattggtaaacacaaatatattaactgtaacttttaaatcaagtcctaacttattaaacaamtgtcgtcattagcaaaaagagtatattctccaaatcattcattcatccatccattgaataaataaatataccttaagtgattttaccagtcactgtatctttgaataatggcctgacaagaattttatatcatcttacagctgtttgtcctaaaagtaatattttaatatgtgcaaattttaaaatagcaatttcgtatttttatatgatatgcttaaatgtgtaggatgctattaggtaagagattattataagatatcccatgtactcccaatttatatcacttttgtgttatgttaatattaataaagtaatctagatgttttaactcatcatacttgaattatcacgaaaaattgattacttatcttatatttgcattcatatctcatattctggtagtattagaagccttacgtttattaatctaattgcttttaaattatattttgataaataatttttcatctgaaatcttattaatataaaattttgaaagatacacacaagaagcagaagaaaagttaaacatctgcaattccatttaccatatacaaaacacactgttagtagtatgtattattcatacaaatttattctactgggtg

SEQ ID NO: 77648 - DNA, 1122 bp, Homo sapiens
tctgtaccctataccagcckgcatcccattccactttgagccccacagggtacccttgatctgacaagttactttccttttttagggcagatatattacataaaaacaattattaaggcctctctgtaatgaacaaggtttaaatgttaaagttaaggaacattggtctatcagttgtgatttcttcagcttaatgtatttctatttgctcacacacttgttcatgtagtcgcatcactccaattaccagaaaacatttaccttatgtcctctactattggacttcaaagtctaatttctcatcacacaattcctccatcctagtggaagaagttcacattaaaaaaagaaaaaaatcaacactagtgcttattttactttttagccatctttttccttaatgtatgtaatacattttttcccattctttgccattcctgtgaactctatacaaccttcagtgcccctgcagatatcacgtttatgatcatttgtgactcaacagttagtcccttatgatcctcttacactttggtcatgtagggtttatcccctcccatatcatggatcattttctagtcaatcccatttatctataaaatactgaacaatactgcattagtttctggagacttcctccaaagaattaccacaaacttgatgatgtaaaacaaaggaaatatactctcttacagtactgggcatcagaagctcaaaaatcttttttgccagaccgaaatcaagatgtcagcagggctctgatccctctggagaccccagaagagagtgtgattcttgtctattccagttcctggtggctgccagcactccttgacatgcagccatgttacgccagtctctgcctccgtgaacacagagccttctcctctgtgtgtctatgtctatcatctgttcccatttctatcaactcgcccactgtctcttataaagacacaagtgactgcattagggcccacctgcacagtccaggataaccgacccatctcagaatctttaacttaatcacatatttttgtcatatacactaatattcacaggctctgaggattaggtcctgatatctttgggggatgttttttagcctgccataaacaggattcg

SEQ ID NO: 77649 - DNA, 1054 bp, Homo sapiens
ttttatattgggagcaactaacttgcttttgattttacaggctcataagtggaagggagtagccttgactcagttgagactttggactatggacttttcagttaatgctggaatgagttaagactttgggggactgttgggaaggtatgattttatttttcaatgttagaaggacrtgagatttgggaggatccaggggtacaatgatatggtttagatttgtgtttctacccatatcacatgttcaattcttatcctgaatgtcagaaatgaggcctagtgattctgccaccatggtccaatcatcttggtgttctctcacggtttaccgtcatgaccccttggtactatagagtttctcatgagatctgtctgttttatagtgtgcagaaccttccccagacccttcctctttttctgactgtgtgagacatggctgcttccccttcgccttctataatgactgcaagtttcctgaggcctccctagtcatgcttcttgtacagcctgtgaaactgtgagtcaattaaacttccttgcttcataaattacacagtctaatgtatttatttatagcagtgtgagaacagactaatacagggctattgagacaaatgctgtgtgattgtaagccaaatttacttttacttaaagattattgttttaatgtttgaaaattatatcaaggaagtttaaaaaatatctccattacctatcatcacctatatttatctaagatgattttaaggaatacaaataaattagttattaaattttaataatttaagtattataacatttcacaaaataccaattagatattagtctgaaaaaatgacaaaatgaatatgggacaaaagttgtctttctgtaattgatttttagaaaaggaaacactgagtcaaaaacatcgtgaaattttaagaactttatcatctactatgaagcaaacgtaggagaagggataacagaataaaacaaagaatattttgtattgtaccagcatagatataatagttacataatttgttgattgaaaattagatcacttcgg

SEQ ID NO: 77650 - DNA, 1054 bp, Homo sapiens
ttttatattgggagcaactaacttgcttttgattttacaggctcataagtggaagggagtagccttgactcagttgagactttggactatggacttttcagttaatgctggaatgagttaagactttgggggactgttgggaaggtatgattttatttttcaatgttagaaggacatgagatttgggaggatccaggggtacaatgatatggtttagatttgtgtttctacccatatcacatgttcaattcttatcctgaatgtcagaaatgaggcctagtgattctgccaccatggtccaatcatcttggtgktctctcacggtttaccgtcatgaccccttggtactatagagtttctcatgagatctgtctgttttatagtgtgcagaaccttccccagacccttcctctttttctgactgtgtgagacatggctgcttccccttcgccttctataatgactgcaagtttcctgaggcctccctagtcatgcttcttgtacagcctgtgaaactgtgagtcaattaaacttccttgcttcataaattacacagtctaatgtatttatttatagcagtgtgagaacagactaatacagggctattgagacaaatgctgtgtgattgtaagccaaatttacttttacttaaagattattgttttaatgtttgaaaattatatcaaggaagtttaaaaaatatctccattacctatcatcacctatatttatctaagatgattttaaggaatacaaataaattagttattaaattttaataatttaagtattataacatttcacaaaataccaattagatattagtctgaaaaaatgacaaaatgaatatgggacaaaagttgtctttctgtaattgatttttagaaaaggaaacactgagtcaaaaacatcgtgaaattttaagaactttatcatctactatgaagcaaacgtaggagaagggataacagaataaaacaaagaatattttgtattgtaccagcatagatataatagttacataatttgttgattgaaaattagatcacttcgg

SEQ ID NO: 77651 - DNA, 1054 bp, Homo sapiens
ttttatattgggagcaactaacttgcttttgattttacaggctcataagtggaagggagtagccttgactcagttgagactttggactatggacttttcagttaatgctggaatgagttaagactttgggggactgttgggaaggtatgattttatttttcaatgttagaaggacatgagatttgggaggatccaggggtacaatgatatggtttagatttgtgtttctacccatatcacatgttcaattcttatcctgaatgtcagaaatgaggcctagtgattctgccaccatggtccaatcatcttggtgttstctcacggtttaccgtcatgaccccttggtactatagagtttctcatgagatctgtctgttttatagtgtgcagaaccttccccagacccttcctctttttctgactgtgtgagacatggctgcttccccttcgccttctataatgactgcaagtttcctgaggcctccctagtcatgcttcttgtacagcctgtgaaactgtgagtcaattaaacttccttgcttcataaattacacagtctaatgtatttatttatagcagtgtgagaacagactaatacagggctattgagacaaatgctgtgtgattgtaagccaaatttacttttacttaaagattattgttttaatgtttgaaaattatatcaaggaagtttaaaaaatatctccattacctatcatcacctatatttatctaagatgattttaaggaatacaaataaattagttattaaattttaataatttaagtattataacatttcacaaaataccaattagatattagtctgaaaaaatgacaaaatgaatatgggacaaaagttgtctttctgtaattgatttttagaaaaggaaacactgagtcaaaaacatcgtgaaattttaagaactttatcatctactatgaagcaaacgtaggagaagggataacagaataaaacaaagaatattttgtattgtaccagcatagatataatagttacataatttgttgattgaaaattagatcacttcgg

SEQ ID NO: 77652 - DNA, 1054 bp, Homo sapiens
ttttatattgggagcaactaacttgcttttgattttacaggctcataagtggaagggagtagccttgactcagttgagactttggactatggacttttcagttaatgctggaatgagttaagactttgggggactgttgggaaggtatgattttatttttcaatgttagaaggacatgagatttgggaggatccaggggtacaatgatatggtttagatttgtgtttctacccatatcacatgttcaattcttatcctgaatgtcagaaatgaggcctagtgattctgccaccatggtccaatcatcttggtgttctctcacggtttaccrtcatgaccccttggtactatagagtttctcatgagatctgtctgttttatagtgtgcagaaccttccccagacccttcctctttttctgactgtgtgagacatggctgcttccccttcgccttctataatgactgcaagtttcctgaggcctccctagtcatgcttcttgtacagcctgtgaaactgtgagtcaattaaacttccttgcttcataaattacacagtctaatgtatttatttatagcagtgtgagaacagactaatacagggctattgagacaaatgctgtgtgattgtaagccaaatttacttttacttaaagattattgttttaatgtttgaaaattatatcaaggaagtttaaaaaatatctccattacctatcatcacctatatttatctaagatgattttaaggaatacaaataaattagttattaaattttaataatttaagtattataacatttcacaaaataccaattagatattagtctgaaaaaatgacaaaatgaatatgggacaaaagttgtctttctgtaattgatttttagaaaaggaaacactgagtcaaaaacatcgtgaaattttaagaactttatcatctactatgaagcaaacgtaggagaagggataacagaataaaacaaagaatattttgtattgtaccagcatagatataatagttacataatttgttgattgaaaattagatcacttcgg

SEQ ID NO: 77653 - DNA, 839 bp, Homo sapiens
tttttttcattgagatggagtttcgctctgtcacccaggctggagtgcagtggcacgatcttagctcactgcaacctctgcctcctgggttcacgtgatgctcctgcctcagcctcctgagtagctgggatcacaggcacacaccaccacgctcggctaatttttgtatttgtagtagagacggtgtttcaccatgttgcccaggctggtctcaaactcctgacctcaagtgatctgcccacctcggcctcccaaagtgctgggattacaggcgtgagccactgagcctttcccaaatgcaagaattctaactgatacaaccttttccacacataggctgctgggtcctttattttattttatttttttttttgagacagagtctcgctctgtcgcccaggctggagtgtagtggtgggatctcggctcactgcaagctccgccttctgggttcacgccattctcctgcctcagcctcccacgtagctgggactgcaggtgcccaccactgtatttttagtagagatggggtttcaccgtggtcttgatctcctgacctcgtgatccacccgcctctgcctcccaaagtgctgggattacaggtgtgagccacagagcccggccttgctgggtcctgtatttttaatgtaartctgtgtcttcatccctaatcctttccttaggctatatccccaggcagagagctgctgagtcaagggcttaattttcaaagctttggatacagactctcaagctgccctccagaaatgttggatctcactgcagcagggccatttcctcaccacataatcaatgataactacgacgttttaaaaggc

SEQ ID NO: 77654 - DNA, 937 bp, Homo sapiens
tatttctacccatatgatctaattcctagtgggtcctcatgccactttgaaaaacagcttaatcaagtgtcagtaatgatttcacatcggttaaaagtggaaatcaaatataccatcctatgtgccaagacattagaaaccaatataaaaggagaaatctgtgtattatagaatggatatgagaattataagttcatttatcaaaaaagattacctgttcacgattcctaatgagagatcccatttggtgaacatttggctaataactcagcagctgcggaacattattacttaatctacttatttccaaagatgtgtaatctatgtgctataaacaaaaatgcaggccaaacaaagaaatgkgtctctatgtttctaactatttcaaattaatgacagaatgtacaaaaacaatattcacctatgagccccctgtattcccagtgtaatgctaagtccagatcgtcagtaacaaggcatcttggagtataaaagcaattaggcagataattaaaggaaaagcaatcatttgtcccctcctgcctttttacctctttatttcttcaattatcagaaaattaacatgatttttttctttagaaagtgaactgtatgagtaattgctttaattttctgcttgatttttccagaaagtcccatcaaatgagaagtcaactaagaggatttgtttactacccaaaatgattaatttagggattaatgaagcacccgtacttccacgtgtagaaaactgtattaaaaacttctatctgcttgggaatcatctgggacttaacatataactcttttaacaactatgtgcttgtttattgattgtttcctgggccaaaaagtaaaaactgttaacagttttgtatcagttgggaaaatttgaaggtggattgtacactagatgctattatggcagtgtttttaa

SEQ ID NO: 77655 - DNA, 3426 bp, Homo sapiens
  misc_feature (1)...(3426): n = A,T,C or G
gaaacgtaaagttgcaaaagggttttataaagagtctgctttgtgctttaagatgatggccattagcttccttggaaagacactttacaacaataatctaggatcaatacgagagataaaaatttatttaagcttcaggaagtgatgaaggtcacatttttattgtctagttctatttaacatcagtttatttgggtttccctgatttggtttattaagctaaaaatccaaaggtggaatctttggcaaatgtctgtttagtataattcatacaaatgtgcctcattgttaatttatagtaggttcttaatcctaattaaatactttatatgcctcctaattrtatttttgaaaagacaatagacaactcctaaaatacgtttgggttgattgtaaatcactgtataatgaatataaaaataaggcagtgtgttgtaagcattgagggaccagtgaacaaagaggtgtgtgcttaacaattggcagcgtctaacttaaagaggatttttctgtcctgaaaagggccttaatctattcgattcatcatatcagttagaaaacatgtattgaatgttaatattgtgaaggtcctatgctaatcatcttttaatttgaaatatttctaatataatgcattttattccacaagcacttattaaatatttcctatgtggtaagtgttggtaatttgaaagagaatatgaaatgatgaactgagcatttcaaacctgggtaataaagactgtggaagcagcaagccccagatgctgcagacacacacgggaagagcagcagcagccctagaaatggatgctggcttttgactaaacaagtctggaaataaattatttttgatccccagtatcatnnnnnnnnnnnnnnnnnnnnnnnnnnnnnnnnnnnnnnnnnnnnnnnnnnnnnnnnnnnnnnnnnnnnnnnnnnnnnnnnnnnnnnnnnnnnnnnnnnnntcatcttaagcaaaattaatgcaggaacagaaaaccaaatgctgcattttctcacttacaangtgggggctaacattaagcacacacgaacataaatatggaaacaatggactactatatggtagagggaggggctgtgggtttaaaaagtatttatcaggtactatgcccactatctgggtgacaggatccatacaccaaacctcagcatcgtgccatattcctgtgtaacaaacctgctcgtgtatcccctgtatctaaaataaaagttgaaattttaaaaattcttctaaatggtagttcttattttagcaccacaaacatgccccctcattactcaaattttaaaaaaaaaaaaacttcttacaaaaaaaaattacaatttgacttttacctaagtcagttatttttaatggggaagaggtaaggaaatgaatagcaccatctgttgttgcaaaatgttactgcagcctcctaaatgggtgttaacacctgggcagcattttccacacttgccagtactattacaattgtaataataacaattagcaccactcaaaatggaaacaagcagctgaaaaatacattttgacccatatgagtaatttgtctaattccacattacattagattaaaaatgtcaaatgtgtttttatcaatagaatattgtcttttactccctcattcagaatgaataaattcactataaaaagatatgtgcttaacaagtaggtgcacctctctgttcataatttaattcttataacccctctaagaaggaaagattattatccccatgtgttgatgagacatcaactcttaaagaaacactcaatgactcacaagctaagtttagtgtgtgaatctgaggttacctcacttatccaacaatcatttaattaaggtcattctataattattgtacacctttgttaataataggagaagaaaaagtatacattgtaaaatggcaaattttatgatatgtgaattatatctccataaagttgatatttgaaaagtatattgaggggagatgggaaaagtgaattagaaatgaaagacatttagaagtgaatcattcaaagggaccaaacaaaaacactgaaaaaaaaataaagatactggtgacttatcttcaaatgcatcagggatgcctagatgttattaacacaagacagggcagcaaaacagaggtagtgttgagggctggaaatagaacatccatggggcaggagttgcaggcatccaggctgtaagtagtagcaatggcttagcaaatctaattgaagatgccaggcttcctatccatgcaaacactccaatctccaacccagatttaaacagatgatcagcactaaggcatccccattggagaagcccatcctctcaccgagtacaagaatcatgaatctatcaagagctctgcaggtcttgcagtcttagttaaggtctgtaggagtcagcaggtctttagcatttggaggtaaagtttatggaaaagacctagtctccaggggtgaggcctgaaaagaacaaagtatggctgtaagcactcttgggaaatgagtgggaatcaaccagatattcatcagcaatacaaaagggatcctctaattatcagacgctgcaaactagctcacagaaaagggattaaaagctgcagggccatgatggagttgtccaatctgaggtcctgtgggagctggggacagctctaaccctacaatcacagtgggactgcaggaatcaggaatcagcattgggacattcagcccccactcagggccacagcaaggaaagttttgagcagaatgtcagggtaggactgtgctgtcacagtggtcagagtatgggatttgccacctaatctgagttgaaggtggcagaagatgagtatgaagcacccctgcccaacagcagaagataaggggcagtagcactaatataattattttctttgacccagttctgcctgggactaggacagacgctggggcaagagagaggttacaggtgagggggtttggtggattcagccatgaggacctgagagaggctcaggcagggcccaagggatggagctggaaataaacatatttggagtgatgattttcaacgtgtaagaaagcaaagaaaataatctctgagcaaagaagctggtcacagcatggagaagagaatcagatcttaaaggtcctgatgtacacaggttagaaaaggtgaggaagaagggcactagagaaggcgagagcagctaagacaatgcagaggagctataagattgaaggaaattataaagatagggccaggtatacagaaaggctgttgtgaaaatgtagagaaatggtatcaatgtacaaagtgagaaagcagatgatgagaactttgattttaaatctagaagagataagacataacttcaagaaaacagcatggtcattgtatgtgaataaaa

SEQ ID NO: 77656 - DNA, 3426 bp, Homo sapiens
  misc_feature (1)...(3426): n = A,T,C or G
gaaacgtaaagttgcaaaagggttttataaagagtctgctttgtgctttaagatgatggccattagcttccttggaaagacactttacaacaataatctaggatcaatacgagagataaaaatttatttaagcttcaggaagtgatgaaggtcacatttttattgtctagttctatttaacatcagtttatttgggtttccctgatttggtttattaagctaaaaatccaaaggtggaatctttggcaaatgtctgtttagtataattcatacaaatgtgcctcattgttaatttatagtaggttcttaatcctaattaaatactttatatgcctcctaattgtatttttgaaaagacaatagacaactcctaaaatacgtttgggttgattgtaaatcactgtataatgaatataaaaataaggcagtgtgttgtaagcattgagggaccagtgaacaaagaggtgtgtgyttaacaattggcagcgtctaacttaaagaggatttttctgtcctgaaaagggccttaatctattcgattcatcatatcagttagaaaacatgtattgaatgttaatattgtgaaggtcctatgctaatcatcttttaatttgaaatatttctaatataatgcattttattccacaagcacttattaaatatttcctatgtggtaagtgttggtaatttgaaagagaatatgaaatgatgaactgagcatttcaaacctgggtaataaagactgtggaagcagcaagccccagatgctgcagacacacacgggaagagcagcagcagccctagaaatggatgctggcttttgactaaacaagtctggaaataaattatttttgatccccagtatcatnnnnnnnnnnnnnnnnnnnnnnnnnnnnnnnnnnnnnnnnnnnnnnnnnnnnnnnnnnnnnnnnnnnnnnnnnnnnnnnnnnnnnnnnnnnnnnnnnnnntcatcttaagcaaaattaatgcaggaacagaaaaccaaatgctgcattttctcacttacaangtgggggctaacattaagcacacacgaacataaatatggaaacaatggactactatatggtagagggaggggctgtgggtttaaaaagtatttatcaggtactatgcccactatctgggtgacaggatccatacaccaaacctcagcatcgtgccatattcctgtgtaacaaacctgctcgtgtatcccctgtatctaaaataaaagttgaaattttaaaaattcttctaaatggtagttcttattttagcaccacaaacatgccccctcattactcaaattttaaaaaaaaaaaaacttcttacaaaaaaaaattacaatttgacttttacctaagtcagttatttttaatggggaagaggtaaggaaatgaatagcaccatctgttgttgcaaaatgttactgcagcctcctaaatgggtgttaacacctgggcagcattttccacacttgccagtactattacaattgtaataataacaattagcaccactcaaaatggaaacaagcagctgaaaaatacattttgacccatatgagtaatttgtctaattccacattacattagattaaaaatgtcaaatgtgtttttatcaatagaatattgtcttttactccctcattcagaatgaataaattcactataaaaagatatgtgcttaacaagtaggtgcacctctctgttcataatttaattcttataacccctctaagaaggaaagattattatccccatgtgttgatgagacatcaactcttaaagaaacactcaatgactcacaagctaagtttagtgtgtgaatctgaggttacctcacttatccaacaatcatttaattaaggtcattctataattattgtacacctttgttaataataggagaagaaaaagtatacattgtaaaatggcaaattttatgatatgtgaattatatctccataaagttgatatttgaaaagtatattgaggggagatgggaaaagtgaattagaaatgaaagacatttagaagtgaatcattcaaagggaccaaacaaaaacactgaaaaaaaaataaagatactggtgacttatcttcaaatgcatcagggatgcctagatgttattaacacaagacagggcagcaaaacagaggtagtgttgagggctggaaatagaacatccatggggcaggagttgcaggcatccaggctgtaagtagtagcaatggcttagcaaatctaattgaagatgccaggcttcctatccatgcaaacactccaatctccaacccagatttaaacagatgatcagcactaaggcatccccattggagaagcccatcctctcaccgagtacaagaatcatgaatctatcaagagctctgcaggtcttgcagtcttagttaaggtctgtaggagtcagcaggtctttagcatttggaggtaaagtttatggaaaagacctagtctccaggggtgaggcctgaaaagaacaaagtatggctgtaagcactcttgggaaatgagtgggaatcaaccagatattcatcagcaatacaaaagggatcctctaattatcagacgctgcaaactagctcacagaaaagggattaaaagctgcagggccatgatggagttgtccaatctgaggtcctgtgggagctggggacagctctaaccctacaatcacagtgggactgcaggaatcaggaatcagcattgggacattcagcccccactcagggccacagcaaggaaagttttgagcagaatgtcagggtaggactgtgctgtcacagtggtcagagtatgggatttgccacctaatctgagttgaaggtggcagaagatgagtatgaagcacccctgcccaacagcagaagataaggggcagtagcactaatataattattttctttgacccagttctgcctgggactaggacagacgctggggcaagagagaggttacaggtgagggggtttggtggattcagccatgaggacctgagagaggctcaggcagggcccaagggatggagctggaaataaacatatttggagtgatgattttcaacgtgtaagaaagcaaagaaaataatctctgagcaaagaagctggtcacagcatggagaagagaatcagatcttaaaggtcctgatgtacacaggttagaaaaggtgaggaagaagggcactagagaaggcgagagcagctaagacaatgcagaggagctataagattgaaggaaattataaagatagggccaggtatacagaaaggctgttgtgaaaatgtagagaaatggtatcaatgtacaaagtgagaaagcagatgatgagaactttgattttaaatctagaagagataagacataacttcaagaaaacagcatggtcattgtatgtgaataaaa

SEQ ID NO: 77657 - DNA, 1571 bp, Homo sapiens
tgcatgatcattaaaattataatcaatccattttcctttctcctaatatttttcctatactgtaacatgttttgatacaatacatcaacattataaaatgacaatgtgatcttaggaaaaactttacaggactttttgaaaaaaaaattgggaaaaactgatttgctttccttgctttttcactactgtggtttaccaaatgctccaaggggtcatgttgccttaagtgctgcccgagagcatattgatttccttcctcgggctggctactctcaccttttgacatcaaatgggctatattgaagaagcaccaaatatagtttgcaatccaccataggtaaggcataagaaaatattcatcattttaaaaagctacacactcatgtaatgggcctattcttaaagattgtataataagctgctgagaatattcttatattatttttgaccagatccctgaatagtaagcacttcattgtgaatttatagcattaagaataaaaatagaacaactttctttcctatgaatagcttctattccatttgagaactatttcattggttaatatgactacttctgcttttcgaagggctctctatctacagaataaagcattgatgagctgattgtaaaatatggcgatgttgaagaaaataaaacatcttaaaaggagaaatattccatgttcatgtataggaagactcaatattgttcacgtgtcagttctttccgtctttatttaacacaatcccaatcaaaatcctaaagagttattttttgaaaatctagtgtctaatgtttatatagaaagtcaaaagagccagaattaaatatgatgatgatgatgatgatagaaaaaaggaagatatgggcaatgtccccaaactataggaatctgaaaactggtttaacatggtttggactggggtgttcaaaaatagtgggcaacaacaggcctaaggacctagtttgattctaatgcatgagcttagcgcaacagatatagatagatacttacagatgtacttctatatctatagccatatatatatctctacaagattctaaagaaacctggaggctgggggttgaacagaagaaaggaataatacatatacattattctgtaagaaatatcagaaaacggatggggcatggtggcccatgtctgtaatcccagcactttgggttgccgaggtgggcggatcacttgaggtcaggagtttgagatcagcctggccaatatagtgaaactccgtctctactagaaatacaaaaattatctgggcacggttgtgcatgcctgtattcccaactactgggaagctgaggcaggagaatcgcttgagcccaggaggcagaggttgcagtgagctgagattgcaccactgcactccagcctgggtgacaaagaaagattttatctcaaaaaaaaaaaaaaagttttacatatacatatatatatgyatatatatgaaaactattgaaaagaattgaatgtgtggtattaagaaaagaagaaaattggtatctcatctagtatcatagttggtttcatgctgctttctta

SEQ ID NO: 77658 - DNA, 682 bp, Homo sapiens
cacagtctggggaaggctggaccaatggctgatagacaggaactttgcaccaacgatggatcttgggagcaacgtgaaaagcagattctatgacatctgaaagggaagattttccagttgtaaaccaaaagcaaaatcctaagctctcaattgactgagagaaacccgaaaaactgaattccaggagggaggtcagacactcccattatacrtcctccctgtggagtgcagccacgactggccagcactaactccaaaatgaataagaacagaccctccgtgggaaccaaactccaaacctgactctggagcagaaccacatgacatagcaggtcctgaaggacatcaaagtatttcactccaaaatatgtttctttgacatattttgaaatggccctgcagagccttttgtgggggaaatttccatctgtagctagtctccactcatactgccaggtctttcccagatccaggagagttgaatcgagcctgacacctttgaggtaggaaaggagattttcaccatccttctctcggaaggctactacctggaaacttcatctacacaagaacctcggcttccacaaccccccttatcttaacccaagcatctctttctgctgacttcctctttagacaaagctttattctttctaccagctgccaatcaggaaatctttgg

SEQ ID NO: 77659 - DNA, 682 bp, Homo sapiens
cacagtctggggaaggctggaccaatggctgatagacaggaactttgcaccaacgatggatcttgggagcaacgtgaaaagcagattctatgacatctgaaagggaagattttccagttgtaaaccaaaagcaaaatcctaagctctcaattgactgagagaaacccgaaaaactgaattccaggagggaggtcagacactcccattatacatcctccctgtggagtgcagccacgactggccagcactaactccaaaatgaataagaacagacmctccgtgggaaccaaactccaaacctgactctggagcagaaccacatgacatagcaggtcctgaaggacatcaaagtatttcactccaaaatatgtttctttgacatattttgaaatggccctgcagagccttttgtgggggaaatttccatctgtagctagtctccactcatactgccaggtctttcccagatccaggagagttgaatcgagcctgacacctttgaggtaggaaaggagattttcaccatccttctctcggaaggctactacctggaaacttcatctacacaagaacctcggcttccacaaccccccttatcttaacccaagcatctctttctgctgacttcctctttagacaaagctttattctttctaccagctgccaatcaggaaatctttgg

SEQ ID NO: 77660 - DNA, 682 bp, Homo sapiens
cacagtctggggaaggctggaccaatggctgatagacaggaactttgcaccaacgatggatcttgggagcaacgtgaaaagcagattctatgacatctgaaagggaagattttccagttgtaaaccaaaagcaaaatcctaagctctcaattgactgagagaaacccgaaaaactgaattccaggagggaggtcagacactcccattatacatcctccctgtggagtgcagccacgactggccagcactaactccaaaatgaataagaacagaccctcygtgggaaccaaactccaaacctgactctggagcagaaccacatgacatagcaggtcctgaaggacatcaaagtatttcactccaaaatatgtttctttgacatattttgaaatggccctgcagagccttttgtgggggaaatttccatctgtagctagtctccactcatactgccaggtctttcccagatccaggagagttgaatcgagcctgacacctttgaggtaggaaaggagattttcaccatccttctctcggaaggctactacctggaaacttcatctacacaagaacctcggcttccacaaccccccttatcttaacccaagcatctctttctgctgacttcctctttagacaaagctttattctttctaccagctgccaatcaggaaatctttgg

SEQ ID NO: 77661 - DNA, 682 bp, Homo sapiens
cacagtctggggaaggctggaccaatggctgatagacaggaactttgcaccaacgatggatcttgggagcaacgtgaaaagcagattctatgacatctgaaagggaagattttccagttgtaaaccaaaagcaaaatcctaagctctcaattgactgagagaaacccgaaaaactgaattccaggagggaggtcagacactcccattatacatcctccctgtggagtgcagccacgactggccagcactaactccaaaatgaataagaacagaccctccgtgggaaccaaactccaaacctgactctggagcagaaccacatgacatagcaggtcctgaaggamatcaaagtatttcactccaaaatatgtttctttgacatattttgaaatggccctgcagagccttttgtgggggaaatttccatctgtagctagtctccactcatactgccaggtctttcccagatccaggagagttgaatcgagcctgacacctttgaggtaggaaaggagattttcaccatccttctctcggaaggctactacctggaaacttcatctacacaagaacctcggcttccacaaccccccttatcttaacccaagcatctctttctgctgacttcctctttagacaaagctttattctttctaccagctgccaatcaggaaatctttgg

SEQ ID NO: 77662 - DNA, 972 bp, Homo sapiens
atataattatgataaagcatcagataaaacaaaacatgtgagtatcttggaaaatcacaacattataaaaatcaaggaaagtcttagaatttttcgacttgaacaagacaagcaagacatgacccataaatgtaacatatgatcctttattgaattatttgacctcrggtcaaatcaacatgtatgaccatccaatgaatgctttataacaaatgatttttgttctaacttatttttacgtcaaagtcctatctacatctgtttagtcaagcttgctaataatgtgatttgaatatcatatatcattgtattactaaaatacattcatcttcaatttatagattttaatatttttctatattttctgatagttcacctttttcaggactatggtgttatagacacacatgttcagaagggttgtgccaacttagtttagtcttcctttcacaaacatcagatattatccattttaccttttaatatttttttcattattttgtcttacattataatttcttttccagctttcttttggtgcatctattccttgtatatctatcacatattacctatctcctattatctatctttttctattgtctgtctattatctaccttcattatctatcttcattagctctgttcattagttttaagcatgtctcctaaaataacatagcaccaggtcttttcatgttggttttgtaacacctaagactatcacatttttaatctcttaatacatttatatttgttttaattgttgatgttaggactcaggtactgacatcttattttgtaaatactatttttcatgcttttatttcttcatttttttcctgatttttttcttacattgaaagaagtttctaactttgttttaactgattgatagttgtacatgtacatttcttttaatatttacttataaattactaattaccacagtaatattttcctatgtatgca

SEQ ID NO: 77663 - DNA, 894 bp, Homo sapiens
tttaattttaagttctaagatacatgtgcaggacgtgcacgtttgttacataggtaaatgtgtgccatggtgttttgctgcacctatcagtccatcacctaggtattaagccccacatgcattaggtatttatcctgatgctctccctcctcctcctatcccctgacatgccccagtgtgtgaaaaatataactgatttttgaaataataattataacaaggtattgggaagttacatatcgtatggataagttttatgagtcacagtaatatcacaaggcataagagggggaattgtgtaccttaccttgacatgaatgaactggcatagtgttatttaaaagtagacttatttaaaatgtatagtgtgaactaaagcaacaactgaaaaaacttaaatgaagaattaatatactaagagaggagataaaatggaattataaaatacwcaaaatcagaagaggcaggggaaaaaaggcagaaaaaaataaaaacaaatacaaaagatagaaaacggtttcaaacatatagatattaaaataactccatcaataagcacattatattttaatagtcgagtttctttcacttttagagaagaaatgtgaggagcttcatgtacttacttcccggaatagcaacacaattggtgaaaattattataaacaagaaaacaatcatttgtctggaaattgtcacaaggacatccagcaaatgaaaaaacatttattcaacaaaacttactaaaactcagtaagaaaatatcaagtctgtggaatgtgagccataacacttcccttctccacccatctcattctgatgaaggctttactccacatgggagtggctgaaacaggatccctcttccttgagctgttaatcaaggaatatatt

SEQ ID NO: 77664 - DNA, 894 bp, Homo sapiens
tttaattttaagttctaagatacatgtgcaggacgtgcacgtttgttacataggtaaatgtgtgccatggtgttttgctgcacctatcagtccatcacctaggtattaagccccacatgcattaggtatttatcctgatgctctccctcctcctcctatcccctgacatgccccagtgtgtgaaaaatataactgatttttgaaataataattataacaaggtattgggaagttacatatcgtatggataagttttatgagtcacagtaatatcacaaggcataagagggggaattgtgtaccttaccttgacatgaatgaactggcatagtgttatttaaaagtagacttatttaaaatgtatagtgtgaactaaagcaacaactgaaaaaacttaaatgaagaattaatatactaagagaggagataaaatggaattataaaatactyaaaatcagaagaggcaggggaaaaaaggcagaaaaaaataaaaacaaatacaaaagatagaaaacggtttcaaacatatagatattaaaataactccatcaataagcacattatattttaatagtcgagtttctttcacttttagagaagaaatgtgaggagcttcatgtacttacttcccggaatagcaacacaattggtgaaaattattataaacaagaaaacaatcatttgtctggaaattgtcacaaggacatccagcaaatgaaaaaacatttattcaacaaaacttactaaaactcagtaagaaaatatcaagtctgtggaatgtgagccataacacttcccttctccacccatctcattctgatgaaggctttactccacatgggagtggctgaaacaggatccctcttccttgagctgttaatcaaggaatatatt

SEQ ID NO: 77665 - DNA, 576 bp, Homo sapiens
acccagtttgagcttcctggccactttgtttacctactcaagcctcattaatgrcggatgcccctccccctaccaggctgcagccttgcaggtcgatctcagactgctgtgctagcagtgagaaagactccatgggcatgggacctgccaaaccaggcacgggagagaacctcctggtcaactggttgctactaccatgggaaaagcacagtgtttgagcaggagtgtcccatttttccaggtacactctgtcatggcttcccttggctaggaaagggaaatcccctgacccctggtgaggcgacaccccaccctgtttcggctcaccctccatgggctgcacccacgtcaaccagtcccaatgacatgaaccaggtacctcagttggaaagggagaaatcacccatcttctgcatcaatcatgctgggagctgcagaccagagctgttcctatttggccatcttggaacggaatccaataattgcaattttaaaaattgtatccaaatgacttgtatttccactactaagcatagaattgaaattatatggatataactcaaattctctgtgaag

SEQ ID NO: 77666 - DNA, 1963 bp, Homo sapiens
actcttcccggcttttcaatttcctgtctctgtaaatacagttccttgtaattctacaatgcaagccttaatcattacacctggcacagctagaatccaatccccatcacggcgtatgagaaccactcttcctttccagggattcccaattcacatcagcctcataaacccgatactcatccggacccaaaaagtaacaattgtcttgcattgggacatctagtcactcaatttgcattctcaaatatcaattgctaactcatatctgggttttatgctccacaatttccccagggcaaacctccaggaacttatgaactgctctttcttactgaaagatacagtggctggaactgcacaaagcaagaagatacttctgtaaccaagcatgatcccagtgagcatttagatacacaggagatggaaagatgtgaaccctatttttcaatcatcagatggtgacatagcagtgcacagaaggtaggttgtggaagattcatcagctcagggtttcagatgcatgctgagaacaatgtggtcttgctgtctacacagaattggatgagattagaatccatttggaaggggcattctcttcactgtggaaggraagggtacacacttctaatagctcttgaattattttctgtttttccccatagaacatgagttcgagaccagcctggccaacatggcgaaatcctgtctctactaaaaatgcaaaaattagccgggcatgggggcgcatacctgtagtcccagctactcaggaggctgaggcaggaggattgcttgaacctaggaggcggcagttgcagtgagccaagattgcgacattgcactccagcctgggtgactctgtctccaaaaaaaaaaaaaaaaaaaaaacgagaaggggttgccttaactattttacaaaaatgtaaatataaagaggaaaaatgtggtttcgagcaccttcaatgagcactttgaccctggtgtcaaaatatcactagcaggagaaatggggaaatacagaaggtgaaaaactccaagggcagccctaatgcaagcttttatggagaaaatattagtgttattttttatcatgggaatgttataggaaaacatcctactgtatgtgaacatatatattgtcatagaaaactgataaccaagagataactacttttcaactttagttgtccaatggcagaccctcaggtcaaacaggtctcccaagcaggtaacaaaccaagggagaaatgagtgctttgcagagtacacaaggcttcagagctcaaggtggacacagatgcagcctaacagcagtgaaatcagcattaaaaaggagacaaatatagattttcttaaaacagcatgcactgaatttcaagggttttaaaattcatacttattttacaaactgtgttctgcaggttcaatggactgcattataataagtggatagattccttaaaaatgtatgcattaaatttattatccctccccgatagtagaaaattgaaagtgtaaattaaaatctttagtacgaattaaaattaatttactctttcctctgctcaatacctgcatactgattgcttattgtgtaacaagcctgggacaaattgtgtggccacctcatctaatcaataactgagtttggattattttaccttcctgtctctcccttcaatgtatctcccacatggtctgacaattcatacttttcatagtttggaccttcatgatttctcttctttattgccaccgttacttcctacctggatgttctgtatcaaatgctagaccgtgcctccccaagacatgcacatacacatgtacacacacatgtacccacccagaaacacacacttctttacacatgcacacactcattcacactgcattctccctatgaaaacaaatatgaagctgctaaacatctaaaatcagagcattgtctgagcattggatt

SEQ ID NO: 77667 - DNA, 743 bp, Homo sapiens
aatcagcaccagcaggctgagaaaatgaatgaaggtcagggtcctgggcctgttgatgtgggacggttcctgctttgccaagagccgataaacaatcagtcatgggacttgcaggtcagaggtgggtccctggactgttcttgcttctgcaagagagggatctatttttcagaggtaaataaaagcaactgcagtgttaatatttcaggtgttgtgattattgattatggtgtatcatattgcatcctacggaagagcaatccaaagccacccggcatacaagagaataagaagggtgttttcatgtttcttaacatttctaacctgtacatgtgcatgcacgcatgtgtatgtgttttgtgtgtgtgtgtgtgttgtgtgtatgtgtgtgtgtgtgtgtrtatgtaaggaaattctattttttccttttgctaaccaagttcttttgtccatgaaacaagatgtgcctagccacaaatgtagtcttgtccacaggattgagcttcgggccatctgttcatccccatggaatctatcaccaggagagaaatatctgatcaggtcagagtgaaacacggatgcagaaacagagaacgcagaggctgctccctttccaaccacacagaaatcatcatatttctcacatgaaagcattaaagccactcttgcttcaagaattatttttagttgtatagaaaaaaatgcaaacacatgtccagccattattatcaaagcttagctaa

SEQ ID NO: 77668 - DNA, 453 bp, Homo sapiens
cagtggttagtaaaagcacacctatcattacatggagctctttggaattcctcactgaaaaaagttaggcatcactgttaagggagtttgggaaccctgtgaaggattttttaaattaaaatttttattgagatgattatagatttacatggagtcctaagaaataatatggagagatcactggaaaactttgcagtttcctccatggtaacattttggacaagctrtagtatatcatggccaggatattgacattgacattgataaaatccaccaatcttgttcagatttcccagttttacttgtactcatctatgtgtataaagttctattccaacaccacaaagatccttcctattcttttataaccactcccgtctcctttcaaccccattcctcattcctaatctctctctgccttccatttctagaattttatcctttcaaaaatgt

SEQ ID NO: 77669 - DNA, 1534 bp, Homo sapiens
cccaaagtgccgagattacaggcgcgagccaccgcgcccggtccattttcattttcaatgcctgagaatgttctcttttttgaatgtatcataattcatttaaccaatttcttaccattggatgttttcattttttatttttaatttttgcttttataaataatcatgcagtggacatccttatacatataaatcagcccaattttctaactattgccttaggatgagtttctaagagtagaagtgctgggtcagaaaatgaaaacatgttaaataattttaacgcatatcaaatagctaaatctccattttagaatcaaccaaagtcacttagacctgctcttctcacggttatatttttctattatacctgtcagggtgcatatgttacatttatttgtgtgattatctgattaacgtctgtttctcccactagactgcaacccagtgagtgcagagatggcacctgtttctgctcaccgctgtatccttagcttttggctgacagcttgtcatccagtaggcagtcagtaaataactgctgatgagggaatgaatggatgtaaagcttaattcaatgaatagggtagaagatcatactagataatgtcatttggggataaaataaaatgtgactatcagtcacccccagtgccatgcagggtacctgcatgtagctccaaaagtgtttgcagttgactaattaatgcatgaatgaagtatatctcttttataaaatccaccttcttgtgtggcttaatgaatggaataattgtggatcctcccaaggtcacttctttggagaaaacacaggctgtctgcatttgggtgcagctccctggggcctggctaactcttagccaaactcctgtttccagcatggagtgccttggtccagtggccagcaggtggcaacaaatggttattaaagcggtggccgagcgctagaggctctctccggatgaggtgtctctcctgctgtcgccccagggcctgtgttttggaaactccagcaagccagcccagcaggcctttcgggtgaggaaggcaccccaggaactacaggtgctcctcagaagagtcaagaaagaggggtcaactctaagcccctgaaagagcccgactttgcatttctatttcacaagcttacagttctgagtaattgtactggagggctgtagaccaaaggcaattcatgtgcaaatctaggcttcttcaggcgtgagatttcrtccggtttacaccagatgacctgcctctgtcatgtctcactctgtctgcaatggtcagtttcttctgttttttttttcagccaggctcagtgctatgcaatcacgctgacagtctgtagtaatgattgggtttgttaccactggattacacaaaggcttctaactacatacaaagaggttgctgaccactcatcatgggttcccccgaccttggtgttgtttcttccaggggcagggatggatttgcccccgtcctgcttcacaatctccctttttctctgggtctaacggtagaggggaaa

SEQ ID NO: 77670 - DNA, 824 bp, Homo sapiens
agagatcgtggacagggaggagtggccaaaagggtggtgctccctgcttcccacccttccttcatctagaacagctgtgctttgatttttaaaatatacgtgtgcgtacattaaattataaatgtaatctttctcttaactttcctttcagaaggaggagaaaaatctgcgcctctttctctcaagggatactttgtctctggggtactttctgacccagtggacccctggcagaagtaagcgtggactgtggctrcaggaccacgcagagtcaacacgaaccgaagccaggccttggccacggcagctctggggtccaaccacttgatcaatgcaggaaatgctttgatggcagaattcttccatggccagcttctcatattctctgggacagacacaaaccaagaaaaatgagtgtggcgcagaatctgatgtgtccttccttaccccgtgctggtagcaaaaagtatgtcttgaacttttctttgttacacacagtctgggtaataacagactgaaggaaaactaaagaagcttgggaggctaagttcaatgacaaatgaagaactaaggcagagaaaaaagagaattgagaaagtgtctgggtgtctggagaggttgggggaatagagagggaggagatataattggccagataacttgagagtgggagaggagtgcaaacattatttttgaggcgctttgttggatatttaaaatgcactcctacctttggcattttctcaaaaggcaagaaagatttgttttcaattctatttttctgctggactgaaccagtgccaagactggaccatgtaggatcc

SEQ ID NO: 77671 - DNA, 777 bp, Homo sapiens
ttaaagtctttgatgggcttagagctagaaccaaccaaccagagaggagaaagaaaacggattcaaagacaggaaatacaatcggctaaaagcagcgtttaatagccgcgtcctggctagggaagggaaggcaccaatgcgaggcctgcgtggctgagtggcgtcaccttgcccttcccgtgtaatgggaccaaggaagaagcacagacctactgcccggggctcccgccctccacagcccctcccctccgggtttcccagcgcgggagctatggggcaagtgcactgcctcgccgctccacactcgcttgaacgcgtaagaaatcctcgtcagactcagctccgggctgggagggcttgcggaggcagcggmgcacaagctggccccagcccgggtggcagttcgcacccacgcacgtccagccggggtcaccacctggaagcgctgcatcccatcacctgcgtcgggtccttccagtgcccaccgattccactgcccagttacggggaggattgtacggggggtggggagggacacacagcacctcacgcacgccgagggcaccaggaccctctagcagcgacgcgcctcaagtcgctgcagaagctgcagaaggtacatctagccctgtctgcatgggctccttcggcggaagggaacatctcacactccaacccgagcaaatctagcgctcctgccaacaccgcccgccgcaacagcaacgaattcatccatcccagattcgccaccagggtccgacggttctgtccccgcgg

SEQ ID NO: 77672 - DNA, 542 bp, Homo sapiens
tcaatgtttacagcccaagtttaatacaaaagacaaagctttattcatcttatgttccgcttccaaagtcaggtgttaagttttctgccccatatccttggactgtccctttcttcacaactatattaaacttaagtaaaaaatacctcacayatgtaaaaacttaaatttctctcccataccttctcttaaaagagcaagagacaatctattttctactgaaaaactcctatgtggctatcaataaccaccaatgccaagcctcctcaaatttacgtaaagacaaaaactaggtgaagatcctatgattaaatgaaagccaacactgtggctacaaagtgttagaactttctctatggtgtaaaaattagaatacttacagaaagtgctactgttgctaagttgttccttcaactgggaagcttaagctttgtgggttcagaacaaacccagttgaaattaaggggctaaacagtggttaagaattccttcaggatctagtttaattcatatattgcaatacaatgtaaattaaaatgatt

SEQ ID NO: 77673 - DNA, 1949 bp, Homo sapiens
tgcattttaaatcaacaatagaacactatagaatactaaaaacataaaagagcacagtggcttgttcctataatcccagctactcagaaggctgaggcagaagtatcacttgagaagccaaggagtttgagaccagcctgggtaacatagcaagactctatccttataaacataataataataatcaacaaggcctggtgtggtgggtcatgcctgtaatcctagcagcttgggaggcctaggcaggggaatcacttgaggtcaaaagtttgagaccagcctggacaacatggtgaaactccaaatccactaaaaatacaaaaattagccaggtgtggtggtgcacgcctgtaatcccagctactcgggaggctaaggcaggagaatcacttgaacccaggagatggaaactgcagtgagccaagatcgcaccactgcactccagcctgtgctgcagactagtaagactgtgtttcacaaagaaaaaaaaaaaacaaatgaagaatcagtaaatactacaataggcagccttcaaataacttaccatcttttatagatcgtggagaaataatctttctctttgggatgtatagttttgaaataatctagacagaaaaacacaataggtttaagaataacatggagcaagttaaaataaggataatacccaccattactacatgatctaacaggaaaagtatggacgttgaaatcactcatatgtagattcaaacctcaagtctgccatttactaatctacagattcacatggggtgatggttatgattggtgatacagatatcttcaaaatgttactcctttcaacccatgttgattattatacaaatactatgatatccattagtttcttttattaaccacaacaaactaggacaaaaatgtactcatatgtaatttagagtattgctgaataaaactaataataaaaaaagtaaattaatcacattatttttcaaaataggtatgcatgatgtatgtttgtgcgaattactttctgtgggaaaaaatgtgagaatgtagtttttagtagtactatctttaaatgggttggcatcagaaacagcacaagttgcttctattcagcgtgtcaaaagctaaaaacaaattatagtacaacttcagctccttccaaaaaagacagaaaaaagcaatcatccaccttatggagcaatgattcacgaatgaaggccacacatagctactaaatagaaagctgtaactaagtatcctgacaatagaaacagaagtgaaatgaaagaatagacactaaagacatgtggtctgcaaggagaaagttagactgaggtaaatcatttttaaacaaagggaaaggagggagcaacaaacaaaaaaagagacatgaccagtcaatcaaatatgmgcttaaaagaaaagcttgtgttcataatatatgcctaataatactggttagcatttactcgacaatttgttttgtgtaaatacttatgtaataaagagtttcatttgtttactataaaataacacatcccaagagttaaccatgatgattgatctgaaaactgacacattcttactacagagagagagagggggaaagaaaaaaaaaaaaacaataaaattccagcaacttaacacctggagaaagaatttttattcagaatttgaaagagtaatgtatgtcccaaaaaaaaggtatttaatagaacatgattggggctttaaaaatttaagaaaatttaatctaaaatcctaatctaagcttccagttggaagatattaggctgtatccacctctcctatttccttttcatcttttctaaattttattttcttctatatgacatattttctcaacataactcacctcaacttatacattctcaacattagaaaaaaagataaattcaaaacattcaagacatttaatagatttaattattagatat

SEQ ID NO: 77674 - DNA, 1949 bp, Homo sapiens
tgcattttaaatcaacaatagaacactatagaatactaaaaacataaaagagcacagtggcttgttcctataatcccagctactcagaaggctgaggcagaagtatcacttgagaagccaaggagtttgagaccagcctgggtaacatagcaagactctatccttataaacataataataataatcaacaaggcctggtgtggtgggtcatgcctgtaatcctagcagcttgggaggcctaggcaggggaatcacttgaggtcaaaagtttgagaccagcctggacaacatggtgaaactccaaatccactaaaaatacaaaaattagccaggtgtggtggtgcacgcctgtaatcccagctactcgggaggctaaggcaggagaatcacttgaacccaggagatggaaactgcagtgagccaagatcgcaccactgcactccagcctgtgctgcagactagtaagactgtgtttcacaaagaaaaaaaaaaaacaaatgaagaatcagtaaatactacaataggcagccttcaaataacttaccatcttttatagatcgtggagaaataatctttctctttgggatgtatagttttgaaataatctagacagaaaaacacaataggtttaagaataacatggagcaagttaaaataaggataatacccaccattactacatgatctaacaggaaaagtatggacgttgaaatcactcatatgtagattcaaacctcaagtctgccatttactaatctacagattcacatggggtgatggttatgattggtgatacagatatcttcaaaatgttactcctttcaacccatgttgattattatacaaatactatgatatccattagtttcttttattaaccacaacaaactaggacaaaaatgtactcatatgtaatttagagtattgctgaataaaactaataataaaaaaagtaaattaatcacattatttttcaaaataggtatgcatgatgtatgtttgtgcgaattactttctgtgggaaaaaatgtgagaatgtagtttttagtagtactatctttaaatgggttggcatcagaaacagcacaagttgcttctattcagcgtgtcaaaagctaaaaacaaattatagtacaacttcagctccttccaaaaaagacagaaaaaagcaatcatccaccttatggagcaatgattcacgaatgaaggccacacatagctactaaatagaaagctgtaactaagtatcctgacaatagaaacagaagtgaaatgaaagaatagacactaaagacatgtggtctgcaaggagaaagttagactgaggtaaatcatttttaaacaaagggaaaggagggagcaacaaacaaaaaaagagacatgaccagtcaatcaaatatgcgcttaaaagaaaagcttgtgttcataatatatgcctaataatactggttagcatttactcgacaatttgttttgtgtaaatacttatgtaataaagagtttcatttgtttactataaaataacacatcccaagagttaaccatgatgattgatctgaaaactgacacattcttactacagagagagagagrgggaaagaaaaaaaaaaaaacaataaaattccagcaacttaacacctggagaaagaatttttattcagaatttgaaagagtaatgtatgtcccaaaaaaaaggtatttaatagaacatgattggggctttaaaaatttaagaaaatttaatctaaaatcctaatctaagcttccagttggaagatattaggctgtatccacctctcctatttccttttcatcttttctaaattttattttcttctatatgacatattttctcaacataactcacctcaacttatacattctcaacattagaaaaaaagataaattcaaaacattcaagacatttaatagatttaattattagatat

SEQ ID NO: 77675 - DNA, 866 bp, Homo sapiens
tgaagacataaagggctctggggaacagcatagttttgctttaatcctccagcttgttttcagtaagggtggaaggagaaagagaggaagtatcgattttacagacgtcacatcgtactgctaaaaacagacagaaaacttcttgtaataacccgtacacactgtaggagaagtaaggagacccttgttgtagcaatcattttgccaaagaagacggattgtgaggcaggaaggggtgaaaagaggaagtcatttgtataattttggggtttctgctgaggaaacctgagtgaactcacttcagatgcatttggaatattttaataaaaaatacttgattttggctgctgcaggaactgctggaagaaggaagsaatcctagaactggcatagaaacacactgactcattactcccctttgtaactattaggcatcagagatacatgttttgttgattttagttatataattgagacaaacttgaatctgaatacattggtttccttgttcaaggagctacctcttggataccatagctatttcatgaaacttctttagagaacaacatgatactcccaagaaggctattttagaaacaaaaattatgctggattctaattaactcctaaaatgctcattttcaatgggtattgcagtgatttctgaatgaaaaactgatcaatatctaatgcttgtagcagtttcactttgtatgtgtatgtcaaatttgataattgatgatatttttattgaggctaatatattatcccttcgtgccacgactggatgaagaaacttttggaaggctaaactagtggatacaagaaacttaggcagattattacaccatatgggggtgagagat

SEQ ID NO: 77676 - DNA, 851 bp, Homo sapiens
tgcaaccagaccagctttgcacaagttcactttcttccaagctcccagccctcgagccacaggaaagccgccgccaccacagccagacacagctttaattggggtctgagcttcgctcgtgctgcgtggctccaagaaaatctattctttaaagtctgggggagaaactgcaaacttgcccagtccttcaagagaaaataaatgccagatatctggacccttaggaagctactgactcccagacagtgaattgtggtcattggattctgggggtctgaggatgactacactctccccaggagtcatcctccctccctctagacaggagacracaaggcagagtctcactcacagtgcataacaggtagaagagacctgggaggcccggtctcttccccactgtggcaggattggagaagcacccagtctcctgatcttcccaagggctctttccaagcacaacatcacctagatcagaggaccccaacctctggaccgaggacgggtccatggcctgttaggaactggaccacacagcaggaggtgagctttactgcctgagctcagcctcctgttagatccatggtggcattagattctcataggagcaccgaccctaccgtgaccttcataccagagggatgtaggttgcatgctccttatgagaatctaatgcctgatgatctgaggtggaacggtttcatccccaaaccatccccccacctcccacaccctctgtggaaaaatggtcttccatggcactgatccctggagccaaaaaggctggggactgctgacctagagggctctttaaacacagagtctgtctgagagttaaatgagataatgca

SEQ ID NO: 77677 - DNA, 1572 bp, Homo sapiens
taaagacattaaatatgaaattattgttaaataagtgataattaaaggcaagggaatgggatagcattcaatgatttgcaacaggtcaatgctcatatagaggacaactagaaagactgggttaaaggataaaagtcaaaaagaggcaaaggactaaagggatcaaaattccggagagagcagaagctttcagaggtgaactgggcatctaaaactgcccctgaggtacttgccaaattcttgatgcacgctagatgctggcaatctgcactaggcccaggttgggggtcacaactggaagacaagcaaacgggcagttttcagtgatcacatggggctaagaatgacaaaataatttttcttcttgagaaatttgctgaaatctgaagcagtgaagggcttcagtataaacagaaaagaatcatgatgtatctgtatctttccatcaagaggctcatttagaaaactagttcttcaacattttcccttctgtcttcrttattttaacatatttatgtctccttaattgtggtagtcactgtggattcaaataagagagtggaggagcactttaaggaaaaaagtggaataaaagaggaacacaaatgaccaggtctctactcctctgatgcatgttagatgtaacaaggtagacagaaaaaaaaatgtagttttactaataaatattgaattgtactattaaaatatactccaaacaaaatagaaaaacacaatgagaaaattacatgatagtctaacttattctggggattcggggagggtattcctgaagaaattacatttgaaccaaaccctgaaggatggaagataagtatttcacacagtgggaacaacagatgcaaaaagtctggagggagaagtagctttgtaagcatgtcatattacagaatgtaatgagcatggagggtgatgggggcaaaagttgagaagtggcatgaaataacactgattagatcaggctgaccattttaaattttctttgcaattctagatttaattcttagaacaatgggaagccattgaaggatcctaatgtgaggcattagaataatcagaatttcatcttaaaatatcactttcgttcttatatggagaatgcacagaagggataagggtggttattgggagataaattgtttcatttatttcatgaagctatacgcttgaaattgggcagtggtattagagataaaaaaagagatatgaaaaaaattttttaatgacagtattggatctactgattaggtgtggtgaatgagaaaaaaaggtcattttgaaaatgcctttttccaagatttgggcttgagaagtgcgtaaacaaatgttccatgtttttttattttgaaacggggagctctaggggaagaataaattttgtgcaagacagcaacttatatttagaaccgatgtcttataagaaagatatggattaaaaatataaatttagaggccatataaaaagagtgaaagcttccttttacatgttgggagagtattgacaagttttttttttgttgtttatttcatgaaattcttaactattctattata

SEQ ID NO: 77678 - DNA, 1572 bp, Homo sapiens
taaagacattaaatatgaaattattgttaaataagtgataattaaaggcaagggaatgggatagcattcaatgatttgcaacaggtcaatgctcatatagaggacaactagaaagactgggttaaaggataaaagtcaaaaagaggcaaaggactaaagggatcaaaattccggagagagcagaagctttcagaggtgaactgggcatctaaaactgcccctgaggtacttgccaaattcttgatgcacgctagatgctggcaatctgcactaggcccaggttgggggtcacaactggaagacaagcaaacgggcagttttcagtgatcacatggggctaagaatgacaaaataatttttcttcttgagaaatttgctgaaatctgaagcagtgaagggcttcagtataaacagaaaagaatcatgatgtatctgtatctttccatcaagaggctcatttagaaaactagttcttcaacattttcccttctgtcttcgttattttaacatatttatgtctccttaattgtggtagtcactgtggattcaaataagagagtggaggagcactttaaggaaaaaagtggaataaaagaggaacacaaatgaccaggtctctactcctctgatgcatgttagatgtaacaaggtagacagaaaaaaaaatgtagttttactaataaatattgaattgtactattaaaatatactccaaacaaaatagaaaaacacaatgagaaaattacatgatagtctaacytattctggggattcggggagggtattcctgaagaaattacatttgaaccaaaccctgaaggatggaagataagtatttcacacagtgggaacaacagatgcaaaaagtctggagggagaagtagctttgtaagcatgtcatattacagaatgtaatgagcatggagggtgatgggggcaaaagttgagaagtggcatgaaataacactgattagatcaggctgaccattttaaattttctttgcaattctagatttaattcttagaacaatgggaagccattgaaggatcctaatgtgaggcattagaataatcagaatttcatcttaaaatatcactttcgttcttatatggagaatgcacagaagggataagggtggttattgggagataaattgtttcatttatttcatgaagctatacgcttgaaattgggcagtggtattagagataaaaaaagagatatgaaaaaaattttttaatgacagtattggatctactgattaggtgtggtgaatgagaaaaaaaggtcattttgaaaatgcctttttccaagatttgggcttgagaagtgcgtaaacaaatgttccatgtttttttattttgaaacggggagctctaggggaagaataaattttgtgcaagacagcaacttatatttagaaccgatgtcttataagaaagatatggattaaaaatataaatttagaggccatataaaaagagtgaaagcttccttttacatgttgggagagtattgacaagttttttttttgttgtttatttcatgaaattcttaactattctattata

SEQ ID NO: 77679 - DNA, 669 bp, Homo sapiens
ttcctcctcacttaaagggtaaacaccatcagttgggagctttcccaggaggcaggaagactgtgaagctgctcctggcccagacaccatcagggcaggtcggaggctgagtcgtgcccacagagtcctggcatttcctcctctctacctttcactccctgcccacccctgctctccagaaagaagttcagcaattctttgaaatcaaaatgcatgaatgaaacacaaggggtgaaacccgtggactctgtctgaggctgggaaaatcacagccaaggtgttaagtaaccactcttcaaacgaggaggaaatsgaatctggctggagcagcagctcctggctttccttctcgaggctcattagctcccacaggaagtggggggccctgccctagctcccgttacaggcggcaggcagcccacgatcttgacgccctgtggttctccaagacctaagctcggtggaaagtttcaccttgaggaaggaaagtttccattcttccttccagccccctgagggagtgtacagcagacatccgggaatgtcccccggggacagctgtctgctggcccagagccagccaggctgctgggctgctcctcatcgggtcctcataccctccctagggaggtgtgttaatacattgggaagaaggctctcagagacccc

SEQ ID NO: 77680 - DNA, 996 bp, Homo sapiens
agctccattttttttttttaactgacatgattccaagaaattctgaagaaaaagaaagttaaattttacaatacaaaaccatggtaagatgggctggagactctggtatttcatccttttgcatcttgccaattcactcgctactgcacatagacatataaatcatccarttccttcatttccccttctagttcatcagcaggctgcatcttcatttgaaaaacactttgtagttcttaaaggataattctgcaagtgcaggatgatgtttcattccaacaacaacaataacaaaattgaattttggatagcctttagcattccacaaaacagcctctaaagagcccctggaattatggtatctaagtctaaagaggaaacagaagaaattcaaatcaagaattcagaagtgaaacatgtttgctaggctttttctctcctgacttagaatgttgtttccaaaaggtttagtattttgcagtcatgtgatatgtagtcattcaaaaaacaaagtactggaagactgggtggattcaaacaagaataacataaatatcctcatgaaaccaacagtctggtatacgtgaaaacggaggaaattttttgagttcttagtatatagctgtggctttgccctatgtttgcacatatcttattcaatctttacaacaatcctgtaatatagcttatgttaccttctttttaataggttttcatctggttcatcaaatttgctactgatgcatatgtaagacaacctcattaccactgacctggtcaaagccaccatcacctctggtcttgtccattcaaatagtttcctaattggtctccacatttatttttgcccctttccaacctgttctgcactaaaaagccagggtaagcctttggagaccctactacttccctgcatgaaatgcttcattggtttctctcttcatttagaccaaatttctaactcgtcaatggcttacagcgtagcactgcataaca

SEQ ID NO: 77681 - DNA, 1230 bp, Homo sapiens
ccagtgattggtggctttgtgatattaaactacgtcggttcttctcctttggttctgcttatccttctcagtgtgtcctgggaggctgatctctgtgggttatattcccaggttcctttgatcctctttctcctgttgtcccatcgcgttcagccaataaaaagcatttacaggtcataggattggaggaagacatgtcaaagcatttattcccacccctgctgcttctctggtcagtttttattgggtggctttcttctgtggctacagagatcactggtaatatactttcgtccctctgccccttcaggactgttttactcatggttctccagaaagacagaagtggtaggagaaatacatatatttatatatatatagatataaatataaatatttatatagatataaatataaatatttatatagatataaatataaatatttatatagatataaatataaatatttatatagatataaatataaatatttatatagatataaatataaatatataaatataaatatttatatagatataaatataaatatataaatataaatatttatatagatataaatataaatatataaatataaatatttatatagatataaatataaatatataaatataaatatttatatagatataaatataaatatataaatataaatatttatatagatataaatataaatatataaatataaatatttatatagatataaatataaatatataaatataaatatttatatagatataaatataaatatttatawagatataaatataaatatttatatagatataaatataaatatataaatataaatatttatatagatataaatataaatatataaatatatacatatttatatagatataaatatatacatatttatatatatatatagtctctgtgtcaacaatgaaaatggatagcatattcctcattgggttcttctaagagttagcagaaacatgtaagcacaatatcagaaatatagaggtttaattaacatgggctatgatgatatttgttactgagactctggaggtttttctagtgcttgcagaatttaaagagaccttcaaattagtgcactttaaaaacatttttcttttaatactcaattccttcattgtagttgaaagtgattaacacaaatttgtgtttgaaagtgattaaaacaatcacaatagacacttttgggatc

SEQ ID NO: 77682 - DNA, 1230 bp, Homo sapiens
ccagtgattggtggctttgtgatattaaactacgtcggttcttctcctttggttctgcttatccttctcagtgtgtcctgggaggctgatctctgtgggttatattcccaggttcctttgatcctctttctcctgttgtcccatcgcgttcagccaataaaaagcatttacaggtcataggattggaggaagacatgtcaaagcatttattcccacccctgctgcttctctggtcagtttttattgggtggctttcttctgtggctacagagatcactggtaatatactttcgtccctctgccccttcaggactgttttactcatggttctccagaaagacagaagtggtaggagaaatacatatatttatatatatatagatataaatataaatatttatatagatataaatataaatatttatatagatataaatataaatatttatatagatataaatataaatatttatatagatataaatataaatatttatatagatataaatataaatatataaatataaatatttatatagatataaatataaatatataaatataaatatttatatagatataaatataaatatataaatataaatatttatatagatataaatataaatatataaatataaatatttatatagatataaatataaatatataaatataaatatttatatagatataaatataaatatataaatataaatatttatatagatataaatataaatatataaatataaatatttatatagatataaatataaatatttatatakatataaatataaatatttatatagatataaatataaatatataaatataaatatttatatagatataaatataaatatataaatatatacatatttatatagatataaatatatacatatttatatatatatatagtctctgtgtcaacaatgaaaatggatagcatattcctcattgggttcttctaagagttagcagaaacatgtaagcacaatatcagaaatatagaggtttaattaacatgggctatgatgatatttgttactgagactctggaggtttttctagtgcttgcagaatttaaagagaccttcaaattagtgcactttaaaaacatttttcttttaatactcaattccttcattgtagttgaaagtgattaacacaaatttgtgtttgaaagtgattaaaacaatcacaatagacacttttgggatc

SEQ ID NO: 77683 - DNA, 1230 bp, Homo sapiens
ccagtgattggtggctttgtgatattaaactacgtcggttcttctcctttggttctgcttatccttctcagtgtgtcctgggaggctgatctctgtgggttatattcccaggttcctttgatcctctttctcctgttgtcccatcgcgttcagccaataaaaagcatttacaggtcataggattggaggaagacatgtcaaagcatttattcccacccctgctgcttctctggtcagtttttattgggtggctttcttctgtggctacagagatcactggtaatatactttcgtccctctgccccttcaggactgttttactcatggttctccagaaagacagaagtggtaggagaaatacatatatttatatatatatagatataaatataaatatttatatagatataaatataaatatttatatagatataaatataaatatttatatagatataaatataaatatttatatagatataaatataaatatttatatagatataaatataaatatataaatataaatatttatatagatataaatataaatatataaatataaatatttatatagatataaatataaatatataaatataaatatttatatagatataaatataaatatataaatataaatatttatatagatataaatataaatatataaatataaatatttatatagatataaatataaatatataaatataaatatttatatagatataaatataaatatataaatataaatatttatatagatataaatataaatatttatatagatataaatataaatatttatatagatataaatataaatatataaatataaatatttatatagatataaatataaatatataaatatatacatatttatawagatataaatatatacatatttatatatatatatagtctctgtgtcaacaatgaaaatggatagcatattcctcattgggttcttctaagagttagcagaaacatgtaagcacaatatcagaaatatagaggtttaattaacatgggctatgatgatatttgttactgagactctggaggtttttctagtgcttgcagaatttaaagagaccttcaaattagtgcactttaaaaacatttttcttttaatactcaattccttcattgtagttgaaagtgattaacacaaatttgtgtttgaaagtgattaaaacaatcacaatagacacttttgggatc

SEQ ID NO: 77684 - DNA, 1230 bp, Homo sapiens
ccagtgattggtggctttgtgatattaaactacgtcggttcttctcctttggttctgcttatccttctcagtgtgtcctgggaggctgatctctgtgggttatattcccaggttcctttgatcctctttctcctgttgtcccatcgcgttcagccaataaaaagcatttacaggtcataggattggaggaagacatgtcaaagcatttattcccacccctgctgcttctctggtcagtttttattgggtggctttcttctgtggctacagagatcactggtaatatactttcgtccctctgccccttcaggactgttttactcatggttctccagaaagacagaagtggtaggagaaatacatatatttatatatatatagatataaatataaatatttatatagatataaatataaatatttatatagatataaatataaatatttatatagatataaatataaatatttatatagatataaatataaatatttatatagatataaatataaatatataaatataaatatttatatagatataaatataaatatataaatataaatatttatatagatataaatataaatatataaatataaatatttatatagatataaatataaatatataaatataaatatttatatagatataaatataaatatataaatataaatatttatatagatataaatataaatatataaatataaatatttatatagatataaatataaatatataaatataaatatttatatagatataaatataaatatttatatagatataaatataaatatttatatagatataaatataaatatataaatataaatatttatatagatataaatataaatatataaatatatacatatttatatakatataaatatatacatatttatatatatatatagtctctgtgtcaacaatgaaaatggatagcatattcctcattgggttcttctaagagttagcagaaacatgtaagcacaatatcagaaatatagaggtttaattaacatgggctatgatgatatttgttactgagactctggaggtttttctagtgcttgcagaatttaaagagaccttcaaattagtgcactttaaaaacatttttcttttaatactcaattccttcattgtagttgaaagtgattaacacaaatttgtgtttgaaagtgattaaaacaatcacaatagacacttttgggatc

SEQ ID NO: 77685 - DNA, 807 bp, Homo sapiens
atgtttatagttgcatagtagtccatggaatagaagatgtatgtaacagattcttcctggaagatatttcctattggctctttgattctgctctttgtctctgttctccacccctccttctcttcctttctttcttttccttcaacagatatcaattgattggcttcccagtatcaagcttatgcacagatgtactagaaacccttgaagaagggtgggtaaagggacaggccccagaaccagatggatcatctgcatcacagctcccacacttatgtcttgggacaaaaggcctatgcttctctttcccactactgacacacgatttcagactaattaacttggttttcttcagcatttttctccaaaatgtaacctttagattaactcctcaatcccccacacaactacttcctagagggccctattaccttttttttttttttttccaaatcttctcatttaggcatcctcctcattcatattccttctctcactctccatagatgtgtgataacattttttattttctatgaggaaatccatgtattctatcagaaagatttyagaaaaaaggaatttataactaattgatctctacatctgctcttttgaatgatgtgtttccaacttttgaattttgcacattactttcatccaaaatatgtggtttatcatcatctagggcaaatcatatgcctcccttttaactccaccctctcccaagttaatagcccttttgcttcatctaacatattttgacgtagtagcggggcaggcacaggtacatacacagcacagcatgtt

SEQ ID NO: 77686 - DNA, 1047 bp, Homo sapiens
catatgaatcaactgaggagtttgttaaaatataggttctgatttcatagttttctgatgaagcctgagtttctcatttctaacaagctcccagatgatgctgatattgctggaccacagaccgcacactgagtagctagcatctagagcagtgagtcctatatgtgacagcccatcagagtcacctgagggaggtttcacaccaaaagagaagcctgtgtctaaacctagttctgaattaggttcactcaagtgggcctctgacatgtgtggttaataagctccatcagtgaggatgagtcccagccagggtggtgaaccactgacttagacaaattattttctctgctgagagtgcacataggtataggtgcatgttggagacatatgtgcatgaagatttggggtagaagtgttttgtaagatcaagagagaaaaggaaggggttttcattctgagcaggtgcccctcctcccttcaaagsttcttttctataaagtgaagcagcgctgaattttgaggcaaaatagtttgacatatagctacagacacatcatttagagtcaaacctggagaccttacaatgtccagtagggttccacatgacctggattcccattgcctctctgcaatctatccccttcctaaccctactgcagacatactggcctctttgctgtttctgatcatctccaagcaaactacctcaagattctgcactagatgttgcctctgcctggaatatgcttattccaaatatcctatggctagatctcttacctccttaaaatctttgctcaaatattatctctcccctaaaacttcctgatccctatttaaatggcagctttccaccagctcttaggatcccaaatatctgttatcacctttaaatggcacatatcacactctcttatattagttatttattatgtttactgatcatatttttggttttcactcctccatcatcattggaaggtagtgatggtagggatatttgtctattcacaattattggcaaatttcttagaaaccctcatctcc

SEQ ID NO: 77687 - DNA, 1901 bp, Homo sapiens
  misc_feature (1)...(1901): n = A,T,C or G
aacatgcactgtacaaagcaaagtgttataaaaatgtcaggtggtggattcacacagctgtgtgttcatgctttgagtcctgtactccgcttggtaattctactgtgcatcccagcagagttttcgctcatttcctacaatgatgattgtaaaccttcaccattctctgaagcctttgactctaccagttctcttattcctgacagatgacttccttaccaatgaaacagaaacagacagtaacttcttcatcctcctgctccaatttcataagccagcatgccttacttccaccctttcttccttctccctagtttcagtggaatagaaacctctcctcccgggagtaataggtacgtgtgaatactaaatctcatctcttcctgtcttcagaggaaatttgcttcatctattatatcttcaaactcagttttcaatttcgttctctctgtttgctccttcccatcagcatttaattatgcttaatctctcccttaactctacatcccttctagtttttgtattattgccgtttcccctttatagctgaatctcttaatgtaatgattttttctcacagtcttcacttcttcatctcagactttctccttaacccacttcaatctagacttgtcatcacatatcccctccgtactactctcaccaaggtcactgataacttctctattgttaaatcagacaactttccatctgtattttgcttggcttctaggcagcaattaattctatcgacctctcccttcttccaacacttatttaccttgtcttcatgatactacactgtattgatcagggttttgaattgcaaacaacagaatccactctgacgttttaagcagaaaaggaatatgttgaaggacgttaggtagctcacaatgcatgtgggaggactggaagacaggttaagatgatattcagccaagaaaatacctattacatcttggtacaaatcccactacctctaccttttggtatcaacaccacaactcacataaatgttgtgaacgttcactgatgccatccaagactggactccagaagtgaatgccatggcgaccatgctaaatgctgatatgccttctctattatgcttgctaaattttgcaacctgcaaggttataaagttatcttctggattgaatttttgcatgagtgctcccatttggtagtaccaggtcactagtttctaaggacactgaaaatttgagtttcctttcttgaagaaacaaagatttttccaaatataggtgtgttcaaaaggtgatgactgcctaccgttttgacatttgtctctccaacactcctctagttttgctgctacctctctgagcaatttttctccacctgctttctttacttgtcacttaaatgtccaagtcccccaggtmtccattttaattgttttctgctcattctacatcctctacctgtgtgatactgtctaacaccatggctttaattacattctttgtgcctatgactctcaaatcttgatctctagcccagtgctgtttcctgagtaagctctagacccacatatctcactgcctctgggacatttttatctggatgtgtcataagcatctcaaattcaacctgtttaaaactatgcttctctgtagctcaattgcagtcctccagttccctacactatggacccacccagttgtttagttaaaaaagaaggatattatctttgagagcatccctccctaatcttcagacatccagtcagtgccagagtgcaagcaatattagatcccatgtattttttttaatctgcctcactcctttcatgttctgcagtcatagttacaagaactgaaactagtatcaagtgagcttcctcctagcttccagttntactcttctctaattta

SEQ ID NO: 77688 - DNA, 532 bp, Homo sapiens
cccatctcttgcagtttgggggttattttcagataaaaaaggaactagttgtagttatctttctctcacaagattcttgtgaataaacaacataataaaatgctttcatgtaaccagaaaatgctctacaaacacaatgattagattgttataatagacctatggtatgttcccaggaacacaagcttttagaagtgtattcactgacaaattatgctgttgatccataaattcccatcctaatgattgcgtggggcactgaaatttgccgatgtagcttcaactatgcacagaaggaagggctagaggcaatacataatatgagaaggagaagcagaaaatgatggccacagctatagaacagaaacatcttcagccacaggggatgaatgacaggtgaatatagctgcttagagaataattaattttattgacatgttcaaaatacattaaatatcctgaaagggcaaggcaaacaaaatcattmattttctagagaattagggacgcttctttggggcatgggatttct

SEQ ID NO: 77689 - DNA, 710 bp, Homo sapiens
  misc_feature (1)...(710): n = A,T,C or G
ccccttagtcatctctactagtctccacacctctgtaaaacaatctggaacatttccaaaactgggaccttgttgtttaagggaattatttcagcacttgtcagttactctctaggaaatcagggtatttctacgattttgttttctaccgaatgacattcactccttcttttaaaatgtacattcatttgccccatgcctttatgctatcatctctctgcctaacagaacaggtgcattccctccattctgttttctcagngtattagtccattctcacactgctacaaagatactatgagactgrgtgattcatgaagaaaagaggtttgattgactcacagttccgcatggctgggaaagtctcaggaaacttacaatcacagtggaaagcaaatgggaagcaaggtatgtcttacatagtggcaggagagagagaggaagtgaggaagttccacactttaaaaccatcagctcttgtgagaactcactcactatcatgagaacagtatgtgaaaactacccctatgatccaatcacctcccactaggtccctccctcaacacgtggggactacaattccagatgggatttgggtagggacacagaaccaaaccttatcactcagtaactgagtagccaacttagataccaatttagggctgctgggattttgacaggcactgcttagaggagaccactataaagta

SEQ ID NO: 77690 - DNA, 710 bp, Homo sapiens
  misc_feature (1)...(710): n = A,T,C or G
ccccttagtcatctctactagtctccacacctctgtaaaacaatctggaacatttccaaaactgggaccttgttgtttaagggaattatttcagcacttgtcagttactctctaggaaatcagggtatttctacgattttgttttctaccgaatgacattcactccttcttttaaaatgtacattcatttgccccatgcctttatgctatcatctctctgcctaacagaacaggtgcattccctccattctgttttctcagngtattagtccattctcacactgctacaaagatactatgagactgggtgattcatgaagaaaagaggtttgattgactcacagttccgcatggctgggaaagtctcaggaaacttacaatcacagtggaaagcaaatgggaagcaaggtatgtcttayatagtggcaggagagagagaggaagtgaggaagttccacactttaaaaccatcagctcttgtgagaactcactcactatcatgagaacagtatgtgaaaactacccctatgatccaatcacctcccactaggtccctccctcaacacgtggggactacaattccagatgggatttgggtagggacacagaaccaaaccttatcactcagtaactgagtagccaacttagataccaatttagggctgctgggattttgacaggcactgcttagaggagaccactataaagta

SEQ ID NO: 77691 - DNA, 841 bp, Homo sapiens
ctctcggggtaatttttctctatcctctctcctacycacccttccacccccaccacaaccagaatcaagtctttctaaaagaactcaaagaattccccacaatgaacttggctttcagaccctctcttctgtttttctttccatacctaaccagtcctgttcagaaaagtgatctgattattctaatcagagaccttttagaaaagaaaattctaaagacactttgggcatttgatctgcatatgtacattgtatgaaagcaatttataagtacctttttaaaactttgcttacctgtgagagattcaaagggaaaaagttacaaagagtaataaagcagatgtcttatttggctattttgaattacacattttaaatattttgtcctgggacctggcatggtacctcacgcctataatcccagcactttgggaggctgagttgggaggattgcttgaatgcaggagtgtaagactgcagtgagctatgactgcaccactgtactccagcctgggtaataaagcgagaccctgtctctataaatcaatcaatcaatcaataaatatgttgtctcattggctcttaatcttttatttatttaagaaataacacactacatatatagatcagtgttctttaaaccctatctccaggattattccctccccactttccacacccttctctacttgtgtgtttgaagtgttgtctgttttcttccagtctattctgcaagagaattacattaatctccatgtagttttacatatatctaaatatagatatgtgtaccgatacttatgtacacatatatactatgtctgcattttaatgctatgca

SEQ ID NO: 77692 - DNA, 710 bp, Homo sapiens
  misc_feature (1)...(710): n = A,T,C or G
cctccgtgatgtggccaagatggtagcaacaccaccaaccaagggtgcaaacagtgattgatgctgccatggcccaaaggagtgctagggacctaggaagggtgggctcagttcccttctccagggtcccagtccaatagactnctagactcctgaggcatggagctaccacagcccttggggtggccgtgttgtcccagggccatgtctgtgctgctcccccatgcaaccttggacccaccctggcaggtggggtggaggctcataaaagtatgatgaataaatgaatgaatgaacacttgagtccataagctagttcaggagccagtggagctcttcctgtatttcaggcccaatgtatttcaaagtccctccccgcacyacatatggcctgaggattctctggaagaatccccctgctatccccacacacaagacactttcctcttagtagtcttttgattcagccaaataaacactcgccaggcctatgacagttctagttggaaggaagaaaatgctccactattttcattaattcctcctctcccatgttgtccaggtagaatttcgcaggaaaaccgcaagggcacttttaagaaaaccacagagagagctgttggctggagaagcttggccaagctggtggggaagggatggtgcgtgctccccatgaagtgctcacccaagagtccacctgtcttgagggt

SEQ ID NO: 77693 - DNA, 878 bp, Homo sapiens
acatgtagattttataaatatataattgtccatttatactacaagtgcaattaaaagagaattttatgttttgaattttcgttttgatttaaaaatcaccacaagccttaggaccaaaaataacagtaacctactctaactgctgcctgtggggtgggggaggagaactatatgcaactgaatttatagacacaaatcctaagactgtgttaaatctattcaaagcatttttatgatgatatatcttacggcawatcttagttattcactgggctttctcttcaggatataactgcaatctgctatttaaggaagctagaattataacctttatttcaaggttcttgggggcaggaggtaaagaggagaaaagatgtgaggggtagggagatagactcatagttaattctcatttcctgggttcaagacggtgcctcccctttctttcactgtatctggtttcctggagtacacagctttcctcacttacttctacggagaataaacttgctatcactatgttggctgggtggggagacctaggcctttaactgcttcttattagatttctgaacaatactctagttttcagtctcttcattaacctatgtactcataggcatataatgtctaatttctgagcatttgggggatctgcacctttaataagctcacctcacacatgcttcatcttctgcaggcatttaggcttccttttcctctgctctgctaagtccttagcacttgaccatctgctttccatttcccatcattttattgatatcatttctctactcttattaactctcttctttgtcctttctgggtttgttcttgtacaaccaatttaatgaagttgcaggagagagtagagataa

SEQ ID NO: 77694 - DNA, 878 bp, Homo sapiens
acatgtagattttataaatatataattgtccatttatactacaagtgcaattaaaagagaattttatgttttgaattttcgttttgatttaaaaatcaccacaagccttaggaccaaaaataacagtaacctactctaactgctgcctgtggggtgggggaggagaactatatgcaactgaatttatagacacaaatcctaagactgtgttaaatctattcaaagcatttttatgatgatatatcttacggcaaatcttagttattcactgggctttctcttcaggatataactgcaatctgctatttaaggaagctagaattatmacctttatttcaaggttcttgggggcaggaggtaaagaggagaaaagatgtgaggggtagggagatagactcatagttaattctcatttcctgggttcaagacggtgcctcccctttctttcactgtatctggtttcctggagtacacagctttcctcacttacttctacggagaataaacttgctatcactatgttggctgggtggggagacctaggcctttaactgcttcttattagatttctgaacaatactctagttttcagtctcttcattaacctatgtactcataggcatataatgtctaatttctgagcatttgggggatctgcacctttaataagctcacctcacacatgcttcatcttctgcaggcatttaggcttccttttcctctgctctgctaagtccttagcacttgaccatctgctttccatttcccatcattttattgatatcatttctctactcttattaactctcttctttgtcctttctgggtttgttcttgtacaaccaatttaatgaagttgcaggagagagtagagataa

SEQ ID NO: 77695 - DNA, 674 bp, Homo sapiens
gtggatgaaatgtaggtatatcccaggtctaagtcctctgggtactgacagaaacacatattgtgcaacatatggaagaccacagaaatagagcctttagcamgggattaagaccaagcatgaagaaactgtatcaactaaagagcaaaataaccagctaacatcataatgataggatcaaattcacacataacaatattaaccttaaatgtaaatgggctaaatgctccaattaaaagacacagactgacaaactggataaagagtcaagacccatcagtgtgcttgtattcaggagacccatctcatgtgcagagacacacatagactcaaaataaagggatggaggaagatctaccaagcaaatggaaaacaaaaaaaggaaggggttccaatcctagtctctgataaaacagactttaaaccaacaaagatcaaaagagacaaagaaggccattacataatggtaaagggatcaattcaacaagaagagctaactatcctaaatatatatgcacccaatgcaggagcacccagattcataaagcaagtccttagagacctacaaagagacttagactcccacacaataataatgggagactttaacacaccattgtcaacattagacagatcaacgagacagaaagttaacaaggatatccaggaattga

SEQ ID NO: 77696 - DNA, 901 bp, Homo sapiens
cattgtgaaaagaacatgatttatgctcaagtgtcagcttaagcatccgctagctacgtgaatttgagagctactcaatgtttctgagcctccgttacttcatctgtaaggtagataaggtaacttacaaggctgmtgtaaaattaagtaggataatgagtgtcaatcacctagcacatagtgaggacacagtagggggaggaatcaggaggtctcctcaccctcatgttttagctccactgtaggctctatctagggctgtgtccctgggggagtagagactagacagcaaatcgatgttaatatatgggagtggtcaaaagtgctaagattcagatggattcaaagtctagagatgcaaatcctctccctgtcacaagttttgccaaatgtctatgccataacgccactttttataaaatgaacttttgcgcctataggagtttgttgttttgttttgtttcgtggcgatacattttttttggtggttgtaattttatttgtgtttagcaggctctacttgtgtttattagatgggagagggattatttgttttcagttgagggctggcagcatattgacgggtcatttgcatgttttttcacgtgttgggtcacattttcaataatgatgtgacttagagaaaatcatacctttttttgttctcagttttctcaatgtttgtacttgatgtggtataaatttaatgccagctctctactactaatattattagaattctctcaactttatagggaatgcttctctacagtgttatggtgtgaattgagagtccagtcctgcattgcttaatgacaggcatatattctgaaaaatgcatagctaggtgatttcatcattgtgcaaacatcatagtgtatatacataaacctagatggaa

SEQ ID NO: 77697 - DNA, 901 bp, Homo sapiens
cattgtgaaaagaacatgatttatgctcaagtgtcagcttaagcatccgctagctacgtgaatttgagagctactcaatgtttctgagcctccgttacttcatctgtaaggtagataaggtaacttacaaggctgctgtaaaattaagtaggataatgagtgtcaatcacctagcacatagtgaggacacagtagggggaggaatcaggaggtctcctcaccctcatgttttagctccactgtaggctctatctagggctgtgtccctgggggagtagagactagacagcaaatcgatgttaatatatgggagtggtcaaaagtgctaagattcagatggattcaaagtctagagatgcaaatcctctccctgtcacaagttttgccaaatgtctatgccataacgccactttttataaaatgaacttttgcgcctataggagtttgttgttttgttttgtttcgtggcgatacattttttttggtggttgtaattttatttgtgtttagyaggctctacttgtgtttattagatgggagagggattatttgttttcagttgagggctggcagcatattgacgggtcatttgcatgttttttcacgtgttgggtcacattttcaataatgatgtgacttagagaaaatcatacctttttttgttctcagttttctcaatgtttgtacttgatgtggtataaatttaatgccagctctctactactaatattattagaattctctcaactttatagggaatgcttctctacagtgttatggtgtgaattgagagtccagtcctgcattgcttaatgacaggcatatattctgaaaaatgcatagctaggtgatttcatcattgtgcaaacatcatagtgtatatacataaacctagatggaa

SEQ ID NO: 77698 - DNA, 901 bp, Homo sapiens
cattgtgaaaagaacatgatttatgctcaagtgtcagcttaagcatccgctagctacgtgaatttgagagctactcaatgtttctgagcctccgttacttcatctgtaaggtagataaggtaacttacaaggctgctgtaaaattaagtaggataatgagtgtcaatcacctagcacatagtgaggacacagtagggggaggaatcaggaggtctcctcaccctcatgttttagctccactgtaggctctatctagggctgtgtccctgggggagtagagactagacagcaaatcgatgttaatatatgggagtggtcaaaagtgctaagattcagatggattcaaagtctagagatgcaaatcctctccctgtcacaagttttgccaaatgtctatgccataacgccactttttataaaatgaacttttgcgcctataggagtttgttgttttgttttgtttcgtggcgatacattttttttggtggttgtaattttatttgtgtttagcaggctctacttgtgtttattagatgggagagggattatttgttttcagttgagggctggcagcatattgacgggtcatttgcatgttttttcacrtgttgggtcacattttcaataatgatgtgacttagagaaaatcatacctttttttgttctcagttttctcaatgtttgtacttgatgtggtataaatttaatgccagctctctactactaatattattagaattctctcaactttatagggaatgcttctctacagtgttatggtgtgaattgagagtccagtcctgcattgcttaatgacaggcatatattctgaaaaatgcatagctaggtgatttcatcattgtgcaaacatcatagtgtatatacataaacctagatggaa

SEQ ID NO: 77699 - DNA, 586 bp, Homo sapiens
ttttctatgtgccctatcctgtcctaagtgctttgcatggattattttgttttattcttaccctagctctaagatctatgtactatggttcttatttttcacatgagatatctgaatttgagagtttaagtgacttgcccagtgtcacgtcactaagaaatacttgctttgaggtcattgcaatttaaaatctacaagattgaggagggcagccaagatggccaaataggaacagctccggtctacagctcccaacgtgagtgacacagaagatgggtgrtttctgcatttccatctgaggtaccgggttcatttcactagggagtgccagacagtgggtgcaggacagtgggtgcagcgcacggtgcacgagccgaagcagggcgaggcattgcctctctcgggaagcacaaggggtcagggagttccctttcctagtcaaagaaaggggtgacagacggcacctggaaaatcgggtcactcccaccctaatactgcgcttttccaacagacttaaaaaacggcgcaccaggagattatatcctgcacctggctcagagggtcctatgcccacggagtctcgctg

SEQ ID NO: 77700 - DNA, 2686 bp, Homo sapiens
gtcacctgggaccaaggtctcactcctttgttctcagttgctgttatgggctggcagaagaaaccagctgacaccagactgttcaccaaagtgtcctcctctctgcctccctaggcaccgctgtaccaaaaatctcccctctctttaaacataaaagggtttacattacaggttcatgcctgtaattcctgtgctatgggaggccgaggcaggaggatctcttgagctcgggagttgaaggctgcaacgagccatgatcagtttaaaaagaaaaaaaacaccagatgtcaacacacatagaggatccaaatggagtagggaaagaaagggagtctctccctctctccagagatgtctgaactctagcttctgctcagagaaaattttctattgcacagacttgaaagatatgtaacaatttttttttcttgagatggagtctcactctgtcgcccaggctggaatgcagtggcaagatctcagctcactgcaaacctccatctgccgggttcaagcaattctcttgcctcagcctcccgagtagctgggattacaggtgtgtgccaccacactaggctaatttttgtatttttatttatttatttatctattttcttgaaacagagtctcactctgtctcccaggctggagtgcaatggcacgatctcggccactgcaacctccgcctcccaggttcaagtgattctccagcctcggcctcctgagtagctgggattacaggcgcccaccatcacacttggctaagttttttgtgtttttagtagaaatggggtttcaccatgtcggccaggctggtcttgaacttcttacctcaaatgatctgcccacctcagcctcccaaagtgctgggattacaggggtgagccactgcacccggccgttacgtaacaaaatattaatagtgtttttgtactggatggtaggaattttctctttatgtatatttctaattttctttaaaaaaaaagaatgtatattatataatcataaaaataaagaaaagtgttttgttagaggaaatgagaaattccccatggtgatggaatatgtgatttcaacatgcatctttattttttttatttttatttttwaaattcctcctacttaggaggaaggtagggtttagcaatgtgttttattttattatttatttatttatttattttttgagacagagtcttgctctgtcatccaggctggagtgcagtggcgtgatcccagctcaccgcaagctccgcctcccaggttcgcgccattctcccgcctcagcctcccgagtagctggaactacaggcgcctgtcaccatgcccggctaattttttcttgtatttttagtagagatggggtttcaccatgttagccaggatggtctcgatctcctgacctcgtgacccacccgcctcggcctcccaaagtgctgggattacaggcgtgagccaccgcgtccggctattttttattttttgagagggagtctcactctgtctcccaagctggagtgcagtggcgctatcctggctcactgcaacctccacctcctgggttcaagcaattctcctgcctcaacctcccgagtacctgggattatgagagcccaccaccacgccgggctaattttgttttgttttgagatgaagtctagctctgtcgcccaggctggagtgcagtgacctgatcttggttcactgcaacctctgcctcccaggttcaagcgattctcttgcctcagcctcctgagtagctgggattacaggcacctgccaccacgcctggctaatttttgtatttttagtagagacggggtttcattgtgttggccatgctggtctcaaattcctcacctcgtgatcgccctgccttgttctcccaaagtgctgggattacaagcgtgagccaccgcacctgtcctgatttttgtattttagtagagatggggtttcaccatgttggtcaggctggtcttgaacttctgacctcaaatgatccaactgtctcagcctcccaaagtgctgggattacaggcgtgagccttcaacatgcatctttaaatagagaatttctgtcttgcaaaaattagtgtatgaaggtcacaaaggcttcctcatacggttcacagcacacagaacagtctttttataaaggatgtggggttgcagaaacaggaaatgaagttggttcccagatcttggcaggcatagatggggagtccctccagaaatctactcaggcctccctcctgcaaatgtgggcatgctgaccccttgttatctgtaaagagggagctcttaagataactgtccattatcaaaccaattggtgataatccctgcctcagccttttaaatcacttagacctagacattaagtactttgttgtgaatttccaccaaggagttgaattggttaactatcctggaagtggttcagcttaaaagggtttgagataattttgctactttgttattattagcaaagatgaaaactgctcattttgtttctaattttattcacttttgggtgaattatctggatcctttacaatgaataattttaaatgggtaattctaaaaattggtattaaaaattaatgtgttctttaaggaagatttaaaatacagataagaaaaatgtatttctgtactgtatttatgtacatatatgtgt

SEQ ID NO: 77701 - DNA, 2686 bp, Homo sapiens
gtcacctgggaccaaggtctcactcctttgttctcagttgctgttatgggctggcagaagaaaccagctgacaccagactgttcaccaaagtgtcctcctctctgcctccctaggcaccgctgtaccaaaaatctcccctctctttaaacataaaagggtttacattacaggttcatgcctgtaattcctgtgctatgggaggccgaggcaggaggatctcttgagctcgggagttgaaggctgcaacgagccatgatcagtttaaaaagaaaaaaaacaccagatgtcaacacacatagaggatccaaatggagtagggaaagaaagggagtctctccctctctccagagatgtctgaactctagcttctgctcagagaaaattttctattgcacagacttgaaagatatgtaacaatttttttttcttgagatggagtctcactctgtcgcccaggctggaatgcagtggcaagatctcagctcactgcaaacctccatctgccgggttcaagcaattctcttgcctcagcctcccgagtagctgggattacaggtgtgtgccaccacactaggctaatttttgtatttttatttatttatttatctattttcttgaaacagagtctcactctgtctcccaggctggagtgcaatggcacgatctcggccactgcaacctccgcctcccaggttcaagtgattctccagcctcggcctcctgagtagctgggattacaggcgcccaccatcacacttggctaagttttttgtgtttttagtagaaatggggtttcaccatgtcggccaggctggtcttgaacttcttacctcaaatgatctgcccacctcagcctcccaaagtgctgggattacaggggtgagccactgcacccggccgttacgtaacaaaatattaatagtgtttttgtactggatggtaggaattttctctttatgtatatttctaattttctttaaaaaaaaagaatgtatattatataatcataaaaataaagaaaagtgttttgttagaggaaatgagaaattccccatggtgatggaatatgtgatttcaacatgcatctttattttttttatttttattttttaaattcctcctacttaggaggaaggtagggtttagcaatgtgttttattttattatttatttatttatttattttttgagacagagtcttgctctgtcatccaggctggagtgcagtggcgtgatcccagctcaccgcaagctccgcctcccaggttcgcgccattctcccgcctcagcctcccgagtagctggaactacaggcgcctgtcaccatgcccggctaattttttcttgtatttttagtagagatggggtttcaycatgttagccaggatggtctcgatctcctgacctcgtgacccacccgcctcggcctcccaaagtgctgggattacaggcgtgagccaccgcgtccggctattttttattttttgagagggagtctcactctgtctcccaagctggagtgcagtggcgctatcctggctcactgcaacctccacctcctgggttcaagcaattctcctgcctcaacctcccgagtacctgggattatgagagcccaccaccacgccgggctaattttgttttgttttgagatgaagtctagctctgtcgcccaggctggagtgcagtgacctgatcttggttcactgcaacctctgcctcccaggttcaagcgattctcttgcctcagcctcctgagtagctgggattacaggcacctgccaccacgcctggctaatttttgtatttttagtagagacggggtttcattgtgttggccatgctggtctcaaattcctcacctcgtgatcgccctgccttgttctcccaaagtgctgggattacaagcgtgagccaccgcacctgtcctgatttttgtattttagtagagatggggtttcaccatgttggtcaggctggtcttgaacttctgacctcaaatgatccaactgtctcagcctcccaaagtgctgggattacaggcgtgagccttcaacatgcatctttaaatagagaatttctgtcttgcaaaaattagtgtatgaaggtcacaaaggcttcctcatacggttcacagcacacagaacagtctttttataaaggatgtggggttgcagaaacaggaaatgaagttggttcccagatcttggcaggcatagatggggagtccctccagaaatctactcaggcctccctcctgcaaatgtgggcatgctgaccccttgttatctgtaaagagggagctcttaagataactgtccattatcaaaccaattggtgataatccctgcctcagccttttaaatcacttagacctagacattaagtactttgttgtgaatttccaccaaggagttgaattggttaactatcctggaagtggttcagcttaaaagggtttgagataattttgctactttgttattattagcaaagatgaaaactgctcattttgtttctaattttattcacttttgggtgaattatctggatcctttacaatgaataattttaaatgggtaattctaaaaattggtattaaaaattaatgtgttctttaaggaagatttaaaatacagataagaaaaatgtatttctgtactgtatttatgtacatatatgtgt

SEQ ID NO: 77702 - DNA, 1367 bp, Homo sapiens
gaaagaagagatctgagaatcaaagctccagtaactgcctgcctgaggggataggaaaaggaagaaaggagaagtgggagggaggaagaaattgaggatggcaaggtttcccacaggccttaggaagagaaggagtccagcgtgggaaggagagatgctgccaaccatggacaacatggagcccaaggacatagtgagggctattgctttgaggaataaaaaagcctggccaactttcaagtaaagatttcagagagtggcagccagattttaaactataaaggaatgagtgaggatgaggaaatgaaggctgtgggagctgctaagagtgattagacaggaagggcacctcccagagtcctctatgatggagcacctgtgtgtgtttggtagagaactgggatttgaagctgggtttctagaacttccttctcaagtccattctactcctaatccccctgaggtgggggtgtcattgacagcagtggttaggacagagtcctggtgcctgctgatgggcaaggacacacggcccagttctggtaatcttccttactctgagcccaatctgcaaacagcttccaggcctttcaaaagtgacccaaaggcacaactctgtaaataaattgactgctgataagacatcaagaattaatgaaactcccagaaaacagctgggcacagtggctcacacctgtaatcctagcactttgggagcccaaagygggaggatggatccagggcaggagtttgagaccagcctggccaacggagggagaccctacctcacaaaaaataaattttaaaaattagccaagtacagtggtatgtgcctacagttttaggtacttgggaggttgaggcaggaacattgcttgagcctaggagttaaggttatagtgagctacgatcatgccactttactccagcctgggccacagactgagaccttgtctcagaaacaaacaaaaattcccagaaaacattttgaacatttctcaatgtatttctctaaatgaaaactcacttaatatggataaatgttttcaccaaacctgtttcttttgaccttttcatttgaggtctaactcatttttgtttgctttctctctaaaagctgttagacctttttctgagaacgtttagatttattgttaaaatatttttcattagtaaagcaaaaaactaaaatatattcagtgagagatctaaaaaaaacttgttgacattacattaaatgttatacattctttttttttagccattcccaaataactacagttttctaattagtttttgcagtaagacatacaagactatttgacaaatgactttgagtctttggggcataaaaattggcaaaaacg

SEQ ID NO: 77703 - DNA, 641 bp, Homo sapiens
ttgaactttcatataattcagtaattcttcaattatgcaagtgtaatttatggaaaaatagtagcattttacaggtgggcatggatagagctctagctctggagtcaggcagacacagcaacaaatcctaggtcttgtggggaccagatgtataagactaatctggacactataattctttcaccatcggtttcaggaaaagtaaagaaaataattttctccttgtagatatttttgtgagattatatttgtaaaatgcttggcagagagtcaatggcagttcattcatttctttatttactttagacagggtctttctctgtcacccaggctggagtacagtggtgcgaacatggctcttgcagccttgactttctaggctcaagcgattctcctgcctygatttcctgaatagctgagaccactggtgcatgccaccatgcctggctaacttttaaattttttgtagaaacagggtctctctatgttgcccagggtggtctcaaactagtgggctcaagcgatcctcccaccttggcctcccgaagtgttggaattacaggtgtgagccaccatatcctgcctcaatggtagtctaataaagacaatttgtaatccaaacttgaaaaaatatcaactca

SEQ ID NO: 77704 - DNA, 638 bp, Homo sapiens
ggatccagcagaacattgaattatttggctttacttactaaaaatgtacatgagtagatgggcttctgtctcagtgggatcaggggtcaactaatatcaaccaaggctcattctgtcccttcatttcctgtgtcagctctgcttttcaggcaagctgttttgagagagcagcaaaaatggccccataaagttcacatcacttacttccttacaaatagatatgccaataaaaagwaagcacctcattcccagcagtttcatcagaagttcagggatgacttccatgagcccagcttggatcacatgaccactcctgaatcaattaccctgctgatctgattgcccagggtgggtcagccttcccaaatcacatggactagtattgaaagacaggtcctcccatgaaaagaaaaaaaaaaaaaaaaaaaggaagggtagtggcagaggaatatgagtggggggggcctcatctctatataaaaagtatgagcgtatttgtgctcttttgtacattcatttgtatagtcactgggaaaaaaatgagaaaaacccaaacacggctttctatatgcctctgtgctttgttttcaacactgagctgtgagaaatctagttactaaaatgaaactttgaaaaaa

SEQ ID NO: 77705 - DNA, 638 bp, Homo sapiens
ggatccagcagaacattgaattatttggctttacttactaaaaatgtacatgagtagatgggcttctgtctcagtgggatcaggggtcaactaatatcaaccaaggctcattctgtcccttcatttcctgtgtcagctctgcttttcaggcaagctgttttgagagagcagcaaaaatggccccataaagttcacatcacttacttccttacaaatagatatgccaataaaaagtaagcacctcattcccagcagtttcatcagaagttcagggatgacttccakgagcccagcttggatcacatgaccactcctgaatcaattaccctgctgatctgattgcccagggtgggtcagccttcccaaatcacatggactagtattgaaagacaggtcctcccatgaaaagaaaaaaaaaaaaaaaaaaaggaagggtagtggcagaggaatatgagtggggggggcctcatctctatataaaaagtatgagcgtatttgtgctcttttgtacattcatttgtatagtcactgggaaaaaaatgagaaaaacccaaacacggctttctatatgcctctgtgctttgttttcaacactgagctgtgagaaatctagttactaaaatgaaactttgaaaaaa

SEQ ID NO: 77706 - DNA, 638 bp, Homo sapiens
ggatccagcagaacattgaattatttggctttacttactaaaaatgtacatgagtagatgggcttctgtctcagtgggatcaggggtcaactaatatcaaccaaggctcattctgtcccttcatttcctgtgtcagctctgcttttcaggcaagctgttttgagagagcagcaaaaatggccccataaagttcacatcacttacttccttacaaatagatatgccaataaaaagtaagcacctcattcccagcagtttcatcagaagttcagggatgacttccatgagcccagcttggatcacatgaccactcctgaatcaattaccctgctgatctgattgcccagggtgggtcagccttcccaaatcacatggactagtattgaaagacaggtcctcccatgaaaagaaaaaaaaaaaaaaaaaaaggaagggtagtggcagaggaatatgagtggggggggcctcawctctatataaaaagtatgagcgtatttgtgctcttttgtacattcatttgtatagtcactgggaaaaaaatgagaaaaacccaaacacggctttctatatgcctctgtgctttgttttcaacactgagctgtgagaaatctagttactaaaatgaaactttgaaaaaa

SEQ ID NO: 77707 - DNA, 502 bp, Homo sapiens
ggtgcacctgtgagtggagaagctaggcctggccagagaagcaagagaaacacacacacacatatgtgcacacacacacacaggcacacacgcatgcacaaacacactgcatccacacatgtcagttcaggggatagaggacactgactctgggcgctgttgacccatgcaggctcccattgtggtgggttgtgtcaccccacaatgtcactgttgctgagcccccatcgcctctgtgttgtggagcagttagagacacactgtggtgtctgagtggctctgcgtgaaggaccgttttctaggtgagaggcacatctcaacacagctgactgatcagactcaggtgagtgggacctgctctcttctcttgctcctagcttggggacagtcgctatcagttgggtggttttggcctctgagcagctactgagggtaatccctgaacactcacyggatgcctattctgtgctgacagtcatctcgttcatcctcgcagcaattc

SEQ ID NO: 77708 - DNA, 535 bp, Homo sapiens
ggctggaaagtccaagactatggcattggcatctgttgagcttctgatgagagccacatgctatgtcacagcaaggcagagaaacaaaatggaaatcaggcaaatcattgctttataaaagaggcaactttctttagaatgaccggctcttatgagaactaatccattatcatgaaaaataacccagtttcaccagaaakttattaatttgtcttaatgacctaatcacctcttcaaagcacgatctcctaacaccttacatgggaaattaaatttcgacatgaattttggagagaataacccatgtccaaactatagcaagggtaaagaccccaaatttacttagacatggggattaataatcatgtgtcattgccaataaacgttttctttcttttgcacttccaaagaattttttcaccacctattttcctctatgtttttctttctctagtatttctttctctaaaaatttgtgcttgtgtaaataatttgcaaatgcaacttttttcttctttgaaatgatagctaaatt

SEQ ID NO: 77709 - DNA, 633 bp, Homo sapiens
aatattcattaagtaaatatcagacctttcacatttatatttcacttttcatttttgatacatgacaaaatttgtgattttattattttctaacaaaaatagaatgggggcccacttttcaaatccattctgcaaaagacaatgtttgagtttttataccacagctgtcctaagtaacgaattatctcaccagagaagagaagaaatgctaaccacataatccaacaggagacttgattcattttgtgtctggaacagtcagtgcaatgttacaaactgaaatgagtttccttttcaatcttcaggtgaaaaaagtagtgagaatgtcccgctttaaaaaaaagaaaatcaatgtgaccttttttttttttcatcttccttgagaaataatgtgtgtttgtgtgggggkgtgtgttttattttgcagtgttagttttgacctcattatgctcattatgctgttgtaaggctaagtatgtcatgggtcaaaatgaaggcaaaatagacctttctcagcattaaagcacaacctaatttatggtaaaagtaatttccatactgttttaaagaaatagccctggacaacatgaatcttcctttgctgtagcatgctggctgaaaaacgggttagat

SEQ ID NO: 77710 - DNA, 1283 bp, Homo sapiens
atattaacatttgacaaatctcaatgaagatatacaaaatttttttgaaatttttgtgaggttgaaattatttaaagataaaaggttaacattaaaacactaaaaaaaatatgaaaggcatgttacctgagattgagaatactttatcttcctgctttttatgatttaatactttgacctcctcatctttattatttgaaaagaaagttatagagacttttaatgaagtcttaaaaactgatattttggtctcatcttactaagaggaatccacaagaagtctaaattacatatatatcaaatgaaaaygttgaataaatctttatttttcagtaatgatcttaaccttcacaacctacaaccttcacaatataccttcaaaatccatttcattaatggcagcaggatctcagaatggcatttcacgtcttgttccagaaccactgtctcaaattcctactgtcttttttaggcatcccagaaaaactgcagcactagataggcagagtaggatagtgggattgagcttccttgcctgagagtactgatcagtcacctccataaatcctgttggtctctttttaaaaaaaaaaaaaaacaatgatcagcactatatacagatggaattccaataaaaaaggagcggatgcaacaatatattgttttacttccatggattatctcccctaaagaacatcattggaaacactgtgtatgggggtgcaggtgggtatgcagcatggtatagggaagggaaagaacgtggaaattgaagtcagacaaatccttattcgtactgaggcaaagtgtttaatcactctgaacctcagtatccttttctataaaaataaggaaactagttattttaggggatatttcgaagaaccaataaactaacatgtggaatgtgctgtttattctttcttttcccctccaggtctgttcatcagttttctgcatcccactctatgtcctaggagaccaaccctaaagactactttaaccaatctcccttgccttgggctattagttgggttcagacaaattgtggcataatcagtttagaagttagtaagagaaagaaggggtaggaaaaaatggcggataggaggcaggactaaattgcagatccaactcatatgggcagagcagcatgtggagactcacattgtgaacttttgctccaagaactactgcaggaatatactaggaaagctaagaaaattcatagactctttgaaggaagtggattgttgttgcaggacctgggagacagcccaaat

SEQ ID NO: 77711 - DNA, 1283 bp, Homo sapiens
atattaacatttgacaaatctcaatgaagatatacaaaatttttttgaaatttttgtgaggttgaaattatttaaagataaaaggttaacattaaaacactaaaaaaaatatgaaaggcatgttacctgagattgagaatactttatcttcctgctttttatgatttaatactttgacctcctcatctttattatttgaaaagaaagttatagagacttttaatgaagtcttaaaaactgatattttggtctcatcttactaagaggaatccacaagaagtctaaattacatatatatcaaatgaaaacgttgaataaatctttatttttcagtaatratcttaaccttcacaacctacaaccttcacaatataccttcaaaatccatttcattaatggcagcaggatctcagaatggcatttcacgtcttgttccagaaccactgtctcaaattcctactgtcttttttaggcatcccagaaaaactgcagcactagataggcagagtaggatagtgggattgagcttccttgcctgagagtactgatcagtcacctccataaatcctgttggtctctttttaaaaaaaaaaaaaaacaatgatcagcactatatacagatggaattccaataaaaaaggagcggatgcaacaatatattgttttacttccatggattatctcccctaaagaacatcattggaaacactgtgtatgggggtgcaggtgggtatgcagcatggtatagggaagggaaagaacgtggaaattgaagtcagacaaatccttattcgtactgaggcaaagtgtttaatcactctgaacctcagtatccttttctataaaaataaggaaactagttattttaggggatatttcgaagaaccaataaactaacatgtggaatgtgctgtttattctttcttttcccctccaggtctgttcatcagttttctgcatcccactctatgtcctaggagaccaaccctaaagactactttaaccaatctcccttgccttgggctattagttgggttcagacaaattgtggcataatcagtttagaagttagtaagagaaagaaggggtaggaaaaaatggcggataggaggcaggactaaattgcagatccaactcatatgggcagagcagcatgtggagactcacattgtgaacttttgctccaagaactactgcaggaatatactaggaaagctaagaaaattcatagactctttgaaggaagtggattgttgttgcaggacctgggagacagcccaaat

SEQ ID NO: 77712 - DNA, 2233 bp, Homo sapiens
agagccaaaaaacatgtgctttggaactaacattcttaaacagtatccaaattaatggaaaagtgcctgcattaatgaaataaaacatcagagctttggcaggagttgattggcagaaacacccgatggcttgatacatctgtctgctgaagacataaatggattcctccttttaaaagagaatgaatgactctggctgaagctaaagctctcatctaaagaaaatgaatttctgctttctgccagagtacctaggagcacaattctcagcctagcatctttgtgcctactaaagtaagattctggctgtaaagataagaaagattctacatctgcaggtatgaatactacatcatttagtattcattaagagaagataagataaaggggtattgtatcttccttcttgatttgtaaggattcaggagatgtggttatatagttagttgatgggttgatttagaaatttctttatttgttcatttatttattggttcattcattcattcacttatacaagtggaattacttaagagtgtctgttcttttctgggcacagttacatactggatgtgttaaggttacagaagccagagtcctagatttgagccattctagggcagagaaggaagggaagggactatgccatgcactctaccaagatttttacatatattcttcccaacactccccacaaccctgtaggattgtcatcattacttccagttccgagagtagaaaatggagactctgagatgaggtacctgttcaatgtgactctaatttttggtgatgatcttggcttatgagcctgggattatgttattcccaagctaggatctttccacaaaagagtggattgttttctactccaatcaaatatttaccctcattctctagatgcccagagagctttgctatcaaatccttatagtcagttggcagatgttgctctgcagaatgcatgagtggatccaaagcaatccaagacaactaaaaaggttgtagatctcaaaggtgaagtcaactgatggtcataataggaaactctgtatttaagaatagtagaatggtgcttaaggaatgaataaatggactctgatttagagcctttgtagctttgctagaaatagtaaaacatgagttggtatatcaatgatgcagtatcaaatttgttttctgcaggatatttttggcttctttttaaagacttagttgtctcccagataagtgaagttggcaaacaaatggcctttatacaaatgaggttttataccaaaatattttgtatttgggtggaaagtgattcttcttcatcaagtgcttcttatcctaaggctagaacaactcattgacatgcatggggtggattctactcttcccattgtgtgaatgaggaggctgagtttcagagaggcagagtagcctgcaggaggtcattcacacagccgctgagcagatgcattgagcatttctccccctttgcatcaactctatttgggttagccattattggactgaacaaattactctgtaaaattttctaaaaatagctctctcaraaattataaataaagtttgggtagactttatgtatcctgagtagggggacagatatatcagaacgttgagtgtttatcaccttgctgtattgacgctttggagcaatagctagaatcatcatgaaagtttcaggaaatttccagtgtttctcaaacatgtcaggcttgctccacactcagtgtttttgcttttgttgtttcctctgcttgaaatgctctagagcaggtggctttgtggcacatcccagactgcgtcggggttgggctcaggtgtcaccttgtccgggagatcttgcttttccacaggtataaaagtatagtcctatcctcatacttcctgtacatcctccctgattgactgggactcttgtccaaagcatttatcagaaaatttactcatttttagggccgggtgcggtgactcacgcttgtaatcccagagctttgggaggccatggtgggaggtcaggagtttgaggccagcctgggcagcatagaaaccctgtcactatagaaataaataaacaaattacagctaggcatggttgtttgtgcctgtagtctcaactacttgagaggctgaggtgggacaattgcttgagcccaggagttctaggttacagtgagctataattggaccactgcactttagcctgggtgacagagtgaga

SEQ ID NO: 77713 - DNA, 677 bp, Homo sapiens
agctttatcattctgcccctccacaatctatggcatcaccatgctttattcagatcctgagttccctcatgctctcttttctaccttccatctaagtctacttttaagcactcattttaattaaagtgtgaatggctaacatggtattttatcagccctgttaattattcagttaggacaaaatatgaaaaaattatttgttcttagcatttgctggtagtttggagctttattggcattgccacacctttctgggcacacaaccaggattcaagtgttacctgcaaggatacgggaaaggtcagaaaacattgggacctagaagtcagcttgctgaccagataattgttttcactatctactttaaatataagatctacagaaatggaattcatcccatagtttgataatctgctttcagtaacaatgttaaaggaaagggcatgatttttaactataaaaacttatataatgtgaataaaatcttcataacgtaagcagtacctcaaagtaataaygtatgataagcactttataactattaactcatttaatacttaaaacacacaatgacatgtctcactgttgttctgttttattgttgagagaattgagacagagaaaggttatttgacttgcataggttccctcaggtggcttacgtcgagccaggattt

SEQ ID NO: 77714 - DNA, 839 bp, Homo sapiens
gcataacaggaaactttgtcttgtcttacagaggtgggtgaaattgagtagaagtgatctttcattttgttatttgcattatgtgaagagagatataaaaatgttgactttggccaggcatggtggctcatgcctgtaatcccagcactttgggaggccaaagtgggtggatcacctgaggtcaggagttcgagaccagcctgcccaacatggcgaaacctcgtctttactaaaaatacaaaaatagctaggtgtggtggcaggcaactgtaatctcggctacttgggaggttgaggcaggagaatctcttgaacccaggaggcagaggttgcagcgagccmagatcatgccactgcactccagcctgggtgacagagcgagactctgtctcaaagaaacaaactacctagctaaaagacaaagttgactcttctgtttccatttttagccactagtgtcttgattaaaaatacacaacttttgtttacctatgtaacaaacctgcacatcttgcacatgtaccccagaactaaaaataaaaattgaaatagaaaaagatacaaaactttcagtgtttaaataaggagaaagttagctatatctgtgcatgcaaatatgttctatgtgaaatataaactgtgtaaatattaaatatgtatgtgtgtatacacacacaaccagactatatagggtcttcagtgtcaatatttagataactgaatgttcattttaaacatctataaacctgtttatatgtctaattctaaaatgtctgtgtctatctaaaccacttctaaaataggtataaaaatatcttagggttattgggagaattaaa

SEQ ID NO: 77715 - DNA, 839 bp, Homo sapiens
gcataacaggaaactttgtcttgtcttacagaggtgggtgaaattgagtagaagtgatctttcattttgttatttgcattatgtgaagagagatataaaaatgttgactttggccaggcatggtggctcatgcctgtaatcccagcactttgggaggccaaagtgggtggatcacctgaggtcaggagttcgagaccagcctgcccaacatggcgaaacctcgtctttactaaaaatacaaaaatagctaggtgtggtggcaggcaactgtaatctcggctacttgggaggttgaggcaggagaatctcttgaacccaggaggcagaggttgcagcgagcccagatcatgccactgcactccagcctgggtgacagagcgagactctgtctcaaagaaacaaactacctagctaaaagacaaagttgactcttctgtttccatttttagccactagtgtcttgattaaaaatacacaacttttgtttacctatgtaacaaacctgcacatcttgcacatgtaccccagaactaaaaataaaaattgaaataraaaaagatacaaaactttcagtgtttaaataaggagaaagttagctatatctgtgcatgcaaatatgttctatgtgaaatataaactgtgtaaatattaaatatgtatgtgtgtatacacacacaaccagactatatagggtcttcagtgtcaatatttagataactgaatgttcattttaaacatctataaacctgtttatatgtctaattctaaaatgtctgtgtctatctaaaccacttctaaaataggtataaaaatatcttagggttattgggagaattaaa

SEQ ID NO: 77716 - DNA, 575 bp, Homo sapiens
agcccaagaagggagataatttttcaaaactttgaagaagacagccagcatcctgcagcaggtaaagcaaaatagaaagctgaacactcttttactgttcattttcctctttttccatttaccagttatttaataattgcctactctatatgagacccttcattaggtccagaagataacacatgaataataagaaatattctctgtgctcaaggtttttactttctakagatttgagacaagcccagaaagcttataagctctaaactttatattgcatatccagcaggtgttttttggtttttgttttttgttttttttttgagacggagtctcgctctgtcgcccaggccgatcttggctcactgcaagctccgcctcctgggttcatgccattctcctgcctcagccttgagagttttttttttatatatattcttttctacataatggaatctttatacacaaataaatcttgaaaaccatagcttaactcttaagtttatttgtcttcattcttgaagacatagaaatcttcatcccactcttgaacctgtctcacatctcttcctaaa

SEQ ID NO: 77717 - DNA, 575 bp, Homo sapiens
agcccaagaagggagataatttttcaaaactttgaagaagacagccagcatcctgcagcaggtaaagcaaaatagaaagctgaacactcttttactgttcattttcctctttttccatttaccagttatttaataattgcctactctatatgagacccttcattaggtccagaagataacacatgaataataagaaatattctctgtgctcaaggtttttactttctatagatttgagayaagcccagaaagcttataagctctaaactttatattgcatatccagcaggtgttttttggtttttgttttttgttttttttttgagacggagtctcgctctgtcgcccaggccgatcttggctcactgcaagctccgcctcctgggttcatgccattctcctgcctcagccttgagagttttttttttatatatattcttttctacataatggaatctttatacacaaataaatcttgaaaaccatagcttaactcttaagtttatttgtcttcattcttgaagacatagaaatcttcatcccactcttgaacctgtctcacatctcttcctaaa

SEQ ID NO: 77718 - DNA, 654 bp, Homo sapiens
atccttttactcactcaaatagcaagtaaaccccacctctgtgatccaggcactgtgcctggtactaggcatacagaatgataacagaaaaaagtgccctcagggagctttctgtctagaaggggaggcacaarcagagaatgaaatgcagattgttaaatgataggagaggtggtgtatttagcttttcctgggtagcaaggagcagaatgccactcaaatagctcatataagggcaacaggaatcacatggaaccaggatcagttttcttgacaggtctctggggaagttgaaataccatgtcaaagtggaaaagaggtatagggtcccaggcagtttcattttattttatttttttgagacagagtcttgctgtgtctagcaggctggagtgcagtgacactatatcggctcactgcaacctcaacctcccagattcaattaattctcctgcctcagcctcctgggtaactgggattacagccgtgcaccaccacacatggttaatttttgtatttttagtagagacagggtttccccatgttggccaggctggtctcgaactcttggcctcaggtaatccgcccgcctcagcctcccaaagtgttgggattacaggtgtgagagcctggcctgggcagttgtaataacta

SEQ ID NO: 77719 - DNA, 653 bp, Homo sapiens
ctgtgtgtgaacaaagcttaacttttaatacaaaaatttagtaactataaaaacacaaaatatrtgacagcaagatttaagaaaatggaaacatctttctctgctctgttttcagtgttaaaaatattttcatctctaatatattattagacactacttaaacctagattttctgtatacttccaaggtaacctttatttttttctttccaactgtgattctaggtatctaaaattcttgtctccttacttatccatacattgagtcaactgctagcagctttgagctacttcagtaaacatttatcaagtggctgctctttgctaggcctagtgctagctttggctttaaaagtccatactgcttctctttctgtctctattaattcaaatctggcaaaagttctttttttaagctgctgacactccattttcttaagtagttatttctatctcatgcaagagagccttgctaatttcagacaaatttcaaactattttttattttggttaattgaattaaactctatccagccatatagtccagaaagccaagagtcagaatagactcatttctcttcattacaaccttcctcctgcatccactcaatcagctttcctcttaattatcactgaaatctgccctttcctctg

SEQ ID NO: 77720 - DNA, 653 bp, Homo sapiens
ctgtgtgtgaacaaagcttaacttttaatacaaaaatttagtaactataaaaacacaaaatatatgacagcaagatttaagaaaatggaaacatctttctctgctctgttttcagtgttaaaaatattttcatctctaatatattattagacactacttaaacctagattttctgtatacttccaaggtaacctttatttttttctttccaactgtgattctaggtatctaaaattcttgtctccttacttatccatacattgagtcaactgctagcagctttgagctacttcagtaaacatttatcaagtggctgctctttgctaggcctagtgctagctttggctttaaaagtcyatactgcttctctttctgtctctattaattcaaatctggcaaaagttctttttttaagctgctgacactccattttcttaagtagttatttctatctcatgcaagagagccttgctaatttcagacaaatttcaaactattttttattttggttaattgaattaaactctatccagccatatagtccagaaagccaagagtcagaatagactcatttctcttcattacaaccttcctcctgcatccactcaatcagctttcctcttaattatcactgaaatctgccctttcctctg

SEQ ID NO: 77721 - DNA, 1095 bp, Homo sapiens
gggggggttgttttcccatgaatcttttcaacccgcccagtattctcattttgttaatctgccatcagatgataaattgccttcaaagagtaaatgatcctgaaactctattctaatgaatagtctgaatttgtagatagtctatatgtatttgtttattttattttattttaatttggttattgtggttagcatagttttgatagcagtttatgatttgctatataaaagtaatcctgatttggttatataagagtaatcttgcctttctttttcaataagctgctagatttgttgtagtttttgtctctctataaccttaggctggtccaatttctcaacgcagttcaagataatgttaagtaattgattgcatcgtgagttattaacaaggacaagaaacacacgtattcttcacaagtttgctatatcgtggcagaaaagcacaatttggtggcaaaaggaaaattccaattagttgctttagatactgtgtctttaactgtgccagttttctagctgttaataaattatattcttggtcttcacatcaatatgctaagctgaaaagtcagtgagtgtttccatttgtggttcacttacttggtgaataagagcatcttaactaaccctaatcagctgtatccaacaatatatgctagatatcagccaaaagtatcaccaaggctgatctttctttctccattccaaatactgcattccatctatcccacattgtcagtcattcatcagctagcctcagactagtagataaaaaagtggtggaaacatccctggagtcttggagatttgactctggttttgatggaatattattytgtggattctcacatttattgacctcaatactagtgaggtcaacgtgacaatacagtgtgtattgatttggtccaattcaagaattgctcattcatttattgcttatatttatgtaagtaaagcagtaggctttcatcttccaattacaacacgttaccgaattaatgtgattaaagatgaagctggactactgttaacagggtctttgtttctgtcataaagtgcaaaagaaacaattatgtaaaattaatatat

SEQ ID NO: 77722 - DNA, 666 bp, Homo sapiens
tgcctgttaaagcatgaattctgggtccagaattgtytaccaaacatattatatactagctaattaaattcatccattcacccattcaataaatatttaagaacttactctgagcaaagtcctgttctaagtattcaagataaagcagtgaacaaaacagaaaaaattcagaaccacattatgacattgcctgagtccctccctccctaaaaatacatgttaaaatgatattttacaaatgtgttgttataaagatggatacataatatatgaaaatgtgttttcaaccccaaagtttattttttcttctaattttaagagaaattaaacataaacatacttatgggtccctaacagtactgtaggcctggccactgtgcctctggtgcctaatggaggagttggcacaaaaatcctaccttcatggaactaacaaccaagattagtagctagaaaacaaataaagtcataaaagttagacattatatatacattagatagtaataaattccaaggaaaaattaaaccgggaaataccagtagtatagtatgtaattttaattaggacagccagaaaagtcatctttgagaggtgacatttgtataaagatctgattttactcaaattattttttctcattgagattttataattgtaaaatcata

SEQ ID NO: 77723 - DNA, 833 bp, Homo sapiens
cagcctggtgagtcagcacccaggctactgcttgccacccaccaagaaatgcacatgtttggaaatttgatgacatctggagtttcagtcttaatcaggctggttttggcatttcctttccaggcatggagctgtttctgggtatttttcaaaattgtctatagggaatgccatagaaaaacccctaaactgaatcttgctagagccacaccttgcaattccacgacttttgcacatttatctaatgatttgccgagtagccacaccaacaaaggacagagcagagactgtaaagggatggagccaagctgtacctaggcagaaaagtttccccacctgctgcctcacgcccatctctgctgtgtaccaggtgtaaactaaaaataaaattctaagcccctcaaccatctgaacggacccctccccttggccaagggcgttctaaagttagcctgaaaaactaatgcaggccatcatgggaagcaggagtyggacatgctcctgcctttggagttcaggcccagctgaccagtattaacatcaacacaaaccttaagactgatagaaaagactctttaagtctgataagaaatatgtacatctattctctctgaagcctactacctggaggcttcaactgcatgataaaagcctggtctccacaaccccttatttaactcagacattcctttctattgattccaagtctttagacaataacttaactctttccatcaactgtcaatcagaagatctttgatctacctatgacctggaactacccctccaccccaaccaccaccacctcaccccaccccctcactccctcattt

SEQ ID NO: 77724 - DNA, 535 bp, Homo sapiens
aattacagagataatatggccttatgtctaatatgcatgttttagagttgcactgcttgggtttaaatctttcctaaactctaatcagctctgagtcattgcccaggttatttaagcctctggtactccgcatgaatatagaaatgatgatactacatgcctgtgtgtatgttgtatgtgtctgtttaggatctaatatatgtaaaatattgcaactttacagagttatgccacaaccgtataaaattcttaatgtttgactatttttatctacaaaagtgcaaattcctcatggttaaaccmagtaataagttatcagtaaattgtagcaattattaacaaactgtatagagaggttggttttgtctatcaaataactagaatatgcaccaatattttacataatcaacaataaaaacctggtaacactgtaattgctcaacagattcttcctgcccactgcacatacagaactaattcactaagaccatggtattgcaataaagaaagagtttaattaacaggagactggcca

SEQ ID NO: 77725 - DNA, 1315 bp, Homo sapiens
gcagaggttgcagtgagccaagcttgcaccactrcacttcagggtgggcaacagagtgagactccgtctcaaataaataaataacaaagccattcaactaaagaaccgattatcaagcagaagcacaaagcccaggttccatcaggtttttaattgtacatcagtgactggtgaaaaagcaattatttccataattaaaatacacactataaaaaacagactcaaagaaaagaaagatgacagagtgaaagaaggtacatttctttcatgttcaaaccacggagttcacaacacagcagcacacacagccgggcgctttgtggtctcggcaccctcggcttccccttcaagaggccactttcgactagtagaaggctgaaaataaaggaaaatggagaaatgttcaaaagaaaatcactggcttctttaagattatcaaagttcctcaatatacttccagtaaagtgggggcatttgatgtgaaattctagtaccaaaaattactggtcgtcatcattgacaactgagtcctcaccacagcccgcaactcagacatgcttatctaatagatatttctctccctatggcttctgacctctgaacgatgtatactgaaagcaagtagcataaccaacttcctcttgatcgtcctcttctaaatatcaagtttaaaaggactataatacctctcagttgaagccccaagtcttggtcttttgcgggaagacaacctttgtgccttagttgttttcccatatataaaattgggaggaaggctgggtgcggtgactcacgcctgtaatcccagcactttgggaagccgaggtgggcaggtcgcttcaggtcaaaagttcgagacaagcctgaccaacatggcaaaaccccatctcacctaaaaatacaaaaattagctgggcgcagtggtggacacctgtagtcccagacactcgggagactgaggcaggagaactgcttgaacccaggaggcagaggttgcagtgagctgagattgcaccactgcactctggcccgagtgacagactaagactctgtctcaagaaaataaaaatcggggcagcggggaggaaacagtgggaaaaaggacagctaccattcaacaacaacaacaacaacaaagtaggactggaattaacttatactcacaaagaactttaaagaataaacttgtaatcaaggaatcaactactgacccaaattttaatttttccaacaaatttatatttgagcccctaatagagtctttcgaaattgccttgcaggtgaccttttggatgacaatccctagctgtgctta

SEQ ID NO: 77726 - DNA, 1315 bp, Homo sapiens
gcagaggttgcagtgagccaagcttgcaccactgcacttcagggtgggcaacagagtgagactccgtctcaaataaataaataacaaagccattcaactaaagaaccgattatcaagcagaagcacaaagcccaggttccatcaggtttttaattgtacatcagtgactggtgaaaaagcaattatttccataattaaaatrcacactataaaaaacagactcaaagaaaagaaagatgacagagtgaaagaaggtacatttctttcatgttcaaaccacggagttcacaacacagcagcacacacagccgggcgctttgtggtctcggcaccctcggcttccccttcaagaggccactttcgactagtagaaggctgaaaataaaggaaaatggagaaatgttcaaaagaaaatcactggcttctttaagattatcaaagttcctcaatatacttccagtaaagtgggggcatttgatgtgaaattctagtaccaaaaattactggtcgtcatcattgacaactgagtcctcaccacagcccgcaactcagacatgcttatctaatagatatttctctccctatggcttctgacctctgaacgatgtatactgaaagcaagtagcataaccaacttcctcttgatcgtcctcttctaaatatcaagtttaaaaggactataatacctctcagttgaagccccaagtcttggtcttttgcgggaagacaacctttgtgccttagttgttttcccatatataaaattgggaggaaggctgggtgcggtgactcacgcctgtaatcccagcactttgggaagccgaggtgggcaggtcgcttcaggtcaaaagttcgagacaagcctgaccaacatggcaaaaccccatctcacctaaaaatacaaaaattagctgggcgcagtggtggacacctgtagtcccagacactcgggagactgaggcaggagaactgcttgaacccaggaggcagaggttgcagtgagctgagattgcaccactgcactctggcccgagtgacagactaagactctgtctcaagaaaataaaaatcggggcagcggggaggaaacagtgggaaaaaggacagctaccattcaacaacaacaacaacaacaaagtaggactggaattaacttatactcacaaagaactttaaagaataaacttgtaatcaaggaatcaactactgacccaaattttaatttttccaacaaatttatatttgagcccctaatagagtctttcgaaattgccttgcaggtgaccttttggatgacaatccctagctgtgctta

SEQ ID NO: 77727 - DNA, 1315 bp, Homo sapiens
gcagaggttgcagtgagccaagcttgcaccactgcacttcagggtgggcaacagagtgagactccgtctcaaataaataaataacaaagccattcaactaaagaaccgattatcaagcagaagcacaaagcccaggttccatcaggtttttaattgtacatcagtgactggtgaaaaagcaattatttccataattaaaatacacactataaaaaacagactcaaagaaaagaaagatgacagagtgaaagaaggtacatttctttcatgttcaaaccacggagttcacaacacagcagcacacacagccgggcgctttgtggtctcggcaccctcggcttccccttcawgaggccactttcgactagtagaaggctgaaaataaaggaaaatggagaaatgttcaaaagaaaatcactggcttctttaagattatcaaagttcctcaatatacttccagtaaagtgggggcatttgatgtgaaattctagtaccaaaaattactggtcgtcatcattgacaactgagtcctcaccacagcccgcaactcagacatgcttatctaatagatatttctctccctatggcttctgacctctgaacgatgtatactgaaagcaagtagcataaccaacttcctcttgatcgtcctcttctaaatatcaagtttaaaaggactataatacctctcagttgaagccccaagtcttggtcttttgcgggaagacaacctttgtgccttagttgttttcccatatataaaattgggaggaaggctgggtgcggtgactcacgcctgtaatcccagcactttgggaagccgaggtgggcaggtcgcttcaggtcaaaagttcgagacaagcctgaccaacatggcaaaaccccatctcacctaaaaatacaaaaattagctgggcgcagtggtggacacctgtagtcccagacactcgggagactgaggcaggagaactgcttgaacccaggaggcagaggttgcagtgagctgagattgcaccactgcactctggcccgagtgacagactaagactctgtctcaagaaaataaaaatcggggcagcggggaggaaacagtgggaaaaaggacagctaccattcaacaacaacaacaacaacaaagtaggactggaattaacttatactcacaaagaactttaaagaataaacttgtaatcaaggaatcaactactgacccaaattttaatttttccaacaaatttatatttgagcccctaatagagtctttcgaaattgccttgcaggtgaccttttggatgacaatccctagctgtgctta

SEQ ID NO: 77728 - DNA, 749 bp, Homo sapiens
gatcccttaaggccaggaggtcgaggctgcagtgagctataattgcaccagtgcactccagtttagggaacagaagaagaccttgtctccaacaataaataaaataaaaattaaattataatatcccttgaaagcaaacagaagaaatcctctatttcaggcagtaaatatgaagcagagagtagatgtaagggatgctcccaaaactggccaytctgttaatgacaaaacagagaccagaatccacattcccaacactcagtccagcgccagacccacaaaaccatttggtttttgcaaaaacactgaattttcccaaaataaaacccaaactatcactaacagatgttttagatggtcagtcttcatccttgtcttcattcaatgctcattcctccttttactgcaaaaacaaaaggtggctaaaagagtattccagggagatcctgcaacggagttgaacttcaccttctccttggttgttaataagttttctttgagacaaagaagtacaagaaaaataggctacgcttgctcataaatttcaggcagatgcaaaccctgttcccaggctcaacaggccagctctatttttttgctagagatgaacacagctcctgtacctctacatttagacccaagagtttccctattaggacacatgaaaagagccaaaagacatgtttctctttctcatcaaaattaaaatccccacatgcaaaggcaccctttgtttccaaacccctttc

SEQ ID NO: 77729 - DNA, 749 bp, Homo sapiens
gatcccttaaggccaggaggtcgaggctgcagtgagctataattgcaccagtgcactccagtttagggaacagaagaagaccttgtctccaacaataaataaaataaaaattaaattataatatcccttgaaagcaaacagaagaaatcctctatttcaggcagtaaatatgaagcagagagtagatgtaagggatgctcccaaaactggccactctgttaatgacaaaacagagaccagaatccacattcccaacactcagtccagcgccagacccacaaaaccatttggtttttgcaaaaacactgaatttycccaaaataaaacccaaactatcactaacagatgttttagatggtcagtcttcatccttgtcttcattcaatgctcattcctccttttactgcaaaaacaaaaggtggctaaaagagtattccagggagatcctgcaacggagttgaacttcaccttctccttggttgttaataagttttctttgagacaaagaagtacaagaaaaataggctacgcttgctcataaatttcaggcagatgcaaaccctgttcccaggctcaacaggccagctctatttttttgctagagatgaacacagctcctgtacctctacatttagacccaagagtttccctattaggacacatgaaaagagccaaaagacatgtttctctttctcatcaaaattaaaatccccacatgcaaaggcaccctttgtttccaaacccctttc

SEQ ID NO: 77730 - DNA, 749 bp, Homo sapiens
gatcccttaaggccaggaggtcgaggctgcagtgagctataattgcaccagtgcactccagtttagggaacagaagaagaccttgtctccaacaataaataaaataaaaattaaattataatatcccttgaaagcaaacagaagaaatcctctatttcaggcagtaaatatgaagcagagagtagatgtaagggatgctcccaaaactggccactctgttaatgacaaaacagagaccagaatccacattcccaacactcagtccagcgccagacccacaaaaccatttggtttttgcaaaaacactgaattttcccaaaataaaacccaaactatcactaacagatgttttagatggtcagtcttcatccttgtcttcattcaatgctcattcctccttttactgcaaaaacaaaaggtggctaaaagagtrttccagggagatcctgcaacggagttgaacttcaccttctccttggttgttaataagttttctttgagacaaagaagtacaagaaaaataggctacgcttgctcataaatttcaggcagatgcaaaccctgttcccaggctcaacaggccagctctatttttttgctagagatgaacacagctcctgtacctctacatttagacccaagagtttccctattaggacacatgaaaagagccaaaagacatgtttctctttctcatcaaaattaaaatccccacatgcaaaggcaccctttgtttccaaacccctttc

SEQ ID NO: 77731 - DNA, 642 bp, Homo sapiens
cacctcctgtgcgtccccrggcgcggcgcgacagtccggggtcctgcacgctgtggggagccgcgctgggggcgcctcggaaggacgcggttctccagccctttccgtgcctaaacaggaccgaggctgagtttcttcgcgtgggtggaaactaaagcggggttggggacagggtgctggccatgggtgcggttccaggagcgggcgcgggtccccgggcgggatgggggggggctcaggcacagcggtggggcgagggcgcagcgccgggagcgcagatcccaggggccctcaccgcaataggtgatggaggtgtgcagcagcaccacgaagcattccacagggcacacatacagcaaagcagcacgctgtgagcagtaaagataggcaagtttgtcaattaaactttcataaagctgggggaaacagaagaaaacaaaccataacaacaaaaaataaagccgagaaacatttaagagatttattagtttgttttaaaataacagaagcaagcccattacatggtaacataagttgcatattttgtgagaaatgttttccaaagcaaaaaaaaaaaaaaaaaaaaccgtgggaaagtggcggtgcttcagttgtgcgagctgtcacgtcctaacacagctg

SEQ ID NO: 77732 - DNA, 642 bp, Homo sapiens
cacctcctgtgcgtccccgggcgcggcgcgacagtccggggtcctgcacgctgtggggagccgcgctgggggcgcctcggaaggacgcggttctccagccctttccgtgcctaaacaggaccgaggctgagtttcttcgcgtgggtggaaactaaagcggggttggggacagggtgctggccatgggtgcggttccaggagcgggcgcgggtccccgggcgggatgggggggsgctcaggcacagcggtggggcgagggcgcagcgccgggagcgcagatcccaggggccctcaccgcaataggtgatggaggtgtgcagcagcaccacgaagcattccacagggcacacatacagcaaagcagcacgctgtgagcagtaaagataggcaagtttgtcaattaaactttcataaagctgggggaaacagaagaaaacaaaccataacaacaaaaaataaagccgagaaacatttaagagatttattagtttgttttaaaataacagaagcaagcccattacatggtaacataagttgcatattttgtgagaaatgttttccaaagcaaaaaaaaaaaaaaaaaaaaccgtgggaaagtggcggtgcttcagttgtgcgagctgtcacgtcctaacacagctg

SEQ ID NO: 77733 - DNA, 642 bp, Homo sapiens
cacctcctgtgcgtccccgggcgcggcgcgacagtccggggtcctgcacgctgtggggagccgcgctgggggcgcctcggaaggacgcggttctccagccctttccgtgcctaaacaggaccgaggctgagtttcttcgcgtgggtggaaactaaagcggggttggggacagggtgctggccatgggtgcggttccaggagcgggcgcgggtccccgggcgggatgggggggggctcaggcacagcggtggggcgagggcrcagcgccgggagcgcagatcccaggggccctcaccgcaataggtgatggaggtgtgcagcagcaccacgaagcattccacagggcacacatacagcaaagcagcacgctgtgagcagtaaagataggcaagtttgtcaattaaactttcataaagctgggggaaacagaagaaaacaaaccataacaacaaaaaataaagccgagaaacatttaagagatttattagtttgttttaaaataacagaagcaagcccattacatggtaacataagttgcatattttgtgagaaatgttttccaaagcaaaaaaaaaaaaaaaaaaaaccgtgggaaagtggcggtgcttcagttgtgcgagctgtcacgtcctaacacagctg

SEQ ID NO: 77734 - DNA, 642 bp, Homo sapiens
cacctcctgtgcgtccccgggcgcggcgcgacagtccggggtcctgcacgctgtggggagccgcgctgggggcgcctcggaaggacgcggttctccagccctttccgtgcctaaacaggaccgaggctgagtttcttcgcgtgggtggaaactaaagcggggttggggacagggtgctggccatgggtgcggttccaggagcgggcgcgggtccccgggcgggatgggggggggctcaggcacagcggtggggcgagggcgcagcgccgggagcgcagatcccaggggccctcaccgcartaggtgatggaggtgtgcagcagcaccacgaagcattccacagggcacacatacagcaaagcagcacgctgtgagcagtaaagataggcaagtttgtcaattaaactttcataaagctgggggaaacagaagaaaacaaaccataacaacaaaaaataaagccgagaaacatttaagagatttattagtttgttttaaaataacagaagcaagcccattacatggtaacataagttgcatattttgtgagaaatgttttccaaagcaaaaaaaaaaaaaaaaaaaaccgtgggaaagtggcggtgcttcagttgtgcgagctgtcacgtcctaacacagctg

SEQ ID NO: 77735 - DNA, 642 bp, Homo sapiens
cacctcctgtgcgtccccgggcgcggcgcgacagtccggggtcctgcacgctgtggggagccgcgctgggggcgcctcggaaggacgcggttctccagccctttccgtgcctaaacaggaccgaggctgagtttcttcgcgtgggtggaaactaaagcggggttggggacagggtgctggccatgggtgcggttccaggagcgggcgcgggtccccgggcgggatgggggggggctcaggcacagcggtggggcgagggcgcagcgccgggagcgcagatcccaggggccctcaccgcaataggtgatggaggtgtgcagcagcaccacgaagcattccacagggcacacatacagcaaagcagcacgctgtkagcagtaaagataggcaagtttgtcaattaaactttcataaagctgggggaaacagaagaaaacaaaccataacaacaaaaaataaagccgagaaacatttaagagatttattagtttgttttaaaataacagaagcaagcccattacatggtaacataagttgcatattttgtgagaaatgttttccaaagcaaaaaaaaaaaaaaaaaaaaccgtgggaaagtggcggtgcttcagttgtgcgagctgtcacgtcctaacacagctg

SEQ ID NO: 77736 - DNA, 642 bp, Homo sapiens
cacctcctgtgcgtccccgggcgcggcgcgacagtccggggtcctgcacgctgtggggagccgcgctgggggcgcctcggaaggacgcggttctccagccctttccgtgcctaaacaggaccgaggctgagtttcttcgcgtgggtggaaactaaagcggggttggggacagggtgctggccatgggtgcggttccaggagcgggcgcgggtccccgggcgggatgggggggggctcaggcacagcggtggggcgagggcgcagcgccgggagcgcagatcccaggggccctcaccgcaataggtgatggaggtgtgcagcagcaccacgaagcattccacagggcacacatacagcaaagcagcacgctgtgagcagtaaagataggcaagtttgtcaattaaactttcataaagctgggggaaacagaagaaaacraaccataacaacaaaaaataaagccgagaaacatttaagagatttattagtttgttttaaaataacagaagcaagcccattacatggtaacataagttgcatattttgtgagaaatgttttccaaagcaaaaaaaaaaaaaaaaaaaaccgtgggaaagtggcggtgcttcagttgtgcgagctgtcacgtcctaacacagctg

SEQ ID NO: 77737 - DNA, 975 bp, Homo sapiens
atccggaatgaattcttcatgctggtgaaggtggctcaggaggctgccaaggtaagactccctggttcctgtgactttggggagtgggcggtaaatgctggcacaggagcactggaagtagcggggccttcccacgggagcttgcctgtgacctgggcattgtgccagctccggccagtactgctggcttgagttttcttggcaagtgttggtgtttcagatacggatcactgattccatgtgcagcttaacctaaaaaccagcataatgacagcagcctgatccccctgttaactgtgacagtgacagaaygaggggttgcttggagttgctcccagattctggagcagcccctggcaggggctgttgcatgagaagaagaaagggctctttctctgcaaatgggttcatgagggcccttgtgccgggctgccccttcccaatgccccttctatttcaggtgggagaggtctaccaacagctgcacgcagccatgagccaggcgccggtgaaagagaacatcccctactcctgggccagcttggcctgcgtgaaggcccaccactacacggcgctggcccactacttcactgccatcctcctcattgaccaccagggtaaggcctgtggggttcaggggtttggccagggctgtggtccagctgccccaggggtgattctgagctgagcgagagctaactgccttccctggagatgctcacaggctgaaggcagaggatgagaatgacccatgactgaggcagctgctgcacaggccatggtggggttaggggttataagcttctttagagagaggaagaggaggcacctttaattctgcctgtgtgcaagaggatgaattttcacctggaatctagaatctaagggaatgccaaaaatgctggcatcaagataggtaacattttaaggtaatattttaaaagaatccaaattaatgcaggccgggtacagtgg

SEQ ID NO: 77738 - DNA, 1296 bp, Homo sapiens
ctgggtggatcatgaggtcaggagttcgagaccagcctggccaagatgctgaaaccccgtctctactaaaaatagaaaaattagctgggcatagtggcacgtgcctgtaatcccagctactcgggaggctgaggcaggagaatcacttgaacccgggaggtggaggttgcagtgagccaagatcaccccactgcacccaagcctgggcgacagagcaaaactccatctcaaaaaaaaaaaaattctgaacctctggagcatgactggttccaatgagcaagagcttcggggtagccaggcatggtggctcacacatttgatcccagcaatttgggaggctaaggcaggaggatcrtttgaacccaggggtttgagaccagcctgggcaatgtagcaagacctcatctttacaaaaaaatttaaaaattggcctggcatgtggtggtgcatgtctgtagtcctaactactcaggaggctgaggtgggaggatcacttgagcccaggagttcaaggctgcagtgaactatgattgtgccattgcactccagcctggtgacagagtgagaccacactccaacctgagtgacagagtgagaccgtctcaaagaaaaaaaaagcttgagggtcagactgcctggggtgtgtccaggggcagaaaggagagcgaggatcccaaatgccttgtgaaactgcagaagaaaggaaactagagacatggtagaaagagaaatctctatgtgggtctgtggccagatccatgagaggggatttaacctgtggttctctttgcagtgaagccaggcatggatctggaccaccaggagaagtgcctgtcccagctctacgaccacatgccagaggggctgacacccttggccacactgaagaatgatcagcagcgccgacagctgggtgtgtgtccctctgcatccacatgtgggtcccactttgtgcccagctgatcctgctcacagacagccacagagaggtccctgaagagggcctgggagaggggggtgttccaagtcatcgtggccactttgggttcagaagtcatgaggtgcagtcctgagcctcagagggcttcccaggctgtgttctcatgggttccatagcacccaggcctcccactgtggagccaggactttaaccatctcccttggggtccatagggtggcctgtatcatgctaacagggaaggaaacgtttgttgatttctttatgcatggctgaattaccaagaacacctaatgactggtaatgaagtgtcctggtttggtctctgccatgtctca

SEQ ID NO: 77739 - DNA, 1296 bp, Homo sapiens
ctgggtggatcatgaggtcaggagttcgagaccagcctggccaagatgctgaaaccccgtctctactaaaaatagaaaaattagctgggcatagtggcacgtgcctgtaatcccagctactcgggaggctgaggcaggagaatcacttgaacccgggaggtggaggttgcagtgagccaagatcaccccactgcacccaagcctgggcgacagagcaaaactccatctcaaaaaaaaaaaaattctgaacctctggagcatgactggttccaatgagcaagagcttcggggtagccaggcatggtggctcacacatttgatcccagcaatttgggaggctaaggcaggaggatcgtttgaacccaggggtttgagaccagcctgggcaatgtagcaagacctcatctttacaaaaaaatttaaaaattggcctggcatgtggtggtgcatgtctgtagtcctaactactcaggaggctgaggtgggaggatcacttgagcccaggagttcaaggctgcagtgaactatgattgtgccattgcactccagcctggtgacagagtgagaccacactccaacctgagtgacagagtgagaccgtctcaaagaaaaaaaaagcttgagggtcagactgcctggggtgtgtccaggggcagaaaggagagcgaggatcccaaatgccttgtgaaactgcagaagaaaggaaactagagacatggtagaaagagaaatctctatgtgggtctgtggccagatccatgagaggggatttaacctgtggttctctttgcagtgaagccaggcatggatctggaccaccaggagaagtgcctgtcccagctctacgaccacatgccagaggggctgacacccttggccacactgaagaatgatcagcagcgccgacagctgggtgtgtgtccctctgcatccacatgtgggtcccactttgtgcccagctgatcctgctcacagacagccacagagaggtccctgaagagggcctgggakaggggggtgttccaagtcatcgtggccactttgggttcagaagtcatgaggtgcagtcctgagcctcagagggcttcccaggctgtgttctcatgggttccatagcacccaggcctcccactgtggagccaggactttaaccatctcccttggggtccatagggtggcctgtatcatgctaacagggaaggaaacgtttgttgatttctttatgcatggctgaattaccaagaacacctaatgactggtaatgaagtgtcctggtttggtctctgccatgtctca

SEQ ID NO: 77740 - DNA, 755 bp, Homo sapiens
acccagagacaatattaaaacaccctcttaagaaatgattcaacattaacaccccyaagggcacaaagggtgatactctacaggaaaacacaggcatcagtgactctaagtcaaaagtgattcagtactcagactcggaaggtgacaaagtttttttaaaaaaagtctagtttattaaactaataattttctcttaaatatgttcaaaaatgataataaaaatatgtttaaaaagtaaaggggagttccttcaaaaaggaacatacattcctcatgattaaaaacatcaaaatataattgtttaattggcattgttttttcttactagtggtccttaaaataatgaagcagcttacaggcaataatatagtggaggaaacacagtaatttttacaggaatgtcatacatagcaaatctaccttctagtttatgaaagatatagtttgtttgggggtaaggagatttctttgtgattcccaaaaacatatgagctgatttccttaccatattgcccatgtaattttaactgtctattgacaattatgtatttttatctttgctctgtcaaatctgtgtctggatttaaataagatcattaaatatatttctgaaatgtcccctttatatacgtccaaaatcactgaaagaaaaatctaactctagcaacactaaaaaaagcatgtaccaagacctctcttgaaccgttaatggtttacctttgtctctccaaagcttgtctttctaaagtatcaag

SEQ ID NO: 77741 - DNA, 1418 bp, Homo sapiens
ttacgccactctgctttcttaccgagtgaacaatgtcatcagaactatggatgtctcaaagaagtaagaaataagtgtatgaagtagattagttgatttaattactattcatctccctttctcctctcaaggaaatgagttaaggggttgaattaagacaattgtgaggtgtgggaggagcagttttatcttcctgatggtgtcctttcttcattctctaatggttgaggtggtcttcatctctatggtcacctctcaactaggcatgaaggcttcagctgacctaagcaacatcaatcttttatttcttgactttcagggaactctctctctgatgctgatttgcactctgctggaattctgcctagctgtgctcactgctgtgctgcggtggaaacaggcttactctgacttccctggggtgagtgtgctggccggcttcacttaaccttgcctagtgtatcttatccctgcactgtgttgagtatgtcaccaagagtggtagaaggaacaatcagtcagtcatgagatacacatgggagggcatttgcattgtgatggaagacagagaagaaaagcagatggcaattgagtagctgataagctgaaaattcactggatatgaaaatagttaatcatgagaaatcaactgagtcaatcttcctattttgtcagcgaagggaatgagactctgggaagttaaatgactggcctggcattatgctatgagtgtgtgcctttgctgaggacactagaacctggcttgcctcccttataagcagaaacaatttctgccacaaccactagtctctttaatagtattgacttggtaaagggcatttacacacgtaactggatccagtgaatgtcttatgctctgcatttgcccctggtgatcttaaaattcgtttgcctttttaaagctatattaaaaatgtattgttgaatcaaacccctatggacttatkgctttatttaactgaattaaaaagccttgatttatccaaaattgtattatagagtgtagaatgaatactagggtgataaattgcaattatttgaagaacctggtgatatgctctacttatcttggattagctaagaattctatgtatacagttggaaaaatggcatatatacatctatcttgaacctgattgaagtctgaagacctaacatattttgtttcttctagagtgtacttttcctgcctcacagttacattggtaattctggcatgtcctcaaaaatgactcatgactgtggatatgaagaactattgacttcttaagaaaaaagggagaaatattaatcagaaagttgattcttatgataatatggaaaagttaaccattatagaaaagcaaagcttgagtttcctaaatgtaagcttttaaagtaatgaacattaaaaaaaa

SEQ ID NO: 77742 - DNA, 722 bp, Homo sapiens
ggatccaattaaggagcagatgaattgttaggagctcagtcaagcattccaaaatgtgggaacacttcagaaggatgcagaattcgagggtcatacataaatcatgcagaaacaaaatgctgtggataaaagaaacatttccatttctttgaggtaccacagtattttaggatgaagcaccacacacaaggcctgaamgatcaaaggctgaagagatgctagactctggagtggagcacattggtggagggactggctgtcctgagcctccaagggccaccggctccctaggcctacatagcagctttggttcaccctttctctcagagctgttctttggctgaaattacaatgaggacaaggggaaaattgtgcctgtaaggtttgctttagaagcctaaatgattccattgaaagaaacagtggccatagctactgtggcaagggacttttgtcactagagacagatctcacttgatgcaacatgaggatgccaggaacacagagaccagagaggaaatgaatatcaggaggttttgaataaggccaatgggacagaagtgcctcaagagtgactttggaacctggggccatcaccaaatttgtaaactttgcaaaggtaccataatgtaaaccaaaaataaaattctaaggccccaaccatctgaatggacttcctcctcagccagggctcttttaaaatttaacccaaaagactggtt

SEQ ID NO: 77743 - DNA, 715 bp, Homo sapiens
ttttattttattttattttatttatttttgagacagagtcttgtctgttgcccaggttggagtgcagtgacttgatcttggcccactgtgacttccacctcccaggttcaagcagttctcctgcctcagcctccaaagtagctgagagtacaggtgcacatcaccacacccagttaatttttatatttttagtagagcttgggtttcaccatgttggcctggctggtctcaaacttctgacctcaggtgagctacctgctttggcctcccaaagtgctgggattacagggctgagtcaccgtgtccagcctaattttttgttttatttcttcctgggaacctggtaatgaaagagaatttacaccaaactgtgtagcataattatattgtttataatgtagaattggaaagttttgtcttattttagtgaactatgttggacaacatggtttagcagaacagagtgaaaaaacaaaagaaaaattaaaatatcttaaataaacttttctatcagaaaagttttagacttacagaagacttgtgaagggagcagagagttctcctgtgccccacacccagtttctccaattatgaacatcttactaatgtatgatgcaccattaatgaaccaatattgaacattattgctaactgaagtccacactttcttatcaagatttccttagattctkatctaatgttcttttctgttcca

SEQ ID NO: 77744 - DNA, 514 bp, Homo sapiens
atccttgcagctcaggaaatgtctcttgctagaactctcaggcttaaccaaaagacacttaccagacccttggtcgctttccttccagcagcaaagcccctgttacagacttgtccactgactctcaaagacattagctttcatatccagcattcagcagttcttcctaaatgaggatacaaacccagtgttgatgatggttatgcttctgtgtactaattattcaattcatttatacctctattgtttttcctggctgatttgctgctatttccacagtgctccagacggaaagaactgattaaagagaatcaactcagagcttccatcggcactccctttcctaaaataatctcctaccttctcccactcttttgtcaatattatttacccaaacarttgtccaagtttggtatttaaaattaatgcatagattttcaagagaaaatgatgaagtcatttgcagatacctgaaattagaagtagtagaacaatgactagtactcactgagaa

SEQ ID NO: 77745 - DNA, 649 bp, Homo sapiens
tgcagcatagcttttcttccccccaaatcctttgtactccatttgttcatctctccacctaccagcaccccaggccttggcagccactgaattttttaytgtttccatagttttgcagatttaatttggtgccttctcaatttataagagtctgttgtgatatagagcaatccttctcttcctggtatagagagggaaacacatttacaaatggagacttcattataaatacaaattgctcttacaaaaaagtaacttacactctgtttacaaagcctctcctgtgtatgctatttcacaaaattatcagctcaaattaatccttctgccagagaggcatattttggggtgacatattctagtctcccacagtatatttatctggtctcctataatatatttatgtatatttctggactttctgttctgttacattggtctatttttcaattctttcaccaataccatgctctcttcatcaccatagttttatactaagtctagaaagcaattaacttgtgtattttaatctcgtgttatgttatgtgtccctcaaaagttcatgtattggaaacttaattgccattttaacagtattaagaggtgtgggctttatgaagtaactaggccatgggggtccactccttat

SEQ ID NO: 77746 - DNA, 532 bp, Homo sapiens
tatcagatctcatgagacttattaactrtcacaaaaataacacaggaaaaacctgcccccatgattcaattacctcccacgggttccctcccatgactcgtgggaattatgggagctgcaattcaaggtgagccaagccctatcagatgctataagctgtatgctaagcaaatgcagaaagacacagataggacataagatcaagggcacatgtactgagcaaataatatttatgcagaaagacacagataggacataagatcaggggcacaagtactgaacaaatcattccgttgcattttgtagatgtgggttgcccagacggggtgttgtcattagaggccctggataagaaaacaagggataggaaaagaaacttggtaaggttcatggaggaagtagagtgtcataggatgggtcagtgataaagtctgcctgatgatttgtggaaacaaagaacatattctggtccaaataaaatattgagaaagggcatcagcagaagtaaaatgagtagacaaaggaagcactg

SEQ ID NO: 77747 - DNA, 532 bp, Homo sapiens
tatcagatctcatgagacttattaactgtcacaaaaataacacaggaaaaacctgcccccatgattcaattacctcccacgggttccctcccatgactcgtgggaattatgggagctgcaattcaaggtgagccaagccctatcagatgctataagctgtatgctaagcaaatgcagaaagacacagataggacataagatcaagggcacatgtactgagcaaataatatttatgcagaaagacacagataggacataagatcaggggcacaagtactgaacaaatcattccgttgcattttgtagatgtgggttgcccagacggggtgttgtcattagaggccctggwtaagaaaacaagggataggaaaagaaacttggtaaggttcatggaggaagtagagtgtcataggatgggtcagtgataaagtctgcctgatgatttgtggaaacaaagaacatattctggtccaaataaaatattgagaaagggcatcagcagaagtaaaatgagtagacaaaggaagcactg

SEQ ID NO: 77748 - DNA, 873 bp, Homo sapiens
ataaaattaaggccagtggaccaaatttagcctgcctcccattattgtaaataaagttttattggaacacaaccatgctcatttattacatgctgcttatagttgttttcacgcaataacagtagaattgagtgagtagatacaasaaagatgatatggcccacaaaaccaaaaatatttattatctggtcctttatagaaaatgtttgtctagaggattatattatagattatagctctccaccactactgtatgccaggtactttacttggctcccttgtgcattatctttaatgttctcaataaccttcccagttgttatgatcatgatattgcaggggaagagtgttagacaggtcaagggatctgtttaaagcagacatccggaattcaaacagtactttgtttatgttttctgactgcgagtcttttatgagctgtgctagggatataatcaccatgttacacttttaatgggaaaagttgttcttagtgccaaaacatgaccctaaaaaaatgtgctatgggaaagcagtccatatgcaatttggggaactgactctcagtccccaaagagtctttcctgataatctggctaccccaacattgtgtaccctatttcatttttattccagtaattataagtgcttgaaattattttatttatttggccatttctgtttggattgtttttctcctctcagtggaatgcaggatccttgccggcagagtttctcttccatttgcatctgtagcccaagagctgggagcatgccaggcacaagtgtcactgttcagcaagcatttgctgtgtggctcctcttagttaataataaacgtttatattgttttcttgtcctaaaatacaacat

SEQ ID NO: 77749 - DNA, 739 bp, Homo sapiens
tattttctccaattaagcagcaaggttaattttttatttttatttttttaatgcacaatacaggtagaagtgtaaattagccaacaagttttgtaaagcagtgtataaatatgtatcaaagaagctttaaatatgtttctagagtgctaatctaaggaaatactctgaaatgcaagtaaatatttaaatataaaggtattctttgaaaatattcttttataaagtaaaaaaccaggaaattcaatgtcctcaaataagaagcacatatgaaaaccatttaatatgctggaaaataaattcttgtgacctaataataatagttataaaacaggctatataaaactacatgacagtatgatttcaaccatggaaaatgatacttagtgaaagatgtcaatagcagtgataacaatggttatctatgcttatttcaattatttttacttgcttcactttgtttttctgtattttccaagtttgctgtcatcattagaaaaaaattatagaagaaaagagaaaaaccagaacaaaagcaaaactctcatcatataggctcaattagatgcagaaagagaagagaaacttaatsctgggcatctcaagttgacgtgagtttcctttgtggtccagcttctgtatagcatatctagcatcaaaaatccaacccaaaccaggtattgattttagtcgaccaccagatctatctgatacaaaacagaatgacaaagtgaccatccaa

SEQ ID NO: 77750 - DNA, 692 bp, Homo sapiens
ctcagcctcccaagtagatgagactacaggcacacaccaccacacctggctaattttttgtattttttgtaaagacagggttttgccatgttgcccaggctggtctcacactcctggcctcaagcgatctgcccacctcagcctcctaaagtgctaggattacaagtgtgagccactgcaaccggcrcataaaacaagatgattatcttctttgtgtatatgttagtgtaaatcactttttgccaggcatgatcttccctctcccccatcaagcagttctggaagaatctgcagaaagacacctttgagtttaacacaaaacaaagctttgttgatgctttaacctagtatggacaagaaaagacatcctggaaggctgtcatgtggacagcaagttctaagaaacaggttacacaagaacattgcctggtttattatttttaatttaatgaacattgttcctgtaaaaattgcagggcagatattacaggaaatcaacatctttttttagccctagagcagacagcccagtaatggccatggctggacaagtatgcctgacctgcattctaaccaaaggggcattgttgaaaagtgagaaggatttttcagttcaaggtctgagcctggatgctctgcccttctaacagagactgtcagcatggaggcgaattttgaaactaagttttgtg

SEQ ID NO: 77751 - DNA, 613 bp, Homo sapiens
aaaaaaaaaaaaaaaaaaaaaaaaaggctgggcatgttagtcccagctgtttgggagggtgaggcaggaggatcacttgagcccagaaggctgagtcagcagtgagccatgattgcaccactgtactctagcctacgtgacagggcgagatcctgtctcaaaaacaaaacaaaacaaaaacagaaaagaaagagccaatgaaacaaaacccacagagaagagaagcagaactgttgtaccaaagtaacagttctcaaatctttattttytttcttttgtgataagacacacaggccaaataagactgactgcaagttagcacaagagtgcaacgactctatgttatcctggctccctcattcaaggaaacacgccaaaacttaagtaaaaataatcttaaaacaaccttaattataaataagcaaatctcttacaaatggcactactttatcattaattagcaactactaagttgtagcatataacacagaagtatggtatcaagactgaaaactaattgattatttaattcctagcatcttttcaagttctcaaatcccaagatttgcctatggttgccaccaagagctatggaattattgtttggtaggtg

SEQ ID NO: 77752 - DNA, 613 bp, Homo sapiens
aaaaaaaaaaaaaaaaaaaaaaaaaggctgggcatgttagtcccagctgtttgggagggtgaggcaggaggatcacttgagcccagaaggctgagtcagcagtgagccatgattgcaccactgtactctagcctacgtgacagggcgagatcctgtctcaaaaacaaaacaaaacaaaaacagaaaagaaagagccaatgaaacaaaacccacagagaagagaagcagaactgttgtaccaaagtaacagttctcaaatctttattttctttcttttgtgataagacacacaggccaaataagactgactgcaagttagcacaagagtgcaacgactctatgttatcctggctccctcattcaaggaaacacgccaaawcttaagtaaaaataatcttaaaacaaccttaattataaataagcaaatctcttacaaatggcactactttatcattaattagcaactactaagttgtagcatataacacagaagtatggtatcaagactgaaaactaattgattatttaattcctagcatcttttcaagttctcaaatcccaagatttgcctatggttgccaccaagagctatggaattattgtttggtaggtg

SEQ ID NO: 77753 - DNA, 613 bp, Homo sapiens
aaaaaaaaaaaaaaaaaaaaaaaaaggctgggcatgttagtcccagctgtttgggagggtgaggcaggaggatcacttgagcccagaaggctgagtcagcagtgagccatgattgcaccactgtactctagcctacgtgacagggcgagatcctgtctcaaaaacaaaacaaaacaaaaacagaaaagaaagagccaatgaaacaaaacccacagagaagagaagcagaactgttgtaccaaagtaacagttctcaaatctttattttctttcttttgtgataagacacacaggccaaataagactgactgcaagttagcacaagagtgcaacgactctatgttatcctggctccctcattcaaggaaacacgccaaaacttaagtaaaaataatcttaaaacaacyttaattataaataagcaaatctcttacaaatggcactactttatcattaattagcaactactaagttgtagcatataacacagaagtatggtatcaagactgaaaactaattgattatttaattcctagcatcttttcaagttctcaaatcccaagatttgcctatggttgccaccaagagctatggaattattgtttggtaggtg

SEQ ID NO: 77754 - DNA, 768 bp, Homo sapiens
gcatttgttactgaataactcagcagtgaacttggcattccatagctaacctttccccttcattaatccccttctccatccccctcaaacacaggagtacaacaggatgccaggcgaactatgtaaccaaccatgcacgtgagcattttctcccagaattttgactagtcttgttctgcctcaaacactagacggggctcatgctgctcacaattaactgactctggccatgtggtggctgccctcaagatctgccacaaagagaacagcagttcaataaaatctcgaactctatttatagcccacttgaaacaagcagtttccttgaagcccaagaagccctccttgagaatgcagcaagtaatttactagtcccagtactcactggggaaataagagggaggaaatgcagcaagtgcattttttcaagtactgcacatatagaaagcattttgtcctacactctgtcccatttcaccctgatgtcaccagccaaggaagtagacaaaacaggcactagtaagaaatctctgttttatagattacaaaactgacrcctaggaggttaaattgctaatgaacagtggtggttggagaaggaggttaaaaaaattgtctaaagggtgagaataatttcttgctcatgcaatcaatctaaaattcagttaagtcattatttacctattaaaaaatatatacaactaagaagaaatgttttgtaaggcacttgcaagattaaaaattgttccttctccacttctaagaaga

SEQ ID NO: 77755 - DNA, 667 bp, Homo sapiens
catgccatttgtttgttaagtccttatttcagagaattcttaaaggtagtccaatcattagagggaattagccaggcggtacagaatatcatatgccagcctccactaaacagctagacaagtctaaatgtgccctccattttcagaagccttctttaatccagtctcaatgctctccactattaattccaaacaatgtttaaatatgagtgtgaggttaaagcaaggtgctttcatccttaaagtggttgtcattgtcagatatgagtaaatttgtgcccaggaaaacgtgaaaaggagagaagcttataaatttaaccagcggccgggaatggtgactcatgcctataatcccagtacttcaagaggccgtggcaggagaaacacttaagaccaggaatttgagacaagcctgggcaagatggcgagagaccccagtaactactaatatataccgtagtatatatataatatatagtagtatatgtatatatacatatatacatatatatgtattatagagtatatgtattatattgtatacatacatgtgcatatataatatatatagtagtatatatacrtatatataatatatatatacacatatgctgggcatggtgctgtgcacctgtggttctcagttactcaggagtctgaggcaaga

SEQ ID NO: 77756 - DNA, 617 bp, Homo sapiens
agttatctattttgtgtgccaaagtacagtaatacatttgtgaaataatcaactttttgaatatgtttggctagtctgatatcttaaaaggatttgacaagatactgagaacatattaccctatcttcaatacagtatagttgtagagattttttaaaaattatttttagaatcctatttwaaaaatctatggctgaagaaaaagaaatgtcaaaattttaattcacctgattgaaaaaaataatgcagtaaagtcatatatgctagaggcttgtcagtataattgtgaactgagaaattttgctattgataaaagcactattctagagagtacttcattagagaaaactgaaatacccaattgcatattttttctcttttagtctgcagctcatttgttgcattaaaactaactttgtgtttgtgcgtgtgtgtgtgtgcgtgtgtgtgtgccataactaaagatattagtcgacatagaattaatctaatttccttttttttggcattccaatttttttgtgaacttaatcagaaaaacaaatgagtttttaaaatttattgattgattgatttattatacttaagttctgggatacatgtgcagaatgtgcaca

SEQ ID NO: 77757 - DNA, 719 bp, Homo sapiens
tagacaatgttttcttttcccaaataaagatgacacctaatccctagatccttagaaaatacagaaacaagcagggaacttgtagcttgacagagtatggtagtgtatctctgagggttccctctaaaacagaagtcggcaagctttgttaataaaggtccagatagtaaatgctttaggctttacaggccacatacaatctgtgttgaagttycctttttatttatttatttttggttaacacctcaacaatttttttttaaattcactctgtacaaaaacaatccctgggatgaatttggcctgtgagccatggtttggcgacccctgctctaaaagaatctgagttggagaacgtggacagtattcagaatttggaatggaatcaaaagggttaatttcaagatctttagtgttttcttgatttccattatttacccaagaaatggctaaaatcaggaaaatcataagaaatcaaaaggattcttaatacagttagtgcacatatactcctcagaagaaagtattagataggaaaattaggtttaggattatttttactatcagagttatatgctgaaataataataatgccatattaaatgaacatgtggtaaacagaaacatagataccttagatgatttgctatatcatagatcacttagaattttaaagtctgtctatgttacttctctgaccattggtcattataagcaat

SEQ ID NO: 77758 - DNA, 994 bp, Homo sapiens
ctgtaaaggagaataaaaataccattctgactcatctcatagagacatcatgagaacaaaataasaacactgtgaagaggttgtcatacttttaagcattgattgagcgttagtgtgtggtaaatgatccagtgatttatcagtctgtagactggaccattgaaaactcattgtgactggaacttctgcctgcagttaggagggaggggagtatagtgggtagagatgagagaaatttggacatttgttattatataacactaggtcccagttcaaaatacatcctgtattgttgagaattaagtctattaagttgttttcaggtctggtgagatagaattagctgccaggtaaaaatacaaaatcaggagaaattatgtcaaaacctaagttcatgttttttatgcttacatggcctaatagaacttaatctatttcattacaaggagaaatagtactgattgcatgtagaaggttgctgtaagaaataactctacctaaaaacaaaaatcagaatcatctcaacattgaacccacctattaacgaaattgatcggaattctgttttccctaggatgtaattatcgggggtcattatgctgcttacatgccaaccttgtctatcatttttagggactcaaaggctcaaagggagacatgggggacccaggtatgacaggtgaaaaaggaggaattggacttcctggattaccggtatgtttatactttctgtttgtttatactttttatattatgttcttattaagataaattaaacaatcagaaaagagttatattattagctgcaatctcatctagtggttcatctcatatttttattttgaaatatttgaggtattattggttaattactctagggaactcaaattgtaaggcatgtaaccaaatgaattataaaggaagccttcatgttttcctgaattgttttccctagaagataataaaataaacatagttggccactttaatttag

SEQ ID NO: 77759 - DNA, 994 bp, Homo sapiens
ctgtaaaggagaataaaaataccattctgactcatctcatagagacatcatgagaacaaaataagaacactgtgaagaggttgtcatacttttaagcattgattgagcgttagtgtgtggtaaatgatccagtgatttaycagtctgtagactggaccattgaaaactcattgtgactggaacttctgcctgcagttaggagggaggggagtatagtgggtagagatgagagaaatttggacatttgttattatataacactaggtcccagttcaaaatacatcctgtattgttgagaattaagtctattaagttgttttcaggtctggtgagatagaattagctgccaggtaaaaatacaaaatcaggagaaattatgtcaaaacctaagttcatgttttttatgcttacatggcctaatagaacttaatctatttcattacaaggagaaatagtactgattgcatgtagaaggttgctgtaagaaataactctacctaaaaacaaaaatcagaatcatctcaacattgaacccacctattaacgaaattgatcggaattctgttttccctaggatgtaattatcgggggtcattatgctgcttacatgccaaccttgtctatcatttttagggactcaaaggctcaaagggagacatgggggacccaggtatgacaggtgaaaaaggaggaattggacttcctggattaccggtatgtttatactttctgtttgtttatactttttatattatgttcttattaagataaattaaacaatcagaaaagagttatattattagctgcaatctcatctagtggttcatctcatatttttattttgaaatatttgaggtattattggttaattactctagggaactcaaattgtaaggcatgtaaccaaatgaattataaaggaagccttcatgttttcctgaattgttttccctagaagataataaaataaacatagttggccactttaatttag

SEQ ID NO: 77760 - DNA, 691 bp, Homo sapiens
attctgattacctgctccaccctgactcattctgattacctgctacctgctccaccctaacttattctccaccctgcataaccaaccatttttcctgccaaagcactcaccccgtcattctctttaaattagccaatcggaattagttgagcctgtgcatctaaccctagccaatagggcaatgacacagcaacaggggccacatgtatgagggawaagaaccccttcccctcccttgtccaagtgtgtgctcaccattgttccatctgtaagggcacacccttctatagaagtcacttgccttgctgagaattaaaaagaaaattttatattcgagtgctatttcttttgtggcaccaaaactttgtaacacacactattccctttggctagaatgttcttccaaactctacttgcagactttccatttttcaaatctcagccctttctcaaggtagtattgctaaattacttaaagcaggtctctccttttcattttctcatggacaccttttcctttccttcataacaattgtcccaacccaaacatatatttatttgtatgtttgcttaaaatgacaagcattagcatttatttccatttacagtgtgaggacaatattccaagtgcttggagtctagcatctcattttagcctcacaacacaaaatgagatatataaccattttat

SEQ ID NO: 77761 - DNA, 626 bp, Homo sapiens
ccctcaaatcctccatctgcagggacatcagaaatatgctttacatatcaaatgatatgtgtaaatatttttcttacaaaaatagggcattatatactttgctcttccccttgattttatcacttataaatatatctttgagattactccttgttagtacagtgttccattgtatgagtgcaccatggtttatttaatcagaccccagctaaagacttggctttragtcttttgtcaagataagcaataccactacagacacccttgtacatgccccttttgcacgtgggcaatgcacagttatatctggaggacaaactagaagcagagcggctggatcaaagggcacctgtgttctatcacctgactgatagaacaaatccccctgcagggcggggcagaacctcctccctctactctagtcaccccgtgtcctcatcaaacgttgtgatctttgccagcctactgaatgaaaaatagctcttgttttattttgcatttctttgattttgatggaggctgggtattttttcatctgtttcaaagtcacctgtattcctttttctgtgaacggactgctttcaagcccttcggccatttctctatgaagtatggaacaaatattt

SEQ ID NO: 77762 - DNA, 626 bp, Homo sapiens
ccctcaaatcctccatctgcagggacatcagaaatatgctttacatatcaaatgatatgtgtaaatatttttcttacaaaaatagggcattatatactttgctcttccccttgattttatcacttataaatatatctttgagattactccttgttagtacagtgttccattgtatgagtgcaccatggtttatttaatcagaccccagctaaagacttggctttaagtcttttgtcaagataagcaataccactacagacacccttgtacatgccccttttgcacgtgggcaatgcacagttatatctggaggacaaactagaagcagagcggctggatcaaagggcrcctgtgttctatcacctgactgatagaacaaatccccctgcagggcggggcagaacctcctccctctactctagtcaccccgtgtcctcatcaaacgttgtgatctttgccagcctactgaatgaaaaatagctcttgttttattttgcatttctttgattttgatggaggctgggtattttttcatctgtttcaaagtcacctgtattcctttttctgtgaacggactgctttcaagcccttcggccatttctctatgaagtatggaacaaatattt

SEQ ID NO: 77763 - DNA, 626 bp, Homo sapiens
ccctcaaatcctccatctgcagggacatcagaaatatgctttacatatcaaatgatatgtgtaaatatttttcttacaaaaatagggcattatatactttgctcttccccttgattttatcacttataaatatatctttgagattactccttgttagtacagtgttccattgtatgagtgcaccatggtttatttaatcagaccccagctaaagacttggctttaagtcttttgtcaagataagcaataccactacagacacccttgtacatgccccttttgcacgtgggcaatgcacagttatatctggaggacaaactagaagcagagcggctggatcaaagggcacctgtgttctatcacctgactgatagaacaaatccccctgcagggcggggcagaacctcctccctctactctagtcaccccgtgtcctcatcaaacgttgtgatctttgccagcctactgaatgaaaaatagctcttgttttattttgcatttctttgattttgatggaggctgggtattttttcatctgtttcaaagtcacctgtattcctttttctgtgarcggactgctttcaagcccttcggccatttctctatgaagtatggaacaaatattt

SEQ ID NO: 77764 - DNA, 724 bp, Homo sapiens
gatcctgattactctaagaagggtaaggtgagagtcatgtcttagaagaattcatctggtaatgagatgaagaggggattggagaggggaaaagctggaaatgggcagtggacaaggcaatcatgcaggcaagcagcgaggagagctgtgctaaggaagtgccaatgaacctggagaagcgacaggaaggtttccagaagcctgctttgaacgtttgatttgtctaaccttaaaagtgttcattcatacagctcttgagagcatgctagggtttgtaagacattaactgaggggcttctgtgtcctgaggtgaacattttgaaaatatttccagatgctcagccaactcaacaaaaatcattaaaaaaccaaaccaaccaamcaaacaaacaaaaacaataatagcaggaatactctggccacatcttagatcaaagtgataaggatgtctgaaaatctttaacccagagacaagaactcagtaaatataaataacgatatgatttgcatcttagacaagttgaattatgtatttctaggcagaaacccaggaacactggtgtctgcaaatgggacacacagggatatagctacatttctgtgcttcctttttcttacatgttaagtgaggcaactggaccagctctctagcatcacttctcgtagagtttatgggttttttcatttaattttttcgaatgttgggatacctgggtagacaggt

SEQ ID NO: 77765 - DNA, 1258 bp, Homo sapiens
  misc_feature (1)...(1258): n = A,T,C or G
tatggaccccttaccgccaaggtgcggtgtggccagaggtggccctggctcctgttgcccaggtctcagggtggtgcagacttgagcacagggaaagacaccactccttccgcatcattcaatctgaaaatggactgtggagcccagcagcttcatattggtcggtcatccctttggattgaacattggccctacaaaacttctcttttcaaatgcaactctctcttgctgtcctccccatccctcttttcccatgcagggagtgggacaatataccaggcccatttctggcattgaggatggaaccggggcagatgggaggtaaagaaaaaggagaaaaygtgttttttgtttgttttttttttttttttttttttttcctaactctgagttgaccgtttcaggagtggcttgggttgccaccattggggagtgtgacggacccaatgggccatgaaatttcaaagctttttggggttgaaggggaggggcacaccaggaaggggcagccactctgcagtttcactcaaatcctggctgaaaccccagccctcacctccgggagcctgcagttgtgaaaatacgttctttctaaatgtgtctttatttctaggcacatttaaatatgcttagcatttgacctgcacataacgagagctcaaaaaatgcctactaaaaaaaaaaataaacaaatgcaagcgtgaggccaaggccggctcccagcattgctgaccctcagcccaccatgtgtctcattttctaggcagggcttatgttccaaaccagccnnnnnnnnnnnnnnnnnnnnnnnnnnnnnnnnnnnnnnnnnnnnnnnnnnnnnnnnnnnnnnnnnnnnnnnnnnnnnnnnnnnnnnnnnnnnnnnnnnnntgtaaatagctgggaaggtccacacacacctcctactaccaaaatgcaaaaaaaataaaaaaaaaaaaaagagagacggccattgtgtaccagggacctgcagaagacataattgctaaactagaggacagtcacactttcagcttttgcagcaggtctgaatagtagcaaataggagcaaaagcaaacaaaacttcagaaatacagctgatgaaggccccgcccctgaagcgtagcttttgcgcaactttagagtaagaactcttatgccattgtcaggccattcccaatacaggtgagggagcatctgctacagtgtggatcggtcagaatgggggccaaggtgggcatggagaagcagagggtaatc

SEQ ID NO: 77766 - DNA, 1219 bp, Homo sapiens
atccacctttctgtccctcatagtatctgtcacagtcagagccttacaaggcccaagtgctttctaggtaccggctgggtgaatgaacaaggggccaggtcctgtaatcccacaatataagctctgtggaactgggaatgagggtcctgacctcrttgccgcatgccagtgagggttggggcacaaactctgcagccaggggttcaatccggacccctctccctgccagctgcatgaccctgggcaagtaactaagcctcaggttggctcaatttcttcattggtaaagtgggaataatgagagtatgtatttcatagaattgttgtgaggactgcatgcatataaagaaagtgcttaggacagtgcctggcagcacgggtatgttaaatacttaataaaggtagtgatcattgggagaggaaatacggcctggattctcaagccagcctgcctggattcaaacctggcactgctgcttgttagctgtgtgtccagaggcaaacttcttagtctgtctgggtctcagtttgcttacctgtcagacagggtgataataattttacctgtttccagaactaatattcagttgctgtatgcaacagtgcagccatacttgcagctacaatattcaaatatgttcatagcagctgttaacagccagcatatctccagagggccacccagtcccctctcagacctttcctgaaagctagcagaggcaacatttataactaggatgaaagggctgttcttccaatggggtttatcactggattaaaaaaaattccaaaaaccctttaagaaatgacagaatcattttttggagtaaaccattcttttattcatccattcattcaataaatatttattctctgaccccagatgtcagagctaaagaaaactaagctttggtccttgccctcaagagactcacaatatagtgggaaaaaaataatcagaaagtaaggggctgagtaacagaatgcacagggcctggggaatctctcaaggtgacaatgacagaggacaaatttaactggcagaccaaggtgggacactttttttatccagcagtggcctctctactttatactcactcttcctatgtagggttgccagatttagcaaataaaaatagaagatgctcaattaaatgtgaatttcaggtaaacaacaaaggaactttttagtgtctaagtatgtcccaacataaatgca

SEQ ID NO: 77767 - DNA, 647 bp, Homo sapiens
aaaaatacaaaaaattagctgggtgtggtggtgggcccctgtaatcccatctactcaggaggctgagacaggagaatcgcttgaacctgggaggtggaggytgcggtgagccaggatcgtaccactgcactccagcctggacgacagtgcaagactctgtctcaaaaaaaataaataaataaaaataaaagtaacacctgcttcagagagtgttgggaagccctgatgaaataaagttcctaagatgctagagctggtgatgcttagtgtgccccagccagcaacagtaatggaaacttacatcagatggtagcatctgagaggttggtagaggagatgagggagccaggaaaggatcagccagactcagaggtggtaaaccagttgtgggcacctggtgaggaggaactaaaggtctaaatgactgtgtctactcaggctccatctgagggcagatctgatttggggaggggaatctcacagcaatggcaggttccaggacagggtctgtgcgtgcttgttatgctctattcaagacagtagccccagggaagccaggtcctgctccacccaaagagaggggacagataagggacaggcacaggagcctccagcagcatcagacttgggcaaggcagaaccattgg

SEQ ID NO: 77768 - DNA, 647 bp, Homo sapiens
aaaaatacaaaaaattagctgggtgtggtggtgggcccctgtaatcccatctactcaggaggctgagacaggagaatcgcttgaacctgggaggtggaggctgcggtgagccaggatcgtaccactgyactccagcctggacgacagtgcaagactctgtctcaaaaaaaataaataaataaaaataaaagtaacacctgcttcagagagtgttgggaagccctgatgaaataaagttcctaagatgctagagctggtgatgcttagtgtgccccagccagcaacagtaatggaaacttacatcagatggtagcatctgagaggttggtagaggagatgagggagccaggaaaggatcagccagactcagaggtggtaaaccagttgtgggcacctggtgaggaggaactaaaggtctaaatgactgtgtctactcaggctccatctgagggcagatctgatttggggaggggaatctcacagcaatggcaggttccaggacagggtctgtgcgtgcttgttatgctctattcaagacagtagccccagggaagccaggtcctgctccacccaaagagaggggacagataagggacaggcacaggagcctccagcagcatcagacttgggcaaggcagaaccattgg

SEQ ID NO: 77769 - DNA, 598 bp, Homo sapiens
tcctgctgggaagagagcgcagatctaaacagaacagggcgcttgtggccacaggtcgtctctgtctggatcacatcagtgttttgcccacctttgttgtcactcaaactcctgacctcaagtgatccgcccacctcggcytcctagaatgctgggattacaggtgtgagccaccatgcccactggctttcattactttcactctcctccagctctcatatttactgtccccgtcttctgtgctttacaaattctctaaccagttgtggccaaacctggtgctgaatagattcatactttttcagcttaacccaagcctaggttccctaaggctacgtccagtcctgctacgtgctctgttttgagtttcacctgtgcctgcttctctgccctagaagagaagatgggatcatctgtgctgcttcttcaaccttaaaatggatttcttgcccttttctccctttttaagtatcaatgtatgaaatccacctgtaccaccctttctgccatacaaccgctgccacatctggctcctagaacctgttttgctttcatagatggatctcggaaccaagtgttaacttcatttttaaacccc

SEQ ID NO: 77770 - DNA, 679 bp, Homo sapiens
attacaggattagtcttggttctaatttatattattaaaaagcaaatcacttgccaggtttaaaacttaaactaatttcataacaaatcctgacatcaaggtgaggctaccscatggtgtagtcaactgtacctacaattctcatttgtggagaaaccccaaggaacctacaggaatggaggctaggcatgcagtaccacgtcccacaccctcacaggcctggctgacccaggctggtcttaccagaacagacttttggttagcctggagcctggagatggcattttcattcaacttgagtttccgctccaagtctaactgggtgcactggagttcagcctaaaagtggaaagcagagaattaaggaggaaggagcccaatgcacacagaaggacacgggcactctccagccctgacatccccgcccttcttccctggaaagaagtttaacttctgtggctgatctcagaaaccagccgggaggcacgaagggttggcggtgagcccgtgccctcctggggctgcagtcagcatgagtcagcgaaaatacagtgagcacggatgccgtgctgctcaccatttcaagcattttgtggattaccccacaccatccttgccatacccatactagctgtaaaccagaaataaaatcctaaacccccaacaatctgaatggatc

SEQ ID NO: 77771 - DNA, 679 bp, Homo sapiens
attacaggattagtcttggttctaatttatattattaaaaagcaaatcacttgccaggtttaaaacttaaactaatttcataacaaatcctgacatcaaggtgaggctaccgcayggtgtagtcaactgtacctacaattctcatttgtggagaaaccccaaggaacctacaggaatggaggctaggcatgcagtaccacgtcccacaccctcacaggcctggctgacccaggctggtcttaccagaacagacttttggttagcctggagcctggagatggcattttcattcaacttgagtttccgctccaagtctaactgggtgcactggagttcagcctaaaagtggaaagcagagaattaaggaggaaggagcccaatgcacacagaaggacacgggcactctccagccctgacatccccgcccttcttccctggaaagaagtttaacttctgtggctgatctcagaaaccagccgggaggcacgaagggttggcggtgagcccgtgccctcctggggctgcagtcagcatgagtcagcgaaaatacagtgagcacggatgccgtgctgctcaccatttcaagcattttgtggattaccccacaccatccttgccatacccatactagctgtaaaccagaaataaaatcctaaacccccaacaatctgaatggatc

SEQ ID NO: 77772 - DNA, 490 bp, Homo sapiens
tgggataggaagtggctgctcctgagtccctccagttttcttgagtcccagattccttaacacaacttcactgggctttctttaaacttcttagttgatactcacccatttcttctactatttacacacaatgcacacattctattttgaatctcctggttttccattcttaaatttcatctttcctgtagttggacccgcagaacatgccagcctcaactcccaaagagcatttctagcacaaagctattattttcattcatgtgttgtctcgagcttgagagcagatcagcctytgaaagctgccactgctgctgccaccaccagcaccatcatagctgactacacattctgtgcagggactgtgctaagcagggaatacattatctacatgagatacagggttttacagataagaaaacagtaacttaatgagattgggtaactgacccaaacccatacatctgatatatagtggagtcagaattca

SEQ ID NO: 77773 - DNA, 628 bp, Homo sapiens
gtgtctgcctggggcagcctgtgaagctgtttctcaggccctgaacatggacacatggcttctcagctggcctgggtgcatgtctgctaagcatggcccacagggtttttctcaggttcaggatgtgggctcatagcttcttggttggccaggagtggcctgaaagggtttttcaggctggcaatgtgggggtacagctactggatcagccttagagtgtgccttccaggggcaccctgtgggattgtttctcaggcctgggacgtggttggacagctggtcagccagcctgaagggcatgtctgcaggaagtgagccacaatgctgcatcataggccctgatcacgggtgtgggggctttgggtaggacaggggcatgtcaacaatgggagtgggtaccacagggttgtttctcaggctgtgggcacaggagtatagacattgtgctgatagggcagcatgtcagctgcttagtggctcaaggacatctcctgctttgtagagrgtggtcagcagtttggctggctcaagagcatatttgccctgggtgggcttgccacatagttcctctgtctcaaagtgcagatggttggggtcgtcttctctgttgcacaggaccagaatcaca

SEQ ID NO: 77774 - DNA, 695 bp, Homo sapiens
ctttgagcccaggaggttgaggctgtggtgagccatgttcccacaactgcactccagcccaagtgacagagcaagaccytgtctcagaaagaaaaaaaaaatgctagaatgataggtggagaaaaaaatatctagaagctgtttatgtttgggaggaatatttttaggtgctctaacttatttctaaactaatggattacaagagctgataaaaatgtaggatttcttaataaggataattttaataagaaatgaactagtggagtagaatttattgtaacggatgtgctccatttatagcacaaacgatctgttaacaaaatctgttactgaataaagaaaatatctacatgaaatagattgacctgtcaattcagtcaaaataatacacacagccaaaagaccttctgctttccacattcccttctttcagcttttgtgcacttcagaggcacttgaggaagcaaagagattcagtccaagatcttagtcttgcctgcttcacagagtttgcacgttgcagatttgcagtggaagctgtgagtaaatttgattccctcacagaagtacattttattcttctgggccacccagaatctgtctattactctaaatgtagagaggcctatctttataaagaaaactgttggtgtcagagttatttacagagcatgtgaaactttaacttgtcactt

SEQ ID NO: 77775 - DNA, 2188 bp, Homo sapiens
ctttccattagaatttttgtgtgtaacaatagactgtggtcactaacttaatattctatttccaaatccaaatttaaacgctctacctatgagttttgtattatcatattttaaaaggcagttctgctgataaataattctcagcgagttatttctctttatattagtagataattactccattattttcacactgcacatttgatgtttttattagaaaactgattttcacttaattagcaataatggtaatatggcttaaatatatttcagattactttgcaacaaactgtatttatttaaaataatttatatttgcttagcccctagaaaaatgcctagcaccaaaaaggcagacagtgtataaattttatttaaaagagtgaatgaattaatatagaaacaatatgcctttgtatcagcaaaaacaaataaaagttaacatttaattaataaattaaataaatacatataatactaaaagacctcaattcaggtaagaaatatttaaaatactagtgtaatattaaaatatatgacttacacaatttttacaagtaaaacaatgacatgaatttgaagtcaatttttttaaatgtgcctataacttcaaaaacatttatctgtatttgaatataatttcaatttaaaagtcaaaagcacatattgtattcttatcatgcaggttttatttttctgttctttagttgtctctatcaccagtttgtgggactttaaaaatagggattataacattaattttggaccctttagtttttagagtgatgtaaagtaggaaacaggcactcagtatgtatttagagattaaatcaattagcaattatagatactgcttcataatcttttcttattgcaaagctgcactggtataatcccatttttaaatattctatatcaattattaataacaattgtcttgtggtcagaatatagcttatatatgcatttcttaaacacattgcatttattgactcttctttcagctttctgcccactcatcacaatatcttcttagtattcatacagttcatttagtattttttttgaaaagagtacactgaatatccttcttccttattatttggttttacacattttttgaatagaaggaaatgcctgtccctggatagttctcctttttacacttttcttacctttctttctaattttattacttgaccacaagttgattttttatctatataatttttatgccaatcccagagatctgttttccaccccaggtagtctgttgctgaagctttttgttttaaaatacaggttttattgatattcaagtatggccaggccaacagatcaggagactactgccattgaaaaggtagttgggtatatgcacagatcccaaaaggggcatgtcaccatgccacagggaagcaccatggttggccaggaggcacagggagcaacgggaaaacctggacatttttttttttttaagagttgagttttcactctatcacccaggctagagtgcagtgacatgattgttgctcatggcaacttcaaactcctaggctaaggggatcctcctgcttccacctcccaaagcactggaattagagatgtgagtcactgcacctagcatggcaagattctgttttgtggttttcacagaaaggaattgttagggtaagcacaattaggattttctagttagaataatttcagtggcttctgggacataggtgctgttcctagttgcctgatacctggccctggcataactaaggcaagggaataatatccctgagtatgagagcctgctaaagtagttgtgggtgagggtctggcttgggacctgtcagtatccatatgaaagtcacatttgctggcaagcattttgccatctgtaataattagctaaccgtgtgtgggaggaaattggggaacggaggatggygggcagtatctccagggtatgcaaggctgcagacatcagagcatcaaaaatatagatcataaaaagacatgcttattataaactttcataattatttttaaactatgcatttttgatccttattgtgatccattagattattacatatcaaaccaagtactcacgagatgttaggcaaactttcagaaatcttgttgacttttacttaccagattacagcagtttaaggattcaatgaacctg

SEQ ID NO: 77776 - DNA, 549 bp, Homo sapiens
gaaattgagaaatttagcactggaaaatcgtattttgtaccaccagttaagaagcttgcaatatttttatatattatgacctttgtagttaaaattctcagctgtttttcctgagaagagtgagttatatatacatacattcaatttttatttattattgcttytgttctcatacaagtaatattggttcaatacgtaacacttagaaaaaagtaaaaacaatgaaataggccgggcgcagtggctcacgcctgtaatcccagcactttgggaggcggaggtgggcggatcacgaggtcaggagatcgagaccacggcgaaaccccgtctctactaaaaatacaaaaaattagccgggcgcggtgacgggcgcctgtagtcccagctactctggaggctgaggcaggagaatggcgtgaacccgggaggcggagcttgcagtgagccgagattgtgccactgcactgcagcctgagcgacagagcgagactccatctcaaaaaaaaaaaaagaaaagaaaagaaaaagaaataaataaaaagaattttt

SEQ ID NO: 77777 - DNA, 1347 bp, Homo sapiens
cggccttttaatattcaaacatctgcccccacttcacacacacacacacacacacacacacacacacacacagagagagagagagagagagagagagagagagagagagcaggtctttgcttattgaagggaagcagggaattggtcacagtgagttgattcatccttacaatttgcaagtgactagagccaaagaggggtgtaaaccagaatcttctagagcaagcttgtccaacccgtggcctgaggactgcatgcagcccaggacagctttgaatgctgcccaacacaaattcataaactttattaaaacattatgagatttatgcacggacccttttttttttttctttttttagctcatcagctattgttagtgtcagtgtattttatgtgtgtcccaagacaattctccttcttccaatgtggcccagggcagccaaaagattggacacccctgttatagaacattgcctttctctgcaaaaagaggcagtcggcaagagttggcaatgagggtggcgagaggttgtacagtacacataaaaggaatacaacccacttggtccacagaaggggctgaagctggtattctgttctcccttgggacagaggctgctggaaggtgaccagatgtttcactcaacagacattgatgaagtgaagctatgagacagccactgggattaaactggtgaacaagacagacatggttcctccctcattaagagacattatgtaggtaaacaaatacataaatgagctaattccacattatggtaagtgctgtgaaggaggtgatgagagttaagctgaagcctaatgaataagttctttgttgcagacaacagaatccactctagctagctaagcagaaagggatttgttacagagtgttaattcattacagaatttccaggaggatcagggaaccatgcttggatgccacaaaacaaggacaacccagccaggaggaggcccagccacaccatgggacctccctgcttcgactctcacctccccctctgacacacggcctggcaccagcacttgctcctgtctaagctgctgaagaagaaccaatacctgcatgtgacctgctcagatggctcatgtatgccttccaagtcatgcrgggatgctcctgcttgtcagacccaggtccgtagaagagctctggctttggggagggctgggaaaaggctttttttttttttttttaatggagtcttgctctgtggcccaggctggaatgcaacggtgtgatcttggctcactgcaacctccgcctcccaggtccaagcaattctcctgactcagcctccccagtagacgagattacaggca

SEQ ID NO: 77778 - DNA, 1347 bp, Homo sapiens
cggccttttaatattcaaacatctgcccccacttcacacacacacacacacacacacacacacacacacacagagagagagagagagagagagagagagagagagagagcaggtctttgcttattgaagggaagcagggaattggtcacagtgagttgattcatccttacaatttgcaagtgactagagccaaagaggggtgtaaaccagaatcttctagagcaagcttgtccaacccgtggcctgaggactgcatgcagcccaggacagctttgaatgctgcccaacacaaattcataaactttattaaaacattatgagatttatgcacggacccttttttttttttctttttttagctcatcagctattgttagtgtcagtgtattttatgtgtgtcccaagacaattctccttcttccaatgtggcccagggcagccaaaagattggacacccctgttatagaacattgcctttctctgcaaaaagaggcagtcggcaagagttggcaatgagggtggcgagaggttgtacagtacacataaaaggaatacaacccacttggtccacagaaggggctgaagctggtattctgttctcccttgggacagaggctgctggaaggtgaccagatgtttcactcaacagacattgatgaagtgaagctatgagacagccactgggattaaactggtgaacaagacagacatggttcctccctcattaagagacattatgtaggtaaacaaatacataaatgagctaattccacattatggtaagtgctgtgaaggaggtgatgagagttaagctgaagcctaatgaataagttctttgttgcagacaacagaatccactctagctagctaagcagaaagggatttgttacagagtgttaattcattacagaatttccaggaggatcagggaaccatgcttggatgccacaaaacaaggacaacccagccaggaggaggcccagccacaccatgggacctccctgcttcgactctcacctccccctctgacacacggcctggcaccagcacttgctcctgtctaagctgctgaagaagaaccaatacctgcatgtgacctgctcagatggctcatgtatgccttccaagtcatgcggggatgctcctgcttgtcagacccaggtccstagaagagctctggctttggggagggctgggaaaaggctttttttttttttttttaatggagtcttgctctgtggcccaggctggaatgcaacggtgtgatcttggctcactgcaacctccgcctcccaggtccaagcaattctcctgactcagcctccccagtagacgagattacaggca

SEQ ID NO: 77779 - DNA, 1347 bp, Homo sapiens
cggccttttaatattcaaacatctgcccccacttcacacacacacacacacacacacacacacacacacacagagagagagagagagagagagagagagagagagagagcaggtctttgcttattgaagggaagcagggaattggtcacagtgagttgattcatccttacaatttgcaagtgactagagccaaagaggggtgtaaaccagaatcttctagagcaagcttgtccaacccgtggcctgaggactgcatgcagcccaggacagctttgaatgctgcccaacacaaattcataaactttattaaaacattatgagatttatgcacggacccttttttttttttctttttttagctcatcagctattgttagtgtcagtgtattttatgtgtgtcccaagacaattctccttcttccaatgtggcccagggcagccaaaagattggacacccctgttatagaacattgcctttctctgcaaaaagaggcagtcggcaagagttggcaatgagggtggcgagaggttgtacagtacacataaaaggaatacaacccacttggtccacagaaggggctgaagctggtattctgttctcccttgggacagaggctgctggaaggtgaccagatgtttcactcaacagacattgatgaagtgaagctatgagacagccactgggattaaactggtgaacaagacagacatggttcctccctcattaagagacattatgtaggtaaacaaatacataaatgagctaattccacattatggtaagtgctgtgaaggaggtgatgagagttaagctgaagcctaatgaataagttctttgttgcagacaacagaatccactctagctagctaagcagaaagggatttgttacagagtgttaattcattacagaatttccaggaggatcagggaaccatgcttggatgccacaaaacaaggacaacccagccaggaggaggcccagccacaccatgggacctccctgcttcgactctcacctccccctctgacacacggcctggcaccagcacttgctcctgtctaagctgctgaagaagaaccaatacctgcatgtgacctgctcagatggctcatgtatgccttccaagtcatgcggggatgctcctgcttgtcagacccaggtccgtagaagagctctggctttggggagggctgggaaaaggctttttttttttttttttaatggagtcttgctctgtggcccaggctggaatgcaacggtgygatcttggctcactgcaacctccgcctcccaggtccaagcaattctcctgactcagcctccccagtagacgagattacaggca

SEQ ID NO: 77780 - DNA, 619 bp, Homo sapiens
aagatggttcctggcattaaacaacatctgcaaaacagtgagcaagaacaagatatttctagaggtaagtaaggtccactaaaacaacataaaatcatagttaataacatcataaagtcaatggctgattctatgttttaaaatcagacaaacaaaccaataaagatcacacctaaaacatgtgcaactgtatagcataaaggagttcagaatgagactcaaccaaattattgcgatcatgaatattacacatcctgagaaacaggaactgtcatagcagtcttgaccacatgttcacatactcaagttggataaaaggaaaagtccaaaatcttggcacaccaaggtaaaaaggtggatatatatttaattaacatttaaaacaaattttcccatttctccacaaagagctcattttttaaatcttaaggtttagtgaagaagagatttcaagcccactgcaaaatgaataacattcttttattatgctgttgatctccaaatatgcaaaygcctttttctttaaaaaaaatagtggtagtttgaaatcaggtagcatgatgcctccagctttgttctttttgtttagggttgtcttggctataaggagctctttttt

SEQ ID NO: 77781 - DNA, 889 bp, Homo sapiens
tgaattttacttggaactgatccacatttttttttgtttagacttttaaaataactctatagcaacattcaataacttgggattgtactggaaaaagtaaacagtgaaagggacacagaccagaaaattaaaaatggctagatgtcaatgggagaagaaattgaaggtcccagagagggcagcctggaaaacggtaaaaaagatctcctgaagtctgagagggtataatgaatggcaaaactgtgaagagcctggagaatcaaggtcgtactgcaggtgaagagctagcaaacctattgccaggtcttctgataactgaattaaagtcataattyagttcttggggtcaaagattgaaaactcagtatctttttagcctgaagtcaaagaggaatagctattttcctcaagttttacaaagctaacaacagcaaggtacattggtctaactttttcttaacaacctagtgtaggaaacaaactctgaaaaaccaacagtcaaatgagctctacagtttgtgacatgggtctttacattcttgaatgtgtttctgttattgctgaaccttatttttgtacaagggtccatgtttgaagcatttgaaagatttgaaatgttggaattccatttttagctgacttttttatatactgagttttctaggcattactttggacaacaggttaatgcttgccttgctctctttggatgctgtctactccacacaggtataatcatacatacatttctatctagacatcatgaagattccacttctgattcacaagagctatcacaatgttgtacaagtccatattcttaggataaaaaggttaactctgtgtctcagctttgtgggcagaagaaaagagaagacatatgccctat

SEQ ID NO: 77782 - DNA, 1178 bp, Homo sapiens
tgcatatgtaaatcaatcattaaacagggccaataaaaacagggctgtaagaaagaaaattaaaggagaaatatcaggttgtgccagtcgataatttctgttactagaaattattaaaaatcatattggacgagttgattacctatttttggttctatatgctcttgaaaagtttatgtaacactgtatacaacatgatagaatatttacctataaccaaggtgtctaggggttgacatttttatcctataatatttgaaacttaaaattatattttagttattcacaaataattcattaaaattcataaactaaatgataaactatatcattcctgaaataactaatataaatgtagctatttaaaatatgagatgctggctatttctgtgatgatttaatgccatgttaacaaatatagagaagaaaatagtataaaagcatatttttagtatttactgtttaaaaaacctttagatctatgatttttaaaaactgcatttgaaaataattacaaacatatagaaaaggtgcaaaaaaagcacaaaacatccctttacccaagttcacctattactaaaatttaacactaggatttttctcaatttatttaatttttttctctctctgtccacacaaatacacacacacacacagaaattgttttttttcctgaaccatttgatggtgaattacatacatcatggcgctttacctcttaaatattgtgtatttcctaataataatatcgtcttacataatcataatgttaccaaccaaataatctaatctaaaaagtagattatttgatctcatctacaatctatttccccatttcctgtcaattgatccagaaatatcttcacgctatctccccctccagaacaagacccagtctaggaaagctataatctttgaatctgcttttttaggggagaagaaggaagagattccttattttttagctgcgtaggctcytagctgtgtcaccattgcaaccaaatggcttgagtgtgacaactcccattcatctttttggtctaccttttcctttaatacatcttggagtcagaagatggataataaattattttggaattatagatgggtaatatttaatgcccaatataagaaggactgaagacttctaaggtttgagggcagatgattttttttgc

SEQ ID NO: 77783 - DNA, 2894 bp, Homo sapiens
aaaaaaaacccccaaaatttcctgaaatctaaccctaggtctgccttcctcttctaaagagggctgtcaaaacccatgacatgttgtggtaaatgggtagaaagaatgcagagaaatgtctcagtgataagaggtgggtgtgtctgtatagcacaaagtggaaagaagacaagcttaaaacatgaaacgtttcagaaaaatgtaatggcttaattataaagatctccacagatgccaactgaaattcttcataaaattgtcaaggcaccataagttagttttaaaaacagagagagatgaagaaaagaacatgtcaagccaaatatttcactgctttttaaaagatatttgctgagttaaaaaacatttatggtattttatttttaatggctctaaaattaatttcctcatgaaaatccacaatcaccatgttttaacaaggtggcctaatgcttgtctttacaacaacaccatctgatacctgggaccatgggccattagcattgagggtcagcttagaagccatccagtccccaaatctcattttgcagaaaatggatcaagcagcatccactcctgttcatggtttctgtgrcccttctttgccaggagcattattgggcaaaaagaagagttaaggcattctagttgaagtggatccctttgaagcattaatatatggattaaaatgtcattttaagacttcattgctatccaaagtattcttattctgggaacagcttttgtcaccatgctgctgtcacagaacacatggtagtaccctgaattctgttttccctcagggcaggggctgttggctttttctttttgtgtggtttcttccagctaatgacctcttttcagttgttcccattgacttaaaagtagcatgcataaacctctgagaataaagatgacattgcttgggagaaagtgcagtgattttgataaagcacctacgttcgggatatcactcataataaggctcactctttggccattactcattctgggaaagataatagatttattttccactcttcttcacatttacttcaactttctatgatcagatgggtaaaaaaaatattttttgtgatgtacacattcttagatatattgtgtaaggcacatcatactagagaataaacaatgacatgactacaatataagggctaatatttactgagtgcttaccatgtgccaggcattgtgctaagagattggcatatattatggatactattcttacaaatatctgttttacagatgagaaaactgaggttaaaagatgttatgctactgatccagctagtcaatattgaagccaagatttgaacctaggaattagagctcattatcttaaccatcaagggttctctttcctcagtgattctgaccacaggataattacttttaagaaataattggtggtagagaaaattaacttgtattaggggaaagttattttaggaatttaaattcatatccatagtattcaatttatctacaaaaagaaaaaaatggttattttacttcagtggttttacattttataaaattgaatggggctagcaattatccagcacctttatccaactcttggtcctttgcaattccagaccatttaatcttaaattatttgcatacaatggacaaacctcatctttctaattgaaaaaaaaatcttgcattccagttacaactggaagagagagattgaagtccattgaaaataagatcagaatgtcataataatcagacttttcttttccacttgagaatagggaactttcgcagttccatttataggccacatcagactgtgtatgaaacattcacctatctttttttccgtggaccaatttgaatattaagaagactagattaaaagtcaagactgataatggagtgtagaaatttcagctgaaccacataattttccaattttcaaaaaacaagaactgggaaaagacactttagaaaaaatatatatttaggtttttattagagcggataggtttaaatgttatgacattatgatttagaaagtactcaagattctcatatctgggaaaatggcaaaatgccatttgtaaggtaatgtggggctgctcttacttttcatttttcttattctcagtatttagtgatgtctatcaatggctctgcctgtttttgtagctgttaaaccattcttctgtcttaaatgctacacaactggcacaaaataactctttagtatgcatgataacagagtatgacctttaatttatcagagtaagttctgtattttgttacctgcttgtccctgctgcttttcatttcttgctgctggtttttgatatgatactccagtgcctttgcaatgggaaacaaacagcatttaaaggtgtagggaagaaaatttaaatcactgttcattccacacaggcaatgagatccaaaattcacaaggttacctgtatttatttcaaattaatctgatgaaacaatatccaaaccaaaatttttgaatgtaagtagctagtgggaacaagtgcttgtacaaatctttgtgtaaaacacttagatatcttaatgtaaatccacataagagagggatgtgaaggaagaaattacttaagctagttagacatgcactaagattctaatttcttccccaaagcaccattgaactctgcagtagacagcctgcagccttctacgcccaacatcacagcagtctcacatgaatatattgtttaactggatataaaagcctgctgtttcacataaggagctgggatgtcatctgaagcattagtcacgaacagcgcatcaccctacttgagctgtgcgtgctctttctagctgtgagaatgactgacagaactcttgagttgcaccacccc

SEQ ID NO: 77784 - DNA, 667 bp, Homo sapiens
aaaaaaaaaaaaaaaaaaaacctgtaattggctcagtgtaactcagactaagtagagatcaccaattaaaacccaggcatcctaaataatgcagtaggtacagaggagaaatagttcattgcataaaatatatcagaataaaactataaatttctctacttccttcagtatttcttcttaaacttaagctacctgttatttctagygatctctaaatgcagaacagaatgaagacaagataaaaactacaaagatatcctatcaaatttgagctgatgctccattactaaggacaattggaattgatgcacacacatgttcttctccatcttttttatagcccaatagatctacagttaggctgtgtcatatacaagaagaagcctgaactaactaggccgtataactctggcctgattaacactttatctaatactttttctgaagtcttttaatctaagtcttgttttgacttcattgaaaataagcagtttgttggtaatcgccacacaagaaccctacacatacttaaagactgttatgagctcaattgtttatcccccaaattcatatggtgaagccttaacccctaagacctcagaatgtgatggtttctggaaacagagactttaaggaggtgattaagttaaaatgaggctgttacggt

SEQ ID NO: 77785 - DNA, 667 bp, Homo sapiens
aaaaaaaaaaaaaaaaaaaacctgtaattggctcagtgtaactcagactaagtagagatcaccaattaaaacccaggcatcctaaataatgcagtaggtacagaggagaaatagttcattgcataaaatatatcagaataaaactataaatttctctacttccttcagtatttcttcttaaacttaagctacctgttatttctagtgatctctaaatgcagaacagaatgaagacaagataaaaactacaaagatatcctatcaaatttgagctgatgctccattactaaggacaattggaattgatgcacacacatgttcttctccatcttttttatagcccaatagatctayagttaggctgtgtcatatacaagaagaagcctgaactaactaggccgtataactctggcctgattaacactttatctaatactttttctgaagtcttttaatctaagtcttgttttgacttcattgaaaataagcagtttgttggtaatcgccacacaagaaccctacacatacttaaagactgttatgagctcaattgtttatcccccaaattcatatggtgaagccttaacccctaagacctcagaatgtgatggtttctggaaacagagactttaaggaggtgattaagttaaaatgaggctgttacggt

SEQ ID NO: 77786 - DNA, 880 bp, Homo sapiens
ttttaccagatttcatggatgaaaacagagttaaggtttagatctaatactcataagctcttccagacaaattgcatgatcacgagaaaagatttacaccatctctatggagtcttagagcatttctctctttctctcagatcctcttatccctaaaggatctctttatcttaccactccagaccaccattttctattttccttaaacttaacagtaatcaaactcggcattttgaaagttaatacattttatctgacatgttcaggttttctggatcctccttatctcccaatcagactaatctgttggcaaacakgaataataatgtctttgacttctttgttccttcctacaactggtttccatttcattggtacctaatgctgtctggtgacacacagcagcattagaacattgaataattgctggttaaaagagagagagggggagaggcagagaagaatgagagagagagagagagagagagagagagcgagccgaaaatgcgggcatgtctctccttctattaagttgttcattagcttttacagtgtattttgcattcatcttgtttattttctcacattctactttagtactttatcttttgatacctggattggttagtagtttcctaaatagtttgtctgtctctatcatttcctgctaatccttcctaaatgaatgcatgcttgaaaagacctaaatctaatttgctactgatttcacaatcttactgcaccactcacttcaaaatggtctcttcttccttggaacgagttttccttttatatcttattcagaaattagccaaatatgatatgataactctagcactttctcacattttatatttctaatcttgaacttttttttgcc

SEQ ID NO: 77787 - DNA, 880 bp, Homo sapiens
ttttaccagatttcatggatgaaaacagagttaaggtttagatctaatactcataagctcttccagacaaattgcatgatcacgagaaaagatttacaccatctctatggagtcttagagcatttctctctttctctcagatcctcttatccctaaaggatctctttatcttaccactccagaccaccattttctattttccttaaacttaacagtaatcaaactcggcattttgaaagttaatacattttatctgacatgttcaggttttctggatcctccttatctcccaatcagactaatctgttggcaaacatgaataataatgtctttgacttctttgttccttcctacaactggtttccatttcattggtacctaatgctgtctggtgacacacagcagcattagaacattgaataattgctggttaaaagagagagagggggagaggcagagaagaatgagagagagagagagagagagagagagagmgagccgaaaatgcgggcatgtctctccttctattaagttgttcattagcttttacagtgtattttgcattcatcttgtttattttctcacattctactttagtactttatcttttgatacctggattggttagtagtttcctaaatagtttgtctgtctctatcatttcctgctaatccttcctaaatgaatgcatgcttgaaaagacctaaatctaatttgctactgatttcacaatcttactgcaccactcacttcaaaatggtctcttcttccttggaacgagttttccttttatatcttattcagaaattagccaaatatgatatgataactctagcactttctcacattttatatttctaatcttgaacttttttttgcc

SEQ ID NO: 77788 - DNA, 880 bp, Homo sapiens
ttttaccagatttcatggatgaaaacagagttaaggtttagatctaatactcataagctcttccagacaaattgcatgatcacgagaaaagatttacaccatctctatggagtcttagagcatttctctctttctctcagatcctcttatccctaaaggatctctttatcttaccactccagaccaccattttctattttccttaaacttaacagtaatcaaactcggcattttgaaagttaatacattttatctgacatgttcaggttttctggatcctccttatctcccaatcagactaatctgttggcaaacatgaataataatgtctttgacttctttgttccttcctacaactggtttccatttcattggtacctaatgctgtctggtgacacacagcagcattagaacattgaataattgctggttaaaagagagagagggggagaggcagagaagaatgagagagagagagagagagagagagagagcgagccgaaaatgcgggcatgtctctccttctattaagttgttcattagsttttacagtgtattttgcattcatcttgtttattttctcacattctactttagtactttatcttttgatacctggattggttagtagtttcctaaatagtttgtctgtctctatcatttcctgctaatccttcctaaatgaatgcatgcttgaaaagacctaaatctaatttgctactgatttcacaatcttactgcaccactcacttcaaaatggtctcttcttccttggaacgagttttccttttatatcttattcagaaattagccaaatatgatatgataactctagcactttctcacattttatatttctaatcttgaacttttttttgcc

SEQ ID NO: 77789 - DNA, 880 bp, Homo sapiens
ttttaccagatttcatggatgaaaacagagttaaggtttagatctaatactcataagctcttccagacaaattgcatgatcacgagaaaagatttacaccatctctatggagtcttagagcatttctctctttctctcagatcctcttatccctaaaggatctctttatcttaccactccagaccaccattttctattttccttaaacttaacagtaatcaaactcggcattttgaaagttaatacattttatctgacatgttcaggttttctggatcctccttatctcccaatcagactaatctgttggcaaacatgaataataatgtctttgacttctttgttccttcctacaactggtttccatttcattggtacctaatgctgtctggtgacacacagcagcattagaacattgaataattgctggttaaaagagagagagggggagaggcagagaagaatgagagagagagagagagagagagagagagcgagccgaaaatgcgggcatgtctctccttctattaagttgttcattagcttttacagtgtattttgcattcatcttgtttattttctcacattctactttagtactttaycttttgatacctggattggttagtagtttcctaaatagtttgtctgtctctatcatttcctgctaatccttcctaaatgaatgcatgcttgaaaagacctaaatctaatttgctactgatttcacaatcttactgcaccactcacttcaaaatggtctcttcttccttggaacgagttttccttttatatcttattcagaaattagccaaatatgatatgataactctagcactttctcacattttatatttctaatcttgaacttttttttgcc

SEQ ID NO: 77790 - DNA, 760 bp, Homo sapiens
cacagactccataattcatattaaacaaaaaacttgaatattgttttagtcctaccttttaccccattattttctcaacttgacaatactaataagcaaatctatattttcaaacaatatctctagatcacacattccttaaataattattttaagtatgctacataaccaaaacagacattttcagggccgaaataaggaccagggatccacattttgttgaatgtctactcagtcattgagaaaagtactttttatttaatatcaatttacttcaataaaaatgtcacctaacatgtaaaamtacttaaagagagagtactatttaacccatgaaaaataaaagaacagaatgagacagctgcaaaatcaaatgtatttaggtgttttagctaaaagtatacattattccaataaaattaccttttgcaaataatattactaagaagaaatttaaagaaaacatactccactatcataatggtgattttcatttaaattagaaacacatttcaaaattcatgaccttggaaactctcatttcatttgagcctccagagtagtgtgctgtctctctctgtctctctgtctctctcaatcttttaatttaacaaatacttatatagcatttacaatatacttgataattgtagaaatattttacaagtattaactcctgatgaccctataatgtaggcacacatattatcgacattttgctaacagtggaaccgagtcatgcagggattaagtaattggc

SEQ ID NO: 77791 - DNA, 1071 bp, Homo sapiens
gaattcttagttcttaatgactaacataaactctaattttctctatcactgtataatagtttcagaatcacagtgcctatgatgttattactgacaatgtgattactaaaaacaggttaaggtttccttgtagtccttttgtattcctctgtataaatcatttgaatcatttcttgctgtgtagttaagttgccactcacagaggaaaaacatgtttttcagactcttagaattacctctagatatccttccctgaaccgcttcttatactttcatgatgttttgtgtatagaccattgtatacgattcaccacacttcaatgtatgaactattctgatctgtttctgccaatatactatgaggatttagtggttaaaatccttgtcttcataccctcactagcaagatgggtgcctggtgataattgttgaataaatgaattaaaagcaaggtaacaagcccatttgaaaatacttttaaaataatttcaatcctctgaaaaaattgaactcatagaagcagagaacaaaatggtggttaccagaggctagggatttggcgaatttgggagatgcyggtgaaaggatacaaaattaaatttaggaacaataaatttaagaggtctatcagacaccaagatgggtatggttaataactaatatcacatagaggcatatctcattttactccattttactttatttcacttatgagatattaccttttttttatcaaattgaacatcactggcaactttgcttctagcgagtctattgatgacaattttccaaaagcatgtgctctctttgttagcatatgtcagcaataagtatttttaattcaggtgtatacagttttaagacataatggtattgtacacttaatatattacagtatagtataaacataacttttatacatattgggaaaccaaaacattcgtgactcaatttattgtaatattagcttcatttttgtggtctggaattgaacctgtgatatctctgatgtgtgcccatacttgaaaattggtaagaaattagatttttaagagttcttactacaaaaaa

SEQ ID NO: 77792 - DNA, 1183 bp, Homo sapiens
ttacatgggcaaaattattgatatataaaagcctttttaatcctaccacgtatttacatctatgcatttcatgaacttgatttcaatgaatgtttataatgcatatggagaaggacttgatagctcttctaagttttatagaaaaattatagttatgtttttatcgacacatggtataaatttaaccattgaaaccacaatcaccactattagatacaaaagtgttctgtagaatgtatctacagaaacgtatttcctccaagtgaaaatgagaaggttaaaaaaaaaaaagaaaaagaggtcatattgatgatactgacctctgagatgtcaagaaacaaaaattaagttctcttcttgcatttaaattgagagtggagggctaggaacataaatcaaaacaaaatttggcttttcaccctattatccatccttttcactttacactctctctatatataagtccagaaatctgagggtacctaacctctaggcacacaggtatatatcaccccaagtgtataaaactagtgtgcagctcctaacaacatgaagttattacttggtttcactcaaagaggaaaggcttgcccccttcccatttctatcttttcttgacccttcttttgtttttccactaggattccacttgattttattaggtaaataaccaattactgtactagatgtttgagtcagccagagtccatactataagtgggtaattcaagaaaagactatttacagagatgtgggccaggatccaagaaaccaacacaataactagtatctagcaaaaaaaagggaactctacctatcactcctgagcctgagtatgaaagagtaggggtgcttgctagaaccccatgagggtgactgtatgaagggggacacttgacagaaactgtgaccttcaacagagaggcactgttcacccacagcacactgtcagggaggaaacacgaagaacaaacaccccacccttaytcccttcccaaattccaatccataaatgcttcactttggcaaagccgactttatgcaatccaatcagatccctacctatctgatatgaaggagagggtacaaagtgttccgtagggacacatgaaaggcatgtagcatgatactctcatttacaatttaaatacagaactaaaaattagatagcaataaagaaagg

SEQ ID NO: 77793 - DNA, 539 bp, Homo sapiens
ggtaatcctgaactttgataattaggtgcagatgataaaatttgacataagaaacctgtatattttgctatccttggatttcrgtgaggcctaatccttgcatttctctaccaggttgtctctgaagtcactggaacaacagaggcaacagagaagagaataaagataaaaagaaaaggtcaatttcaaagctgttctatgtctgtgtctatggaacacaaaccaaagtttggagagaaaataaggagtgtgtgtgggtgtggacgggattttcttaatctgggaaaccggttcaagcccatgaaacatttcaacaaatgttaatgtgaagccgacgtgctcatcaatatttatgagcagttctctgaccaaatcctcccaactgggtgtgggtccctctcctctctcccttccctcaccggtgcagtcaaataatacagcaaaggaaaacagtggagccaagtaatacaggatgacttaaacgtgttttttttcctctgtaaacatgctatcttcattttagctatttatttttcact

SEQ ID NO: 77794 - DNA, 539 bp, Homo sapiens
ggtaatcctgaactttgataattaggtgcagatgataaaatttgacataagaaacctgtatattttgctatccttggatttcagtgaggcctaatccttgcatttctctaccaggttgtctctgaagtcactggaacaacagaggcaacagagaagagaataaagataaaaagaaaaggtcaatttcaaagctgttctatgtctgtgtctatggaacacaaaccaaagtttggagagaaaataaggagtgtgtgtgggtgtggaygggattttcttaatctgggaaaccggttcaagcccatgaaacatttcaacaaatgttaatgtgaagccgacgtgctcatcaatatttatgagcagttctctgaccaaatcctcccaactgggtgtgggtccctctcctctctcccttccctcaccggtgcagtcaaataatacagcaaaggaaaacagtggagccaagtaatacaggatgacttaaacgtgttttttttcctctgtaaacatgctatcttcattttagctatttatttttcact

SEQ ID NO: 77795 - DNA, 568 bp, Homo sapiens
cccaaattgctgcctccgcctcatcatctttcccttctaggcatgagactttccagaaaagggcacagatggacagagcatcctatggttctggaaccagatgtataatcttaagtctgttttttccccctttcagaattagcattcctttatctcattcctaamtattcagtcaagtgtgttaaatgctgcgtcccaatgcttgtgtgcgtttagtggctggacataggcccatagccttcagcagcaagaaggaccatgttgcaaggtccacaacagccgtgaagagtgaaagatggacaggaaatgtcagcctccctagcgacccctgaaagtcctcaggaaggaaactggactttctgcaacatttcagtccaatttttttttttttcttaaagcaaagggagcctccaggaagctggacatctggggacctttgggtgaccttagtcagtcttagcagtttgaacttcatcttctgagttccccctctgggcaatggggagcaacccattgctgctcagctatggccgcaacagatccagatttctgtctggggtctctccac

SEQ ID NO: 77796 - DNA, 688 bp, Homo sapiens
gtgtttgtaagtgcgtgccggtggtcccaactgcttgagaggtgaggcaggaaaatcacttgagcccatgagttggaggctgcagtaagctataattgtgtcactggaatacagcctgggtgacagaggaagaccccatctctaaaaagtaaaaaataaaaaagcatatccccacataagaaaatgtttaaggatattaaggatatgtacttatgtgatgttcatagatgcattatgctgaatgggcacttctgggactgggagcaccacagaagtagaaatggaagaaaaagagacaaacggctaattacaatgacataaaaatggggttttgaataatggtgatactgtgcatgaactgagtgatgtgattaactcaattctagccagctgaggaacaaaataaatacaagtgaatacttgggtgcatgaaggttcccacctgttgttttcagtaccagagaagygagggggagttggccctcctgtttctgcaggagcatcggcgtcacacggagctgaggcttcttttttttattgagatggagtctcgctctgtcacccaggctggagtgcagtggagcgatctcaattcattgcaagctccacctcctgggttcacgccattctcctgggagctgaggcttcttaaggatgggcgccatctgcctcacttgctgcggtttcg

SEQ ID NO: 77797 - DNA, 688 bp, Homo sapiens
gtgtttgtaagtgcgtgccggtggtcccaactgcttgagaggtgaggcaggaaaatcacttgagcccatgagttggaggctgcagtaagctataattgtgtcactggaatacagcctgggtgacagaggaagaccccatctctaaaaagtaaaaaataaaaaagcatatccccacataagaaaatgtttaaggatattaaggatatgtacttatgtgatgttcatagatgcattatgctgaatgggcacttctgggactgggagcaccacagaagtagaaatggaagaaaaagagacaaacggctaattacaatgacataaaaatggggttttgaataatggtgatactgtgcatgaactgagtgatgtgattaactcaattctagccagctgaggaacaaaataaatacaagtgaatacttgggtgcatgaaggttcccacctgttgttttcagtaccagagaagtgagggggagttggccctcctgtttctgcaggagcatcggcgtcacacgragctgaggcttcttttttttattgagatggagtctcgctctgtcacccaggctggagtgcagtggagcgatctcaattcattgcaagctccacctcctgggttcacgccattctcctgggagctgaggcttcttaaggatgggcgccatctgcctcacttgctgcggtttcg

SEQ ID NO: 77798 - DNA, 688 bp, Homo sapiens
gtgtttgtaagtgcgtgccggtggtcccaactgcttgagaggtgaggcaggaaaatcacttgagcccatgagttggaggctgcagtaagctataattgtgtcactggaatacagcctgggtgacagaggaagaccccatctctaaaaagtaaaaaataaaaaagcatatccccacataagaaaatgtttaaggatattaaggatatgtacttatgtgatgttcatagatgcattatgctgaatgggcacttctgggactgggagcaccacagaagtagaaatggaagaaaaagagacaaacggctaattacaatgacataaaaatggggttttgaataatggtgatactgtgcatgaactgagtgatgtgattaactcaattctagccagctgaggaacaaaataaatacaagtgaatacttgggtgcatgaaggttcccacctgttgttttcagtaccagagaagtgagggggagttggccctcctgtttctgcaggagcatcggcgtcacacggagctgaggcttcttttttttattgagatggagtctcgctctgtcacccaggctggagtgcagtggmgcgatctcaattcattgcaagctccacctcctgggttcacgccattctcctgggagctgaggcttcttaaggatgggcgccatctgcctcacttgctgcggtttcg

SEQ ID NO: 77799 - DNA, 688 bp, Homo sapiens
gtgtttgtaagtgcgtgccggtggtcccaactgcttgagaggtgaggcaggaaaatcacttgagcccatgagttggaggctgcagtaagctataattgtgtcactggaatacagcctgggtgacagaggaagaccccatctctaaaaagtaaaaaataaaaaagcatatccccacataagaaaatgtttaaggatattaaggatatgtacttatgtgatgttcatagatgcattatgctgaatgggcacttctgggactgggagcaccacagaagtagaaatggaagaaaaagagacaaacggctaattacaatgacataaaaatggggttttgaataatggtgatactgtgcatgaactgagtgatgtgattaactcaattctagccagctgaggaacaaaataaatacaagtgaatacttgggtgcatgaaggttcccacctgttgttttcagtaccagagaagtgagggggagttggccctcctgtttctgcaggagcatcggcgtcacacggagctgaggcttcttttttttattgagatggagtctcgctctgtcacccaggctggagtgcagtggagcgatctcaattcattgcaagctccacctcctgggttcacgccattctcctgggasctgaggcttcttaaggatgggcgccatctgcctcacttgctgcggtttcg

SEQ ID NO: 77800 - DNA, 736 bp, Homo sapiens
aaaaagccaatatcagaaggttatatactgtaggatcccctctctggaacattcttaaactaacaatgatasagatagaaggtgattagtgatgcaagttttgggatggaggaggaggagaagggaaatggatgtgactgcaaagtgatagaacaaaggggacccctgtgatgacagggcagtcctattccttgactcggtgattccaccaactgacatatgggctaaaattgcatagaactaaatacaaacacacacacacacacacatacacacaagtacatgtagaactggcaaaatctcaattgtgccaatgttaattttccggttttcattctgtgctataattacataagctttcaccattggcaaaagctgtgtgaaggatataggcatctctctaaattatctttccaacttcctgtgaatctattactctttcaaaataaatagttaaatgcaatgtaatgtgcccacaagcccagggtttacagtagacgcgacttactcttagctcaaaaatcctctggcctgactcatcttggctcattcccaaattcaaccttgataattaataaggattgtttttacattgataatatttgccattttccaaatctagcaaattcctttgaatccctatggttttacatatgccgttttcctcatttaaagaatattaattccccttctcaggcataatatcaactcctctccttagaaattcagctcaaat

SEQ ID NO: 77801 - DNA, 549 bp, Homo sapiens
tcactgtattctccaagtatagcttacatatgtcattgcttgtattttatgttcctttgacctggctgttactttccagttgtttcaaaagcttaagactgttttgttayagagctggaactttttaatacatggcagcaacatttcataaaattgcaatgtctaaaatgtcaagtgtaattgaaagaattttgtatttatttcagctgtaaaactgaagggaaacatttgtattacttttagtcttttgtaatgctctgtgttgatttgtttattttgcgaaaggcactaccctaggctccaggttttcaaggcgaggtaagagccagcccccgccccgggcgagcatgggaactcccagattcctcggggcatcgcctctgggtggcatggtgtaggaacacacttcctcctgcatgaactgcagtaagaatcgcttcagactcagccggcagggacgctggatgcttcagccatttcagaccttcaataatgaactgctccaagccagttggaaatttaagaaacttggactggagaccatttgca

SEQ ID NO: 77802 - DNA, 549 bp, Homo sapiens
cagaatatccaaattggcatctatmaaggaaaaatttctgttttttatattatcccatcctaagcaacattcaattattgtcattttaatttggagttttggacataagtctgtgaggtgtttcatatagacgaagtttgcagctgaataataaataaatgagttgccaataactttgaaacgatgcaacgacacctcttttctattgtcaatcatctttagtgcaaacttctgtggttcaaatctcataatgagtgcattctgactgtgtggagagcttgaagttcttgtagtgaaaccttaaatgagaagatgcccatttcaggtgttatgttgaagggttctgagcttagcaaacttgtagttgtcatatggcactcacaagcacacacacatgcacacttatacctcacacacatataccgcaaccaaaggaaggaagaaaagcaattgcaaagcaacctgtgaaatgcatgatgaccaaaacaataatgctttaaaaatttcttattttatacatatttatatgtaagtttcaaagaaaatttt

SEQ ID NO: 77803 - DNA, 549 bp, Homo sapiens
cagaatatccaaattggcatctataaaggaaaaatttctgttttttatattatcccatcctaagcaacattcaattattgtcattttaatttggagttttggacataagtctgtgaggtgtttcatatagacgaagtttgcagctgaataataaataaatgagttgccaataactttgaaacgatgcaacgacacctcttttctattgtcaatcatctttagtgcaaacttctgtggttcraatctcataatgagtgcattctgactgtgtggagagcttgaagttcttgtagtgaaaccttaaatgagaagatgcccatttcaggtgttatgttgaagggttctgagcttagcaaacttgtagttgtcatatggcactcacaagcacacacacatgcacacttatacctcacacacatataccgcaaccaaaggaaggaagaaaagcaattgcaaagcaacctgtgaaatgcatgatgaccaaaacaataatgctttaaaaatttcttattttatacatatttatatgtaagtttcaaagaaaatttt

SEQ ID NO: 77804 - DNA, 872 bp, Homo sapiens
tagtttcctctgaaccaagccaatctggactccaaagctagagcatgaactccaacagcttccatttttaggaagcaggacaagtgctaagacccagaatccatattcaaactcatgccatttaagaggcgctcgcagctgagctctcactaatgaggttgaggtgtgatggggagggtcgtctggaccaggtcagtggacagctcaatggggccatgaaagagagggcctagaggcattgacctgatgtgtcactgatgggcacttgtcagcgcaacatgtagctgatgagttgcaggagaagctcagccctcgcaggccggggatgacctgcatcctgcctctttctcaacagcatgcctgcttttcctcagctccagagtgacccatgccacctccctgggtctcagtttctcctggcagaggagaggcaagcacagctttcaaccccgccatagaggcatccggcggcaatgaggaggactgcttgccgggctgcgtgcagagcatcatacttaggatcaaattattgcccccaaagagtcgtttttcttcacccctggtggcatgcttcttggaagcggggagcgaaggggttcctgcagtgactaacaaaatagattatggagacagccacttatcttatttgtcatctcgccaaagaaaggctgctctgatgttccmaaaaacaaactcatcatctttatcagatgagaagattcaggaaccacaacagaggctaagagtgtaaatcctttgtcttctcttctgtcgttaatactacggcaggcaaagagagcaaagagaaaccaacccttgagaaatttgaacctgggatgttggaattggaggcatcaatttccctacatgca

SEQ ID NO: 77805 - DNA, 536 bp, Homo sapiens
cggccatcccagtcacacaatacatcataatgatttaaaccattcaaatggtgccaaataattagcagatgaaactcacggagtccaactgtataactatgagattaaattagccatttatggatttcagaaagaaaggagactaaaatgttttatagtgtagttaaaaaaaaycattgaatgagtccctcatgttgaacatttcctcatgtcagaagcagggtggatgacacagaaaccataaatccaattgataagtgttaaaatcactttagtctgccatcttaggagaaattcaataaagcagaaagaaggacttctgtagacacaagtctgcctccagttacctacagacatttacactgctcatctgaaggggcacgtgtgtccccagattaagtatatttggttctttagtaattgtttacttttaaaaggcttgcttcatctagcgttaatatcctagacagcagttatgcagatatcatatgcacatatgcagttttgtacatctgtgtgttacacatcagtgtctg

SEQ ID NO: 77806 - DNA, 1024 bp, Homo sapiens
cccagcacaccccccacaccccatccatcttcctattcttaagtacatccatatccatttccatcctcaccccattccccaccccttccccatctgcatcttcatccatagccccatccccaccatattcctatcgacatccccattcacatccatgtctctatccacaggctcatgcctatctgcctccatctcaacatccacattttctttacttatttttttgagatggagtttcactcttgttgcccaggctggagtgcaatggcatgaccgcggctcatcacaatgtccactcctgggttcaagagattctcctgcctcagcctcctgagtagctgggattacaggcatgcaccaccatgcctggctaatttttgtatttttagtagggccagggtttctccatgttggtcaggctggtcgcgaactcctgacctcaggtgatccgcctgcctcggcctcccaaaggcctgggattacaggtgtgagccaccgtgcctggcaacatccacattttcatccacttcctgatccatctacaatcaagtccacagccacagccattccatattcatattcacatccttgcctgtcttgacaaatgcagccactgctgtggttccattcaatggcgcacacctagtgaagttgacagccagatggacaactgaggctgcaacgtcttgtccacatgaatttttctgtttatcccccgagagaacctggtgcttcctgtctcataatttgactaggtctgcaagattaagacagctttyattttgtcacctcaaatcacggaatgcccttacatcacatgaccatttggattcatgctagggtcagtcctggtgaagtttaaatgactgaaagcaaatgtgaattttcaaaaactccagtacatctgtgcttccctccagcccaggctttagttgtttctattcactccttcaggttcatcattacttggttctaacaaatcctggaacttgggtggatgtattacttcttgacagtcaccaca

SEQ ID NO: 77807 - DNA, 847 bp, Homo sapiens
gcatatgcacattcactggcacattgagtacctgtcttagactctacgagacccagcttctcattttctataccacacaggatagactaatgggggctggggtagtgaggacatatgccttgctagtggtatgtgagccctgacctcagggcatgtgtgtgggtatacacaaagggttactcctgccaggggttatgggcaatcccaatcctgcaaaaccaggctgaaacaagacagcatgccctctcagcagcagttctgagtgattcttaatagaatgcaggtattgcatcaaatgataaattcagtaacattatagggaacaaaatcaatatataaaaatcagtatcatttctatatgccaacagtgaacaatttgaagtagaaaccaagaaagtaattccattcacgacagctaaawtaaaatacctaggaataaacttaatcaaaggagtgaaaaaatctttagaatgaaactacaaaaacactgatgaaagaactgaagaggacacagaaaagggaaagatattccaagttcatggtctggaaaaataaatattattaaactgtccatactacccaaagcaatctacagatgcaatccctataaaaatactaatgacattcttcacagaaataaaaaaaaaaattctaaaatttataaggaactacaaaagacccagaatagtcaaagcaatcctgagcaaaaagaacaaagctggaatcattgcattacctgacttcaaattatactacaaagctaccataactaaaacagcatggttctggcataaaaacagatgcaaagaccaatggaaaagaatacagaatccagatttaaatccat

SEQ ID NO: 77808 - DNA, 1085 bp, Homo sapiens
agttattttagttgtaaagtgccttgtacacttttcctttagtaaaatgcttactgcaaaagaaatgtttaatgaacactagctgtttttattgtgactcttatggttagacaagttcttatgttgaggaaatgtcttatttctcactgggaccctttcaactgggcacttttctctggttaattttaaactgagttgtaaacttacatgagatagctgtgttggagcaatggactcaatgtgttattgtttattcgactgtacttcttctgtacctgtgaataggggcttaaaaaccttgatgtacggttactctggaagttggaaaattcctgcctttggaggatttgttgtacttcctaggaagaatttccagaatgaatgttagattgtgatacccagggactaaatggaaacattcagggtttcacaatactaatcttcctggggtaaagaatagcacctctaaacaatcagcaggtctgggccattctcaagcaggacagattttgtgagcctggctgcttctgtgtgaatttattttagaaagagccacagtcaacaatcagacaatcctaccatctggccactagttgccatcattattggaaatgacttttgcatttttgtgaacaaccatttcaaattttcttttcctgaaatcagcattgcaaactatcaggaaattgtggcatatatcagcctttttataaaacttgaaaatcagacaactttaggttttaaaatgtaaagtatgccccctaaagctaaatgatgcctcattcatctcctgtggttcattatctattatkacaatgttacttattaagtaatttgaaaatataaacatgatcacaaaagcaaattaaaataccaggccctaggactcaaagaattaatgatgaaaaactatttctaagcaaacataatccaggaagcatctctagaaaagcatgtactctggttaccaggaagggttaatgtttggaaaacttcaggccacatttagaaaactcacagagaacagaagtgagacgtgtctccacagttactgaggaggccaaggcaatgtgcttatctctttt

SEQ ID NO: 77809 - DNA, 1521 bp, Homo sapiens
atgataattaaagcaacttcagttacattgtggattttctaggatttccaggtacatgttagcatttcctgatcaagaaagttggtgatctcaattctgttttccataaacgcatcatcatggcaaaggctgatggggcagagagacaggatatatgacccttgtatataacccagaagtcagggatgtggtcccgccaccactcgtaccctatcctacgtacataaaactgtcccatatctttactcttgcgggcttttgattttgttttgttgagttctgtgtttattttttgctgtgtacttaaattgattcaataaggcacatgatctgagcaaaaaaagaaagttggtgaaataatagatttatttactaatgtttctgaatctttttcatgtcacagagtgctcagtaaataataatatttgcatggtacactgggtaaacagtctggacatcttttggcctggggcttgggctctgcctggccctgcctggcagctcccaggagtgaggggcatctccacccacttgaaacttactccaaccctggtttagaaccatgaggattcacagttgatgcagtagtagctttatgcattatgcagctttatgcattctatactggcaacttgggttatgattttgcttttgctgtgatttcctagtgtgcttaggactttttgtctgaattatctgatctctaacccagagtcaatatgttacttatcttattagcaactaggcatgctgagagaataaataaattgtgtgtaactctttgagtatcttcaaagtaataccctatgctattacaacggtatcacaaatgttggatcacaaatgtcatttagtccatccttctgtcctctcctcaatcttgttgatagtacagggtagactaaaacatcacagctgggtttctttatttcccctgaatttattaattcgctcctgactgcttttttcttgttttgttttactaagaactttgtgttctggtcctgtccaaggtgcagatggttatgctttcaaaacaccttattgtcataatagcactcatttcaaataatactctactctcagtttcaccatttcaagcactattcatttgattcttgaggagaaggtgatgctcttccactgatcctccaggaagggtctgatcctccaggaaggctccatccacctcgttcctttcccaggttcataaggagggtggcagtgtcaaatgaaccctgtgccaggcactttcacrttcagtaaggagagcatgggttttagagtcagacagatctaagtgtgaatttccatctcttcccttttagactctgtaacctcaggacattaactttatgattatgggactgtgtttcatcctatgtaaagtggagctagtggtaactactgggtgtgtgctgccgtgatgatcacaagtgaaccgtcccaaaggggctagcaaacagtgggtgctcaacaaacgatacatataattatcattattgataattctgtaatgca

SEQ ID NO: 77810 - DNA, 1207 bp, Homo sapiens
gaacaaaaaaactataggtcaatggattttaatggccacagtkatgaatatcttatcactattatttcagatcccacattataactaacttttttaaaattttattattattatactttaagttttaggatacatgtgcacaacgtgcaggtttgttacatatgtatacatgtgccatgctggtgtgctgcacccattaactcatcatttagcattaggtatatctcctaatacaaatttctcttcttcagtcatgagaaagtgtctcttgccttttaaaatttgagttcttcaccatatctaacttatcacctccatttattcaactagactgttgtttcttacaaaatggctctgttcttttggcatgatgttaactgtaggtcattaaatttggagctttgattctgtcttgaccaaaattctttggtgcctccacttccatgtaaattgatattaattattttggtaaatttgaatctgatttttattattttccacaactcaacatctctgacaaatactccaagctaattcattaacataaaccaaataacaggaccaaagaagaggctttctaacactgctcaggttttacattttcccaaagatttttcccagagccactaggatcttgtgaatctaaataggcccaatagtttagctctgagagtttctctcccacataatataaaaatcacctgatgggtttgtataatatgagaaatctaacctcaattcctttctgcagtgacctcaccatttcccttgaaatattgaaaacccagatacccagtcatatgtgctaaagcaattacagaagggatttatttattaaacattaatccccttgtcatgcagagtatctagaaaatccctgatgcacttttgcactgaaacttcactggaaacaaatttttctaagtctccaaagacctttcccttgagaagtcgaataggtctttctcaagtcttcaatccccttgacctctatgcttcagttagcactgttgaaattctctcctcgcatggtttccctgggtgttctctgtgttcttctactacctctttgtctcatttgctgactatactttttgcctgcctccacccccttggctggcagctgcttctaaggttccaaactcagctttctgcatttctccctcaatagtcaccaccatgatacatactccacatgcattactga

SEQ ID NO: 77811 - DNA, 1207 bp, Homo sapiens
gaacaaaaaaactataggtcaatggattttaatggccacagttatgaatatcttatcactattatttcagatcccacattataactaacttttttwaaattttattattattatactttaagttttaggatacatgtgcacaacgtgcaggtttgttacatatgtatacatgtgccatgctggtgtgctgcacccattaactcatcatttagcattaggtatatctcctaatacaaatttctcttcttcagtcatgagaaagtgtctcttgccttttaaaatttgagttcttcaccatatctaacttatcacctccatttattcaactagactgttgtttcttacaaaatggctctgttcttttggcatgatgttaactgtaggtcattaaatttggagctttgattctgtcttgaccaaaattctttggtgcctccacttccatgtaaattgatattaattattttggtaaatttgaatctgatttttattattttccacaactcaacatctctgacaaatactccaagctaattcattaacataaaccaaataacaggaccaaagaagaggctttctaacactgctcaggttttacattttcccaaagatttttcccagagccactaggatcttgtgaatctaaataggcccaatagtttagctctgagagtttctctcccacataatataaaaatcacctgatgggtttgtataatatgagaaatctaacctcaattcctttctgcagtgacctcaccatttcccttgaaatattgaaaacccagatacccagtcatatgtgctaaagcaattacagaagggatttatttattaaacattaatccccttgtcatgcagagtatctagaaaatccctgatgcacttttgcactgaaacttcactggaaacaaatttttctaagtctccaaagacctttcccttgagaagtcgaataggtctttctcaagtcttcaatccccttgacctctatgcttcagttagcactgttgaaattctctcctcgcatggtttccctgggtgttctctgtgttcttctactacctctttgtctcatttgctgactatactttttgcctgcctccacccccttggctggcagctgcttctaaggttccaaactcagctttctgcatttctccctcaatagtcaccaccatgatacatactccacatgcattactga

SEQ ID NO: 77812 - DNA, 1207 bp, Homo sapiens
gaacaaaaaaactataggtcaatggattttaatggccacagttatgaatatcttatcactattatttcagatcccacattataactaacttttttaaaattttattattattatactttaagttttaggrtacatgtgcacaacgtgcaggtttgttacatatgtatacatgtgccatgctggtgtgctgcacccattaactcatcatttagcattaggtatatctcctaatacaaatttctcttcttcagtcatgagaaagtgtctcttgccttttaaaatttgagttcttcaccatatctaacttatcacctccatttattcaactagactgttgtttcttacaaaatggctctgttcttttggcatgatgttaactgtaggtcattaaatttggagctttgattctgtcttgaccaaaattctttggtgcctccacttccatgtaaattgatattaattattttggtaaatttgaatctgatttttattattttccacaactcaacatctctgacaaatactccaagctaattcattaacataaaccaaataacaggaccaaagaagaggctttctaacactgctcaggttttacattttcccaaagatttttcccagagccactaggatcttgtgaatctaaataggcccaatagtttagctctgagagtttctctcccacataatataaaaatcacctgatgggtttgtataatatgagaaatctaacctcaattcctttctgcagtgacctcaccatttcccttgaaatattgaaaacccagatacccagtcatatgtgctaaagcaattacagaagggatttatttattaaacattaatccccttgtcatgcagagtatctagaaaatccctgatgcacttttgcactgaaacttcactggaaacaaatttttctaagtctccaaagacctttcccttgagaagtcgaataggtctttctcaagtcttcaatccccttgacctctatgcttcagttagcactgttgaaattctctcctcgcatggtttccctgggtgttctctgtgttcttctactacctctttgtctcatttgctgactatactttttgcctgcctccacccccttggctggcagctgcttctaaggttccaaactcagctttctgcatttctccctcaatagtcaccaccatgatacatactccacatgcattactga

SEQ ID NO: 77813 - DNA, 849 bp, Homo sapiens
tgcatattttgattccaatcatacaaaaaaaagaaaaaattagaattaggattgatttttttaactcataagatggaatgagagaaataccacagacttctacatatcatttccatggagatttttttaactgaataaatagctgaactacacaaaatgtctcaaatgaggatactggcctgatggctcacaacacccttcaaatcccttctaaagaccctaccctaggccaggcacagtggttcatgcctgtaatctcagcactatgggaggccaaggrgggtggatcacctgaggtcaggagtacaagaccagcctggccaacatggtgaaacctcgtctctactaaaaacacaaaaattagacaggcatggtggcacacacctgtaatcccagctactagggaggctgaggcaggagaatcgtttgaacccaggaggtggaggttgcagtgagccgagatcacgccactgcactccaggctgggcggcagtgtgaaactctgtaaaaaaaaaaaaatcccctaccctatatttgttctctgactccttgatttcaggctagaccatcaagtgctgcatagactgtctctatcaaaaagcaggtgctctgacattttcagggaatctctctgaaagaaaatcacttacaaaatataggcctaaacttatatatcccagatccgtcactcatggctttcaagtaagtcaccatgcaagatagaatccatttaggtgaaaggccattctgcatgctacccctttctgacacagcctcccctagactaccagaaacaagtgatattaaaatgcaattggtaagtattagaagctaaatgaatatggacag

SEQ ID NO: 77814 - DNA, 1133 bp, Homo sapiens
tacgtttgctgagctaaaggacaggagtctagctaacaatcataagcttgtgtctcctttgagaccttttattctgtagctcttagttcttgcctagagattgttatcactattattatcatcatcaaatattaaatattaatagtgctgtgctcagtgaacatcaagtaacaagctaagatttcttatcagtcttgcttggggaacctcaggttgccttgaggatttctgggaggctttcagtatataaaattcccatgcagttcagtgggaagaaaagtatttccctgtttttcatcacatttgtcatttgcttgcatgcctggtcctgtgtaataggtagcgttaaaattaaaataaattacttatcagtattcaaaattatctatacataaatgacatatgtaatacgtaattatctattaataaacacattattttttatgtaaaaaaattgcccttatccatatataaaaatagaaatcatcccttgttctgagtctggaccctcatgcaaaatttcataaagggctggtttaccccctggtaactgcaaaattatgctgtgctttttgaagggggttttcttctcatgagctggtatttataccagtaaattagcaatgttactttgcttgtatcttattagagctgcttatggacactcttatgggtttgagaataataagctaacaaattacttgtattttggctgagcgtggtggcttgtgcctgtaatcctagcactttgggaggccgargtgagtggatcacttgaggtcaggagttcaaaaccagcctggccaacatggtgaaaccccacctctaccaaaaatacaaaaaaactagttgggcatgatggcacatgcctgtgatactcaggaggctgaggcaggagaatcacttgaactggggaggcagaggctgcagtgagccgagatcgtgctactgcactccagcctgggcaacagagcgagactctgtctcaaaaaaaaaaaaaaaatcacttgtatattattaaagtgtttaggattatacatacttgtccatttcttgctaaataaaagtgtcaaccacacagtgtccactgtgcctggacttgatactgtagtttggtttaagttttcttatgc

SEQ ID NO: 77815 - DNA, 1133 bp, Homo sapiens
tacgtttgctgagctaaaggacaggagtctagctaacaatcataagcttgtgtctcctttgagaccttttattctgtagctcttagttcttgcctagagattgttatcactattattatcatcatcaaatattaaatattaatagtgctgtgctcagtgaacatcaagtaacaagctaagatttcttatcagtcttgcttggggaacctcaggttgccttgaggatttctgggaggctttcagtatataaaattcccatgcagttcagtgggaagaaaagtatttccctgtttttcatcacatttgtcatttgcttgcatgcctggtcctgtgtaataggtagcgttaaaattaaaataaattacttatcagtattcaaaattatctatacataaatgacatatgtaatacgtaattatctattaataaacacattattttttatgtaaaaaaattgcccttatccatatataaaaatagaaatcatcccttgttctgagtctggaccctcatgcaaaatttcataaagggctggtttaccccctggtaactgcaaaattatgctgtgctttttgaagggggttttcttctcatgagctggtatttataccagtaaattagcaatgttactttgcttgtatcttattagagctgcttatggacactcttatgggtttgagaataataagctaacaaattacttgtattttggctgagcgtggtggcttgtgcctgtaatcctagcactttgggaggccgaggtgagtggatcacttgaggtcaggagttcaaaaccagcctggccaacatggtgaaaccccacctctaccaaaaatacaaaaaaactagttgggcatgatggcacatgcctgtgatactcaggaggctgaggcaggagaatcacttgaactggggaggcagaggctgcagtgagccgagatcgtgctactgcactccagcctgggcaacagagcgagactctgtctcaaaaaaaaaaaaaaaatcacttgtatattattaaagtgtttaggattatacatacttgtccatttcttgytaaataaaagtgtcaaccacacagtgtccactgtgcctggacttgatactgtagtttggtttaagttttcttatgc

SEQ ID NO: 77816 - DNA, 1122 bp, Homo sapiens
tgtatcactgtgttgggcactgcataggccagacagagacagctaaaggccactccartgcagtgaacatgtggaggacatggtgggaactagcaagcccctaacacgataggagttgacaagcctacagacttgcactgaatgccaattaatgtaagtgcatttgatgaattaccattttttttttaaccagggtgagatttgtagaaatttgtgcaaatttggaaaatttttattgtaatttggaaatgagtgatagcactgagtccttcttagtttcgtatccctgaacccctctagaagaattgtaggagccttaggttgttaacatgggaaccattaagacatcttcttaaggtctcacttggatcctatttcctgaatagctctgtgaggctaagctttaccgtatgttttagttatctgttcaccatgaaactctggtttaaacaacaatcatttgtttgcttatgattatctaatttggctatgactcagcaaggacagtgtgattctgtcctatgtggtattaacttccaagatggctggctcacatagttggcaaattggaactcagctgcgggagtcagccaagggtgccttggttggcaggattcccaggttcttctctgtgtggccagcgtgggcttccttacagcaaagtggtccagggtagtcgtattccttacattatggctgccttcctccagagtgcaaacgcagaagtcccaggccttttttaggctagtcttggaactagcacagcatcacttctgccaggtcacaagggtggctcactttcaaggagagggactccatagatgtgagtcctaggaagtgtgactcattgggggctattgatgtaatcatctcccagtttggtttcctgattcttatggctgtcgctgccctgataccgaacttggcacccccgttgctcaaagtcttagggacctgccctactctttctagaactttcaaggactgaaactcttcttttcaggctttgtcctcttggtagctatcaaataccttgctctgtcttgctggcacaaccattgatttccccatgaagttttctggaggctgtcctaggcctttactatgctcctggcttgcaaa

SEQ ID NO: 77817 - DNA, 548 bp, Homo sapiens
tgaaagttgtttagagctctcctctccagtttgatccagtagctgaaggaatttaatcctctcacacccaatgcttttaatatacaaaatttatgacttcctgctccttgatcaagtagagctgtgtcttgtttctataaccttttttaatcaatgccccaaaatcatatcagaaaggagcccagaaaaagactatcatttggaggaaagaatcttcttataattttttttctctgttgaatctattttggggcctttasttttaaaccaataataataataataatgagtgccttcatgccatcttctaaaaaataatgagaacattcaagaaagagaatcatgccattctaattaaactcactgagtacacctggcttcaactactttgtttaatgtcagtttcaagacctaaggctatttctagagaggaccttagaaaattaatttctttgaatagctattattaaaaagtcaaaaaataatagatgttagcaaggttgcagagaaaaaggaatgcttatacactgttgttgggagtgtaaatt

SEQ ID NO: 77818 - DNA, 683 bp, Homo sapiens
tcaattagaccttgggacagacatcagtggaaaaactggtaaaatcaaaaaaaaagagtgaagtttcatgaatagtaatttcccaatattggttccttggtttgataactataccacrgtgctatgttaacatttggggatactgagtgaaaaatcaaataactctgtattatttctgctacttttctatagatctaaaattattcaaaaatagagtttcagagtgatattagcaagatggtggaacagacaatcccccagcatcacgtccctgacaaaaatacaattagaaaccattcaatgacaagaataccaccatgaatataccagaactcagaggggaagcagagaaaccaccaaggcacacagaattgagagaagccatgacaggtaggatgaacagtcatttaacactgtgccaccccttcccctaagctggcatagtaccactcacagagattttccctagacccatggttgctagtgaaggagggaattggaggtgaatattcgatctccccactggtctaggaatcttcatgcgaagtccattctggtcctatttgatcagaaccattgggagtgtcaggaaagcttaactacttggggtgaggtggaaacaatgacctgggtgttcatcacagaaagctgatctcagcactctgatcagtggggatgccaag

SEQ ID NO: 77819 - DNA, 935 bp, Homo sapiens
ctgacccaatgtctttcccctttctgatttctctggaactccagataagtcattagccaagaccctgtatctcaaactcttctttgaatgttccctgcaacttcatgctctatacttcctctcgtgatttatagctcttccgacagcttccataccctttgtatcacagagcctggaagtagacgcaattgtctccttgctccacagctatattccttcctgaaaatattatcctctacccctccttgttgcagtcatttcctgatccctgcattacttcccttcatttctagatgttagctcctggttttaactctttccaatgctacttctgccataattctcagcgatttcaacattcatgtctgtgatcattctaataccctggcctcttagttccttgggcttctgtcctccaatgatcttgtgttcccacatgcctcagccacccaccgtcctttaccagctgacatcccctgattcatcactctaaacactgctctccatgtagcaagcagacaggaagctaaatccagctggaggaaaacacgcagctaagctaagtgcttttacttaaaatttgttaccagtaatgtcaactgggtccttagtgctacctggcaagtctgctgtttcccaagtccaaacatcctctgttgccttgaagtctccaaacctcctgcttccctaacctagtcttagttgaagaatttgcttccttattgaactgagaaaatagaggcaatcagataagagcatcacaggcttctaccatcatattttccaatatacttacagctgaatcyggatagtttgtctttactcctgcaacgatgcctgatttgtccatgctcctattgaaggtcaaccctacttagctctaggtttcatgctctcttatctacccaaggacattgctctagcaattgtcacct

SEQ ID NO: 77820 - DNA, 3290 bp, Homo sapiens
tgcatatacaacctaattctgacaagatcaacagaaatcagcccaccaaaaagttcatccgggtgcagttctcaggctcccattctgagctctgttctcaattagcattggtgtaggtggcttccaaagcaaacagttcccactgagaaatcaaatctgagaaactcctcttatcccttttatccagggaaggagcatgacataaaaatgcaaaccaaatgaaaagggatgaagagagatggccctgctcagtgatgggctggatggttcagcatgtttggtgctcacacctctccaagaaatgtgggcaagagccctcctgagaacatgttgaaacagcaggccccgtctgcacccatggtactctgccagtgatctcatcagccaagctgggcaatggaacctggtcagcagcggcttggaaagcagccaaatcccagttcctgaggagggggtggtgttgattctgtctggagatgacactccgtctcagcttgacttatgaatatggttcttcatctctaatgagcactaaacagactggtatttgggtaccaagctgctcgtgggactggctttctgtcaagtgagaacaaatccgatctccacaatgtagagttaagattattctcttggtaaacagcaggagaagcagtcaacttcacacattgagagcgctttcacggaatgaaagagatctttgagatctgcggcttcatgtcacacgcagacaaggacaccaaagcacagagcatttagacaactcacccaatgtcatggagctgaactgcatctactactcttgtgttcaacttaaagtttaattgggttaggttaagtggtctccactttagctagaacattttggttgttttcttgcttaaatactatgcggtcatcagagtcgtagtttataggccaggcgaggtggctcatgcctgtaatcccagcactcggggaggctgaggcaggtggatcaaggtcaggagtttgagaccagcctggccaacatggtgaaaccccgtctctactaaaaatacaaaaattacccgggcttggtggcaggtgcctgtagtcccagctacttgggaggctgcggcaggagaattgcttgaacccaggaggcggaggttgcagtgagctgagatggcgccactgcactccaacctgagcgacagagtgagactccatctcaaaaaacaaaaaacaaaacaaaacaaaaaatgaagtcatagtttatagagtaaatacagtttaataaacttaaagttaattatctctatatatcattatgtatatatgcatttaaatatctctgattacacatatgatcaccgaacatatattgatgaaagtagcacataagacacccataaaagtagagatacatctgccttcacacaagaggacttaaatatacactgacttgtcctgagtttctcgctctagaactgagacagaaacatgtatcgaggcattctgctgcttctctttctaccgaattttgcccaattaattttttcccttcaattacttacaaaagtcggtggttttctatggtaggtggaataacgtttcccgcaaatctccagaacctgagaacatgttaatttgcgtggcaaaagggaccttgtcgatatgatgaaattaaaggcatagagatggggagagcatcctggattatccaggtgtgctggaatgaatcacatggctctttaaaatcagagacccctttccagctgtggttagaggagcttatctgtcagggtgggcagacagactggtgatggctttgaagatggagagggggtccaagagcctgggaatgtgacttcctctagaagctggaaaaggcaaggaaatggattctcccctggagcctccaggaaggaatacagccctgctgacaccttgatgttagcccagtgagacctgtgccagacatctaacctatagaactgtacagaataagttgtgtcgtttaaagccaccaagtttctagttatttgtcgcagccatgcgagaaagctatcacctcctgattccctcctccccagccccccacgccaattctgaggtgacaggtatggttttggcatattcagaataggttcataaaatggaaaaacctagaaaaaaaaattgtggttctttctggccagtattctccatggaggagagcaagaatttagtagtcttccactcatgtgcagaatccatgtacagaaagtgtgctaattgccagctgtacacaggatgtccaccaggctatttccctaattgccaaaagagggaaagggaaacagcgcgcaccctcctttgttattaggggcatgcatttgggaagcagctgtctgtcttcagtttgtgatagtaaaacccagtggtgttatagctcatgctacctggtagggtactgacatgggaasagtgaagagagaagtgagtcttggacctggttcagacactctctgggaagaggaagaacacaaaggccaatgaaagacaggcaacgcgggaagacgcatagagataacaagtgaatcatgagctgagagcagggctgggctaggcaagtgcttccaagagtcctctgagacctggtgcctggggctggagaggcaaggtaagaggattgagaaataacaatctaaaggttatttgtgcacagtgttctggtcctgcagagacctacaggcctgtgtgctttcactgcatagcagagaatggtacccagtgtccagctgccagaactggtgtctctgagaagtgaactaatgactattcattggcaccatgaacaagtgggccagtcatccttcagcaagataataggtatcatgaatttgatgatgcttcaggactcttactaggaaaaatgaaagtctgggccattctgagattactcatagtatcctttgtttctggacactttattgtttaatttttcatcaaagagattctgggctgggaaggtttgagggaggtcagactgtaatagaaaggaacagctcccaccacagggtggtcctttattaagaaaatatgattttttaaaaataactttacttcatggaggtgggagaccggaccacaagatctgttccagactttagagtctgcagcagttgtttaagaacagcttctaccttgaaacaattccctagggaagagaggtatgtgggaagtgctgtgcatatgccctaatgcgcttatgacacacatgcacacacatacacacacatacagacacacatgcacacacaggcacacacacatacacgaatgca

SEQ ID NO: 77821 - DNA, 738 bp, Homo sapiens
gccattaacttggcttacccatgttttcagctctatgagaaaaccactacatatattttttaaactagtatgcttttacatctcttttggtaataagacggtgaaaggtgtgggatttatgtactattacataatttgtctctctacctgtaatcacggaaactgctgaaattgacctaatacttttcttcccaatgagctgaattaccataattgcataaacaaggattctcagtgcagtagagtcctacaatataaatctgcatctagtcaatgaaacaaacaattctcaattgaagaatgacaagtagactacggaatgatctgataattttaagtttcttgttcatgagggtcttcatcaaacaataaaaacatacagaaaccttcattcctagcccaaattttttatttcaatcatagggaaataaactccttctctaaaacaagaacagcagagaatcatatatatatatatatatatatatatatatatatacacacacacacacacacacacacacacacatatatayacacacacacacatatgtataatcataatcatatatatatttctttttctcttattatgagttgctgtgtggggtctgtgctatcttctgaggatgtgtgcacacatgtggctgttggaagtcgattgtttcaccatcaaaaaaagacttgcatgtggtttttatgaagagtgcgttttcaaacacatagttcacgatgaag

SEQ ID NO: 77822 - DNA, 1536 bp, Homo sapiens
aaacagaaccacagctattgtcctgaaactcatcctcccgtttcccagtgaaatcatctcaatatacttctgaccccatcatccctctaagtctctcgggacccctaacctcacctttccctcccctcaaaaatggatgtatcatggagaaagtttaaagggctgatgtgaataaatacaacatagttaaatagttgccttttccaggaagacttctagaatcattgtcattgctctaattagtctgttactgtgaaccctttggcattttgtttattcaagtgatatagtttactctgaaaatgtgaagagatattgattactatgttaagcaatttatggagaggagcttttcttctgtgacttgtgctctatgcaggatggatagacaagcttgtatgtagattcttataggtaaatgcagaggggctgacccaatccaggagtaaacatttcttctagaaaacagagagtaaagacaacagattaaagacaaaatcacttctgcctttgttttctattgtaatcttctgagaaaagatttacaacaggctagaaagattataaatatagcatctatctatatccaatatagaacaaagcaaagtagaaattaactactttttcaggtaatttaacatggatgtgaaaatatcaaggtatataatcaccatggagaatttcagagtgttgtggttgtatatttatatacatttaaatttttgttcaaaataacattttctttgtggcataaaggcccaaagtgaatcagtatttatcatatgcttttacttttttattttcaaaattatagaaagttgtttcaaagagataaagttgcacttttcatagccaacatgcatagattgagtgagaatactcataactaggttctctttctttggtcatttcagtctgcaaatacagacctggcaaggtaagaaaaagtagatgaaacaaccaagttatcatattttaacttcatttctacraaaaaagaatatttgtattgtatattaaattgaccatagtgccagaactttatgatgttatattacatgatcactaatctattattattgtacacgtatttacacacaggcataagtatacacatactttgcatataaacatgtgcaagcatatttcacttggactgaaaggttatttacaactctgtctggatatacatacaacagtgattaacaagtgcataaccaatctacaacacgtagattaaaactaaataaacagtgtaagagtttattttaaaacaattacaagatgttttatgtttctccttcatcgtgaactatgtgtttgaaaacgcactcttcataaaaaccacatgcaagtctttttttgatggtgaaacaatcgacttccaacagccacatgtctgcacacatcctcagaagatagcacagaccccacacagcaactcataataagagaaaaagaaatatatatatgattatgattatacatatgtgtgtgtgtgtgtatatatgtgtgtgtgtgtgtgtgtgtgtgtgt

SEQ ID NO: 77823 - DNA, 1384 bp, Homo sapiens
atatgtattttctgtcgtctttatttcttttctttttttttttttttttttgagatcagctctgttgcctgcctgggctcaagtgatcctctcacatcagcctttcaagtagctgaaaccacaggtgtgtgccaccatgcctggtgaatttttttaattttctgtagaaacagggtcttatcatgttgtccaggctggtctcaaattcctgggctcaagcaatcctcctgccttggcttcccaatgtgttgggattacaggcatgagccactgtgcccagcctctctcacatctattctcttttcttcactgcatttatcactatttaacattgacacgcttattcattggttggcttatttatagtctgtcttcctattttagtatctgccaccatagcactactgaccagtggatctaataattacaaagtcagttggtttcttatttttactgtcctgtggtgtagtatattaatcttctaaatgtaatacttaggcatttgcaaaatggcacatcacacttaaactatagtatgctctctgttattgtggtacctagactacaatagtacatcactgtgaggttgagactagacatctgaaaagtgagtatgtgccttggaagtacttaagacacagcagatcaatatatttggayggccatgtcaaagtgagtgtgtaatttgtattaagtgagtgtggacactcatagatggtacctatagatccttgctgttattggtcacatactgctgtcaggggaaaaaattgtgcacacacccttaaactctatgcatttatttacaaattgtttataaattgttagtatttacttacaaatattggaaaatattggtaaaattagtaaaatatattaaatattagtaaaattaagtttttattttttaagattaaaaagcaaatagaggttccaatataccttttctacatatactcttggataaatgctccccactcttgagcccactggcctaatcacagaccatgaagtatgtcaagagcaaagctctcttcactgtcattaatcaatcttctgtcaatatgctttgtggaggtatagatctctttcagctgcctgtcacaacagaatgacagttgtctgcctctccttaaaatgcagggagaacacttgatggtctctggtatgatctactagttttttgttgagtaaagttattaatgttctggccttaattttccttcagacccttctggtagatataatcttctgccttttttccttttcctttttttttttttttaaataatcaaaggagtctttgtgttccagtatgacactaggcaaagtttttatacagcccatcaggaattcacatatgacctcactggacaatattcag

SEQ ID NO: 77824 - DNA, 1286 bp, Homo sapiens
  misc_feature (1)...(1286): n = A,T,C or G
agcctcccaccttggaccccaccagcacctcttatgaatcccagctcggccagaacaggtaaggagtgtcctggggtcactgcccttcagcggcttggactagagaggaacagagcgaatgggccaaaagatcttctgggtctcagtagttttcaaactgtgctccaagagaagaggcagttgggaaaaaggtgtagggggcagttccagctcccccactctccaaccttgagttactgtgctcttatctgttacacattccagctgcctaggaaagattttaattgaaaagaggccctgctgtattaaaaaaaatcaagttcaaatgagaacacatggacacaggaagggcacacaccggggcctgttggagggtagggaacaaggggagggagagccttaggacaaatacctaatgcatgcggggcttaaaacctggatgatgggttgataggtgcaggaaaccaccatgaaacaaatatatctatgtaacaaacctgcacgttctgcacatgtatcccagaacttaaaaatatatatatatatctcaaaaaaataaaatagtaaagttcaaaacactcaagttagttcaaccccacacaccccatgttttacagctggggaaactgagatgaaaaggcttgcccctgtggctggctcactggtgccgtgtctcaaaccagcagcctggctccccatgtttctggttccccgcaggagaccagcatctagttgggaggttctcaagctatttggtcccaggatggctttaaaccctttaaagttattaagagcccaaaagagcctttgcgtgtggaggctatatctatcaatgtttactgtattggaagttaaaactgagaaatatgtaaaatatttattatttttttaaaaaatacgttaacacaaataatatactcttataaaaagtgtgtattttcttgtgtccmctttttttaaagcttttattttaggttcatgggtacatgtgcaggtttgtgatgtaggtaaacttgtgtcacaaggggtttattgtacagatagtttcatcacccaggtactaataatacacaatagttattttttctgctctctccctcctcccaccttccaccctcaaggaggccccagtgtctactgttcccctctttgtgcccatgagttctcatcatttagctcccannnnnnnnnnnnnnnnnnnnnnnnnnnnnnnnnnnnnnnnnnnnnnnnnnnnnnnnnnnnnnnnnnnnnnnnnnnnnnnnnnnnnnnnnnnnnnnnnnnnttat

SEQ ID NO: 77825 - DNA, 797 bp, Homo sapiens
ttccattgtctccaaaaggcttaggatactcctccttcaagggcactcccaaaggcagactatcttacctaaattaaaggttctcygaagtggtcactgaaattgcaaattattctttgtaaagttcacctattttttcttgtgaactttgtaaagttcacaagattctgatccacagtgtttttggaccccatctttgcattagattctctgaaaggtcttaactattaaggattcttttttcagcagctgctctggaacacagggaatcatgtgtttcacccttcccccttttgaacagaataggttgacttcctgagaagtttcagcaaaggttgttcagcataattggagagttctacacagaaggaggagagctcagattcaaaagagacttactctagaactccatggctgggtgagagagcagccagtgctgcggccctgggtaccagcacctagttactggccttggggcttcacaggggtcttcttctgatcctgcttctgacatcaaaaactgtcaaaagaaaattcagggtgcttttcttaatataaatattaagttagtaaaaaactgcaaatagggagacttccaaatcaaaagtggtaagaagcttgtctcacgaaggttatagtaaggtttataaagcctagaaaaggaaattcatacagcttaattctcactggttagaatgagtgggttagtttagtcattactgatttgctgcaatgtgctgagtcatgctgaccaagaaatgaagttcaagcttcatgtgcagtttaagtaggtgttt

SEQ ID NO: 77826 - DNA, 740 bp, Homo sapiens
accccccaccccaccccaaattaaggccagcacttgaagcattaaatactgtcattgtggggtctaaaagttctggttaacctttgaaccccaaggcagagcaagatctgggactgaaaacggcgattgtttaaaattcagcagacccactgggcagtgcaccttccaggcctttccaggacacctcagtaggagtttggtttgcccatcatctctgggtcaggctggacacttggctgtcacacttggccttctggggtgactgcgtgagtgtggccccctcgtcagcctgtcaggacacctcctcttgctggggctgcgcctctggctgggatttgtcctggatgtggccggtccgaggctccggttgcagcccgtggcccagcacacagaactctrggggagatgcacgcctggtgccgccctgcagttcaggggaacaggggctgctccccggctctgtgtccttcttagggctctcctcgctgctgctgccgagagaaaggacaagtgcaggtcagacactcctcctctgctgctccttcctgccccacccctgtcctccattctccctttctgtccctccccagccctctcccacaagcctgttcaccctgggtgccaggcctctgccctctgtaccaggcttgccaggctggtgccgccattgccgtgtgcctgcaggggtgggcgctgtgggagctggggtgactggctgagtcctgttctttcccctgaag

SEQ ID NO: 77827 - DNA, 657 bp, Homo sapiens
aagagaagcataatgttttcacttcttgaaataatgatatatttgaggagatgacatcatatatagacagtattgtcaaaatacgtggtccccaactgtgccatacgcagatgagggcttaaaatttctagaaaagggaaaattagatggattatttttatagataaaactattagaaaagtatttacttctatgtaatggccatgttaaaaaaatagtggactttgtaaaactataaagtagaaccatttgctaaagcgatatattgaaagcatttattttgtgcccctgtaaaaaagtaggttcttttcaaagtaaagttatctgaccttcaagggaatctactttgaaactgattattatactatttattcttcatagacatttatttaaagggtttttatcattctggtaaaattgatttagtatatataaaagaagcattcacttaatatagagctattcatctggaagggttagcattctattagattttattgtgctctttggtttattttctaagttattttgaccagrttttcatttaaataatttaagcaatcaataagattattcctggatttgcaataagaataactgtcctcttcagagcatcctaatgtcaatgatacatttttgatcggtgaacttttgata

SEQ ID NO: 77828 - DNA, 1167 bp, Homo sapiens
tttgccccaatttagcaggtccatcttagcttcatgctactatgatattcagaggtctttttgtcttgtttctttatggctatatggtggcccatgttctcccttctcccaacccttccactcttactccaagagaggtattggcagtgagaacactccccagttaactgcctgaatgaacatttttttccatgtaaatatttcagaggccagagactgagcatggtggctcacatctataatcccagcactttaggagaccaaggcgggtggatgacctgaggtgaggagttcaagaccagcctgctcaacatggtgaaacccatctctagtaaaaacacaaaaaattagctgagcatggtggcaggtgcctgtaatcctagctacttgggaggctgaggcaggagaattgcttgaacctggtaggtggaggttgcagtgagccgagattgcaccattgcactccagcctgggtgacagagtgaggctctttctcaaaaagaaatatatatatatatttcagagactgcttccagayacctaacctgtgaagctacccgggttggctgactgcttttaacaaagctattgtccgcaatacgtatttcttattcatcttttatagcagtagtttggtcaaaacttgtggaaaaactctgtagcaaaatgtgaaacattaaattaactttcatagatttgaatgtatatgtatctttcatttatgatacccataccatctaaagctatataggaaaatgtctattttaatttatatttccaaggaacaacgatccatgatttatttatatctagaatgttaatttagattttttccttgaaagttttactcaagtctaaagttaagttgaattactaacatataaatcagaaataaaatttacccacacattgcacaaatcctttacattagggcctaaggaaactaggccataatggccttatttttgacttagtatgtattattcaacaaagttcttaattatctatgaaatcaagggtattattacatgtcgcttgcatggatttttaacaaagagtgaggagactgggcttttgagtgcaaacccacactggatttgagatttagccaatagagtgatcctagatgataaaaagttttaataataacggttctgagtttacatg

SEQ ID NO: 77829 - DNA, 860 bp, Homo sapiens
gtgtatgtaaatttaaataaataactctgaaatgtattcaaaatattgaaataggctgggtgcagtggctcacgcctgtaatcccaacatttggggaagttcaaggcagatgaattgcttgagctcaggagttcaagaccagcctgagcaaaatagtgagaccttatctctgcaaaaaattttaaaaattagccaggcatggtggcatgtacctgtagtcccagcttctcaggaggctgaggcagaaggatctcttaagcctgagaggtcaaggctgcagtgagccatgattgtatcactgcactccagcctggcctgggtgacarggcaagacacggtctcaaaaaaaaaaaaaaaccattaaaaaaactatctatctatctatatacacacacacatacacacacatatgtttatatttacatatttttgagaccatgtcttgcctctctcacacgtgcgagagagatgtgaggatgagagaaagaaagagagagaaaccttttactagatttcttttctttttgtttatcttgctctgtctcccaagctggagtgcagtggtgacatttcggctcactgcaatctccacctcccaggttcaagtgattcttctgtctcagcttcccaagtagctggaattacaggcatgcaccaccatacctagctaatgttttctgtagttttattagggacagggtttcaccatgttggttaggctggtctcaaactcttgacctcaagtgatctgcctgccttggccccacaaagagctgggattacaagcatgagccatttgcacctggccctttctctagatttccaaaatttaaatttgaaaaacatctcttgaagacaaa

SEQ ID NO: 77830 - DNA, 1773 bp, Homo sapiens
tgtggggcgtctgggcacactgttgtaaatgtcagtcttcaccgagtggcccagttattgggctttacagcctgcagtgcaggctggtgtgctctgcagtggccttcacattcgctgtcttctcattctatctgcccagccaccctgggccgggactcaggaaaggaastagtaagaccactgtatagatgtagaaactgaggtccacttggggaaagattggcccgagtcacatctggctggtggaggggctgggactgaagccagcagagacagctgtggtattggccctgatttaaatcctggttctcacttgctggctgggagaccattaagcttcacgagccttggtttctttatctgtgaattgggcacgataacctttccctacagagctactgctggggttaagggtgaggatgtgggtgggctgcagaccacagccgtcatatatttaaagggaaaatagcacctctcctgaagaagaaatcaacataccagtgctgggaccctgtgtccagcttctttctgctctgccgtccttcttctgagtgttggtggttttacagtcagaacttgcagctggaatgtctgggtttgagccctgtctctgcccccgactctccgtgtgactacagtctgggcctcagttccccgtctataaagtggggataatgatcgaaacctgcctcctagggctgccatgaggattccagggaaggtagctgaggaagtgctgggtcagggctggccattgtcatcctaggacctggttgagtgtgtctagtttcaccatgcttctctagatttggcttatattctgagtgttttaaagggattgggtttgggacccaagctcccttttggtgccccaggagcctgcatgggcagcctggggaggagaaagataccccctctcacaagctggcttcctgcactgtctggcactttacccctctctgggtgcttccccaggcctggttctaaagaaagatgttaagagagacctgagggtagcttaggagcggacctagatgggagacttctgccctgccatggcccctgaagtagggtaccctgcctgggggatgctggccctcaaatagcttccctatttgggaacttttgtgctcccccatatgtcatacatttctagcatctcaagaggtgtttgtttttttccatatcaagggatccatggagtgaagagacctatgtgtgacctctgaaccctttatgggggattgggttgggggtggggaggacaccctgccaaggtgaggccacctcatctggcctctgggctgctggctcagccacctcctgggtcctgcaagcaactctgcttcagctcccggtcaccagcacctacttatgccaagctgctgccttgttctccagctcacccacttcccaggacccctccggaattctgtggggatggggaggttgcagctaagtgaatagtcaccctattattttaggagaggaacaacagcctgtgtgcaaagcccctgggtagggctggtttatttatgcatttgtctttaatgggaaggctgagagaaattgcatggtttgtgaatatttacaggcaaattactacagggaggaaatgaattcattctctctcctctcccactgttaatagatcacactgtggttccctgaagcctgcctcccacctcccccccttttctttcttgcaactccttgtagtctttatgccagctccaggagggtgtccgggtagacgtgccaatttaatttacc

SEQ ID NO: 77831 - DNA, 669 bp, Homo sapiens
caagaagatgcaacaaatagcttaagggtgttcattaaatacaccatcatcatcctttcttgagcatttaccacgtgcccagagctctgcaactgttttaacactcattatttaatttaaagctcatcgcagccctaagatgccattagtgctaccattttctagatgagagttgagaatttgagagagactcaataacacgcccaaggtcacccagcctcagagctggcgtttgcaagctctgtccttaaatcagggtacacaccaggctgcctccctgaaatcaaactgagaaacttaatcagctcaaaagccatttgttttgagtccattccactacttgaaaattccttatattccacgggagccaaaatcaaattgtcacagaaaaacaagccaagagattggtatstccaaccaccccggctgaggctgggacaacaccgattccagtaaatccactgtgatccttccacccatccatccattcaccaacctctggctgatgccccacatggcaggctctgctggctgccagagaccagagagggtgagatacccacaaggagaccgccaggcaaacacaggggcagactggacccccagcaccttccatgtacaggcttggcgtcctccagaaataatcaaaaccctttgcagttcaggatc

SEQ ID NO: 77832 - DNA, 775 bp, Homo sapiens
agagaaacaactggtagaatatacagtcagctggatatacagataggatatcaggatatatatctgataggatatacaaccctctgtatccatggattctgtatctgtggattcaaccaactgtgaaccaaaaatattctagaaaaaaatgcaaaataatacaaaaacttcccaatacagtgtattagctatcatgagtaaactagagatgatttaatgtgtacaggaggatgtgcataggttataagcaaatactattccattttatatcagggacttgagcattaatacattttgataycaaagacggtcctagaagcaagggatggatacctccgtggattctaagagatgactgtttatataaagagatttattatgaagaattggctcatgtgagtatagaggccgagaaatcctgagatcagcactttaagtttgtgactcaggagagttgatggtgtaagttccagtccaagggcaggagaagcccagtgttccagctcaagaagtcagactggtgaagtttcctcttactcagccttttggtctatttaggtctccagttgattggatgagatccagctacattggggagggccatttgctttactcaatctacctgtttaaatgtcaatttcatccagaaacagcctggaagacactcccagaataatgtttgacccaaattatccatcactctaggatatatgacacctagagcacatgatttttgtatacttgcttcctctatacaacaaacttattttcaata

SEQ ID NO: 77833 - DNA, 988 bp, Homo sapiens
gaatagatacctacacaccctgctccagccagagcagaagcctagaggacagacagagggtgggtaggctcaggctggcccgggctcagcaggtctgtattttggttgttgctgtgtgactgaggctatccttgtccttctcaggtcattagttccctagtacataaaacaaggatagggggagacctgtagtcaccaacattctccctactttgacatgctgggttccattctgggtgctatgtgcaggcaaaacccggagaggtgttgcctctccaaggagaagaaacccagctggaaacagggacgatgactccaccagtccccatgaccgaccctgagctccaggttcttgcttttatctccaccgtgtgaagggagaataattcttccgtggcaatggaggaacccacaggagtggggctaaggctggggcagaggaccctgccatccatttcccatgaatcagcaaaaacatcgtaaaaactgaaaaccaatctcccactgccatggcttctccactgcacaaaacatacacctcaggtcgcttgccagtgaactctaaataatgatcataaataattaaaatgaaattacagttgtcaaaataaattagcaaagaaccaggagcctccattttctcctcctccttgccattctgtgacatctcagcttgttgttctttaaaagcagatgtgggcaaagcgtctcctgaacactggggcaartgagtgagatgcagtcatgatgtggcatggaaagggcaacggagggaccacagggaggccagagggcacaaaaaaggaatagaaagtgcattcacagccatggctcacccctgaggtttgggacaggtagtgacagtgacaggctgtgtctgcaggctacagctccacatttagcaggcctgggagcagggagccctggctagtcccagatcaccccaaagcctccaaaggtccttggtgccagccggcagtgggctcag

SEQ ID NO: 77834 - DNA, 995 bp, Homo sapiens
tgcatgttcattacacaaatgatatatatttattagacaaaaattcatttaatacaaaaaaaaacaagaggaaattagaaagctcccaatcatcaaagcataactccaccatgcagagatatttggcatttgtgtgtatatctttctggactttccctttacatatatttacacatrtatttttctttatttgttgtttttaatttttttcatttgtttttgagagacagagacagagtcttgctgtcttactctgttgtctaagctggagtgccgtgacgccatcatagctcactatagctcgacatcccaagctcaagcaatcttcctgcctcagcctctcaaatagttaggcacacaccaccatgcccagctaatttttaaattttttttttgtaaagacagggtctcaatatgttgcccagactggccttgaacttctaggctcaagatgtaccttttatcacataggatcactctaaacgtaatgttttagaacctatcttgtaaaaatatttaaaagggaaattttaagtgagcatattttaaatttgttttcaaatatatgtgcttgattctttgctccgggcttcataggtcatagaaatttttcctgaaagccgatggaagtaagacttactctgtaggcctcagtttaaggatgagccaaagttttaaggatttcaggttacgaaggtgtgatgatgttcacttatagttccagccactcaggaggctgaggcaggagaatcacttgagcacagaagttggaggtcagcctgggcaacatagcaagacctcacttctcaaataataaatgaataaataagggcagcatagcagtgatttacaacaggtagaatttgagccagctgatctcttggtttctaacactgagttcggtgattccctgactagttagagaagacaagaggcaaggaaagaagacatgttttcaagacttagaggaacaggaagcagtctgattggaataa

SEQ ID NO: 77835 - DNA, 664 bp, Homo sapiens
tgcaaaaaaaaaaaaagaaatgaatgacaaggcaaggcagaaagctaaaattctcaactaaaataaaacttgagctggaaaacaagtagtactagataatttcataaaagagatctgctacctaagaacaagcttgctctctctttatatccacttacttatttagatcgatgtctttcccctgctcgtgggcttcaatcagttgtttaataacatctcctatagtcagcatcatcagctcagcagggctgagatctcctggaaagttaatattcaacaatgtcaaaaatcgtatcattcaatcaagattttaaaatctgatttagtagcagttttccatccgaaaccatacaaatatgccaaatgaatagctcaagttcagaagatgctaaatctctactgtttacaatttgatcatatcttttgtatctttaaaacaaacgtggctttacatatatatgggaaaagctccctttagaagcacatactctatgagattattaaaaataaatacaggaaaggatacagragtagaaacaatgtgaggagaaagaacttaatcacacaggaaaggaccaaagtaattctcttccctttatctccagaggtgtaattactaatatgtgcataatactttagagttcataaagaacatttagatgca

SEQ ID NO: 77836 - DNA, 812 bp, Homo sapiens
tcctgccttggcttctgaaagcattgggattacaggtgtaaacctccgtgccttgcctaactattacaactttgacctaattcctacagacattttctttagttgccttgtgcaaagtactttatttcaagtgctaggaagaatacctagagaactgctcatctcatcaactaaggctttcctctcagtatgaagctcttttacctcagcctttatgtggttttgtttctgagataagatctcttaaactcttgattgattgctgagaatatttaaactttatttattcagtggactgayacaataaatatttaaactttatccagtggattgagtaaatttatttaatcaattgaaaacttaatttgttttcaactgattaaggagacattcagaagatcaaaaatgttattcatcaaagagcatccatctgtaacaagagaaatattctgaagttggtgttcagatgttggtgtagaggtagtctacagatttttggaaactcagtttgaatagctacttcaagagaaaagagaggcacctccatgtggttgtcagcatgcccggttgttataagccggacaactgaaaactacttgaaatctaagagggtctttccactgtcttcccagctccctcagctggattactccactccaccttctggtctcaggctaagtgttgctgcctcaacaaactatccctggccccctaattaggttgggcccctcgtatactctcagatacaactccatatttccttcttagctatcacaattatcactaaataagcatttctgtaataattcatt

SEQ ID NO: 77837 - DNA, 610 bp, Homo sapiens
tgaacccaggagacagaggttgtagtgagccaataccactgcactccagcctcgacaacagagcaagactctgtctcaaaaaaaaaaaaaaaaaattagctgagtgtggttgtgcgtgcttatagtcctacctactcaggaggctgaggtgggaggatcacttgagcccaggaattcaaggctgcagtgagctaaaatcagccgatgaacttccagcctgggcaacagagagagaccgtgtttcttaaaawaataataataataataattaaaaaagaataaaaagccatgcatttttaatgttgataggtgttgtcagtttattttccaaaagactgaccaatttacactctaccaagagagtaagggactgtttaccctgaacccttaccaacactggatattatcaagttttaaattaatttttctcacttaataggaaaaaaaatgccatctccccattaacaccactgcttgacaagttcttcccaaggcacaccttgctcctcaccatgaggggtgagactgactcgggaagttctgtctgcagcgagtgtgcccagagccacaggcctggaagccagcccaagagatggataagcagagcaga

SEQ ID NO: 77838 - DNA, 610 bp, Homo sapiens
tgaacccaggagacagaggttgtagtgagccaataccactgcactccagcctcgacaacagagcaagactctgtctcaaaaaaaaaaaaaaaaaattagctgagtgtggttgtgcgtgcttatagtcctacctactcaggaggctgaggtgggaggatcacttgagcccaggaattcaaggctgcagtgagctaaaatcagccgatgaacttccagcctgggcaacagagagagaccgtgtttcttaaaataataataataataataattaaaaaagaataaaaagccatgcatttttaatgttgataggtgttgtcagtttattttccaaaagactgaccaatttacactctaccaagagagtaagggactgtttaccctgaacccttaccaacactggatattatcaagttttaaattaatttttctcacttaataggaaaaaaaatgccatctccccattaacaccactgcttgacaagttcttcccaaggcacaccttgctcctyaccatgaggggtgagactgactcgggaagttctgtctgcagcgagtgtgcccagagccacaggcctggaagccagcccaagagatggataagcagagcaga

SEQ ID NO: 77839 - DNA, 684 bp, Homo sapiens
tgcttgaggttgttttttaatagatggattagggagtaattcaaaaaagacaaaagggtacagtaattgggtttccccttggcctgcaaatgttatcatcagagaaagtagtaagaggggctaggactcacaaggtttggtcaaacggttgcctgggaagcctacagtgatgaagggggaggagagcagccctgaagcacagggctagctccattcaacttctccaccaagcaaatggaaaatcccaaggcgcggaggactgaaaggatgaaccacaggctgcaagaccatgacagaacaggcaaggagcccttttccctgcactgccagtggctccatcccccaacggtgctgcctcttttgcatttcagcaacagaattttgcctgaacccccaggttatggggtgacctacaagccacactcaaaagcagatgaacsgagaggcagagcccatgttaactttgcgcctggacccagacaggttgaggccctgagccaacagtctggctttgagatgctgttgtgaatgtgcttggccagaagccaagtgagaccaaccagacacccaagaggtggtctgcagccatggaggagggttcatcctggcctcagtagccacaaccctacatcctacctagggatctccagaccaaggtgctctcactctgatgtgtgacctggg

SEQ ID NO: 77840 - DNA, 673 bp, Homo sapiens
tggtgccagagactcacaggggtacatctttgcatttcaggggtctgtactcaccctgtgtctggcaggatgggctggtcattggtagagtcaccctcaattctgggtaaagccacttccctctgcctctgaaacacaacagagtggccaggctttgggaaggtgtgttagtccatttctatgtcactataaaggaatacctgaggctgggtaatttataaagaaaagatacttaactggctcatgattctgcaggctgtacaggaagcatggtgccagtgtctgctacttgtgagggcccaaggaaacttccagtcatggtggtgtcacatactgagagcctgaacaagagagcgagaaggtggaggtcccgactcttaaacaaccatatcctaagtgaactgagtgagaactcacttattactaaggggatggtgtcaaaccattcaygagggatctgcccccataatccaatcacctcccaccaggctccacctccaacgctggcaatcacatttcaacatgaaatttggagggaacacacaggcaaactatatcaaaaggggccttgaaagctatgcccaggctgctcagctctcatagtttattgctgctcttagatggagcccagagtggagctcaggatggagtcagtggggtccaaaatcttttt

SEQ ID NO: 77841 - DNA, 1243 bp, Homo sapiens
actcacctttataggctgaggtcaagcccacttcttccaggaagcctgacatcctgggcatgacactgtgctggggctgggtgcatctatatgaatgaacacttttggccaaacatggtggctcaggtctgcaatcccagcatttggggaggctgaggcagaaggattgccttaggccagaagttcaagaccagcctggtaagcatagggagacccttatctctaatttttttttaaaagaagaatgaacactttctcagtgtgtcaagaggacartcaaagatgtggccaccagttaaataaataaactgttaaatggataacctcaggttgcaactgaaagtacctaaactgggaggccgaggtgggcagatcacaagatcaggagatcgagaccatcctggctaacatggtgaaaccctgtctctactaaaaattaaaaaaattagccaggcacggtggcagacgcctgtagtcccagctacttgggaggctgaggtaggagaatggcatgaacccgggaggcagagcttgcagtgagctgagatcgcaccactgcactccagcctgggcgacagagggagactccgcctcaaaaaaaaaaaaaagaaaaaagaaaatacctaaaccggcatcaaatgctgtctgcttgattggttacagctgttggatggcagatgcatgttgatcttgtttttctcattcatttgacgaatgtttacttagtgctaggccctgtgtgggtgcaggtcccagtgcataaaacatacacacacaccccattcttccttggaaaaaatcgggaaacacagttgcacaggaatcatcacagcagtaaaaactctccaaagaggaataagagaagtctaattcgggtcagatcttcagagacaggtaagataagcctgcaatacaaggtttcctggaggcctaaattctgggcccagaagagaaaggggaggtggcatcaggcctcatgagatggctcaagggataggcttctggacttctccttggttgctctctgctcatcccagctgaggtcagactgccaggcagtcaggctggcaacgggatagcaggcacatcctgttggcagctgaggcccagtctgggagccgctggccacagccccatggcaagaagacctttctgctcagccggctcgtcctgcagctgtttagtggagaagaaaagcccaaggaaagcagagcctggaatgattgatggggctgtgtgtgtc

SEQ ID NO: 77842 - DNA, 1243 bp, Homo sapiens
actcacctttataggctgaggtcaagcccacttcttccaggaagcctgacatcctgggcatgacactgtgctggggctgggtgcatctatatgaatgaacacttttggccaaacatggtggctcaggtctgcaatcccagcatttggggaggctgaggcagaaggattgccttaggccagaagttcaagaccagcctggtaagcatagggagacccttatctctaatttttttttaaaagaagaatgaacactttctcagtgtgtcaagaggacaatcaaagatgtggccaccagttaaataaataaactgttaaatggataacctcaggttgcaactgaaagtacctaaactgggaggccgaggtgggcagatcacragatcaggagatcgagaccatcctggctaacatggtgaaaccctgtctctactaaaaattaaaaaaattagccaggcacggtggcagacgcctgtagtcccagctacttgggaggctgaggtaggagaatggcatgaacccgggaggcagagcttgcagtgagctgagatcgcaccactgcactccagcctgggcgacagagggagactccgcctcaaaaaaaaaaaaaagaaaaaagaaaatacctaaaccggcatcaaatgctgtctgcttgattggttacagctgttggatggcagatgcatgttgatcttgtttttctcattcatttgacgaatgtttacttagtgctaggccctgtgtgggtgcaggtcccagtgcataaaacatacacacacaccccattcttccttggaaaaaatcgggaaacacagttgcacaggaatcatcacagcagtaaaaactctccaaagaggaataagagaagtctaattcgggtcagatcttcagagacaggtaagataagcctgcaatacaaggtttcctggaggcctaaattctgggcccagaagagaaaggggaggtggcatcaggcctcatgagatggctcaagggataggcttctggacttctccttggttgctctctgctcatcccagctgaggtcagactgccaggcagtcaggctggcaacgggatagcaggcacatcctgttggcagctgaggcccagtctgggagccgctggccacagccccatggcaagaagacctttctgctcagccggctcgtcctgcagctgtttagtggagaagaaaagcccaaggaaagcagagcctggaatgattgatggggctgtgtgtgtc

SEQ ID NO: 77843 - DNA, 702 bp, Homo sapiens
tgcatcactgtctaacaaacacgcacaaagcttaagaagcactcaggggccaggcgcggtggctgatgcctgtaatcccaacactttgggaggccgaggccggcggatcacctgaggtcaggagttcgagaccagcctggccaacatggtgaaaacccrtttctactaaaactataaaaattggccgggcgtggtggtgggtacctgtaatccagctacttgggaggctgaggcaggggaatcgcttgaacccaggaggcggaggttgcaattgcactcaagcctgaacaacaagagtgaaactccacctcacaaaaaaaaaaaaaaaagcactcagacagggtttggaacagtgccttgtcttccctatatgaagtgatgaactgagaaggcttagcttgagtctccacctctatcctttggctacatttaccttagagtgcttctttgcatacaaaaatatgatccttgcatccaccccctacttaaaacccactgccttcaggacagagctctaacgttctagcttggtcctagccccaccgtggccacctttccagctcctcctggcccagcatcctgcccttctgccatgcgggaacttgactttcctgtgcattcacacaccctttccctgcctcggcctgaaacggaacaggcattagtcttgggcctgcagcgctaactgttctctgtgcttcc

SEQ ID NO: 77844 - DNA, 702 bp, Homo sapiens
tgcatcactgtctaacaaacacgcacaaagcttaagaagcactcaggggccaggcgcggtggctgatgcctgtaatcccaacactttgggaggccgaggccggcggatcacctgaggtcaggagttcgagaccagcctggccaacatggtgaaaacccgtttctactaaaactataaaaattggccgggcgtggtggtgggtacctgtaatccagctacttgggaggctgaggcaggggaatcgcttgaacccaggaggcggaggttgcrattgcactcaagcctgaacaacaagagtgaaactccacctcacaaaaaaaaaaaaaaaagcactcagacagggtttggaacagtgccttgtcttccctatatgaagtgatgaactgagaaggcttagcttgagtctccacctctatcctttggctacatttaccttagagtgcttctttgcatacaaaaatatgatccttgcatccaccccctacttaaaacccactgccttcaggacagagctctaacgttctagcttggtcctagccccaccgtggccacctttccagctcctcctggcccagcatcctgcccttctgccatgcgggaacttgactttcctgtgcattcacacaccctttccctgcctcggcctgaaacggaacaggcattagtcttgggcctgcagcgctaactgttctctgtgcttcc

SEQ ID NO: 77845 - DNA, 702 bp, Homo sapiens
tgcatcactgtctaacaaacacgcacaaagcttaagaagcactcaggggccaggcgcggtggctgatgcctgtaatcccaacactttgggaggccgaggccggcggatcacctgaggtcaggagttcgagaccagcctggccaacatggtgaaaacccgtttctactaaaactataaaaattggccgggcgtggtggtgggtacctgtaatccagctacttgggaggctgaggcaggggaatcgcttgaacccaggaggcggaggttgcaattgcactcaagcctgaacaacaagagtgaaactccacctcacaaaaaaaaaaaaaaaagcactcagacagggtttggaacagtgccttgtcttccctatatgaagtgatgaactgagaaggcttagcttgagtctccacctctatcctttggctacatttaccttagagtgcttctttgcwtacaaaaatatgatccttgcatccaccccctacttaaaacccactgccttcaggacagagctctaacgttctagcttggtcctagccccaccgtggccacctttccagctcctcctggcccagcatcctgcccttctgccatgcgggaacttgactttcctgtgcattcacacaccctttccctgcctcggcctgaaacggaacaggcattagtcttgggcctgcagcgctaactgttctctgtgcttcc

SEQ ID NO: 77846 - DNA, 702 bp, Homo sapiens
tgcatcactgtctaacaaacacgcacaaagcttaagaagcactcaggggccaggcgcggtggctgatgcctgtaatcccaacactttgggaggccgaggccggcggatcacctgaggtcaggagttcgagaccagcctggccaacatggtgaaaacccgtttctactaaaactataaaaattggccgggcgtggtggtgggtacctgtaatccagctacttgggaggctgaggcaggggaatcgcttgaacccaggaggcggaggttgcaattgcactcaagcctgaacaacaagagtgaaactccacctcacaaaaaaaaaaaaaaaagcactcagacagggtttggaacagtgccttgtcttccctatatgaagtgatgaactgagaaggcttagcttgagtctccacctctatcctttggctacatttaccttagagtgcttctttgcatacaaaaatatgatccttgcayccaccccctacttaaaacccactgccttcaggacagagctctaacgttctagcttggtcctagccccaccgtggccacctttccagctcctcctggcccagcatcctgcccttctgccatgcgggaacttgactttcctgtgcattcacacaccctttccctgcctcggcctgaaacggaacaggcattagtcttgggcctgcagcgctaactgttctctgtgcttcc

SEQ ID NO: 77847 - DNA, 1066 bp, Homo sapiens
tctgttaagtaacaaatttccaccaacttagtagcttaaaacaacacaaatttatcgtcttataattttatagttcagaaatctgacatggtctcactgggctaatatcaaggtgtcagcaagcctgtattctttttagtggactctagggaagaattcatttccttgcctttttcagcttccagagtctgtcaacattctttagctcatagtctccatcttccttcttcaaagccagcagtgttgcatttatccgcccatatttccataatcacatctctctctaattcttcttttctgcttccctcatttttgaggacccttcagtaggactgggcgcatattcgttggataatacaggataatttccctgtttcaaggtccttaacttcatcacatctaagaaatttcttttgccatagaaggtaatataatcacaggtgccagtaattagaacatktacaccattggtgttggtgggaaaggagcattttatgcttgtcacatatgctaataacataagcattaaatctgttttatactagataattatataaattaatattttaacagtttttctatgatttcaggtttgttagtttttctcaaatatttcctttaattctagtgttaaaagtttctgttcttaatttggcaagctcgcttttgtaagttcctatatttagcctgacactgattacagtatcttcttctgagttgggattagaatcagacagccctatgggaaggcattatataatattatagtcctacggggaaacctagagttagaaataaaaaattcctatcattacattcgttactctgctcttagctgggttctgtgaaagaagaaagagaagactttgcttacttttcgaagactaaaggaatttcaggagagcctaaatttggatatgaaaggggtagatacaaactaatatataaaatacaaactaaaagttacaagattattcttatatttttcatttagtttgatttggtctgcatttaaagaattaaatcatgacttttaatatcatctttaaagtcatagaaaaaaatg

SEQ ID NO: 77848 - DNA, 1158 bp, Homo sapiens
caggacttctcactcactttaggcactcataaaccacacaatggatttcagtataaacaaacaaatgaacaaaaccccaagggaatctcagtgccattccagccttaggaaattgaatttataagtcacatatatgattagattctctaacaagcctgagcaagaaaattcctctgaaacagttaactgttaattcttccaaagtaaattgactattctgcagttggagactgattttgaataaattacttctcctattaaatcacattgaatgcaaatgctataaagtgatgtttatatgggactgggaaaggtgtgaaaattgctggaacagtgagagaatacctgttagaaatgttccacgtagaccccagtacttgctgcttaggaacatgccaagttacatatgaaagatactttgtatgaccttagcttgtatgccagactctgcctgccctaagctggcatcatctcatctttcatctctcatgcatataatccgtttaggacaaagcagacaccatccagttttcttgcctccagccaccattctatcagccataatcccagagagtcaagggttagcaaaccccaggggtgttcaaaaacattttctagacattattgaatcccttatagcaaaagrctatgagatttagggtaaaaagattattacatgataaacagtttaactcaacaagaagatttaactatcataaatatatgtgcacctaacattgtagtactcagattcataaaacaaatacttctaggcctacaaacaaacttagacagccagactagacaataatagtgggagtcttcaacaccccatttacagtgtgagacagattattgagacagaaaactgacaattctgaacttaaattcaaaatattggaactaatagacatctacagaatactccatcaaccatagaatatacattcttatctgcatatggaacatactctaagatcaaccacatgcttggccacaaagtaatctcaataaatttaaaaattgaaatcataccaatcatattcttggaccacagtagaacaaaaatagaaatcaatgccaagaagatctctcaaatcaatacaagtacatggaaattaacttactcctgaatgacttttgggtaaacaatgaaat

SEQ ID NO: 77849 - DNA, 1521 bp, Homo sapiens
ttgtgaactgatatgattctgttttcagaaacccaggcttttactctgggtctgccttttcacctttaacactggcttctaaccctcaaggtcgctgattgtctaaattgcttttggagctgtaagaaacgggaaggagaaagtagctatttgtcctgtcttaaaagggctttcctggaactcccacctaacatgattatagctcattggccaggaccaggtcacatggtcacattgactacaagggatactgggaaatactayctttcagctgagtttctagccaccccaaacaaaattgggattgtctttctaaggcagtagggaaggaacattgcatgggcaatgaacagaatatgtgtcatgcagataagaataagtaaggagataactaaatgatttggtcaatgtctgcgtgaagaaacaaacaaacaaaaaacagctatttgggagccctgtttaagaagggggatatttacagactattgtgattctggggctgagaaagacactattcttgtgtttatacccctagagcctttgattgaactcgaaagctcctgtctgctttttgttttcattcagagtagtaaatacctttgtttccctttacaaataagaaaatagggagaggggcaaaagaaatagaaatgttctatctatctaagtttttaggatgtcaagaattttcctgacattaggagaaacttccaccctgtatggcaaacacctgtcaatgatggcactagcaaggaggatcagagtgaataaaattctaagatttgcaatgctggttgttagagttactttctgcagcagaactacagggaattagagagaagctgaagttgcttaaaaaaatgagcttctttgtcaggtggttgctaaggccttgtctcattaaagaagaggaaataagtgccttatgggagttcctattttcttgttgttgacaagaaggaaacatacagcgtttcaatgacagataaaaagctttgcctatttaggtgattttgactaattgtccttgagaataaaagtgagaacagaaagaccaatttcttaggaagaaataaatgcatctgtgtttaagaattagtttttcagtgtaactggttggttttggccactgagctcacgagatataaacatgagatggtttattttctccaaaatggttaagaacagtgttctaccaaaaccttttcctctgggtggcaggctccccaatggcatcttagtctaactaccattttcagttacatttaactattaaaacagtcttatcctagctttgaaatataatcctgtttatttaaaattgttattttatatttaatttaaaatgctttctggcttgaccacaggtggacttatggttctagtatcttggagtggaggggccctcttatcccttgtatatgcaatctttagttcgggggcagggaagagacagaagaagataatttcttataagactgtgtatgttcagttgactgtcggtgatgataaggtttctat

SEQ ID NO: 77850 - DNA, 1521 bp, Homo sapiens
ttgtgaactgatatgattctgttttcagaaacccaggcttttactctgggtctgccttttcacctttaacactggcttctaaccctcaaggtcgctgattgtctaaattgcttttggagctgtaagaaacgggaaggagaaagtagctatttgtcctgtcttaaaagggctttcctggaactcccacctaacatgattatagctcattggccaggaccaggtcacatggtcacattgactacaagggatactgggaaatactacctttcagctgagtttctagccaccccaaacaaaattgggattgtctttctaaggcagtagggaaggaacattgcatgggcaatgaacagaatatgtgtcatgcagataagaataagtaaggagataactaaatgatttggtcaatgtctgcgtgaagaaacaaacaaacaaaaaacagctatttgggagccctgtttaagaagggggatatttacagactattgtgattctggggctgagaaagacactattcttgtgtttatacccctagagcctttgattgaactcgaaagctcctgtctgctttttgttttcattcagagtagtaaatacctttgtttccctttacaaataagaaaatagggagaggggcaaaagaaatagaaatgttctatctatctaagtttttaggatgtcaagaattttcctgacattaggagaaacttccaccctgtatggcaaacacctgtcaatgatggcactagcaaggaggatcagagtgaataaaattctaagatttgcaatgctggttgttagagttactttctgcagcagaactacagggaattagagagaagctgaagttgcttaaaaaaatgagcttctttgtcaggtggttgctaaggccttgtctcattaaagaagaggaaataagtgccttatgggagttcctattttcttgttgttgacaagaargaaacatacagcgtttcaatgacagataaaaagctttgcctatttaggtgattttgactaattgtccttgagaataaaagtgagaacagaaagaccaatttcttaggaagaaataaatgcatctgtgtttaagaattagtttttcagtgtaactggttggttttggccactgagctcacgagatataaacatgagatggtttattttctccaaaatggttaagaacagtgttctaccaaaaccttttcctctgggtggcaggctccccaatggcatcttagtctaactaccattttcagttacatttaactattaaaacagtcttatcctagctttgaaatataatcctgtttatttaaaattgttattttatatttaatttaaaatgctttctggcttgaccacaggtggacttatggttctagtatcttggagtggaggggccctcttatcccttgtatatgcaatctttagttcgggggcagggaagagacagaagaagataatttcttataagactgtgtatgttcagttgactgtcggtgatgataaggtttctat

SEQ ID NO: 77851 - DNA, 498 bp, Homo sapiens
  misc_feature (1)...(498): n = A,T,C or G
agcnnnnnnnnnnnnnnnnnnnnnnnnnnnnnnnnnnnnnnnnnnnnnnnnnnnnnnnnnnnnnnnnnnnnnnnnnnnnnnnnnnnnnnnnnnnnnnnnnnnncgttaagtcagtgaactaaatccttcagatccatatgtaaattatatctcagttttaaaaagttaaaatagagtacaatgaaatataaaattgagtggacaattggggattgaggtctagttctcaagtaaaccgttggtgcaaattatttattctttatcaaacattaattgaatgaccccctcagacagggatatgtgtctgaggtatatatgtatgtttatggtctaagcatagctgttaaactcaagaagcttacagttggaggaggtttctctttaagccctggtttaaaaaatacttttggccggcggcagtggctcacacctgaaaacaggctgggtgcggtgtctcacgcctgtaatcccagaacttcgggaggccaaggtggstgg

SEQ ID NO: 77852 - DNA, 524 bp, Homo sapiens
tatatatayacatagaaacactgtatatatgttgacaacagtcatctcaagggaaaaacttttatttgctactgttttgttctcagccttttctatttttctttgcaatgaatatttattactttgcaacaagacaaatttttaattattttaagaaatttttacttcaagaaaagaaagctccacgttggccactgctgactatattgtcctaaggttgcctcttaaatgtaggtttgaaaaggggatggatgcagagcaagtgtgagtttatggtggaagatacctcctacagaaggttctagagccagagcctccagtatccgcacctccactccggaaacactgagggaaacaggggaacgtacctgaaaggccaagtccggatggtcctcagagtcccatccccttgagcgtctcgggctctctgccttccctcaccagcgtggcttcggtggccacggtccgacgggccgtcatggaagtgtctggtggctgcaggcagggctgggtgaggggaggtg

SEQ ID NO: 77853 - DNA, 524 bp, Homo sapiens
tatatatatacatagaaacactgtatatatgttgacaacagtcatctcaagggaawaacttttatttgctactgttttgttctcagccttttctatttttctttgcaatgaatatttattactttgcaacaagacaaatttttaattattttaagaaatttttacttcaagaaaagaaagctccacgttggccactgctgactatattgtcctaaggttgcctcttaaatgtaggtttgaaaaggggatggatgcagagcaagtgtgagtttatggtggaagatacctcctacagaaggttctagagccagagcctccagtatccgcacctccactccggaaacactgagggaaacaggggaacgtacctgaaaggccaagtccggatggtcctcagagtcccatccccttgagcgtctcgggctctctgccttccctcaccagcgtggcttcggtggccacggtccgacgggccgtcatggaagtgtctggtggctgcaggcagggctgggtgaggggaggtg

SEQ ID NO: 77854 - DNA, 707 bp, Homo sapiens
tggatcttgctgtgtggcatctgcttcttaattcagtccctgctcctaggtccgagcacttagttctgcccgtgggtgcatgcttggttcatctgggcatgstcaggttatgtgaccttcaacctgggtgtccatggcaactgcaaaacatcacaacttcgttacataaaggttgaaccaaattggtctgatgcggtgatggtggctgccctgccatgccccggcccacctggagggtgaggagtggtgattcacagaggactgctcagcaggtgcccagggtttgccactgggtcactcatccggtcttcatggtaacctggtcaggtgagcaagcggggtgaatgtccccacgtggacagaggctgaagcaccaagataagtgactcactgaaaccacatggcaagccaacaacagagccaggactcactgcccagagcccctctgcatccacccctctgccctgctgagccatctctgctacagagtgctagaaggtggcatgcacccctaggggacatgaggtctcagaatcaatgaagacatttctcctcccaggaaatggtatccatgcatttaaattagtatctttataatcagcttaagggcattttattttaatgtagcagctgagaggcaaaatcaggtcccactttaagtgctactaaaatctgctgtgtgggcagctctccgatgtggaaatgaa

SEQ ID NO: 77855 - DNA, 707 bp, Homo sapiens
tggatcttgctgtgtggcatctgcttcttaattcagtccctgctcctaggtccgagcacttagttctgcccgtgggtgcatgcttggttcatctgggcatgctcaggttatgtgaccttcaacctgggtgtccatggcaactgcaaaacatcacaacttcgttacataaaggttgaaccaaattggtctgatgcggtgatggtggctgccctgccatgccccggcccacctggagggtgaggagtggtgattcacagaggactgctcagcaggtgcccagggtttgccactgggtcactcatccsgtcttcatggtaacctggtcaggtgagcaagcggggtgaatgtccccacgtggacagaggctgaagcaccaagataagtgactcactgaaaccacatggcaagccaacaacagagccaggactcactgcccagagcccctctgcatccacccctctgccctgctgagccatctctgctacagagtgctagaaggtggcatgcacccctaggggacatgaggtctcagaatcaatgaagacatttctcctcccaggaaatggtatccatgcatttaaattagtatctttataatcagcttaagggcattttattttaatgtagcagctgagaggcaaaatcaggtcccactttaagtgctactaaaatctgctgtgtgggcagctctccgatgtggaaatgaa

SEQ ID NO: 77856 - DNA, 805 bp, Homo sapiens
ttctcttttaattttgtatttcttcaacctgtatgtagtttattgttgttttcatttctgctttaagggttactatatgtaacttcagaggagggaaggtctccttaccctacttatattaattattaatcataattatttcataattaataaatttcttcctccaaagtatctcaaattagtaacttcaaggttagaaacaatggttgctttataaggtttaagaactctgggtttattttaagttttcatcaactcatyagttgttccacataggtgccatatgtgttttcctctaaagcctgaggattagattctttgttacaacagagacctggatagcaatatcagcaaaggcaattttttttttttttttttttgaaacagagtctcgctctgtcgcccaggctggagtgcagtggcaagatctcggctcactgcaagctctgcctcctgggttcactccattcttctgcctcagcctcctgagtagctgggactacaggtgcctgccaccacgcccacctaattttttttgtatttttagtagagacgaggtttcaccgtgttagccaggatggtctcgatctcctgacctcgtgatctgcccgcctcggcctcccaaagtgctgggattacaggcatgagccacctcgcccagccagcaaaggcattttatagggttttagtgagtcatcttcttttaggaggttagaactcagcacaccatatggtagctcttctttctcacaatccaccatccagtgagcccatgtattgcacagggtatcaatattttccctgg

SEQ ID NO: 77857 - DNA, 605 bp, Homo sapiens
ctctagggcgggcgcagggtccggagagcaggcacgacagctgcagacacccagaccttcccttccctgcaggaacatcgcagggcttgcccaaggccgcatggacagctgcattggaaggagactcatcgatgactctgcattttggggctttaatttatctgccaaatatggagtaagcccctggcacgtgggatattggagtctcagcagtgtgcacagcagagtcttgtctccatggagttggagggcrctgactcccaccaacgtaaattcagtgcagatgcaaaattagcagagaagagggcgtggggtgcactggccaacagcatgagccagccccacctccgagagtcaaggtgaagctctgaggcaggtgctcatttgcgagctggaatgcatgtgtgtacagaggttgtacccccagatttccaatttggggaggtgctggggcatgtgcctcctagtgccgtggacagctcaaaagtcagcacctgtataccctggtcctgtgtctggctggtccctgagtcccacaagatgtatgtggacttgttgtgagccactctcccaccgggctgtcctccggggttctcccttttccc

SEQ ID NO: 77858 - DNA, 605 bp, Homo sapiens
ctctagggcgggcgcagggtccggagagcaggcacgacagctgcagacacccagaccttcccttccctgcaggaacatcgcagggcttgcccaaggccgcatggacagctgcattggaaggagactcatcgatgactctgcattttggggctttaatttatctgccaaatatggagtaagcccctggcacgtgggatattggagtctcagcagtgtgcacagcagagtcttgtctccatggagttggagggcgctgactcccaccaacgtaaattcagtgcagatgcaaaattagcagagaagagggcgtggggtgcactggccaacagcatgagccagccccacctccgagagtcaaggtgaagctctgaggcaggtgctcatttgcgagctggaatgcatgtgtgtacagaggttgtacccccagatttccaatttggggaggtgctggggcatgtgcctcctagtgccgtggacagctcaaaagtcagcacctgkataccctggtcctgtgtctggctggtccctgagtcccacaagatgtatgtggacttgttgtgagccactctcccaccgggctgtcctccggggttctcccttttccc

SEQ ID NO: 77859 - DNA, 1076 bp, Homo sapiens
tctgtacccctcctccctcctcccgtgccccaagtccctcctcccgtgccccaagtccctcctcccatgcccagagtccctcctcccatgccccgagtccctcctcccatggtgcaggagctgcctccgttcatccaggctcattcatccaattcccctcgggaccagggtatgcacttttccaggtagcttgatggggtcaggggagcttatagctatggatgggtgcaggagatggggccagtggggacatgaacctggagaaagcataactgaacacactgtcgatcatccaaatgcccaaacatttaacctggaaaaaaatggatccttcaatccccaatcttatccaccatcaccaaatgtagatgtacaacctaccagcgatcaagttcaggcaacaaaaaacagaaagcccagcccttcacaggctcctactgcatcgactcccagctcttgctgtggtggtttcaagtgttaatgcagctctccagrgttttagcaaatctgctaccctaggagatgaatgggaaggtgttagcaatctgccaccctgggagatgaatgggaaggtgcttccacatcctccatgatgaacacgactccacacggcccgatcacccacctaagcactcgccacaggggtgggctgaggatggggggactgtggcttctcaccctctgggatcgcgtctgcccaggctcttttgatgacgcgtctctgtggcagcatgtgttctagaacacgggaggctctgcccaaatgcctctgaggccaaaccgggacccagatccccaggaggctgggaaagtcctgccctaagtggcctcagcttcaaccagcggctgccctggcttcagggcccacacggacagatctcctggtaccacatgggagaccagaaacctttccatgaaactttcagaactgtaaacacagatgcccaattcacatagacactgaaatcacatctgcaagccaaataggtcagggagggctcatcctgcaccacaggagggctgaggtggggccaggaccacgctcactgccttcgctggggtctccgcaggctcca

SEQ ID NO: 77860 - DNA, 1076 bp, Homo sapiens
tctgtacccctcctccctcctcccgtgccccaagtccctcctcccgtgccccaagtccctcctcccatgcccagagtccctcctcccatgccccgagtccctcctcccatggtgcaggagctgcctccgttcatccaggctcattcatccaattcccctcgggaccagggtatgcacttttccaggtagcttgatggggtcaggggagcttatagctatggatgggtgcaggagatggggccagtggggacatgaacctggagaaagcataactgaacacactgtcgatcatccaaatgcccaaacatttaacctggaaaaaaatggatccttcaatccccaatcttatccaccatcaccaaatgtagatgtacaacctaccagcgatcaagttcaggcaacaaaaaacagaaagcccagcccttcacaggctcctactgcatcgactcccagctcttgctgtggtggtttcaagtgttaatgcagctctccagagttttagcaaatctgctaccctaggagatgaatgggaaggtgttagcaayctgccaccctgggagatgaatgggaaggtgcttccacatcctccatgatgaacacgactccacacggcccgatcacccacctaagcactcgccacaggggtgggctgaggatggggggactgtggcttctcaccctctgggatcgcgtctgcccaggctcttttgatgacgcgtctctgtggcagcatgtgttctagaacacgggaggctctgcccaaatgcctctgaggccaaaccgggacccagatccccaggaggctgggaaagtcctgccctaagtggcctcagcttcaaccagcggctgccctggcttcagggcccacacggacagatctcctggtaccacatgggagaccagaaacctttccatgaaactttcagaactgtaaacacagatgcccaattcacatagacactgaaatcacatctgcaagccaaataggtcagggagggctcatcctgcaccacaggagggctgaggtggggccaggaccacgctcactgccttcgctggggtctccgcaggctcca

SEQ ID NO: 77861 - DNA, 724 bp, Homo sapiens
agccgtgtccatagaccacacgaagtgaaagcgcactttgactgtgaaatccaattactttggatttaagctctgaaatgcaagttcattagaaaagagatgtattgtgccttctttctgtggtggcccctcaattaatcctctggtcattgaagaatgaaaaacatcaacccacaggcttcccttgcacagacaccagagtctgagtgaataattatggttttgattctgagttatgaaacaaacactcctccttattaaataaattaaaaataatgggatctgcgaaagatcaatacacaagaaaggtacatttgcaataacggctgccgccgtcacaaatgcaattctagactcagccaccagcctggctgctggaaccaggccctgcragaacacggatgacaacacagatgcacggataaatcatcacgcgtcgcattcccagaatagaaaatgggctaaacgcaagttctgtccttcctgctctcctttgttcctggccacatcttagttttcacaaacgggctcttggagaaaagaggtgagagcctcagcaaaggttgtgggatgttaatggacacatccagaaagcagggccctggcccaagacgcgtggtgaggcagccccaggtgctgtcctccggtgcagccaggcctcctgcatccacctcggatgactctgtaatgacgctgttcacatccacagaagacaggaggatcc

SEQ ID NO: 77862 - DNA, 724 bp, Homo sapiens
agccgtgtccatagaccacacgaagtgaaagcgcactttgactgtgaaatccaattactttggatttaagctctgaaatgcaagttcattagaaaagagatgtattgtgccttctttctgtggtggcccctcaattaatcctctggtcattgaagaatgaaaaacatcaacccacaggcttcccttgcacagacaccagagtctgagtgaataattatggttttgattctgagttatgaaacaaacactcctccttattaaataaattaaaaataatgggatctgcgaaagatcaatacacaagaaaggtacatttgcaataacggctgccgccgtcacaaatgcaattctagactcagccaccagcctggctgctggaaccaggccctgcgagaacacggatgacaacacagatgcacggataaatcatcacgcgtcgcattcccagaatagaaaaygggctaaacgcaagttctgtccttcctgctctcctttgttcctggccacatcttagttttcacaaacgggctcttggagaaaagaggtgagagcctcagcaaaggttgtgggatgttaatggacacatccagaaagcagggccctggcccaagacgcgtggtgaggcagccccaggtgctgtcctccggtgcagccaggcctcctgcatccacctcggatgactctgtaatgacgctgttcacatccacagaagacaggaggatcc

SEQ ID NO: 77863 - DNA, 1383 bp, Homo sapiens
ctcctaaataacaaaggcaaataggaataccaggagtgcatgctttgtgtgttttcatcaagaacatagtcaccaaaatccaagcggatgggcacagccatttgcatgtaactttacagtataagagacattgtcatatgcccacagtctgctatgaagacacagatccagactggctaagagcacagaggtgcrtggaaatgctcgggtgtgtggtgtgcgtggtgccctgcgcatttgtgctggctttgcacccccctcctgccacgtcccgtgcaaacgctcaggtgtgtggcatgcctggggccctttgcattggtgctggctttgcacccacctcctgccacgccccaaaccccaaggagtccaggagccaggagagcccaaaatccccatccatgctcctagaaaggaagtttcttgacaaaggtctgagtcaaccatgggtaaagccagaataaaccctgctagttcttttgaggtgtgaacagtctcagctactctgagccccgcataactcactttggtcaccagaggagcaggatttacagggtcaaaagccatttctccttccagaggctcccagctcaaagcccagccatcgtctcccagacattttgggtcgcatggaaatctgcctcttaagagacctggcctcctgtctagggttagagaacactgtgttcccagaagggacagtcaggcctcaggatcctctcctgagaagccctgaactcaagtcaaactgagcctgtgttaacagggtcctttgccgctaagaacccaactgtctcaggagtggctctgcctttttttttttttttcctttctattttcagacaaatcgtcactcagcatagtaaacccaagatataaaaaccaacaattgagtaactggtcttttccgtctgtcttgggaaagtagcttatcaaaagtaagatgaaaaaagagtattttattgttaaactctataatgaagcaactgtctttgactacacaatgtgggaacttgccagtgaatgtagaagtactgcggggccatgcgtcagaggtgtgtgggtctaggagacgcagatcaggagtctggcctggctcagatgtccacagccaggaagccgcgggcagagcagcggggtcgaggctgcggctgagtttgtgagctgtggcagccatacttactctgcagggcatgttgagttctgaaggagacagcactgctgaagtgagcacagcagcaggacagacggctgatccctccttgtgctcccacacacagcagcgagacacaaacggctcgtccctcctggtgctccacacacagcagccggacagacggctgatccctcctcgtgctcccacatgcagcagccagacacagacgg

SEQ ID NO: 77864 - DNA, 1383 bp, Homo sapiens
ctcctaaataacaaaggcaaataggaataccaggagtgcatgctttgtgtgttttcatcaagaacatagtcaccaaaatccaagcggatgggcacagccatttgcatgtaactttacagtataagagacattgtcatatgcccacagtctgctatgaagacacagatccagactggctaagagcacagaggtgcatggaaatgctcgggtgtgtggtgtgcgtggkgccctgcgcatttgtgctggctttgcacccccctcctgccacgtcccgtgcaaacgctcaggtgtgtggcatgcctggggccctttgcattggtgctggctttgcacccacctcctgccacgccccaaaccccaaggagtccaggagccaggagagcccaaaatccccatccatgctcctagaaaggaagtttcttgacaaaggtctgagtcaaccatgggtaaagccagaataaaccctgctagttcttttgaggtgtgaacagtctcagctactctgagccccgcataactcactttggtcaccagaggagcaggatttacagggtcaaaagccatttctccttccagaggctcccagctcaaagcccagccatcgtctcccagacattttgggtcgcatggaaatctgcctcttaagagacctggcctcctgtctagggttagagaacactgtgttcccagaagggacagtcaggcctcaggatcctctcctgagaagccctgaactcaagtcaaactgagcctgtgttaacagggtcctttgccgctaagaacccaactgtctcaggagtggctctgcctttttttttttttttcctttctattttcagacaaatcgtcactcagcatagtaaacccaagatataaaaaccaacaattgagtaactggtcttttccgtctgtcttgggaaagtagcttatcaaaagtaagatgaaaaaagagtattttattgttaaactctataatgaagcaactgtctttgactacacaatgtgggaacttgccagtgaatgtagaagtactgcggggccatgcgtcagaggtgtgtgggtctaggagacgcagatcaggagtctggcctggctcagatgtccacagccaggaagccgcgggcagagcagcggggtcgaggctgcggctgagtttgtgagctgtggcagccatacttactctgcagggcatgttgagttctgaaggagacagcactgctgaagtgagcacagcagcaggacagacggctgatccctccttgtgctcccacacacagcagcgagacacaaacggctcgtccctcctggtgctccacacacagcagccggacagacggctgatccctcctcgtgctcccacatgcagcagccagacacagacgg

SEQ ID NO: 77865 - DNA, 972 bp, Homo sapiens
agccagagcctcagaactccaaggacagcactgatggtgtgcattgaaggaagggcctggagggtctcctgcctctccgcagtccccagcacacgcactccccatggaacagaaacggtctatggctccctatgagccctgaagggccagcttctcagggctytctcacctctaccttctgccacttgggttcctggcacctgctgcccatctgcatgacctgtgcgatggaacatggtccctgtgctcaggcagctcagcaggacacaggtagatagcatgtggcagcttaggcacttctgggaacagccaaggtgagcatatgtgcctgcacttgcctgagtttccacaccagaaagctgattttagtatttttcttttgcaccccaaaaaccagctttcccacaagcaggtttgcagtgtggccagctgccagccgggctgggtagagctgtcctcactcttaattcttctggtttgtttataaggctgctttcttcattcttgcttctccagattatctgttcccctgagggcaaagggaaaccaggcagccccacattgactgcagctcagtgttctctgaaatgcaattaaaatgttaagaaagatggacaatcaatactttgtactctacacaaaaaattcccctcctaatggcctaatgtgggaggtgatgcagtgagtgagcccagggctgtgtctacaaaatgccaacacaaccagtggcaaaacgagtcatttctgtctcattgccaatctccccacctggtttccctcctggcgccccaccccatagtcagttaactagatgatttattctgacatcgtggaaggcagggccacagaacaggagagccaggtgcagagcagcttcacggggcacgatggggctcccttcactctttccatgagaagaactacaaatttttactcttctgagttcttgcaaagacaaaatggcagatacag

SEQ ID NO: 77866 - DNA, 1375 bp, Homo sapiens
  misc_feature (1)...(1375): n = A,T,C or G
ctatcagaaacagagcggacagactattagcaagacagcataagtaaatctttatgctacaaattttggaataaatttatcaaccattccagctccaaacaggtttctaaaacaatgagctaatgagacagagcccatcactgatctacgcaatcgaagcagaggagcagtcagtgtatcaaacattggcncgtaaagaaaattgttggcctggcgcggtgacgcacgcctgtaatctcagcactttgggaggctgaggcgggtggatcacttgaggtcaggagtttgagaccagcctaacgtggcgaaaccctgtctctactaaaaatacaaaactcagctggaggtggtgacgggcgccagtgaacccagctactcgggaggctgaggcaagagaatcgcttgaatctgggaggtggcgcttgcagtgagccgagatcacgccgctgcactccagcctgggcgacagagcgaggctccgtctcaataaaaagggttataataaaaaagaaanttgtttttcccctgcaataattgtgctgaagtagcacaaatggccgaaacattcatgggcaggtttcccagttatttcaagtccgtttgagttagggctcatttcagcaagcacacacatgaatgatccaatacaaactttagcagaacttctgttgagtccagaagactttatcttacttgttttggggaaatagctgaatcttcaaagttatgattgttttatctagtaaaaaaatctagatctggcgctttaattttaaaaaataaccccccccccccgggggagttttgctctgtcgcccaggctggagtgcagtggcgcgatctcggctcactgcaacctctgcctcccaggttcaagcgattctcctgcctcagcctcccgagtagctgggattacatgcgcatgcgccacgcctggctaattttttgtacttttagtagagatgggatttcaccgtgttagccaggatagtctcgatctcctgacctcgtgatccgccctccggcatgagccaacgcgccctgcctggtgctttaattttaataagcgcttctgttttaattttacttcggagttctcagtaacggtccatttagtaaactaaaggcctccccatttggggtctcaacgatgcacgcagatgggagataaacttaaggccaccgagacgcttaagcgacacrtgcctggcttctgcagcaagcggccgacctgcccgccggacccgccgggccacccccgcctcggtgtcccgcaggcctcccctcccggctgcatgcaatccctagggcaaaggctactcgcgggtcctcccgctacttaagggggagaagcggccgcagagccagggatccc

SEQ ID NO: 77867 - DNA, 1375 bp, Homo sapiens
  misc_feature (1)...(1375): n = A,T,C or G
ctatcagaaacagagcggacagactattagcaagacagcataagtaaatctttatgctacaaattttggaataaatttatcaaccattccagctccaaacaggtttctaaaacaatgagctaatgagacagagcccatcactgatctacgcaatcgaagcagaggagcagtcagtgtatcaaacattggcncgtaaagaaaattgttggcctggcgcggtgacgcacgcctgtaatctcagcactttgggaggctgaggcgggtggatcacttgaggtcaggagtttgagaccagcctaacgtggcgaaaccctgtctctactaaaaatacaaaactcagctggaggtggtgacgggcgccagtgaacccagctactcgggaggctgaggcaagagaatcgcttgaatctgggaggtggcgcttgcagtgagccgagatcacgccgctgcactccagcctgggcgacagagcgaggctccgtctcaataaaaagggttataataaaaaagaaanttgtttttcccctgcaataattgtgctgaagtagcacaaatggccgaaacattcatgggcaggtttcccagttatttcaagtccgtttgagttagggctcatttcagcaagcacacacatgaatgatccaatacaaactttagcagaacttctgttgagtccagaagactttatcttacttgttttggggaaatagctgaatcttcaaagttatgattgttttatctagtaaaaaaatctagatctggcgctttaattttaaaaaataaccccccccccccgggggagttttgctctgtcgcccaggctggagtgcagtggcgcgatctcggctcactgcaacctctgcctcccaggttcaagcgattctcctgcctcagcctcccgagtagctgggattacatgcgcatgcgccacgcctggctaattttttgtacttttagtagagatgggatttcaccgtgttagccaggatagtctcgatctcctgacctcgtgatccgccctccggcatgagccaacgcgccctgcctggtgctttaattttaataagcgcttctgttttaattttacttcggagttctcagtaacggtccatttagtaaactaaaggcctccccatttggggtctcaacgatgcacgcagatgggagataaacttaaggccaccgagacgcttaagcgacacgtgcctggcttctgcagcaagcggccgacctgcccgccggacccgccgggccacccccgcctcggtgtcccgcaggcctmccctcccggctgcatgcaatccctagggcaaaggctactcgcgggtcctcccgctacttaagggggagaagcggccgcagagccagggatccc

SEQ ID NO: 77868 - DNA, 576 bp, Homo sapiens
ttaagcattaatacttgaagtgcctctgctgtaggttggttcccaggaagcagactccgatgcaaaggtgagcatgcagagtgtgcagggtgtttattaagggggcctgggacctgcacctgggaagggagggaaggaggcagcatgcgcagagagagaagctgagctgtgatgtagcccagtgacagcccggcccagaccctggggagcaccggagctgtcccaagtcgggttgagatacccaggtcttgaccacacccagacactccgcctattggtcattgggtgctggctgccccaagggggcacaatytcaacagaggtaggtgttgcattttttaccccattaactgaggcaacgaaccctgcgtgggagggggatctgggcagcgcattcagagtcgactatagcctctggccaactctggctaactctggctaatttctttttcttttctttttgccaaactctttaaaaatttttgttaattcttatgggcacatggtaggtatatatacatatgagatatatgggacattttgatacaggcatgcagggtgtaataatcacattgg

SEQ ID NO: 77869 - DNA, 576 bp, Homo sapiens
ttaagcattaatacttgaagtgcctctgctgtaggttggttcccaggaagcagactccgatgcaaaggtgagcatgcagagtgtgcagggtgtttattaagggggcctgggacctgcacctgggaagggagggaaggaggcagcatgcgcagagagagaagctgagctgtgatgtagcccagtgacagcccggcccagaccctggggagcaccggagctgtcccaagtcgggttgagatacccaggtcttgaccacacccagacactccgcctattggtcattgggtgctggctgccccaagggggcacaatctcaacagaggtaggtgttgcattttttaccccattaactgaggcaacgaaccctgcgtgggagggggatctgggcagcgcattcagagtcgactatagcctctggccaactctggctaactctggctaatttctttttcttttctttttgccaaactctttaaaaatttttgttaattcttatgggcacatgrtaggtatatatacatatgagatatatgggacattttgatacaggcatgcagggtgtaataatcacattgg

SEQ ID NO: 77870 - DNA, 1245 bp, Homo sapiens
ctcatcaaattaatggagtcatcaagcaagaaggaatggtcaaactgtgggaagtcagagttaggttgcgaactgtctacgcaggtttaataatggtccaaaaacaaaaggggaaattttacaaggatctgatgcatttggagtctacatctaagtaaaacaaaaagaataaagaaaaagaaaagaaaatcaacagcatggttacagagtaaagaagacaggaatttttagccattcatgtgaaaaaaaaaaaaatctggaagttgtagttcacctcaagctcagtgttaatcaagattgagttatagggttgggtgtggtggctcatgcctgtaatcccaacactttgggaggctgaggcgggcggatcacgaggtcaagagatcgagaccatcctagccaacatggtgaaaccctgtctctactaaaaatacaaaaattagctgggcgtgatggcgcgcatctgtagtcccagctactcaggaggctgaggcaggagaatctcatgaacccaagaggcagaggttgcagggagctgagatcataccactgtactccagcctggcaacagagcgagactctgtctaaaaaaaaaagaaagaaaaaagattgagttacacttttaaaaaaatatagtaactttgtttaattaatagatgtagatttcagatcaaaaggagtcagatttcaaagcagacacttctagtcagaccacttttgaggtattgctttcagttccaggcaccacattttaagagacaggtaattttgcattcttaagatgatgaggaacttgagatttgtatctgacaaaatgatagctgtcttcagatgttttcagatttgcrtttgagaagaataccaagaactgaggaacaaaatttgcaggcttgcggatgacttaatttgagatcattcgaatctttagagcttccaatggaaagaaaaaacattcctgtaaagttacgagcactcagtcgttgaaagtacttaagcagaagtatttaagctgaattattattgtattagttttctgttgatgctttgttctctgtttaagatctcctaagtcatccagtctagactcttattggaagaacccacttccaagatcattcagactgttggctgaattcagtttcttgaagttgtagaactgagatccctgtttaattcctcactgtaaaccagggtcttttctcagctcctaaatgccatccacattccttgggatgtgacccccac

SEQ ID NO: 77871 - DNA, 1245 bp, Homo sapiens
ctcatcaaattaatggagtcatcaagcaagaaggaatggtcaaactgtgggaagtcagagttaggttgcgaactgtctacgcaggtttaataatggtccaaaaacaaaaggggaaattttacaaggatctgatgcatttggagtctacatctaagtaaaacaaaaagaataaagaaaaagaaaagaaaatcaacagcatggttacagagtaaagaagacaggaatttttagccattcatgtgaaaaaaaaaaaaatctggaagttgtagttcacctcaagctcagtgttaatcaagattgagttatagggttgggtgtggtggctcatgcctgtaatcccaacactttgggaggctgaggcgggcggatcacgaggtcaagagatcgagaccatcctagccaacatggtgaaaccctgtctctactaaaaatacaaaaattagctgggcgtgatggcgcgcatctgtagtcccagctactcaggaggctgaggcaggagaatctcatgaacccaagaggcagaggttgcagggagctgagatcataccactgtactccagcctggcaacagagcgagactctgtctaaaaaaaaaagaaagaaaaaagattgagttacacttttaaaaaaatatagtaactttgtttaattaatagatgtagatttcagatcaaaaggagtcagatttcaaagcagacacttctagtcagaccacttttgaggtattgctttcagttccaggcaccacattttaagagacaggtaattttgcattcttaagatgatgaggaacttgagatttgtatctgacaaaatgatagctgtcttcagatgttttcagatttgcatttgagaagaataccaagaactgaggaacaaaatttgcaggcttgcggatgacttaatttgagatcattcraatctttagagcttccaatggaaagaaaaaacattcctgtaaagttacgagcactcagtcgttgaaagtacttaagcagaagtatttaagctgaattattattgtattagttttctgttgatgctttgttctctgtttaagatctcctaagtcatccagtctagactcttattggaagaacccacttccaagatcattcagactgttggctgaattcagtttcttgaagttgtagaactgagatccctgtttaattcctcactgtaaaccagggtcttttctcagctcctaaatgccatccacattccttgggatgtgacccccac

SEQ ID NO: 77872 - DNA, 1245 bp, Homo sapiens
ctcatcaaattaatggagtcatcaagcaagaaggaatggtcaaactgtgggaagtcagagttaggttgcgaactgtctacgcaggtttaataatggtccaaaaacaaaaggggaaattttacaaggatctgatgcatttggagtctacatctaagtaaaacaaaaagaataaagaaaaagaaaagaaaatcaacagcatggttacagagtaaagaagacaggaatttttagccattcatgtgaaaaaaaaaaaaatctggaagttgtagttcacctcaagctcagtgttaatcaagattgagttatagggttgggtgtggtggctcatgcctgtaatcccaacactttgggaggctgaggcgggcggatcacgaggtcaagagatcgagaccatcctagccaacatggtgaaaccctgtctctactaaaaatacaaaaattagctgggcgtgatggcgcgcatctgtagtcccagctactcaggaggctgaggcaggagaatctcatgaacccaagaggcagaggttgcagggagctgagatcataccactgtactccagcctggcaacagagcgagactctgtctaaaaaaaaaagaaagaaaaaagattgagttacacttttaaaaaaatatagtaactttgtttaattaatagatgtagatttcagatcaaaaggagtcagatttcaaagcagacacttctagtcagaccacttttgaggtattgctttcagttccaggcaccacattttaagagacaggtaattttgcattcttaagatgatgaggaacttgagatttgtatctgacaaaatgatagctgtcttcagatgttttcagatttgcatttgagaagaataccaagaactgaggaacaaaatttgcaggcttgcggatgacttaatttgagatcattcgaatctttagagcttccaatggaaagaaaaaacattcctgtaaagttacgagcactcagtcgttgaaagtacttaagcagaagtatttaagctgaattattattgtattagttttctgttgwtgctttgttctctgtttaagatctcctaagtcatccagtctagactcttattggaagaacccacttccaagatcattcagactgttggctgaattcagtttcttgaagttgtagaactgagatccctgtttaattcctcactgtaaaccagggtcttttctcagctcctaaatgccatccacattccttgggatgtgacccccac

SEQ ID NO: 77873 - DNA, 692 bp, Homo sapiens
cctttaggtgcagatatttagtgtgggggggtggacatcacaataacatgagggatcaggttcttagtgaaccggaacctctggttcctgggcctgggaatctgtattccaagactctcccctctccctgcaaccacctcagaagacttgaatggatgccaatgagtaggacactttgggggcgtgcactatatgctctctccaaggtccacagtgggactgaatcccagtggcccacctaaaacccacctgtcaggtaccctctgttggcttccttccctctctgctgccctttctcctccaaccagtgctttccaggactacctcccaaatcagctacttgcacccaaatctgctctgggaaatccagactcagaggctccctgaggtgtgaaggcttttgaccagctgggccggggaagccacgctgcagacacagtgtttaggctgagatttaaagaataygaggaattaggccaggcccagtggctcacgcatgtaatctcagcactttaggaggccaaggagggcagatcacttgaggtcaggagttcaagatctgcctgaccatcatggcaaaaccctgtctctaccaaaaaaacaaaaattatctgggcatggtggtgtgcgtttctggtcccagctgctccggaggctgaggcaggagaatcgcttgaacccaggaggcggag

SEQ ID NO: 77874 - DNA, 480 bp, Homo sapiens
gtgstgtgcaccagcaatcccagctactcaggagaatgaggcaagagaatcgcttgaacctgggcggtgaaggttgcagtgagcctagatcgtgccactgcactccaacctgggcagcagaacaagactccgtctcaacaacaaaaaagaaaattcaatgttttcatttatgtttttctacacagggccatgcttgtcaatgtgctcttaaagtgctgagtgaagtggcattggccctcccaagctcatgagtcatgttttggacaacaagcactggcatggcctgtggatgtatctaccttcacatccccacctctgccccaactcaaggacgtggtggccccatccatcccccagcacagcagcagtgctctgtgtgtgtctaggagttagccctgtgccttctgaccagttgggaagccaggataactggcacatccaggaggggtctagagccagaaaggaattcttcccaaacct

SEQ ID NO: 77875 - DNA, 586 bp, Homo sapiens
tacgtgtcaaatttacttttgcaaattctatgtgcttctgatgcttagttctgaaatatcgtcaagatttaaatctgcccacacttgtaaaatgaaacaaaacaaaacaaaaacccaaaactagagaaagcctaggttagtatgtcatgagtacctcattgttgtctaatgttacatgtctttgttttaccttcccaactagattgcaaacttcttaagatgttttacatttgtgatgaaataattctaggttgagaatggataccaagactatttagaattcctgatacagacgagaaaaaacatccttcaaaccagtgcttcttmagcctatcagacctaacacgctgtgtttagaacaaatgcttcgaagtaaccattttattatcctgaaatgcaactcattgttggcatgatgaagaagcatacaatttcactataaaaagacaatttagtaccctgtctgtaatacaaaaaaaggaattaagtttaaaataaaataatacattttattgttgtaaatttataagcacagctaaacaagaagacctataaagtaggtcgattcttgcacctattaccatga

SEQ ID NO: 77876 - DNA, 586 bp, Homo sapiens
tacgtgtcaaatttacttttgcaaattctatgtgcttctgatgcttagttctgaaatatcgtcaagatttaaatctgcccacacttgtaaaatgaaacaaaacaaaacaaaaacccaaaactagagaaagcctaggttagtatgtcatgagtacctcattgttgtctaatgttacatgtctttgttttaccttcccaactagattgcaaacttcttaagatgttttacatttgtgatgaaataattctaggttgagaatggataccaagactatttagaattcctgatacagacgagaaaaaacatccttcaaaccagtgcttcttcagcctatcagacctaacacgctgtgtttagaacaaatgcttcgaagtaaccattttattatcctgaaatgcaactcattgttggcatgatgaagaagcatacaatttcactataaaaagacaatttagtaccctgtctrtaatacaaaaaaaggaattaagtttaaaataaaataatacattttattgttgtaaatttataagcacagctaaacaagaagacctataaagtaggtcgattcttgcacctattaccatga

SEQ ID NO: 77877 - DNA, 1231 bp, Homo sapiens
ggaccaaaattattcatattttatgggcataaaggcagttcattaattaatggaattctatggtgaattaactttatttaacaaagaaagaaccaggtttttctgattcgtctgctctggagatctaaacgttcatatcttggggggattccgttgggatgactttgtagcagtgggaggcagtatagcagctaaagcaccagtggaacccaggttcggagaagctaagtcacttaccccacatcacgtagctggtggaggagaaaaagaccctgtgaaggctgttggatggggaaggtaagtaggggkatagagagggaggaagagggaggcagcaacaaatttactcgctgtgttgaccttgactgttacgagtttgccccttggccagggggactgtgtggagtggtgctctggcagcagccttcccccttacaggggtgtgggcccccaccctgatacaggtgattgtccctcgccaccccgggaagctgctgatcctcaggcccaccctctgagctttggctcttacgttcacgagcgctggggctcagagatggcagaatggcggctccagagtgtccctccaggtgcttgtcattagccactgccccctgctccatctctggctgtaagccctttggccccctttggtctacacagcactgtcaactgactctgaggagtcagagaggcagtcatttacccaatgacacagctggtcttgaggatgtaagctgtctgaggccttgctttgagataagtgtcccacagcctgatgtccaaccaagtggacatgagacctgaactcccttgtcagtgacacacctgacaaaggatgtccccatggcatttctgtgttgttgttgttgttgttttgtcttgagacaggttatcgctcagttgctcaggctggagtgcggtgacacaatcgtggcccactgtagcctcgaccacccgggctcaagcaatcctcccacctcaccctcccaagtagctgggactacaggtgcctgccatcacacctggcttatttttgtattttttatagagacagggtttcaacttgttgcccaggctggtctcgaactcctgacctcaagtggtccccttcccaaagtgctgggattacaggtgtgagccattgtgcctggcccccatgatatttcttatagccattggtactgccatgatttgggagttttgggagaattgaagcaagtacttagaa

SEQ ID NO: 77878 - DNA, 1289 bp, Homo sapiens
aaaactagtctacagccagatttcacaacccctgccccctgaaaaaaaccctcttgtcaagtctatcttcttaatgtgaacaaacatgctgcctttatccaccttacgggatgcaaccatggggcagaccctcttacctatacccttggatagtctctggtcactggtccgcttcttccaatctctaccccagctaatcccaagtgattcttctaaaaacgccaatcaattcaaagatttctgtctgccgcaagtcaaaatctaagccttgcaccactctttaacttcatcaaatgcagtcgccgcctggaatcctgggctccaaccgtgcttgtcttccggatgggtcagtttctgcccttcctctgggccttggtgtcctctggtctacacactgtcctcctcctctggcctggtacactttcaccagtttgtttttgttttacctaactgggtactgtcaattctcagattagagtgactttttcaggaaagcatttcttcacctcctggtgctgaaataagtacttttattcaagccatcacttcgcatgtgacactatgctatcacttagttttcagctgtccctctcactagactggacactcctcaagagcacagaaggaatcatttcatgagcattttcactgccaggcacagggaagacaggcacagggtgtgtcttcagtaaacatttatccaaatccactcagcattgaatgaatgaatgaatgaatgaatgaatgagatataagtatgtgactgtactttagtgactctctgctgttcccaatcaatatttccattgttccaatcactgtttttcccatccgcaggttatctatttataatttttttcattcccctacccctggtttattcagaggttcwctcactcctctatattgaatggccagaataagactcaaagtcagggtcactgttggtacatgatggtgcaattagtagacatctcagtgtgaagattaaaacttacacatagagcaagactctgttaaaaaaaaaagaacttgcagaatccacctggtgaattcctttcagaattgtttcttttagaatttcttccttgtagatttctcttctttcatacactatttttaaatccttctctttgtatatcataattatctgtctctttttggtttgattaatgtctactaagcctttcacttagatagtttcagttctcagctatttaggacacagccaatacctgggaagatttcttccttttggaaggaccgtcagcaccagggcagaatgcaga

SEQ ID NO: 77879 - DNA, 683 bp, Homo sapiens
agaattaccacacccataaaagtctcacagagggcaaaagggcatcctgagatttttccagtctaacataaactgcrtgttagccaacaaaagcacacacattaagtagatggaagtccctctgctcttggctggaattatatcaagtggaaatggtaaggaggacaacttcattctgatgggacctcctaactggctattgatcataaagtaatttctgagaccatattaggacaaagaattccaggcagttaaaagataggggaggttgggggttactggtttaaagctcaccaatatgttctttaaacaaaagaatcaccactgcctaaagtggagagtttgtttttaaatgaaatactagagctgtcagtgaagcccgctttctgttcttggccctttcaatactcctcactaaaagtgctaaacatatttatagcaatgagattaactcaaatccaggcacccagaatttgaggctgagctttatttacctgaaaacaatgtttataagtcactccgtatatcaatgaggtaagcattctcgaaatcagacagcaagaaggaaaggctgctgcagccccagttccattagcaaggtcaaaggataatggtcagatccattttaacttgttcacatttctttctcatctgaataaatcaattttgattggttagattgt

SEQ ID NO: 77880 - DNA, 683 bp, Homo sapiens
agaattaccacacccataaaagtctcacagagggcaaaagggcatcctgagatttttccagtctaacataaactgcgtgttagccaacaaaagcacacacattaagtagatggaagtccctctgctcttggctggaattatatcaagtggaaatggtaaggaggacaacttcattctgatgggacctcctaactggctattgatcataaagtaatttctgagaccatattaggacaaagaattccaggcagttaaaagataggggaggttgggggttactggtttaaagctcaccaatatgttctttaaacaaaagaatcaccactgccyaaagtggagagtttgtttttaaatgaaatactagagctgtcagtgaagcccgctttctgttcttggccctttcaatactcctcactaaaagtgctaaacatatttatagcaatgagattaactcaaatccaggcacccagaatttgaggctgagctttatttacctgaaaacaatgtttataagtcactccgtatatcaatgaggtaagcattctcgaaatcagacagcaagaaggaaaggctgctgcagccccagttccattagcaaggtcaaaggataatggtcagatccattttaacttgttcacatttctttctcatctgaataaatcaattttgattggttagattgt

SEQ ID NO: 77881 - DNA, 986 bp, Homo sapiens
  misc_feature (1)...(986): n = A,T,C or G
gaaaaatgaataagacttactatttggtagcacaatagggttactatagtcagtaataattgtagactttaaaataaagagtgcaattggattgtttgtaactcaaaggataaaggtttgaggggatggatacccccataatatgcttatttcatagtgtttgcctgtatcaaaacatcgcatgtactctataaatatgtacacctaccatgtaccccccaaaataaaaataaatgaaaataaaaagtaatgagcttatagcacttcattttaaatatttttacatacccaccttgaaaatcagccatgctaagtcccagaattttttaaaagtgttgtattaccgaattttcactgccatatatgttcttaaaagcagatgtaagttgaaaatgtgaaattaatttgtatctcaactttatgtcccatttcccaggtgtagaacacttcaccacggcttgttttatatatataaatatatataaaaaawatatatataaatacatataaaatatatatatataaatatatatatatatatataaataaaaaacacacatgtgcactagtctttttcatatagagacgtcttttcctctggatagatacccagtagtgagattgctggatcaaatggtagatctacttttagctatttaaagaatctctatactgtttnccatagtgcttgtagtagttacattcccacaagcagtgtaaaagtgtctcttttaccatccatgccaacatgtattattgattttataattatagtcattcttgcaggagtaaggtggtatcacattgtggttttgatttgcatttccctgatcattagtgatgttgagcattttttcatatgtttttttggccatttgtatatcttcttttgagaattgtctattcatgtccttagcccactttttgatgggattatttgtttttttcttgctgatttgtttgaattccttataggttctttatat

SEQ ID NO: 77882 - DNA, 986 bp, Homo sapiens
  misc_feature (1)...(986): n = A,T,C or G
gaaaaatgaataagacttactatttggtagcacaatagggttactatagtcagtaataattgtagactttaaaataaagagtgcaattggattgtttgtaactcaaaggataaaggtttgaggggatggatacccccataatatgcttatttcatagtgtttgcctgtatcaaaacatcgcatgtactctataaatatgtacacctaccatgtaccccccaaaataaaaataaatgaaaataaaaagtaatgagcttatagcacttcattttaaatatttttacatacccaccttgaaaatcagccatgctaagtcccagaattttttaaaagtgttgtattaccgaattttcactgccatatatgttcttaaaagcagatgtaagttgaaaatgtgaaattaatttgtatctcaactttatgtcccatttcccaggtgtagaacacttcaccacggcttgttttatatatataaatatatataaaaaatatatatataaatacatataaaatatatatatataaatatatatatatatatataaataaaaaacacacatgtgcactagtctttttcatatagagacgtcttttcctctggatagatacccagtagtgagattgctgkatcaaatggtagatctacttttagctatttaaagaatctctatactgtttnccatagtgcttgtagtagttacattcccacaagcagtgtaaaagtgtctcttttaccatccatgccaacatgtattattgattttataattatagtcattcttgcaggagtaaggtggtatcacattgtggttttgatttgcatttccctgatcattagtgatgttgagcattttttcatatgtttttttggccatttgtatatcttcttttgagaattgtctattcatgtccttagcccactttttgatgggattatttgtttttttcttgctgatttgtttgaattccttataggttctttatat

SEQ ID NO: 77883 - DNA, 1035 bp, Homo sapiens
tgggattcaaagatatcagtaaagttttatttctgaggcttagtggtggatacaccaatgttagcaacaaccacacagttcagcttcagttgctgaagcataggctccagaacccacaggccttaagaaaatgctgtgcagttcatcctgattcctctcctctatttaacagctttatacacacttagatgagacctttgagaggtaggggagaacgctaggggaggctactatagtaaggataataaagttgaataaattaacccagaagcattggaattaaacaccagcctagtaagccaggctaagaggaggaggctgatataaacaagaaaacattgttagaacttattatgcaaaatgttaccttgaggttgcaatctgattagttttttgcaattcatctcttgcttcctctttttgtctccagctttcctctcttcataggagggggtggggcttcttattccaggacccctgttcccctaagcagcctaaaactaggcagatctattagccaggaccgtctctgtcaataatggctgctcttccagtgcatttttcagtgtgtaagatgtaattctaaacatatgctgattcccacatgttagctcctattctaatgtaatgctctgttgtggctgggaacatattgagtcccacaaatgagtacttgtggacaatggacctctttgggggaaggagccccaagggagaggagggaagagtgtttattccattaatgtgtatgtgtgtatctccaccataatttctgaagggactggaaacaagacatcaaggcagctaataaagtactagagagaactgyccctctgctttggagggggttgggtgaccaatggcacctggaggggtggatgaaccaagtcaataaaagttccaaaataatacacatactgtgttatggctgcattggcttaaaaattttaaactgtctctggggatattctaaatttagaaaacccataaagaaagacatgggaatgataaacactgaatcctggatagtctgta

SEQ ID NO: 77884 - DNA, 1035 bp, Homo sapiens
tgggattcaaagatatcagtaaagttttatttctgaggcttagtggtggatacaccaatgttagcaacaaccacacagttcagcttcagttgctgaagcataggctccagaacccacaggccttaagaaaatgctgtgcagttcatcctgattcctctcctctatttaacagctttatacacacttagatgagacctttgagaggtaggggagaacgctaggggaggctactatagtaaggataataaagttgaataaattaacccagaagcattggaattaaacaccagcctagtaagccaggctaagaggaggaggctgatataaacaagaaaacattgttagaacttattatgcaaaatgttaccttgaggttgcaatctgattagttttttgcaattcatctcttgcttcctctttttgtctccagctttcctctcttcataggagggggtggggcttcttattccaggacccctgttcccctaagcagcctaaaactaggcagatctattagccaggaccgtctctgtcaataatggctgctcttccagtgcatttttcagtgtgtaagatgtaattctaaacatatgctgattcccacatgttagctcctattctaatgtaatgctctgttgtggctgggaacatattgagtcccacaaatgagtacttgtggacaatggacctctttgggggaaggagccccaagggagaggagggaagagtgtttattccattaatgtgtatgtgtgtatctccaccataatttctgaagggactggaaacaagacatcaaggcagctaataaagtactagagagaactgcccctctgctttggagggggttgggtgaccaatggcacctggaggggtggatgaaccaagtcaataaaagttccaaaataatacacatactgtgttatggctgcattggcttaaaaattttaaactgtctctggggatattctaaatttagaaaacccataaagaaagacatgggaatgataaacamtgaatcctggatagtctgta

SEQ ID NO: 77885 - DNA, 696 bp, Homo sapiens
ttggcgcctactgttttttcccccccgagatgcagtcttgctctgttgcccaggctggagtgcagtgatgtgatctctgctcactgcaacctctgcctcccaggttcaagcaattctcttgcctcagcctcccgagtagctgggattacaggtgcccaccaccatgcccggctaattttttttgtatttttagtagagacgtggtttcactatgttggccaggctggtcttgaactcctgacctcatgatccacccgcctcggcctcccaaagtgttgggattacaggcgtgagccaccgtgcccggcctgttcctactcttgtaaaatggagatagcaatcatacctatctgtgtcagaagaactaacacaggcaggctcagagaagtgaggcccagggaggggtaacagggacacatctccccagttctgaaataataaaggcactgggcatctacatggacaatggcacagtgctgtactatctgcaatagagcaaaatgaatttcacaacatgacgtgacagaaatcttagaacagtgaccggagcacaggtcatatttattatttctttctttatttgtttgtttgtttatttatttttgagactgagtctcactctatcatctaggctggagtgcagtggcgtgatctcggctcactgcaacctccaccccttgggttcaagmgattctc

SEQ ID NO: 77886 - DNA, 896 bp, Homo sapiens
tgggcacttgggttgcttccacctcttggctactatgaataatcctcttatgaacctggatgtacaaatagttgttcaagaccctgctttcagttcttttgtttgtttgtttgtttgagacagagtcttgttctattatgaaatggtgggatctcactcactgcaacctccacctcccgggttcaagcaattcttctgcctcagcctcctgaggagctgggactacaggcatgtgccaccacgcctggccatttttttgtatctttagtagagacagggttttgccatgttgcccaggctggtctccaactcctgagctcaggcagtctgcctgccttggcctcccaaagtgctaggactacagttgtgggccaccacgcacagcccctgcttagttcttttgggtatatagaagtgggattgctgcatcatatggaaattctgtttaactttttcaagaaccaccatatttttcatagaagctgcaccattttgcattcccagcaacagtaaacaagggttccaatttctgtacattcttgcccgtaccttttactttgtttttttccttccttccttccttctctctttcttttgtaatagacatcctaataggtatgagtttcgggctttattttaaatgtactagtttatttcatctgttaaattataagaggtagataggtcgtgctatctccatttgaaagaagaggaaacaggtataaaggtgttggctgctaagaattggagctggtatttgagtcaggtagcatggttctgggatctgagctcctactccccttctctgactgcctccctcgttatataacaatgcagcaagttcaaacaataaaraaatgtttgtgaaagcaagtgagcttttttacccagttcca

SEQ ID NO: 77887 - DNA, 1246 bp, Homo sapiens
cttgagcccaagagtttaagactgcagtgggtaggtggggaggcaatcagtaagaaatttccaggctaggcttgagatagaaccaaccatccaagataacctctccctactgatgcccttgaagtcacctttgacagatgcaccctaaatggaaaatgaagtaaaaagatacaggcagcaggtaaacctggcactgcctagagctctagcattgtgtgggtatccaaaatattcaaactatctaaagaggtgaccaaccctgacactgactcattggaggagttccacaaactcctacaaatctcagctttggaataaaataatcaacatgagaaaaaaatattggaaatctcttctatgttatgaattcataactcatgtttcaaaatgcattgcccttcaaaagataccataaataaaaggcaagccatagactaggggaaaatgtttgcaagtcattaaacccacaaaggatttgtataaagaactcttaaaactcaatagtacaaaaataaacacaactttaaaatgtgcaaaagatctaaacagatatctaccaatacataaattaccaataatcaaatgataatgcaacatcattattcaacagggaaataaaaattaaatctataatgagatatcacttcacaccccactagaatggctataattgaagagataatagcaatgtttttgaggatgcagtgaaactggaaccccaatacactgctggtgggaagatgaaatggtgtatcttagaaagtttgataatttcttagatattcatgttcatatttcatatctytaaatgtgaatttatcatatgactcagtaagcaatttctcttttaggtagctgcccaagagaaatgaagacatgtccaggcaaaggcttctatccgaatgttcacagcagcattattcatagtagccaaaaagcaaagacaatgaaaaatacccactcaatggtgaatggataaacaaagtgaggtatatccattcaaatgaagcactcatatattctctgagctatatgaaactcaaaagcattatgccaagtggaagaagttagccacaaataccacatattgggtgattccacttatatgaaatgttctgaaaaggcaaatctattgcgacagaaaatagattagtggtggttgcctgggactgggagtacaagggagtgaaagcatatggcctgtccacagttgctctgtttgctccacagggaactcagctcacaa

SEQ ID NO: 77888 - DNA, 1246 bp, Homo sapiens
cttgagcccaagagtttaagactgcagtgggtaggtggggaggcaatcagtaagaaatttccaggctaggcttgagatagaaccaaccatccaagataacctctccctactgatgcccttgaagtcacctttgacagatgcaccctaaatggaaaatgaagtaaaaagatacaggcagcaggtaaacctggcactgcctagagctctagcattgtgtgggtatccaaaatattcaaactatctaaagaggtgaccaaccctgacactgactcattggaggagttccacaaactcctacaaatctcagctttggaataaaataatcaacatgagaaaaaaatattggaaatctcttctatgttatgaattcataactcatgtttcaaaatgcattgcccttcaaaagataccataaataaaaggcaagccatagactaggggaaaatgtttgcaagtcattaaacccacaaaggatttgtataaagaactcttaaaactcaatagtacaaaaataaacacaactttaaaatgtgcaaaagatctaaacagatatctaccaatacataaattaccaataatcaaatgataatgcaacatcattattcaacagggaaataaaaattaaatctataatgagatatcacttcacaccccactagaatggctataattgaagagataatagcaatgtttttgaggatgcagtgaaactggaaccccaatacactgctggtgggaagatgaaatggtgtatcttagaaagtttgataatttcttagatattcatgttcatatttcatatctctaaatgtgaatttatcatatgactcagtaagcaatttctcttttaggtagctgcccaagagaaatgaagacatgtccaggcaaaggcttctatccgaatgttcacagcagcattattcatagtagccaaaaagcaaagacaatgaaaaatacccactcaatggtgaatggataaacaaagtgaggtatatccattcaaatgaagyactcatatattctctgagctatatgaaactcaaaagcattatgccaagtggaagaagttagccacaaataccacatattgggtgattccacttatatgaaatgttctgaaaaggcaaatctattgcgacagaaaatagattagtggtggttgcctgggactgggagtacaagggagtgaaagcatatggcctgtccacagttgctctgtttgctccacagggaactcagctcacaa

SEQ ID NO: 77889 - DNA, 729 bp, Homo sapiens
agacatacaatcctgaagagcygagagttgtggaaacaggcacacaaagtactctagtgggtcctttggagtgtcgataagtggggccatcctgcttctactccttggttcccagaacaatgtttcatttctattggggacattgtaccatatagaagtctctgctataattcatatattgcatccttaaaaatagaatcctatccttgtagagtgttgctggcaagctgtcatttcacctgtgtcttaagccgatcattccacagttctgtcgtactggctgattctagattatgtggtgtgtgatatgaccagtagatctcatactcatagacccactctcaaacctcacaagtattatgtaagctcccctatagtgatgcggttgagtcttcatggacaggaaaggtaaacccatatctagcgtagacatttctctctaaaaggttgaaccattgactcttccaggagaaaaagagcccagtgcattcaactaaccaccaagtggctgactgctctccttgaagaatagtatattattaggatttagtaataattttgctgcctgcaggttggacctagagaggcagcaatagctaggtagatcttgataagatagagtcagtgctgttgagcctatgcctaacctctatctctgccaccttgctcattctatgcatgtgcccatgatgccagctctgtggtggtcaaaatacaaaatttagctaa

SEQ ID NO: 77890 - DNA, 729 bp, Homo sapiens
agacatacaatcctgaagagccgagagttgtggaaacaggcacacaaagtactctagtgggtcctttggagtgtcgataagtggggccatcctgcttctactccttggttcccagaacaatgtttcatttctattggggacattgtaccatatagaagtctctgctataattcatatattgcatccttaaaaatagaatcctatccttgtagagtgttgctggcaagctgtcatttcacctgtgtcttaagccgatcattccacagttctgtcgtactggctgattctagattatgtggtgtgtgatatgaccagtagatctcatactcakagacccactctcaaacctcacaagtattatgtaagctcccctatagtgatgcggttgagtcttcatggacaggaaaggtaaacccatatctagcgtagacatttctctctaaaaggttgaaccattgactcttccaggagaaaaagagcccagtgcattcaactaaccaccaagtggctgactgctctccttgaagaatagtatattattaggatttagtaataattttgctgcctgcaggttggacctagagaggcagcaatagctaggtagatcttgataagatagagtcagtgctgttgagcctatgcctaacctctatctctgccaccttgctcattctatgcatgtgcccatgatgccagctctgtggtggtcaaaatacaaaatttagctaa

SEQ ID NO: 77891 - DNA, 726 bp, Homo sapiens
actatgtaatttcaacactttatgaatatatctgtttcataaaatattaatacatattactggacctaagaaaacaatccacactagtaatactgtcccatgatatttaattcacttttgtaaatgttaacattaatatttcataattttagtaactctcctattaaaatgccgaaatttaacagcataaaagacaatatacatacaactttttttcaatatctaaagatactgagttactttaaactcttactcattgtctcttcagaatcaaatgtctgaatgataaacattaattggtatggttatggtagaggatggtgtggaagggagcaataaagagaaaaacagaagacaaatcaggggtacttactattattagatcatatacatttgaagagggtgaaaataaacgaagtattgtgtgatcataaaaaacgagctattagggcattacagtgactcattctacaagagttaatcaaagacccaagaaaaaattggaagggatggaagggaatatatgattgtcaatgcacaaatcttattaatgcataatgcaattgtaagaattctataacagaaatyaataccattttattttacaacacagaagtgcatgtctatcattttcctatttctattaaaagtatggagtcttctttccaagtctgcaataaattatactgttactttagatatattttgttaatttatttaatttgg

SEQ ID NO: 77892 - DNA, 800 bp, Homo sapiens
gatccagtcaataaaagtttgaaggatagattgaaggaaatacttttgacaaatttacagtagccaaaacagcatggtactggtacaaaaacagacacgtaaaccaatgaagcagaatagagaattcagaaataagaccgcacacctacaatcgtttgatcttcgacaaactggacaaaaacaaatgtggaaaggattccctatttaataaatggtgctcagtgaactgactagccatatggagaaaattgaaagtgaaccccttccttacaccttacacaaaaattaactcaaaatggattaaagacttaaatgtaaaacccaaaactataaaaaccttagaagaatatctgagtaataccattcagggcataggcatggacaaagatttcatgacaaaaatgtcaaaagcaactgcaacataaacaaaaattgacagatgggatctaatgaaactaaagagcttctgtacgcaaaagaaactatcatcagagtgaacatataacctacagaatgggagaaaaagtgtgcaatctatccatctagatattagacaaaggtctaatatccaaagtctacaaggaatctaaacaaatttacaagaaaaaaacwaactgccccattaaaaagtaggcaaaggacatgaacagacacttcttaaaagaaaatatttatctgaccaacaaacatgaaaaaaagctcaacatcactgatcattagagaaaagtaaattgaaaccacaatgagataccatctcaagccagtcagagtggtgattactaagaagtcaagaaacaaca

SEQ ID NO: 77893 - DNA, 1862 bp, Homo sapiens
aacttcccaggttataatacggtcttgaaattcttgttttgtttatgctgattccgtctctagataaaatcatgaccgatctttccttctagaacaagtgacagactttttatatatccactatcaagaagccttctatgtacactagaaaataaactttcctctcttactttaagtactattttatggataaaggttcatttcaattagcttgtgccaaagatatctgaaaatgtaagcaaaacataagaaaataaaatgtttaaaaaggtgtctatgatggtcagataagcagagaatcataatggaaatgacaaaaccaggcagctaatcatgggactgcttaaagaacaagccacctagcccaaattataatagatttcccaaagattaccactttgttttttttaaatgcattatattgattccaagtctatgtttgggctgaaagacccaatatatctcttaattaaaagtaccaaaaagatgrtttttagttgaaaataaaatgagaattaatgttaataaaatcttaacataaagcctattacctacatggaaaattcctttatttatgactctaaagaggttaatgaacaacagtatccttttagagaactaagataatgcattcaacgagcaaaaaagaaaaaaaaataaagatgccacacataaacaatattaatcttaaatgtaaaggggctaaatgccccaattaaaagacacagactggcaaattggatagaatcaagacccatcggtgtgctgtattcaggagacccatctcacatgcaaagacacacataggctcaaaataaagggatggagaaatatttaccaagcaaatggaaagaaaaaaaaaagcagtggttgcaatcctactctctgataaaacaaattttaaaccaacaaagatcaaaaaagacaaagaagggcattacataatggtaaagggatcaatgtaacaagaagagctataattttcactaattgtgctcataaatattatattatagctgtaaccctcatgtccccgcatgactccctatatccatgggccccaaaccctatgactaaaaagtaaacttaggagaaccacatttgtaatgtggagcccctaaataatgagttcaacacacagaacatactgcacagacgtactctaaattgcctagctggattcactgcctaggaaccaatgtatatgtttatttgtttgtttgttttggaaagggtaggatgaagaggaagaggtaaaaaacaagtacgacactttggcttcaagaaatctgttggaaacacagagttgaacatggtaaatattaatacaaaaaaacactttaaatgaaataggatttgttggaaatcatatctaagaattggaagaacttctaaggagttcttttgatccaacttttgtcactagagagcagtacatttaaaacattctccaaagctgatattttactattttttctcaaaaatcattacagagggggattccataatccccgacttcacacactcataatgtgtaatgaactttaaatttgatgtccaggtacataagttgacatatttattttggacaaaatactgctttaattattttaatatttcaggcagccttttatttttttggtcttgagtggtccagaaattcatttcaaattttaatttctattaaatgtgtaaacacatcgttcttcggactattacgtcttagtctcttctgtagtttaaacacattctttttctgtcatcattggaaacaaaatctatatacctgttctcattgcagatggatgatgacagacataaagctcttttcacctctttttctctttagctaaatgtgcctc

SEQ ID NO: 77894 - DNA, 1862 bp, Homo sapiens
aacttcccaggttataatacggtcttgaaattcttgttttgtttatgctgattccgtctctagataaaatcatgaccgatctttccttctagaacaagtgacagactttttatatatccactatcaagaagccttctatgtacactagaaaataaactttcctctcttactttaagtactattttatggataaaggttcatttcaattagcttgtgccaaagatatctgaaaatgtaagcaaaacataagaaaataaaatgtttaaaaaggtgtctatgatggtcagataagcagagaatcataatggaaatgacaaaaccaggcagctaatcatgggactgcttaaagaacaagccacctagcccaaattataatagatttcccaaagattaccactttgttttttttaaatgcattatattgattccaagtctatgtttgggctgaaagacccaatatatctcttaattaaaagtaccaaaaagatggtttttagttgaaaataaaatgagaattaatgttaataaaatcttaacataaagcctattacctacatggaaaattcctttatttatgactctaaagaggttaatgaacaacagtatccttttagagaactaagataatgcattcaacgagcaaaaaagaaaaaaaaataaagatgccacacataaacaatattaatcttaaatgtaaaggggctaaatgccccaattaaaagacacagactggcaaattggatagaatcaagacccatcggtgtgctgtattcaggagacccatctcacatgcaaagacacacataggctcaaaataaagggatggagaaatatttaccaagcaaatggaaagaaaaaaaaaagcagtggttgcaatcctactctctgataaaacaaattttaaaccaacaaagatcaaaaaagacaaagaagggcattacataatggtaaagggatcaatgtaacaagaagagctataattttcactaattgtgctcataaatattatattatagctgtaacccycatgtccccgcatgactccctatatccatgggccccaaaccctatgactaaaaagtaaacttaggagaaccacatttgtaatgtggagcccctaaataatgagttcaacacacagaacatactgcacagacgtactctaaattgcctagctggattcactgcctaggaaccaatgtatatgtttatttgtttgtttgttttggaaagggtaggatgaagaggaagaggtaaaaaacaagtacgacactttggcttcaagaaatctgttggaaacacagagttgaacatggtaaatattaatacaaaaaaacactttaaatgaaataggatttgttggaaatcatatctaagaattggaagaacttctaaggagttcttttgatccaacttttgtcactagagagcagtacatttaaaacattctccaaagctgatattttactattttttctcaaaaatcattacagagggggattccataatccccgacttcacacactcataatgtgtaatgaactttaaatttgatgtccaggtacataagttgacatatttattttggacaaaatactgctttaattattttaatatttcaggcagccttttatttttttggtcttgagtggtccagaaattcatttcaaattttaatttctattaaatgtgtaaacacatcgttcttcggactattacgtcttagtctcttctgtagtttaaacacattctttttctgtcatcattggaaacaaaatctatatacctgttctcattgcagatggatgatgacagacataaagctcttttcacctctttttctctttagctaaatgtgcctc

SEQ ID NO: 77895 - DNA, 1862 bp, Homo sapiens
aacttcccaggttataatacggtcttgaaattcttgttttgtttatgctgattccgtctctagataaaatcatgaccgatctttccttctagaacaagtgacagactttttatatatccactatcaagaagccttctatgtacactagaaaataaactttcctctcttactttaagtactattttatggataaaggttcatttcaattagcttgtgccaaagatatctgaaaatgtaagcaaaacataagaaaataaaatgtttaaaaaggtgtctatgatggtcagataagcagagaatcataatggaaatgacaaaaccaggcagctaatcatgggactgcttaaagaacaagccacctagcccaaattataatagatttcccaaagattaccactttgttttttttaaatgcattatattgattccaagtctatgtttgggctgaaagacccaatatatctcttaattaaaagtaccaaaaagatggtttttagttgaaaataaaatgagaattaatgttaataaaatcttaacataaagcctattacctacatggaaaattcctttatttatgactctaaagaggttaatgaacaacagtatccttttagagaactaagataatgcattcaacgagcaaaaaagaaaaaaaaataaagatgccacacataaacaatattaatcttaaatgtaaaggggctaaatgccccaattaaaagacacagactggcaaattggatagaatcaagacccatcggtgtgctgtattcaggagacccatctcacatgcaaagacacacataggctcaaaataaagggatggagaaatatttaccaagcaaatggaaagaaaaaaaaaagcagtggttgcaatcctactctctgataaaacaaattttaaaccaacaaagatcaaaaaagacaaagaagggcattacataatggtaaagggatcaatgtaacaagaagagctataattttcactaattgtgctcataaatattatattatagctgtaaccctcatgtccccgcatgactccctatatccatgggccccaaaccctatgactaaraagtaaacttaggagaaccacatttgtaatgtggagcccctaaataatgagttcaacacacagaacatactgcacagacgtactctaaattgcctagctggattcactgcctaggaaccaatgtatatgtttatttgtttgtttgttttggaaagggtaggatgaagaggaagaggtaaaaaacaagtacgacactttggcttcaagaaatctgttggaaacacagagttgaacatggtaaatattaatacaaaaaaacactttaaatgaaataggatttgttggaaatcatatctaagaattggaagaacttctaaggagttcttttgatccaacttttgtcactagagagcagtacatttaaaacattctccaaagctgatattttactattttttctcaaaaatcattacagagggggattccataatccccgacttcacacactcataatgtgtaatgaactttaaatttgatgtccaggtacataagttgacatatttattttggacaaaatactgctttaattattttaatatttcaggcagccttttatttttttggtcttgagtggtccagaaattcatttcaaattttaatttctattaaatgtgtaaacacatcgttcttcggactattacgtcttagtctcttctgtagtttaaacacattctttttctgtcatcattggaaacaaaatctatatacctgttctcattgcagatggatgatgacagacataaagctcttttcacctctttttctctttagctaaatgtgcctc

SEQ ID NO: 77896 - DNA, 1515 bp, Homo sapiens
aggctttttaaggaccgtrgaaacctcatctctttcacactcactggatagaaaaaacgggttgctgatacagccaatgagctggtaatcatgcagaagcctaggcacacccaagagaagttattacagggtgaaatgctatctgtgggtgtctggccatgggaaaaaccagttaatctatgggataaattacaagtcttttagagaacaaacaggtttcaccaggttctgtctacttcttcaaccactaacgcatgacataatttctgctccagaaacaccacttatcatggcacacatacgtacctttttatttcacatctctatttatttgatcacatggtctggccaccttatctaataccaattcatactaatgtttttaccgaggtttatctcctccaggaacccttcctctatgagttagattggaaagatttcttttatcatggtacttactacattgtattataaatatctgcttataggtgggacctgctttgatgtgggagtgactttggaccaggggctgcttttttttttttctttttgagacagagtctcgttctgtcacctaggctggagtgcagtggtgcaatctcagctcactgctacctccacctcccgggttcaagcaattctcctgtctcagtctcctgagtagctaggattacaagtgcacgccaccatgcccagctaatttttgtatttttagtagagacggggtttcaccgtgttggtcaggctggtctcaaactcccaacctcgtgatccgcccaccttggcctcccaaagtgctgggattataggtgtgagccaccgcacctggccagggctgcattttattaattcattttagtatccctaacacagaatccagtgtgtggaaaatgctggaatctagccaattgcccaaacttccttcctctgggattttaaccggttggtcccagacataaagatcacatgaaaatctaagtaaagtgtcatctttatccctagttgggcaggggccagtaacaatgcaaagtttctgattaactgcattgacaagtgtggcttaggcttagagtcaagcctgggcttcctacctcctctccatcaaaaccttaacagtcaggctgaaagaggtgctgagagaaagaagttttgttaccagcattatcagcagaaagagctgatgctgataaacgatgaaaccagccaatgtttgactttttctagaaagaccatgagttgttttttcttatgataaaacccataaggattacaaaatgtactgcagagaaataggcttcagcaaaaatgaagtgcagtcatttcctgagacacttggacaaaattgcaggggggagtcaaagtaaagctttgatggtccatattatccaccaaatgtatttctagcaaataccaacaaattctgtggctactggaggtcactgtgtcagctgtcccgcttcactccacctaaagatacaactaagaaaaccataaagggatagagtgatagaatga

SEQ ID NO: 77897 - DNA, 1515 bp, Homo sapiens
aggctttttaaggaccgtggaaacctcatctctttcacactcactggatagaaaaaacgggttgctgatacagccaatgagctggtaatcatgcagaagcctaggcacacccaagagaagttattacagggtgaaatgctatctgtgggtgtctggccatgggaaaaaccagttaatctaygggataaattacaagtcttttagagaacaaacaggtttcaccaggttctgtctacttcttcaaccactaacgcatgacataatttctgctccagaaacaccacttatcatggcacacatacgtacctttttatttcacatctctatttatttgatcacatggtctggccaccttatctaataccaattcatactaatgtttttaccgaggtttatctcctccaggaacccttcctctatgagttagattggaaagatttcttttatcatggtacttactacattgtattataaatatctgcttataggtgggacctgctttgatgtgggagtgactttggaccaggggctgcttttttttttttctttttgagacagagtctcgttctgtcacctaggctggagtgcagtggtgcaatctcagctcactgctacctccacctcccgggttcaagcaattctcctgtctcagtctcctgagtagctaggattacaagtgcacgccaccatgcccagctaatttttgtatttttagtagagacggggtttcaccgtgttggtcaggctggtctcaaactcccaacctcgtgatccgcccaccttggcctcccaaagtgctgggattataggtgtgagccaccgcacctggccagggctgcattttattaattcattttagtatccctaacacagaatccagtgtgtggaaaatgctggaatctagccaattgcccaaacttccttcctctgggattttaaccggttggtcccagacataaagatcacatgaaaatctaagtaaagtgtcatctttatccctagttgggcaggggccagtaacaatgcaaagtttctgattaactgcattgacaagtgtggcttaggcttagagtcaagcctgggcttcctacctcctctccatcaaaaccttaacagtcaggctgaaagaggtgctgagagaaagaagttttgttaccagcattatcagcagaaagagctgatgctgataaacgatgaaaccagccaatgtttgactttttctagaaagaccatgagttgttttttcttatgataaaacccataaggattacaaaatgtactgcagagaaataggcttcagcaaaaatgaagtgcagtcatttcctgagacacttggacaaaattgcaggggggagtcaaagtaaagctttgatggtccatattatccaccaaatgtatttctagcaaataccaacaaattctgtggctactggaggtcactgtgtcagctgtcccgcttcactccacctaaagatacaactaagaaaaccataaagggatagagtgatagaatga

SEQ ID NO: 77898 - DNA, 1515 bp, Homo sapiens
aggctttttaaggaccgtggaaacctcatctctttcacactcactggatagaaaaaacgggttgctgatacagccaatgagctggtaatcatgcagaagcctaggcacacccaagagaagttattacagggtgaaatgctatctgtgggtgtctggccatgggaaaaaccagttaatctatgggataaattacaagtcttttagagaacaaacaggtttcaccaggttctgtctacttcttcaaccactaacgcatgacataatttctgctccagaaacaccacttatcatggcacacatacgtacctttttatttcacatctctatttatttgatcacatggtctggccaccttatctaataccaattcatactaatgtttttaccgaggtttatctcctccaggaacccttcctctatgagttagattggaaagatttcttttatcatggtacttactacattgtattataaatatctgcttataggtgggacctgctttgatgtgggagtgactttggaccaggggctgcttttttttttttctttttgagacagagtctcgttctgtcacctaggctggagtgcagtggtgcaatctcagctcactgctacctccacctcccgggttcaagcaattctcctgtctcagtctcctgagtagctaggattacaagtgcacgccaccatgcccagctaatttttgtatttttagtagagacggggtttcaccgtgttggtcaggctggtctcaaactcccaacctcgtgatccgcccaccttggcctcccaaagtgctgggattataggtgtgagccaccgcacctggccagggctgcattttattaattcattttagtatccctaacacagaatccagtgtgtggaaaatgctggaatctagccaattgcccaaacttccttcctctgggattttaaccggttggtcccagacataaagatcacatgaaaatctaagtaaagtgtcatctttatccctagttgggcaggggccagtaacaatgcaaagtttctgattaactgcattgacaagtgtggcttaggcttagagtcaagcctgggcttccyacctcctctccatcaaaaccttaacagtcaggctgaaagaggtgctgagagaaagaagttttgttaccagcattatcagcagaaagagctgatgctgataaacgatgaaaccagccaatgtttgactttttctagaaagaccatgagttgttttttcttatgataaaacccataaggattacaaaatgtactgcagagaaataggcttcagcaaaaatgaagtgcagtcatttcctgagacacttggacaaaattgcaggggggagtcaaagtaaagctttgatggtccatattatccaccaaatgtatttctagcaaataccaacaaattctgtggctactggaggtcactgtgtcagctgtcccgcttcactccacctaaagatacaactaagaaaaccataaagggatagagtgatagaatga

SEQ ID NO: 77899 - DNA, 1515 bp, Homo sapiens
aggctttttaaggaccgtggaaacctcatctctttcacactcactggatagaaaaaacgggttgctgatacagccaatgagctggtaatcatgcagaagcctaggcacacccaagagaagttattacagggtgaaatgctatctgtgggtgtctggccatgggaaaaaccagttaatctatgggataaattacaagtcttttagagaacaaacaggtttcaccaggttctgtctacttcttcaaccactaacgcatgacataatttctgctccagaaacaccacttatcatggcacacatacgtacctttttatttcacatctctatttatttgatcacatggtctggccaccttatctaataccaattcatactaatgtttttaccgaggtttatctcctccaggaacccttcctctatgagttagattggaaagatttcttttatcatggtacttactacattgtattataaatatctgcttataggtgggacctgctttgatgtgggagtgactttggaccaggggctgcttttttttttttctttttgagacagagtctcgttctgtcacctaggctggagtgcagtggtgcaatctcagctcactgctacctccacctcccgggttcaagcaattctcctgtctcagtctcctgagtagctaggattacaagtgcacgccaccatgcccagctaatttttgtatttttagtagagacggggtttcaccgtgttggtcaggctggtctcaaactcccaacctcgtgatccgcccaccttggcctcccaaagtgctgggattataggtgtgagccaccgcacctggccagggctgcattttattaattcattttagtatccctaacacagaatccagtgtgtggaaaatgctggaatctagccaattgcccaaacttccttcctctgggattttaaccggttggtcccagacataaagatcacatgaaaatctaagtaaagtgtcatctttatccctagttgggcaggggccagtaacaatgcaaagtttctgattaactgcattgacaagtgtggcttaggcttagagtcaagcctgggcttcctacctcctctccatcaaaaccttaacagtcaggctgaaagaggtgctgagagaaagaagttttgttaccagcattatcagcagaaagagctgatgctgataaacgatgaaaccagccaatgtttgactttttctagaaagaccatgagttgttttttcttatgataaaacccataaggattacaaaatgtactgcagagaaataggcttcagcaaaaatgaagtgcagtcatttcctgagacacttggacaaaattgcagggkggagtcaaagtaaagctttgatggtccatattatccaccaaatgtatttctagcaaataccaacaaattctgtggctactggaggtcactgtgtcagctgtcccgcttcactccacctaaagatacaactaagaaaaccataaagggatagagtgatagaatga

SEQ ID NO: 77900 - DNA, 1515 bp, Homo sapiens
aggctttttaaggaccgtggaaacctcatctctttcacactcactggatagaaaaaacgggttgctgatacagccaatgagctggtaatcatgcagaagcctaggcacacccaagagaagttattacagggtgaaatgctatctgtgggtgtctggccatgggaaaaaccagttaatctatgggataaattacaagtcttttagagaacaaacaggtttcaccaggttctgtctacttcttcaaccactaacgcatgacataatttctgctccagaaacaccacttatcatggcacacatacgtacctttttatttcacatctctatttatttgatcacatggtctggccaccttatctaataccaattcatactaatgtttttaccgaggtttatctcctccaggaacccttcctctatgagttagattggaaagatttcttttatcatggtacttactacattgtattataaatatctgcttataggtgggacctgctttgatgtgggagtgactttggaccaggggctgcttttttttttttctttttgagacagagtctcgttctgtcacctaggctggagtgcagtggtgcaatctcagctcactgctacctccacctcccgggttcaagcaattctcctgtctcagtctcctgagtagctaggattacaagtgcacgccaccatgcccagctaatttttgtatttttagtagagacggggtttcaccgtgttggtcaggctggtctcaaactcccaacctcgtgatccgcccaccttggcctcccaaagtgctgggattataggtgtgagccaccgcacctggccagggctgcattttattaattcattttagtatccctaacacagaatccagtgtgtggaaaatgctggaatctagccaattgcccaaacttccttcctctgggattttaaccggttggtcccagacataaagatcacatgaaaatctaagtaaagtgtcatctttatccctagttgggcaggggccagtaacaatgcaaagtttctgattaactgcattgacaagtgtggcttaggcttagagtcaagcctgggcttcctacctcctctccatcaaaaccttaacagtcaggctgaaagaggtgctgagagaaagaagttttgttaccagcattatcagcagaaagagctgatgctgataaacgatgaaaccagccaatgtttgactttttctagaaagaccatgagttgttttttcttatgataaaacccataaggattacaaaatgtactgcagagaaataggcttcagcaaaaatgaagtgcagtcatttcctgagacacttggacaaaattgcaggggggagtcaaagtaaagctttgatggtccatattatccaccaaatgtatttctagcaaataccaacaaattctgtggctactggaggtcactgtgtyagctgtcccgcttcactccacctaaagatacaactaagaaaaccataaagggatagagtgatagaatga

SEQ ID NO: 77901 - DNA, 1093 bp, Homo sapiens
tcctgttgaggtttcatgtgaacctcatatttgtttcatatttggtgttatgtgagccttccacctggccataggtgattggacagggactggcacttgagctgaaagtagccaatgagttagcctcatgtaagagtccatctctacataggactatgattaattagacccattacgttctccttctgaaagttttgaatgagacgttgctcagagtgagtgggatatatgttcattctagtaggaatcttgtctgttttctttcctaatttatcaccattattgataatagtacccagcacttggctgggcatggtggcgcatgcctgtaatcccaggactttgggaggctgaggcaggcagatcacaaggtcaggagttcatgactagcctggcaacatggcgaaaccctgtctctactaaaaatacaaaaattagccaggcacggtggcacgtgcctataatcccagctacttgggaggctgaggcaggagaatcacttgaacctgggaggtggaggttgcagtgagccaagatcgcaccactgtactccagcctgggcaacagagcgagactctgtctcaaaaaaaaaaataawaataataataataaagtagtacccagcatggcacacaataaatatttgataaataaatgcacgcacccttatgtagaaagatttttaaaaaatgaatcaacatctctctccccatattttacctttttctcctgccaccaggcagccaggttcttccttatctcctcttttaaattgttattattcttttaaacacactttattttttaaggcacctttaggtttgcagcagaactgagtggaagataatagagacttctcacatatcccctgctgcctcacatgcatagcctcccttattatcaacatccccacagaatggtacatttgttataattgataatctacattgacacatcattatcatccaaagaccaagtttacattagggttcactcttgctgttgttcattcaatgggttttgacaaatgcttaatgacatgtatctaccattataacaacatacagagtagtttcactggcctaaaaatcct

SEQ ID NO: 77902 - DNA, 645 bp, Homo sapiens
aaaaaatcaattatgtgacccaaattgtgaccattgtcacatgaaattgactcttgaactataatattgttgatgaaatttctgtaatcgttatcatacaaggactttgcatcaaatttgatgttgatataatttagagaaggagcctttggagattcctcagacttccctgtacacagtttcatcacctccttattagatgtgctatcataatgggtgtgtgtgtgtgtgtgtgaaaaggagagaaaaaacatgcacacgtgttgcttastaactttttaataactcccattgcatctgcaactgccaacttctccactgaaaatatatttcctacaaatatccaatattactccctatgctaatcattatagtagacttcttattcagcatcagttaggaacagtgtaaactgttcatgtgtttgggtgaagaagggcagagcagtgatgatggggaagttgtcaggctcactttaccaatgcaaaggtaggtgagggcgtcctgaaaattttgcacacctacaaacttatgatttcaatagtgtctctgaaaggcaaaatgtccatttgcaattctggaagtatatgtcatcttgaactagaagcttcaggctgattaagatctcctacttctaacctaaaa

SEQ ID NO: 77903 - DNA, 600 bp, Homo sapiens
aatataatctttgatagtgacagagtttcacttcttggtcaaactctagctaggctcttctgagccctcttctggactagactttaactgtgacctacaaataagaactgcagactccccgtataaattatttcattcaacccctctcctaccacattaaaagacttagccaaacactaaaacagtttctactagcgcaaggtckttaaccgcagtatgagtcaaggctgccaaaaaaatttactttttgttccagccaacacctgagaataggcccctggccacactttcttagaacaattattaaaaagcttaccattttgaatccttcctctgtccctttgagatacatatgtttccctttcaactcaagagagcctttctcaaagacctgaaagtcattgctttgaaatgttatcactgggaaggatagggcttctgtctcctattctctgtggaaagatagaatcctaacctcaataactgccagctagcagacacagctggcctaagcacagttacgcttaaccagcctttgtggtttttcactttcctgactctgtaaccacctgaagggttcttgttgcccggtgaataaag

SEQ ID NO: 77904 - DNA, 546 bp, Homo sapiens
gaccactgtactccagcctaggcgacagagcgagactccgtctcaaaaaaaaaaaaataaataaataaagagttggccgggcacagtggctcatgcctgtaatctcagcactttgggaggccgaggcaggcggatcttctgaggtcaggagttcaagaccagcctggcaaacatggtgaaaccctgtctctactaaaaatacaaaaattagctgggcattgtggtgcatgctataatcccagctacttggaaggctgaggctggaaaatcccttgaaccaggaggcggaggttgcagtgagccaagattgtaccactgcattctggcctgggcgacagagtgagactccaactcaaaaaaaaaaaatttaaagagttattgcatcaaaatccttttaatctttctttctttaaatcagtagccccccaagccgggcatggtggctcacgcctgtaatcccagcactttgggtggccgaggcgggtggatcacgaagtcaggagatcgagaccatcctrgctaacacggtgaaaccccgtctctacc

SEQ ID NO: 77905 - DNA, 877 bp, Homo sapiens
acaccaattctgaccttctattctgagagcccccaactaaactggggttcccataccacagcagctaacaaccctgcccttataggaaataaaggggatttggacatgggcatttacaataagcctttcacaggatactcctttacatggcagatgtcctaatgcctgtgcctaatgccttgttcgacctgtgaccaggtgtccctcccatgggaaacttgcttattcctgcagacacccttgtggctccttctgacttgtgtccagtttgttgctgcctaaacaaagttctggtgctggcagcccaaccttgtgttctcctcagcatcccagagaaaaatctccctgaagtagcccctggttcctccaaaggaatgtgcaaattcaatccactgacaaaataggaaacaagtccaaagatttttacttaagagaccttgggcagggagggcaccatgagtcagaagggcagtcatccgttccaggatgagagagagagagagagagaataagagaatgaggaagggaggggtaaagagaaagcatggtgactagcagtctatataagagaatagggtgtgagtcactttaagttcacaggtaaatgtctgagagatgcctctaagtccctatctctggccatggcttaagccacttaggtgtgctattctactgctaatgcccaactttatgaccttytctatgtcattcttgttaccattgaccacacgatgtctaggtattagagcttgtgtatgcggaggtatttttgaacagtggaaacatcaaaggccaacagggaaatctgagtcaggcactgagtaaggtatttgatgagcacaatgaaatgataagtgatatgaaagcatggccccaa

SEQ ID NO: 77906 - DNA, 533 bp, Homo sapiens
tgctattacacctcccttttaatgttacgtgggtcagttaacttgtctgtctctatgggtttgactcacatctctttttacacgtcttaatattgcctagtagaaacatacagttcggagtacacttatggtggattcattgcacaaatgaaccaaaatgtcatcaagaaactaatagggactagatattccttatgccatgtgaaaacawaaaattcacaggtataggaatccatggtttgcaaatgcctgaacatttttttttttaaaaaaggacagttatccctgagagatgagaaatagtgatgtgagtcctactgtagccttgggttatggttgagtttccaggctgtgggtgtggcaaggaccttggaagacactcgagttgagaaggtggaactgagagtctggagaacaaggtggctgagtttcatcaagccattctccatgtccagtgctaggaaggggaaagagtattcatgccagctgccatgagatagctttgctatgtaccatcatcactgatgtggcac

SEQ ID NO: 77907 - DNA, 533 bp, Homo sapiens
tgctattacacctcccttttaatgttacgtgggtcagttaacttgtctgtctctatgggtttgactcacatctctttttacacgtcttaatattgcctagtagaaacatacagttcggagtacacttatggtggattcattgcacaaatgaaccaaaatgtcatcaagaaactaatagggactagatattccttatgccatgtgaaaacaaaaaattcacaggtataggaatccatggtttgcaaatgcctgaacatttttttttttaaaaaaggacagttatccctgagagatgagaaatagtgatgtgagtcctactgtagccttgggttatggttgagtttccaggctgtgggtgtggcaaggaccttggaagacactcragttgagaaggtggaactgagagtctggagaacaaggtggctgagtttcatcaagccattctccatgtccagtgctaggaaggggaaagagtattcatgccagctgccatgagatagctttgctatgtaccatcatcactgatgtggcac

SEQ ID NO: 77908 - DNA, 991 bp, Homo sapiens
acatcagatattggtgttaattttattgagccttcctggaaactgaaagtctattttcgaatacaaacaacattctaaattatatgtgtttcttctttattcaacatattcatcaaagaataccaaaacccaggcccrgcacagtgtcccacacctgtaatcccagtactttgggaggccaaggcgggcggatcacctgaggttgggagttcgaggccagcctgaccaacatggagaaaccccatctctactaaaaatacaaaattagccaggcgtggtggcacatgcctgtaatcttagctactcaggaggctgaggcaggagaatcgcttgaactcgggaggcggaggttgcagtgagccaagatcgtgccattgccctccagcctgggcaacaagagcaaaattctgtctcaaaataaataaataaataaccaaaacccactccatttttcaggtacccacaagtagggttgaccacagtaacaagtaagcaagcaaaacattttgtgaaaaccgtgaagcatcttcctctgcagtgacttatcaaaaggggtttgtatgatcaccgtccacagaattagaaagtagaatgggagaaaattagatacacagttgttctggaatgaagcactggatttagaaggcagattacagggaaaattgctcttatttctaatattagggcagaaattctcaattacatttttttctaactctacagaatactacaactccagcacaaacattgaactacctctttgccatttctaccttcccccttaatggatttcctgaaccattgcttataaaattatctctgtagtttaatacaaagataatatattaatatgctctatttttcttatttctattttactcttcaggtattcctccggacaatgtaatgctaacctagcccaatgagaattgatagaatttggtcataagtgtttaaaatgtgcctctatatattctgttagatagccaaa

SEQ ID NO: 77909 - DNA, 713 bp, Homo sapiens
ggtgcagatcgaaggggaggatgacgagaaaaggaccccccttagcagcggagaagcatcgtccacatccaggtcccagggcacccagggagacgtggcctccttcagatgcagccctgggcctctggagggaaatgtctaccacaagttctcagaaaacagcatgagtgagaaggcccaggcgtctccagcgagctcctgcttggaaggccctgccatgcccagcacacacagccaggccggatgtgcccggcatcttsgaaagcctgatccggatgcaacagcgccccctgagccagccgttggctgctccctgctgcagcagaagttggctgcggaagtgctgaatgaagagccaccgcccagctccctaggcttgccgattccgctgatgtccggaaagaggatgcctgatgagaagcctttctgtattcctccaaggagcgctgctcctcccagagctgcccgcaacaggccctgcaaaaggaaaatgtcgattccattgctgctgccgctgcccccttcactgccattgctgtgggatcgaggtgagcttcccccacctgctaagctcccctgcctgtctgttgagggagacctacacaccttggagaagagccctgagtataaaaggaatagcagaatcttggaggataaaacagagaccatgacaaacagcagcatcacccagcctgccccttctttctcccaac

SEQ ID NO: 77910 - DNA, 826 bp, Homo sapiens
tttcccaataggtggagctggagagggacctgggggatgacaacgaggagaaaattgagtttgagctcatccagctccacccccacacttgtggatgggcagtctgaggcccagagagcacacaagactttagggccacacagcaggctcttagcagaactctctacagaacttaggtctccggattcttaatccttgcccatctctgcttcactctagcattaacagacagaggggggatcaaggatggggactgtaataaaatagcttgttgaatagcaagagaggctgggtgcggtggctcacacctacaatcccagaactttgggaggccgaggcaggaggattgcttgaggccaagagttccacaccagcttgggcaacatagccagaccccatctctatttaatatargaaataataaaaaataaaaagtaaaagaatggcagtgtgatgccaccttgaagcaaaactgccatggtgactggtattggattcctgattctggcagcaaagtccttaaacaatgcctgtagcatagataacccctgtattagtccattctcacactgctgtgaagaaatacctgagactgggtaatttataagggaaagacatttaattgactcacagttccacattgctggggaggcctcaggaaacttaaaattatggcggaaaggaaaagagaagaagacaccttcacagagcagcaggacagagtgaatgcaagcaggggaaatgccagatacttataaaaccatcagatctcatgagactcactcatgatcatgaaaacagcataggggtaaccacccccatcact

SEQ ID NO: 77911 - DNA, 519 bp, Homo sapiens
tacatccgtcttattctgctttatatttagtatgatataattacattgctacagatccgcttttatgtagttgatgtgttcataaaatgtttcatgcaaaaccaataacactgtcccgctgattaacattctacattcagaaatgtttattttgccctgatttcagttgtcagtgactggcaacacccgttcatttaataaaggcagaaaatcttaaagacctggcaacaaatacttgaatatatttggggaactgcctgatagtatcctgaagtcttttgtaaagtgaataaaccttttatagtatgaataatctcatgttttggttttgtaaattctaatcttcttataatatatatcaggtttcttagacatacatcttaagttgacacttagaagactatcaagaagcctcatagacactggtgaaagtttatttcttaagtcaggtggtgggtgyatggatgttttcttattattctttaatctatacatgtaattatacttgcctttttgtac

SEQ ID NO: 77912 - DNA, 858 bp, Homo sapiens
acacacacacacacacactctcacactcacactcacacatacacatttacattcagcccctccttggaggcttcattagctttgcctgatcagcgcccaccgaggatgctgaaaagggccactccttcccccggctcttaaagatccaaaccccagacatatgccccctccctggtcagtggcacccagtgagggcagatccctgcgccagatgccacagggaactactggggaaggggaaagtcacattcctgggttttccctcgtggtgctcccattccaaagaggagacatctttactctcggaaagtcatcaggttcatagaggagacacagaggctaaagcccagagaacacaggcttggaaaagccaatggaaataaggaatggtctccatacctctatctattgcatctaaatattcaagggatgatttgggatttggagccaggagtaggggttagtcatggaaggcgtcctgaaagaggtaagcatgggacagatggtgaagaggaagaaggagccagggcttggatggaagctctagggtgatgtacaggcaggagatggagcaggtctgcccagttcccttcatgcatctgaaccaggaactagaactgacctgactagactctactgacctgaaccaggtcactagagggaaaatcagcagaaatgagcacaaggactttgaagtccttcctcagagtccagaccagggacaccactgaaggcttccagcttcttatctccctgaaggctctcagccctgaccctgcacctcccccaactcrcgctcccaatatctcatacttaagatgtccagagattcacaaattctcattgtctaattctagg

SEQ ID NO: 77913 - DNA, 526 bp, Homo sapiens
agggaccctgacctggggtcgggggcctaggtttactctcttttcgtacttgtgtggctttggtaaggtcttgttaggaaaggtgtaccatgtgtccatcaccagctgcagaccttcatctcccaatacacctcatggtgcttcacggttattgcagtttttacaaattgaaggtttggccaggcatggtggctcatgcctgtaatcccaacactttgggaggctaaggtgggcggatcactaaaggtcaggagtttgagaccagcctggccaacatggcaaaaccccgtctstactaaaaataaaaaaatcagctgggcatggaggcaggcgcctgtaatcccagctacttgggaggctgaagcaggagaattgcttgaacccgggaggtggagcatgcagtgagccaagatctcgccactgcactccagcctgggcaacagagtgagactgtgtctcaaaagaaaaagaaaaggacaaattgaaggtttctggcaacactgcatcaagcaaatctgtcggtgcc

SEQ ID NO: 77914 - DNA, 1279 bp, Homo sapiens
gtcggagaacagccaggcaaaagcacagagaattttgctctctgactaccgtgccgccgccagttccctcacagccccttgggggatttccctgctgaagccagcagaaagcccagcagtcccagcgcccctcctgccaccgtcagagctgcactgatgccccaccagcacctcagcgggagccgctgcccacacccctgccccctcccctcagccttccaggaagcgaaggccagacacagggaaacagaaacatgttgcccttttatttgcgtttctcagaatactgtacaaagggagtaaaaatcctattcacactttgcttagaaagattttaaggtgaaagttccctatgatacacggggtgggagatgcagggtcaggagggagaaaacaggcccagtgacctctccygttcccttggacccctggaagaggacacagggacccacaccttttcaaaattaacactgcccctagtccaactggggaggggagaaggctccagcccaggctcaggctcccggcctcactttcttctctgcaggctgagacagtgcctacaggccacgtcttgccccttcctctgtgctgcttgagcagggatcctacaggactctcaccacagaccccacatggggtggcctcacaacgccacatgtggctgccacatgagaggccctgcccagtgccagtctgtatgaggaagttaaggggtgagggcctgcagaggaccacagcacccatcgtttctgtcacagcttccccatacccccgcaggagtcagggccaagttggacctgtgcttacaatgactcacgggccttttccccacctgtctacccaacagccaacccaggagttaaacccacagcagcctccctcccctattactatcacattctgtgggtaaattaaccctccaagcctgcttccctccctgcccacatcccaaaggagattgggtctagcttctgtccctacccctccctcccttacaccagtcctctgctgctatgtggccccattcttctaagtctcgactcactagctctcctacagctccccaacctccaccaggccaggatggcagcagccctggccccctcacctctggaaccaagccatctacactctaccccatctttccccaacctgaccctccccactcccaaccaggacccacggtgggttgcagagaagctgccaaaagcctgggacttggattagacagctccctacccagaaaggcaaagacccatcccacacttgcttccat

SEQ ID NO: 77915 - DNA, 991 bp, Homo sapiens
ttaattttgagacggagtcttactctgtcacccaggctggagtgcagtggtgcgatctcacctcactgcaacctccgcctcctgggttcaagcaattctcctgcctcagcctcctgagtagctaggattgcaggtgcatgccactgtgcccggctaatttttgtatttttagtagagacagggtttcaccatgttcaggctgttctcaaactcctgacttcatgatctacccaccttggcctcccaaagtgctgggattacagacatgagccaccgctcccggcctggatgcacttattctaatataccagcttctgcttgattttgtaatcagtgkgttttgtttcgtttttaaatgactggccatctcaaatgtcttataattttggccctgggacacattttgccatggagatataagttattgtgtaaaacaatgctcttgggtgactaacaatatcagcctctttgagttcatggtatggggggatgggagagacgctgatgccataaaaccactatcactttctgcctcatatacacctgctttgtcagtttttcaccttttgctaccctagatgaagagacatcaggaggctctattagtctattcttgtgttgccataaagaaatacctgagtgtgggtcattttaaaagaaaggaaatttattttagcttatggttctgcaggctgtacaggaagcatggtgctggcatttgcttctggtgagggcacgagacagcttgccatcttggtggaaagcaaagggggagccagtgcatcacatgacaagggcaggagcaagagaaaaggggaggtcccagatttctttgaacagccagatctcatgtgaactaactagcgagatctcacttatcaccaaggggatagtgttaaaccattcatgagggacctgcccccgtgatccagtcatctcttccccaggccccacttccaacattggaaatcacatttcaacatgagatttg

SEQ ID NO: 77916 - DNA, 991 bp, Homo sapiens
ttaattttgagacggagtcttactctgtcacccaggctggagtgcagtggtgcgatctcacctcactgcaacctccgcctcctgggttcaagcaattctcctgcctcagcctcctgagtagctaggattgcaggtgcatgccactgtgcccggctaatttttgtatttttagtagagacagggtttcaccatgttcaggctgttctcaaactcctgacttcatgatctacccaccttggcctcccaaagtgctgggattacagacatgagccaccgctcccggcctggatgcacttattctaatataccagcttctgcttgattttgtaatcagtgggttttgtttcgtttttaaatgactggccatctcaaatgtcttataattttggccctgggacacattttgccatggagatataagttattgtgtaaaacaatgctyttgggtgactaacaatatcagcctctttgagttcatggtatggggggatgggagagacgctgatgccataaaaccactatcactttctgcctcatatacacctgctttgtcagtttttcaccttttgctaccctagatgaagagacatcaggaggctctattagtctattcttgtgttgccataaagaaatacctgagtgtgggtcattttaaaagaaaggaaatttattttagcttatggttctgcaggctgtacaggaagcatggtgctggcatttgcttctggtgagggcacgagacagcttgccatcttggtggaaagcaaagggggagccagtgcatcacatgacaagggcaggagcaagagaaaaggggaggtcccagatttctttgaacagccagatctcatgtgaactaactagcgagatctcacttatcaccaaggggatagtgttaaaccattcatgagggacctgcccccgtgatccagtcatctcttccccaggccccacttccaacattggaaatcacatttcaacatgagatttg

SEQ ID NO: 77917 - DNA, 991 bp, Homo sapiens
ttaattttgagacggagtcttactctgtcacccaggctggagtgcagtggtgcgatctcacctcactgcaacctccgcctcctgggttcaagcaattctcctgcctcagcctcctgagtagctaggattgcaggtgcatgccactgtgcccggctaatttttgtatttttagtagagacagggtttcaccatgttcaggctgttctcaaactcctgacttcatgatctacccaccttggcctcccaaagtgctgggattacagacatgagccaccgctcccggcctggatgcacttattctaatataccagcttctgcttgattttgtaatcagtgggttttgtttcgtttttaaatgactggccatctcaaatgtcttataattttggccctgggacacattttgccatggagatataagttattgtgtaaaacaatgctcttgggtgactaacaatatcagcctctttgagttcatggtatggggggatgggagagacgctgatgccataaaaccactatcactttctgcctcatatacacctgctttgtcagtttttcaccytttgctaccctagatgaagagacatcaggaggctctattagtctattcttgtgttgccataaagaaatacctgagtgtgggtcattttaaaagaaaggaaatttattttagcttatggttctgcaggctgtacaggaagcatggtgctggcatttgcttctggtgagggcacgagacagcttgccatcttggtggaaagcaaagggggagccagtgcatcacatgacaagggcaggagcaagagaaaaggggaggtcccagatttctttgaacagccagatctcatgtgaactaactagcgagatctcacttatcaccaaggggatagtgttaaaccattcatgagggacctgcccccgtgatccagtcatctcttccccaggccccacttccaacattggaaatcacatttcaacatgagatttg

SEQ ID NO: 77918 - DNA, 577 bp, Homo sapiens
aacttagatgctataacagttgctttagtagtagcatgtgtttttcttcttttgagatggagtcttgctttgttgcccaggctggagtgcaatggcgcattctcggctcaccacaacctccgcctcccgggttcaaatgattctcctgcctcaacctcccaaatagctgggactacaggtgcacgccaccatgcccagctaatttttttgtatttttagtagagacagggtttcaccatgttgaccaggctggtcttgaactcctgacctcatgatctgcccgcctcggcctcccaatgtgctgggattacaggcatgagccaccatgcccagcctagtagcatatgtttttctaaagcaaatccatgccatttctaggatgtgtgctaggtctgtggacatttctggcctctctaaaatttctttaccattttttctccaaaattatctttcagttaaaatatagcatacccagaaatcctggaaaagaaagatatctaactgctttttaaaaattactgatatataattttttaaatgttgyatttaaaaaataccaaattaaatgtttttaagg

SEQ ID NO: 77919 - DNA, 617 bp, Homo sapiens
ttgtttctctaatgagataatttattgttaactagagcctcatctcacacttagttttggctgatatgggctctgattatggtaagttatttgcatatagataattctactctgctacaagcatagtgataagagctagttttaarcattgattatacttatggcatagaatgatgaccaatcctcaaatacattaaagaatttataattactcaggaccaggaagacatcacaaaacttctaggattttcaccaattcctcataagaactttcagatttcagtatcatttggagagtgtgatggttaattttaattgtgtcaacttgactggatacgttaagcaataccaagaaacgtggtaaagcattattttggggtgtgtttgtgagggtgtttccagatgaaactagcatgtgaatctgagtggactaggtgggaaagatccaccctcagtgtaggcaggcaccattcaattggcttgggactcagacagaacaataacagaggaaaggcatgtgtctatttcctggaaatgagatacacttctcctctactgcctttggacaccagagctccaggcctcctggccttcggactccatggcttacaccagtg

SEQ ID NO: 77920 - DNA, 594 bp, Homo sapiens
tgagaggtagtaatatgggcagttctgtgggactcacctggggtcactcatgcagctgattgggatccaagctggcctcattcagactctggaatgctggtgccagctgttggcgatggcatcttaattcttctcctagggcctctcatgcttccattggggttactgggcttcttcccaggaggctgatggggagttgatgttggcgttgtaagaggttctaagcagaagctgcaaggccttcgaggcctccagctcacacacctctccagcacatcctatcagataaagcaagccacaggccagcccagtctcaaggaratggagaaagagcatttatcatttgatgaaaggggaaggaaaatcatttagcaaatagaagtgatccaggaaggtagactcctgggagctgtgactgcaaccattctcacaggtggaagaccttttattcctttaagtcacctcctattttctcctcatctcttcagcccaccatcagcctagctcagcacttgaatgcagaatggtgcctccttaaccctcctaagtatcagctggtctcaaagacacacaatccccgagcccctgttgcag

SEQ ID NO: 77921 - DNA, 528 bp, Homo sapiens
ctatcaagacatcaacttttatacatcttaaatacatgcagctttaatttgtcaattatacctcagaaaagctaaagtaataaaaacctaaatggaagacgtaaaactgtaaaacacctagaaacaaacataagggggaatactcatgatactgaatttggcaatgatttcttggacatgacactaaaagcacagtcaatgataagcaaatggaactacatcaagcttcaaatcatttgtctatcaaatgttatattcaactgagtgaaaaagcatgggagaaaatatctgtaaattatacaagtcataaggrgtcactatccaaaatacataaaggagccatacaaataagtcaaacaacccaattacaaaacagacaagggacttgaatagacatttatccaaaaagccaacatgcacacgaaaatatgctcaatgtcaagcaaaataatgatatatcacctcacactcagtagggatggtgactataaaaacaaaacccaaaacaaaaaatggctcctcaaaaaa

SEQ ID NO: 77922 - DNA, 880 bp, Homo sapiens
tgcatgcagttgtgcttttggacttccctcctgtttttacaggacacttccatctctctcctcccttccccacctccaccactttattcattcttctcttcagccccccacgccttccccacaggactatyagggttttgcttgggatcaggccctgcagagacagcccaagtgctaaggatgcacccactgaccccagctttgtcagagcactctcaagggcagctcatgggggtcagagaacttctttgcattccagcactgctctttgccatttgtatgactttacccctccatttactcttctgaatactgaaaagatttaacaggagcatcacgcaggcaccttccatttctaacagctctaggtccaatgcctctaagaacaataagacttggaagtgcaaaagcataaagctaatgatggtgttcccagggccagatgaattctaggcctttgttattccagagcagaaggaaaatccctgaaatagaagaagggataggagacctaagccacaatctgggataaccattccaacagttcagggtgacttggagaggatgaagcaaaagacgcgagacagagcaggcaattaggcagtttggaaagtctaagagattggcttcgaaaaaatacttctagtgcaaagggggaaactagtgtgagatgttgccaatttagatgaagtgatacacggagtttgaagtgccttgcatttgtttacgcatcaaagaaatgataccatgtatttagtgcccagcattggtgatggtccaggaacacaggtgctttcataataatgcctcctcactctctaaggactataacaaaatgctatgatttcacaacacagggtcctttcctggctgaaacata

SEQ ID NO: 77923 - DNA, 880 bp, Homo sapiens
tgcatgcagttgtgcttttggacttccctcctgtttttacaggacacttccatctctctcctcccttccccacctccaccactttattcattcttctcttcagccccccacgccttccccacaggactattagggttttgcttgggatcaggccctgcagagacagcccaagtgctaaggatgcacccactgaccccagctttgtcagagcactctcaagggcagctcatgggggtcagrgaacttctttgcattccagcactgctctttgccatttgtatgactttacccctccatttactcttctgaatactgaaaagatttaacaggagcatcacgcaggcaccttccatttctaacagctctaggtccaatgcctctaagaacaataagacttggaagtgcaaaagcataaagctaatgatggtgttcccagggccagatgaattctaggcctttgttattccagagcagaaggaaaatccctgaaatagaagaagggataggagacctaagccacaatctgggataaccattccaacagttcagggtgacttggagaggatgaagcaaaagacgcgagacagagcaggcaattaggcagtttggaaagtctaagagattggcttcgaaaaaatacttctagtgcaaagggggaaactagtgtgagatgttgccaatttagatgaagtgatacacggagtttgaagtgccttgcatttgtttacgcatcaaagaaatgataccatgtatttagtgcccagcattggtgatggtccaggaacacaggtgctttcataataatgcctcctcactctctaaggactataacaaaatgctatgatttcacaacacagggtcctttcctggctgaaacata

SEQ ID NO: 77924 - DNA, 880 bp, Homo sapiens
tgcatgcagttgtgcttttggacttccctcctgtttttacaggacacttccatctctctcctcccttccccacctccaccactttattcattcttctcttcagccccccacgccttccccacaggactattagggttttgcttgggatcaggccctgcagagacagcccaagtgctaaggatgcacccactgaccccagctttgtcagagcactctcaagggcagctcatgggggtcagagaacttctttgcattccagcactgctctttgccatttgtatgactttacccctccatttactcttctgaatactgaaaagatttaacaggagcatcacgcaggcaccttccatttctaacagctctaggtccaatgsctctaagaacaataagacttggaagtgcaaaagcataaagctaatgatggtgttcccagggccagatgaattctaggcctttgttattccagagcagaaggaaaatccctgaaatagaagaagggataggagacctaagccacaatctgggataaccattccaacagttcagggtgacttggagaggatgaagcaaaagacgcgagacagagcaggcaattaggcagtttggaaagtctaagagattggcttcgaaaaaatacttctagtgcaaagggggaaactagtgtgagatgttgccaatttagatgaagtgatacacggagtttgaagtgccttgcatttgtttacgcatcaaagaaatgataccatgtatttagtgcccagcattggtgatggtccaggaacacaggtgctttcataataatgcctcctcactctctaaggactataacaaaatgctatgatttcacaacacagggtcctttcctggctgaaacata

SEQ ID NO: 77925 - DNA, 880 bp, Homo sapiens
tgcatgcagttgtgcttttggacttccctcctgtttttacaggacacttccatctctctcctcccttccccacctccaccactttattcattcttctcttcagccccccacgccttccccacaggactattagggttttgcttgggatcaggccctgcagagacagcccaagtgctaaggatgcacccactgaccccagctttgtcagagcactctcaagggcagctcatgggggtcagagaacttctttgcattccagcactgctctttgccatttgtatgactttacccctccatttactcttctgaatactgaaaagatttaacaggagcatcacgcaggcaccttccatttctaacagctctaggtccaatgcctctaagaacaayaagacttggaagtgcaaaagcataaagctaatgatggtgttcccagggccagatgaattctaggcctttgttattccagagcagaaggaaaatccctgaaatagaagaagggataggagacctaagccacaatctgggataaccattccaacagttcagggtgacttggagaggatgaagcaaaagacgcgagacagagcaggcaattaggcagtttggaaagtctaagagattggcttcgaaaaaatacttctagtgcaaagggggaaactagtgtgagatgttgccaatttagatgaagtgatacacggagtttgaagtgccttgcatttgtttacgcatcaaagaaatgataccatgtatttagtgcccagcattggtgatggtccaggaacacaggtgctttcataataatgcctcctcactctctaaggactataacaaaatgctatgatttcacaacacagggtcctttcctggctgaaacata

SEQ ID NO: 77926 - DNA, 880 bp, Homo sapiens
tgcatgcagttgtgcttttggacttccctcctgtttttacaggacacttccatctctctcctcccttccccacctccaccactttattcattcttctcttcagccccccacgccttccccacaggactattagggttttgcttgggatcaggccctgcagagacagcccaagtgctaaggatgcacccactgaccccagctttgtcagagcactctcaagggcagctcatgggggtcagagaacttctttgcattccagcactgctctttgccatttgtatgactttacccctccatttactcttctgaatactgaaaagatttaacaggagcatcacgcaggcaccttccatttctaacagctctaggtccaatgcctctaagaacaataagacttggaagtgcaaaagcataaagctaatgatggtgttcccagggccagatgaattctaggcctttgttattccagagcagaaggaaaawccctgaaatagaagaagggataggagacctaagccacaatctgggataaccattccaacagttcagggtgacttggagaggatgaagcaaaagacgcgagacagagcaggcaattaggcagtttggaaagtctaagagattggcttcgaaaaaatacttctagtgcaaagggggaaactagtgtgagatgttgccaatttagatgaagtgatacacggagtttgaagtgccttgcatttgtttacgcatcaaagaaatgataccatgtatttagtgcccagcattggtgatggtccaggaacacaggtgctttcataataatgcctcctcactctctaaggactataacaaaatgctatgatttcacaacacagggtcctttcctggctgaaacata

SEQ ID NO: 77927 - DNA, 880 bp, Homo sapiens
tgcatgcagttgtgcttttggacttccctcctgtttttacaggacacttccatctctctcctcccttccccacctccaccactttattcattcttctcttcagccccccacgccttccccacaggactattagggttttgcttgggatcaggccctgcagagacagcccaagtgctaaggatgcacccactgaccccagctttgtcagagcactctcaagggcagctcatgggggtcagagaacttctttgcattccagcactgctctttgccatttgtatgactttacccctccatttactcttctgaatactgaaaagatttaacaggagcatcacgcaggcaccttccatttctaacagctctaggtccaatgcctctaagaacaataagacttggaagtgcaaaagcataaagctaatgatggtgttcccagggccagatgaattctaggcctttgttattccagagcagaaggaaaatccctgaaatagaagaagggataggagacctaagccacaatctgggataaccattccaacagttcagggtgacttggagaggatgaagcaaaagacgcgagacagagcaggcaattaggcagtttggaaagtctaagagattggcttcgaaaaaatacttctagtgcaaagggggaaactagtgtgagatgttgccaatttagatgaagtgatacayggagtttgaagtgccttgcatttgtttacgcatcaaagaaatgataccatgtatttagtgcccagcattggtgatggtccaggaacacaggtgctttcataataatgcctcctcactctctaaggactataacaaaatgctatgatttcacaacacagggtcctttcctggctgaaacata

SEQ ID NO: 77928 - DNA, 612 bp, Homo sapiens
tctcttgctgctttatacacaccagaaaacctcaattacttgtagttctctaaacataccacatcctctcacacctccaggcagtgcttatgctggccttacctggtgcatcctcaccctccctgaactgaacatgccatcttccgagtcctgtggccctactcgtccttcaatgactcagctcagacaccaaacccttctgaaagcttaccccacttccccacctcctaacacaagcaccctctatctgaaagtatgtgcattttcttaactcttattatatcttgaacatgttttaatagcatttatgccattctgtgtaattgtctgcttatctgtccactcccccatagcactgtgatcttatgggaagcaacctttttcttttgtgcatcttcagcacatgacaaattttgggaagcagtttggaactttacaaatgtcaattgaatggactaaatggagagaaayggatggagaaagatgcaagtcacatggtgtctcttcaaacttttcgcttaattcatcttttttataaatacaaggatgactcttacctgttgtaacagtgtctggagggattcaatgcttagtggatggcagagaacattc

SEQ ID NO: 77929 - DNA, 545 bp, Homo sapiens
aaaaaaaaaaaaaaaattagaaagctgaagagacaccgtcctaaccaatcccaggggtgccccacttctcatgagcctcctacagctttagaatgtggacagcctctaattagggcatgcctgcagtcttcctgattctcctatctggggttcctgcttttacatttttgctaaatgcaagggacggtggctgcctcccttggtatagcaagccctggataaatcgtttcttcttgctcgctgytgggtgagcttctattatttccatagtgaccagtcatcatcaccttgtcatcagcagcatgtcaatgtagcgtggaaagtggggctggtggatggagatgtcttttgcagagccagggattccacgtggagcatttacattgggacattcactgttgagggtgcttcccctctcccctgcagaccacccccaccaagggtcaacccaagacccccaagctcactttctttcctccaggtcttcactctgatgtcaagtcgtttcatctctctgagttcctctttctttatttgctagaaag

SEQ ID NO: 77930 - DNA, 545 bp, Homo sapiens
aaaaaaaaaaaaaaaattagaaagctgaagagacaccgtcctaaccaatcccaggggtgccccacttctcatgagcctcctacagctttagaatgtggacagcctctaattagggcatgcctgcagtcttcctgattctcctatctggggttcctgcttttacatttttgctaaatgcaagggacggtggctgcctcccttggtatagcaagccctggataaatcgtttcttcttgctcgctgctgggtgagcttctattatttccatagtgaccagtcatcatcaccttgtcatcagcagcatgtcaatgtagcrtggaaagtggggctggtggatggagatgtcttttgcagagccagggattccacgtggagcatttacattgggacattcactgttgagggtgcttcccctctcccctgcagaccacccccaccaagggtcaacccaagacccccaagctcactttctttcctccaggtcttcactctgatgtcaagtcgtttcatctctctgagttcctctttctttatttgctagaaag

SEQ ID NO: 77931 - DNA, 1107 bp, Homo sapiens
ccaccactcttgggcgggcatccaccttcctccttgacatcctctttacccacctcagtctctgagacctgccctgactggtgccttcctccccatcttcagacgctgagagtggctctgagctacacagctgccattctttccacctacctggatgacctcccatggcattgcctacaagctttaagattgaatcgttgaggaaggaagggacagggatgatggaggaggaaagaaaaagcctccaaaactctgcaatggcatttcccaaaatagtgatttaggttttcttaagattattgggagtcacaaacattcttatttgagaggctataggcccccaaatggcaataggcagcagctgaatgggggaaggtaacttttatttttacatcttacatttctcttttctatgattaaatttaatgataatcattgaaacgtaccagagaaagggaagttatctcctaagggcactactatcaggcgtgcaaatatctaaccattatacaaggtcaagggaatcctgaatcatttcccaaatgcagagtgatggagaaatctcatatgggagcatgggggagcctgcgattgactcatattgagtaggcaatgagggacagtgtccttaaccattcaacagctggtttgtcacttttaagttaaatcagctttcagtaggcagagaagggtcaaaggcaactgcagcctggaggaagaacctatgcaggcacccacagggagaaacgaagtggcctttcgttacttcctggagagcaacatcaggaagagtgtgataatttgagggaaaatctttataaccataaggtgtgtgtgtgtttggatgtggccatgtgactgagtggcagatgggttactgtacatggatgtgtgtgtttgtggagtgtgtgtgtttgtgagagagagagatatgctacagtggaaaccaggagagctcctcacctgaaggaaaggttcaaacttaacgacatctactttgtctctttgaggttaagataactcagatgttkaagaagccctgtcctgagttaaatcagggtagcacgtaaacatgtgatccttgcacatgtcaaaggaggacttcca

SEQ ID NO: 77932 - DNA, 892 bp, Homo sapiens
  misc_feature (1)...(892): n = A,T,C or G
annnnnnnnnnnnnnnnnnnnnnnnnnnnnnnnnnnnnnnnnnnnnnnnnnnnnnnnnnnnnnnnnnnnnnnnnnnnnnnnnnnnnnnnnnnnnnnnnnnnctccaaaagagcaattctgaaccatggtgagtcatacagaatctagtgtgactcattatcaattagcactgtttcaagggtgtatcaaactcataccagcttcaacaataacaacaaaagagaaaacaatagttggtgaaaatagaagtttcaaggtgtaagatctgcttcaggtacagctggcttcagaatctcaaatattatgattcgggtttttccagtctgtctgtttctcactccacatttgactgcttaccgcttggaggtgcttcatttgcaggcaagatttcagtggtaatgaaggtgaaatcatcaactccaggtttaagtagcagcagttcaacattccatgtggaaagaaaacctcccacttttaaagttccagaaaactttccttatgttaagtcatgggattgagttttcaaggaccaatcccagaccatggcagtgttcaggtgattgggatctactgcatggccatggccaaattattcacccagctatggctgtgaagagagtggagatagttcagcgttaattgcatgggttgaaaacagggaaaggctacttctcagaagcaagttgagctgttcttaccagagaaagagaaaratcaacaatgatctagtaatgccacctcttcttctcttttgcattttgctctcccttttttaagaggagagaagagggtgcagttatagccatgggctaggaattgtggctcatttggggaaaggattgtgccggtgtgcatcaacagttcaaatatgttgcggtatgaaaaataatag

SEQ ID NO: 77933 - DNA, 892 bp, Homo sapiens
  misc_feature (1)...(892): n = A,T,C or G
annnnnnnnnnnnnnnnnnnnnnnnnnnnnnnnnnnnnnnnnnnnnnnnnnnnnnnnnnnnnnnnnnnnnnnnnnnnnnnnnnnnnnnnnnnnnnnnnnnnctccaaaagagcaattctgaaccatggtgagtcatacagaatctagtgtgactcattatcaattagcactgtttcaagggtgtatcaaactcataccagcttcaacaataacaacaaaagagaaaacaatagttggtgaaaatagaagtttcaaggtgtaagatctgcttcaggtacagctggcttcagaatctcaaatattatgattcgggtttttccagtctgtctgtttctcactccacatttgactgcttaccgcttggaggtgcttcatttgcaggcaagatttcagtggtaatgaaggtgaaatcatcaactccaggtttaagtagcagcagttcaacattccatgtggaaagaaaacctcccacttttaaagttccagaaaactttccttatgttaagtcatgggattgagttttcaaggaccaatcccagaccatggcagtgttcaggtgattgggatctactgcatggccatggccaaattattcacccagctatggctgtgaagagagtggagatagttcagcgttaattgcatgggttgaaaacagggaaaggctacttctcagaagcaagttgagctgttcttaccagagaaagagaaagatcaacaatgatctagtaatgccacctcttcttctcttttgcattttgctctcccttttttaagaggagagaagagggtgcagttatagccatgggctaggaattgtggctcatttggggaaaggattgtgccggtgtgcatcamcagttcaaatatgttgcggtatgaaaaataatag

SEQ ID NO: 77934 - DNA, 675 bp, Homo sapiens
catttactggaaatgtataccccacagggtatttaccaagtttctctatcaggcatcatcctccctcttccgccatacctggaactgctgtgttcctctttcactgtagggactaagtagatatgtattaatttttggattttcttatatttagatagtttttgaaaattttctttttggtgatcactgaagttctctgttagagacctagtggcaaaagttattttaactttgtgcttagaaaataaggacactcttcacytttacataaatataaagaggatgcaaacatcaagtacttcattaattaacaagaaaacttttagaaatatcatgtgttttgtcaccacaatgtgtggcacaatgccagcagatggcataaaaagtgtttgaaacgtgatgtgatttggttttgctttcagaaaactaaacagtttctctttggattgagcatagtatcttcttcatgtacatgtcatggattgcttagatagtttttacaagttcgttatctatctcgtaaagcccacattattgtagtttttgatacgtatctctttatttcatcattttgacatagccataaatggtatcccacatagatattcaaacaatgtaccattaactaggacatagaaatcctagtcattagctaacatgaccccacgtggaaat

SEQ ID NO: 77935 - DNA, 675 bp, Homo sapiens
catttactggaaatgtataccccacagggtatttaccaagtttctctatcaggcatcatcctccctcttccgccatacctggaactgctgtgttcctctttcactgtagggactaagtagatatgtattaatttttggattttcttatatttagatagtttttgaaaattttctttttggtgatcactgaagttctctgttagagacctagtggcaaaagttattttaactttgtgcttagaaaataaggacactcttcacttttrcataaatataaagaggatgcaaacatcaagtacttcattaattaacaagaaaacttttagaaatatcatgtgttttgtcaccacaatgtgtggcacaatgccagcagatggcataaaaagtgtttgaaacgtgatgtgatttggttttgctttcagaaaactaaacagtttctctttggattgagcatagtatcttcttcatgtacatgtcatggattgcttagatagtttttacaagttcgttatctatctcgtaaagcccacattattgtagtttttgatacgtatctctttatttcatcattttgacatagccataaatggtatcccacatagatattcaaacaatgtaccattaactaggacatagaaatcctagtcattagctaacatgaccccacgtggaaat

SEQ ID NO: 77936 - DNA, 675 bp, Homo sapiens
catttactggaaatgtataccccacagggtatttaccaagtttctctatcaggcatcatcctccctcttccgccatacctggaactgctgtgttcctctttcactgtagggactaagtagatatgtattaatttttggattttcttatatttagatagtttttgaaaattttctttttggtgatcactgaagttctctgttagagacctagtggcaaaagttattttaactttgtgcttagaaaataaggacactcttcacttttacataaatataaagargatgcaaacatcaagtacttcattaattaacaagaaaacttttagaaatatcatgtgttttgtcaccacaatgtgtggcacaatgccagcagatggcataaaaagtgtttgaaacgtgatgtgatttggttttgctttcagaaaactaaacagtttctctttggattgagcatagtatcttcttcatgtacatgtcatggattgcttagatagtttttacaagttcgttatctatctcgtaaagcccacattattgtagtttttgatacgtatctctttatttcatcattttgacatagccataaatggtatcccacatagatattcaaacaatgtaccattaactaggacatagaaatcctagtcattagctaacatgaccccacgtggaaat

SEQ ID NO: 77937 - DNA, 675 bp, Homo sapiens
catttactggaaatgtataccccacagggtatttaccaagtttctctatcaggcatcatcctccctcttccgccatacctggaactgctgtgttcctctttcactgtagggactaagtagatatgtattaatttttggattttcttatatttagatagtttttgaaaattttctttttggtgatcactgaagttctctgttagagacctagtggcaaaagttattttaactttgtgcttagaaaataaggacactcttcacttttacataaatataaagaggatgcaaacatcaagtacttcattaattaacaagaaaacttttagaaatatcatgtgttttgtcaccacaatgtgtggcacaatgccagcagatggcataaaaagtgtttgaaaygtgatgtgatttggttttgctttcagaaaactaaacagtttctctttggattgagcatagtatcttcttcatgtacatgtcatggattgcttagatagtttttacaagttcgttatctatctcgtaaagcccacattattgtagtttttgatacgtatctctttatttcatcattttgacatagccataaatggtatcccacatagatattcaaacaatgtaccattaactaggacatagaaatcctagtcattagctaacatgaccccacgtggaaat

SEQ ID NO: 77938 - DNA, 635 bp, Homo sapiens
tgtccagtcaccttacctaagtatcttgtgtctaatatatgaattaatctgtgaaatcacctgctttaaaaatatatttacaaatatatttatgtgaaccttataatatgtaaaatacattcacagttattgtctcatttgatttgcataacaatcttttgaagtatttattattttttacagattaaaatatgaagttcagagagactttatgagtcaaaggttgcactgtaaatcttagaaatgaaaatgatactgcatcttataactcagggttcatggtctttctgttacctctgtactaatggtttctttctttaaaaggggacaattcagatttgaaagatttagggaaaaagatcacattctagacttctgttgtccagtaatatagccactagccataggtggctactgagcatttgaaatctggccgggtataaaatacactatggatttcaaagatttgtataataaaataaygtaaaatatctcattatttttaaaatatgaattatatgttgaaatgatgtacatgtacatcattttgcatgtacagttggcctgtgtgtctgtgggttccacatctgtggattcaaccaatggcagatggaagatttttttttaatgggtgg

SEQ ID NO: 77939 - DNA, 1835 bp, Homo sapiens
gatttcccctatcatcctctagtcttatatatttcagtaactatcatgatcaagccaaaatcctgagaattgtctttgtattttccatttccctctgttccttccctccaattcatcagtaaacctggattctatctacaaaatacacttcaaatacattctctttatttttttcatcatcaccttattctgagacaccaatatctttttcctggatgactaagttagcctcctaacttgtagaaagcatcaggaacatgtttgtgaacatctaagcttttaataccctttgatcagccttccctcaatattatctaaataaaacacccaggactgtgttggagtgaaagctccttgtctctgaacaccactggcttccaccttgcaatgcctctctgttgataggagcccagagaaatggctccctattatgtttgtctcgatggaattatgttgtactattagtgaaaaaatattcaccttgcctagaaaagcatggtgaatgtaaaaaagtattacatctttttctctgttcacctgacaacattcttcaagatacacagatcttgttaattaggtacatttctcttgatttaataatttatcaaaaattgcttactgaatgccttttgtatgccaggccttgttctctagttgctggggaaatgggaaaacaaaacagagcttcaaataaggaaagggcagacaacaaaaatcaaatgtgaaacgtgtcaagaggcaataagagctgtgcagaaaaataaagcagagaaagggaggtggaaagtgacaggacaggcacagggtatgcactggtttccatctgttggtgaggaaatgcatcctttcaagacgacgtttgagcagagaactggatgatgtaaaggagcagctatgtgggtatctcaggacaagtgttccaggcagagggaataacaagtccaagggccctgaagctgatgtgtgcttggcatattcaaggaaccacaaggaggccaatgctgctggagcagtgtgagcaaggagaggttggtgaaggatgaggctggagaggtagagcaggagtacactgaaggttcattgagcagactgtgtaataaggctgagagtgttttagtggaagtggtgctcttgttttctaacctttggtgcatgccagaggtagagagggtgtgttatcagccacaaacaaacctccagggtagtagacatatgtgtgacrttggtttcccttatgaaccccaacatctattcaatatatgcaaagcaccagatacaatacctggacatagcagtttcgcaataaatgacaactgctattgtttcttatcaagtttggggttgattgggaagcctaggttcaagtcccaaatccagcacttacatcttatctgtgtgacctccagcaaatcacctaacttctctggtcctctctgactatggtgtcaataaatggattgattgacaaaatacatggcatagcacagtgcttggtacatattcagggctcaataactttcttattgttatcatcagggagcttctaatctcctccctttgttgcaacagcatggagatgagagatatcctatagacatagtggatatttttatgggcatttctagaccctcttccccacagctgttttccttgttttattcatgtctctgttcactgggccaccgtcactctgtattccttgtcctgctttatttgtcctccatcacagtgattgacgtaaaatctgctagacatctactttagtactgtctgtctctttcaactaaaatataaactccatgagggcaaaaggagccttttcttctttagttcat

SEQ ID NO: 77940 - DNA, 453 bp, Homo sapiens
tcccaggggaaggaaagcccaccctgcatcggtccaccctcctgggactgaccccacgggcaaaccagtcccaatgaagtgagcagggtacctcagctggaaatgcagaaatcacccaaaattctgcattggtctcgctgggaggtgcakaccagagctattcctattcagccatcttgcctgggaatcccaaaacttgagtttttaaaaataagtgctggaatttcagtttttctccttgtcttgtaacttagcaaccaacacaactaacttgactcagagcttcagctacaacagaaacatattttagtaaaattaaatcatttgatgtattggttatttctccaccctggtcctatgtttttatgttttaatttaaaatgtatgggaatgtttattagtattatctatacaccaattagcatgtaatctccaaaaaatttaagaggcctt

SEQ ID NO: 77941 - DNA, 678 bp, Homo sapiens
aatgaccaaagacacctggatcaggaatacaaaaggctctgagaacatgtactgttaatatcagaaaccccaatgttccatggggcaaagatttccaagttaatatctctgtagaaactcccaattgtcacatcataaatcaacacatttttaaaaaaggaatggttgaatttaattcttgcatgggcaagcaaaaacacaaaagtgcagcctctcaccaagcaaagaaagagacagggttattttttgaatttttgagagaggcgaagtttaggtaaagtataaaggaagcagtgatttctgttattcatgagacagggtcttgctgcgtcacccaggatgtagtgcagtggtgcaatcttgggtcactgcagccttgaccgcccatgctcaggtgatcctcctgccccagccccccgcgtagtgggttctacacgtasgcaccaacattccaggctaagttttgtattttttgtagagacagggtttcgccatgttgaccaggctgatctttaactcctgagctcaagcgatcttcccatcttggccccccaaagtgttgggattacaggcatgagccacagaacgtggtgcaagcagtgttttggattaactcaaagcacagtggagatgtgtgtaaaggggttaatcttaggtctgggctgtgaagtggactta

SEQ ID NO: 77942 - DNA, 1607 bp, Homo sapiens
tgctcagcgactctgagtctgaggttgttgtgaattaatatgcccagtagcccactgtagaggggacttggtggtgttcatttatccattttctcactgtttatggagttcctgggatctataaatgttgattcccagttgtcagtaawgtgctccttaagacattttgcttgcaagaaacagaaaccaacttatataaagctaaaagggaaattttattatagaaatactggatggttttataggattaaaagagagagatacatctgaatcttgggcacaaaatggcaacagggatgagggttagtggtttagagcaaatgggctgaagtcaggtagtctggatttgaatctttgcactcacacttagtagtcctctgaccttggataatttgcttaaccactcagtatactcaacgctaaaacgactgtaataacagtgcttcctcataggtggttctgttttttcatttttcttttcttttctttttttttttagacagggtcttgctctgtagcacaggctggagtgcagtggtgcgatcatggcttaccttgaactcctgggctcaagtgatcctcccacctcacccttctgagtagctgggattacaggtgtgtgccaccatgcctagctgattttttgattttttttttttttagagatagggtctcgctatattacctaggctggtcttgaactcccggcctcaagacatcctcccaccttggcctcccgatgcacatcatacctggccacaaagcctcttaatgtattttttttttttttggtggcattcagtaggaaaacggataactgaaaaaaagttatttattttatcttggatgtccagagagtgtctctgtgatttcccatctgtctccttaaaacaaacaagcaaacaaacaaggttcttggattaaacatttcatgacggagactgaaaattgccatggagatgatggaggaaattatacacttgttcttttttgctttttcttcacagcctatgcataagaatgaactgaggtattagccttagctctcttttcatggtaaactgttttaaaatttgccactatgctagcaataatagatttttctacatgttagtgttaaaaatctttttattgtaacagattcaactttactaaacagccaggccacagttgcttgttgagtaagataccttacactgtgtaagctgagaatctctgagaaatctggatacttttattcaagtctgtttttttaaaatgatgcctatctttttatgtggttccagccccattattaattaactagtagcagaaaaatcaacttagactagcttaaacaataagaggaacttacctgcttacttaactgaaaagttcagtggtagcgcagtcttcaagtatagattgatctagtggctcaaccacatcgctagaggcccagtttctttttgttgctccatattgtttttcccattatcaatttcatttaaagattggcatccatcatggccacacaaagctggtggcaggaacagcagccccacttttgttttagcagagaggagaaagtattctctttgtagctttcatgttccaaagagaacact

SEQ ID NO: 77943 - DNA, 1607 bp, Homo sapiens
tgctcagcgactctgagtctgaggttgttgtgaattaatatgcccagtagcccactgtagaggggacttggtggtgttcatttatccattttctcactgtttatggagttcctgggatctataaatgttgattcccagttgtcagtaaagtgctccttaagacattttgcttgcaagaaacagaaaccaacttatataaagctaaaagggaaattttattayagaaatactggatggttttataggattaaaagagagagatacatctgaatcttgggcacaaaatggcaacagggatgagggttagtggtttagagcaaatgggctgaagtcaggtagtctggatttgaatctttgcactcacacttagtagtcctctgaccttggataatttgcttaaccactcagtatactcaacgctaaaacgactgtaataacagtgcttcctcataggtggttctgttttttcatttttcttttcttttctttttttttttagacagggtcttgctctgtagcacaggctggagtgcagtggtgcgatcatggcttaccttgaactcctgggctcaagtgatcctcccacctcacccttctgagtagctgggattacaggtgtgtgccaccatgcctagctgattttttgattttttttttttttagagatagggtctcgctatattacctaggctggtcttgaactcccggcctcaagacatcctcccaccttggcctcccgatgcacatcatacctggccacaaagcctcttaatgtattttttttttttttggtggcattcagtaggaaaacggataactgaaaaaaagttatttattttatcttggatgtccagagagtgtctctgtgatttcccatctgtctccttaaaacaaacaagcaaacaaacaaggttcttggattaaacatttcatgacggagactgaaaattgccatggagatgatggaggaaattatacacttgttcttttttgctttttcttcacagcctatgcataagaatgaactgaggtattagccttagctctcttttcatggtaaactgttttaaaatttgccactatgctagcaataatagatttttctacatgttagtgttaaaaatctttttattgtaacagattcaactttactaaacagccaggccacagttgcttgttgagtaagataccttacactgtgtaagctgagaatctctgagaaatctggatacttttattcaagtctgtttttttaaaatgatgcctatctttttatgtggttccagccccattattaattaactagtagcagaaaaatcaacttagactagcttaaacaataagaggaacttacctgcttacttaactgaaaagttcagtggtagcgcagtcttcaagtatagattgatctagtggctcaaccacatcgctagaggcccagtttctttttgttgctccatattgtttttcccattatcaatttcatttaaagattggcatccatcatggccacacaaagctggtggcaggaacagcagccccacttttgttttagcagagaggagaaagtattctctttgtagctttcatgttccaaagagaacact

SEQ ID NO: 77944 - DNA, 1607 bp, Homo sapiens
tgctcagcgactctgagtctgaggttgttgtgaattaatatgcccagtagcccactgtagaggggacttggtggtgttcatttatccattttctcactgtttatggagttcctgggatctataaatgttgattcccagttgtcagtaaagtgctccttaagacattttgcttgcaagaaacagaaaccaacttatataaagctaaaagggaaattttattatagaaatactggatggttttataggattaaaagagagagatacatctgaatcttgggcacaaaatggcaacagggatgagggttagtggtttagagcaaatgggctgaagtcaggtagtctggatttgaatctttgcactcacacttastagtcctctgaccttggataatttgcttaaccactcagtatactcaacgctaaaacgactgtaataacagtgcttcctcataggtggttctgttttttcatttttcttttcttttctttttttttttagacagggtcttgctctgtagcacaggctggagtgcagtggtgcgatcatggcttaccttgaactcctgggctcaagtgatcctcccacctcacccttctgagtagctgggattacaggtgtgtgccaccatgcctagctgattttttgattttttttttttttagagatagggtctcgctatattacctaggctggtcttgaactcccggcctcaagacatcctcccaccttggcctcccgatgcacatcatacctggccacaaagcctcttaatgtattttttttttttttggtggcattcagtaggaaaacggataactgaaaaaaagttatttattttatcttggatgtccagagagtgtctctgtgatttcccatctgtctccttaaaacaaacaagcaaacaaacaaggttcttggattaaacatttcatgacggagactgaaaattgccatggagatgatggaggaaattatacacttgttcttttttgctttttcttcacagcctatgcataagaatgaactgaggtattagccttagctctcttttcatggtaaactgttttaaaatttgccactatgctagcaataatagatttttctacatgttagtgttaaaaatctttttattgtaacagattcaactttactaaacagccaggccacagttgcttgttgagtaagataccttacactgtgtaagctgagaatctctgagaaatctggatacttttattcaagtctgtttttttaaaatgatgcctatctttttatgtggttccagccccattattaattaactagtagcagaaaaatcaacttagactagcttaaacaataagaggaacttacctgcttacttaactgaaaagttcagtggtagcgcagtcttcaagtatagattgatctagtggctcaaccacatcgctagaggcccagtttctttttgttgctccatattgtttttcccattatcaatttcatttaaagattggcatccatcatggccacacaaagctggtggcaggaacagcagccccacttttgttttagcagagaggagaaagtattctctttgtagctttcatgttccaaagagaacact

SEQ ID NO: 77945 - DNA, 1607 bp, Homo sapiens
tgctcagcgactctgagtctgaggttgttgtgaattaatatgcccagtagcccactgtagaggggacttggtggtgttcatttatccattttctcactgtttatggagttcctgggatctataaatgttgattcccagttgtcagtaaagtgctccttaagacattttgcttgcaagaaacagaaaccaacttatataaagctaaaagggaaattttattatagaaatactggatggttttataggattaaaagagagagatacatctgaatcttgggcacaaaatggcaacagggatgagggttagtggtttagagcaaatgggctgaagtcaggtagtctggatttgaatctttgcactcacacttagtagtcctctgaccttggataatttgcttaaccactcagtatactcaacgctaaaacgamtgtaataacagtgcttcctcataggtggttctgttttttcatttttcttttcttttctttttttttttagacagggtcttgctctgtagcacaggctggagtgcagtggtgcgatcatggcttaccttgaactcctgggctcaagtgatcctcccacctcacccttctgagtagctgggattacaggtgtgtgccaccatgcctagctgattttttgattttttttttttttagagatagggtctcgctatattacctaggctggtcttgaactcccggcctcaagacatcctcccaccttggcctcccgatgcacatcatacctggccacaaagcctcttaatgtattttttttttttttggtggcattcagtaggaaaacggataactgaaaaaaagttatttattttatcttggatgtccagagagtgtctctgtgatttcccatctgtctccttaaaacaaacaagcaaacaaacaaggttcttggattaaacatttcatgacggagactgaaaattgccatggagatgatggaggaaattatacacttgttcttttttgctttttcttcacagcctatgcataagaatgaactgaggtattagccttagctctcttttcatggtaaactgttttaaaatttgccactatgctagcaataatagatttttctacatgttagtgttaaaaatctttttattgtaacagattcaactttactaaacagccaggccacagttgcttgttgagtaagataccttacactgtgtaagctgagaatctctgagaaatctggatacttttattcaagtctgtttttttaaaatgatgcctatctttttatgtggttccagccccattattaattaactagtagcagaaaaatcaacttagactagcttaaacaataagaggaacttacctgcttacttaactgaaaagttcagtggtagcgcagtcttcaagtatagattgatctagtggctcaaccacatcgctagaggcccagtttctttttgttgctccatattgtttttcccattatcaatttcatttaaagattggcatccatcatggccacacaaagctggtggcaggaacagcagccccacttttgttttagcagagaggagaaagtattctctttgtagctttcatgttccaaagagaacact

SEQ ID NO: 77946 - DNA, 1607 bp, Homo sapiens
tgctcagcgactctgagtctgaggttgttgtgaattaatatgcccagtagcccactgtagaggggacttggtggtgttcatttatccattttctcactgtttatggagttcctgggatctataaatgttgattcccagttgtcagtaaagtgctccttaagacattttgcttgcaagaaacagaaaccaacttatataaagctaaaagggaaattttattatagaaatactggatggttttataggattaaaagagagagatacatctgaatcttgggcacaaaatggcaacagggatgagggttagtggtttagagcaaatgggctgaagtcaggtagtctggatttgaatctttgcactcacacttagtagtcctctgaccttggataatttgcttaaccactcagtatactcaacgctaaaacgactgtaataacagtgcttcctcataggtggttctgttttttcatttttcttttcttttctttttttttttagacagggtcttgctctgtagcacaggctggagtgcagtggtgcgatcatggcttaccttgaactcctgggctcaagtgatcctcccacctcacccttctgagtagctgggattacaggtgtgtgccaccatgcctagctgattttttgattttttttttttttagagatagggtctcgctatattacctaggctggtcttgaactcccggcctcaagacatcctcccaccttggcctcccratgcacatcatacctggccacaaagcctcttaatgtattttttttttttttggtggcattcagtaggaaaacggataactgaaaaaaagttatttattttatcttggatgtccagagagtgtctctgtgatttcccatctgtctccttaaaacaaacaagcaaacaaacaaggttcttggattaaacatttcatgacggagactgaaaattgccatggagatgatggaggaaattatacacttgttcttttttgctttttcttcacagcctatgcataagaatgaactgaggtattagccttagctctcttttcatggtaaactgttttaaaatttgccactatgctagcaataatagatttttctacatgttagtgttaaaaatctttttattgtaacagattcaactttactaaacagccaggccacagttgcttgttgagtaagataccttacactgtgtaagctgagaatctctgagaaatctggatacttttattcaagtctgtttttttaaaatgatgcctatctttttatgtggttccagccccattattaattaactagtagcagaaaaatcaacttagactagcttaaacaataagaggaacttacctgcttacttaactgaaaagttcagtggtagcgcagtcttcaagtatagattgatctagtggctcaaccacatcgctagaggcccagtttctttttgttgctccatattgtttttcccattatcaatttcatttaaagattggcatccatcatggccacacaaagctggtggcaggaacagcagccccacttttgttttagcagagaggagaaagtattctctttgtagctttcatgttccaaagagaacact

SEQ ID NO: 77947 - DNA, 1130 bp, Homo sapiens
cagtttctgcccctgttgtcacatgacattccttctatgtgtctctgtccttgcatggtatccctctctctgtgtccaaatttccctccctataatgaagacaccaatcattgaattaggaccgacccttcctattccaggatgatctcatcttaactggcttacatctgtaaagaccctattcccaaataaggtcacattcacaggatccagacattagaacttcaacatatctttttgagcaacacaatttaacccataacactatgctttacttttttttctttcaaacagggtctcactctgtggcccaggctggagtgcactggtgcgatctcagctcacagcaacctctatctcctgggctcaagggatcctcccacctcagccttcgaagtagctgggactacagcctcatgccaccatgcttgactaatttttgtattttttttttttgtagagacaaagtctcattatgttgcctaggctgttcttgagtgcctgagctcaaggtatgtctgcccacttgagcctcccaaagtcctgggattacaggcatgagccaccactttacttttaattatttttaaatgttaacaaaagtaatctgagcagtagactttttcttttttttttttttttttttttgagacagagtcttgctttgtcacctaggctggagtgcagtggcacaatcatggctcactgcaacctctgccctgggttcaagcaattcttgtgcctcagcctcctgagtagctgggactacaggcatgtacccccacgactggctaatttttgtagtttttggtagagacgaggtttcaccatgtcggccaggctggtctcgaactcctggcctcaagtgatctacctgcctcagcttcccaaagtgctgggcttacaggcatgagccactgcatccagccctgagcagtagacttctataagccattttcttttcttctctatgtcttatgtatttttcttaatctaacaaataytacacatgcacacaaatagagataagctatatagataccaacacacacacatatatttacatattacataataattagtaccttgtaaccttctgcccttgggtcatcagagtctctaccctggag

SEQ ID NO: 77948 - DNA, 1130 bp, Homo sapiens
cagtttctgcccctgttgtcacatgacattccttctatgtgtctctgtccttgcatggtatccctctctctgtgtccaaatttccctccctataatgaagacaccaatcattgaattaggaccgacccttcctattccaggatgatctcatcttaactggcttacatctgtaaagaccctattcccaaataaggtcacattcacaggatccagacattagaacttcaacatatctttttgagcaacacaatttaacccataacactatgctttacttttttttctttcaaacagggtctcactctgtggcccaggctggagtgcactggtgcgatctcagctcacagcaacctctatctcctgggctcaagggatcctcccacctcagccttcgaagtagctgggactacagcctcatgccaccatgcttgactaatttttgtattttttttttttgtagagacaaagtctcattatgttgcctaggctgttcttgagtgcctgagctcaaggtatgtctgcccacttgagcctcccaaagtcctgggattacaggcatgagccaccactttacttttaattatttttaaatgttaacaaaagtaatctgagcagtagactttttcttttttttttttttttttttttgagacagagtcttgctttgtcacctaggctggagtgcagtggcacaatcatggctcactgcaacctctgccctgggttcaagcaattcttgtgcctcagcctcctgagtagctgggactacaggcatgtacccccacgactggctaatttttgtagtttttggtagagacgaggtttcaccatgtcggccaggctggtctcgaactcctggcctcaagtgatctacctgcctcagcttcccaaagtgctgggcttacaggcatgagccactgcatccagccctgagcagtagacttctataagccattttcttttcttctctatgtcttatgtatttttcttaatctaacaaatactacacatgcacacaaatagagataagctatatagataccaacacacacacatatatttacatattacrtaataattagtaccttgtaaccttctgcccttgggtcatcagagtctctaccctggag

SEQ ID NO: 77949 - DNA, 832 bp, Homo sapiens
cctccataaagtcttgctgaatcccagatgaggtaaagtgttctttgtatatgtgaccaggatgccctgaacacacgcatatattaaatgtcaaattatgtgtctgtctctctggctgtaagcacctgagagataaatatcacgtattttaaaccatgtatctatctgttgtgcctagcccagtccctggcataaagtagtaaagaaaagctggcagaatgaacaaaggaaggcatrtatcttactattcaagaatttccacaaactgttatttaacaagggaataataaataactatttggcggtaatttaatacaatctcaaaacacttattttgtatagaccagggtttctcaaccttggcactactgccatttgggctgggtaggtctttgttgtgggagttgtcctgctcatcacaggcctttacccactggatgccagtagctccctaccccctatttgtgacaataaaaagtctccaaacatcgccagatgtccctggacaggaaggggagggctgtcgggaggtggagagcagtgagattgcccactggtctagacaaacgctcaatgttgattttgaatttcataacacctgtgaagacagggactcccataacatttcatttggtccctcaggatatcaattattctttctaagaacaaatctgccatagttcatcatgtttttaaaggcatttagatcaactatatataaaacttttaagagtttttctaatataattaccttgtaaaaagatgagatcatgtaacttattgttccataaaaatatagggttgttaaaaaaaaaaaaatatatatatatat

SEQ ID NO: 77950 - DNA, 832 bp, Homo sapiens
cctccataaagtcttgctgaatcccagatgaggtaaagtgttctttgtatatgtgaccaggatgccctgaacacacgcatatattaaatgtcaaattatgtgtctgtctctctggctgtaagcacctgagagataaatatcacgtattttaaaccatgtatctatctgttgtgcctagcccagtccctggcataaagtagtaaagaaaagctggcagaatgaacaaaggaaggcatgtatcttactattcaagaatttccacaaactgttatttaacaagggaataataaataactatttggcggtaatttaatacaatctcaaaacacttattttgtatagaccagggtttctcaaccttggcactactgccatttgggctgggtaggtctttgttgtgggagttgtcctgctcatcacaggcctttacccactggatgccagtagctcccyaccccctatttgtgacaataaaaagtctccaaacatcgccagatgtccctggacaggaaggggagggctgtcgggaggtggagagcagtgagattgcccactggtctagacaaacgctcaatgttgattttgaatttcataacacctgtgaagacagggactcccataacatttcatttggtccctcaggatatcaattattctttctaagaacaaatctgccatagttcatcatgtttttaaaggcatttagatcaactatatataaaacttttaagagtttttctaatataattaccttgtaaaaagatgagatcatgtaacttattgttccataaaaatatagggttgttaaaaaaaaaaaaatatatatatatat

SEQ ID NO: 77951 - DNA, 832 bp, Homo sapiens
cctccataaagtcttgctgaatcccagatgaggtaaagtgttctttgtatatgtgaccaggatgccctgaacacacgcatatattaaatgtcaaattatgtgtctgtctctctggctgtaagcacctgagagataaatatcacgtattttaaaccatgtatctatctgttgtgcctagcccagtccctggcataaagtagtaaagaaaagctggcagaatgaacaaaggaaggcatgtatcttactattcaagaatttccacaaactgttatttaacaagggaataataaataactatttggcggtaatttaatacaatctcaaaacacttattttgtatagaccagggtttctcaaccttggcactactgccatttgggctgggtaggtctttgttgtgggagttgtcctgctcatcacaggcctttacccactggatgccagtagctccctaccccctatttgtgacaataaaaagtctccaaacatcgccagatgtccctggacaggaaggggagggctgtcgggaggtggagagcagtgagattgcccactggtctagacaaacgctcaatgttgattttgaatttcataacacctgtgaagacagggactcccataacatttcatttggtccctcaggatatcaattattctttctaagaacaaatctgccatagttcatcatgtttttaaaggcatttagatcaactatatataaaacttttaagagtttttctaatataattaccttgtaaaaagatgagatcatgtaacttattgttccataaaaatatagggttgttaaaaaaaaaaawatatatatatatat

SEQ ID NO: 77952 - DNA, 546 bp, Homo sapiens
agattcctgtgctatggggacatctaatgagcacttcataaatgttttcatttcaattatcaccatagccagaagcttcaataacaggaaccatttttgaaatcctgttcacaatttatgaatgtgtagaattactgmatccattccctgtgccacaccagtcccagagtataagtgaaatacaaaataaatacagaacaattatggtgatgaggattattaaacacacaaaaaataaaatcatagctattttacttgaaacttggagaaatgtagtcctgttataaagtggggaaagtgtgtacttttgactataaattatgttggaattaaaacatagaagttgctataatatcaatttctctaatattaatgtgctagggtgattggaaattataatgctgaagtggaatgtgattagaaaagggtaaagtttgtagaattggggaggctgagtgggtggtaccaagaccagctacctaaatgcagagtccagtgcagaatgaaaattcaggcccccttgtgcaaaacttattaagaatctca

SEQ ID NO: 77953 - DNA, 546 bp, Homo sapiens
agattcctgtgctatggggacatctaatgagcacttcataaatgttttcatttcaattatcaccatagccagaagcttcaataacaggaaccatttttgaaatcctgttcacaatttatgaatgtgtagaattactgcatccattccctgtgccacaccagtcccagagtataagtgaaatacaaaataaatacagaacaattatggtgatgaggattattaaacacacaaaaaataaaatcatagctattttacttgaamcttggagaaatgtagtcctgttataaagtggggaaagtgtgtacttttgactataaattatgttggaattaaaacatagaagttgctataatatcaatttctctaatattaatgtgctagggtgattggaaattataatgctgaagtggaatgtgattagaaaagggtaaagtttgtagaattggggaggctgagtgggtggtaccaagaccagctacctaaatgcagagtccagtgcagaatgaaaattcaggcccccttgtgcaaaacttattaagaatctca

SEQ ID NO: 77954 - DNA, 546 bp, Homo sapiens
agattcctgtgctatggggacatctaatgagcacttcataaatgttttcatttcaattatcaccatagccagaagcttcaataacaggaaccatttttgaaatcctgttcacaatttatgaatgtgtagaattactgcatccattccctgtgccacaccagtcccagagtataagtgaaatacaaaataaatacagaacaattatggtgatgaggattattaaacacacaaaaaataaaatcatagctattttacttgaaacttggagaaatgtagtcctgttataaagtggggaaagtgtgtacttttgactataaattatgttggaattaaaacatagaagttgctataatatcaatttctctaatattaatgtgctagggtgrttggaaattataatgctgaagtggaatgtgattagaaaagggtaaagtttgtagaattggggaggctgagtgggtggtaccaagaccagctacctaaatgcagagtccagtgcagaatgaaaattcaggcccccttgtgcaaaacttattaagaatctca

SEQ ID NO: 77955 - DNA, 1006 bp, Homo sapiens
acatcttggtacattctactcaattttgctgtgaacctaaaactgctctaaaaaataaagtcttaaaaaaaaaggaataaagcatctactacttcttatttccaatcttagaattgtgtgttagatgtctttcaaagcttgtgctgaggtgttgggtaggggtggcgggtgaggcgtgtggggtagtctccctgacaaatttggagagtgagggtcacctggcaactgctcccactgtacacaggcagtttaccagaagaaatgtccctttggtgaatcaaattctcctttttattccactgtcacaaaagttaatgtgactggagatatacagagaggtgcctgctgcgcctattgttcaccgccaccccagatttccagagctgtgttaaactctctaatttttgttctttagaatctgacatgagtgaccccttgtgttttgatgtctgtaattgattttaaattatgccagcagagagagtgtgatctaaataagtggttgattagttttaagctacaccctaggaaccgacagtctctctgattggaaatatcctccggagatggccagtttgcatttattaataaggccatactctagataaatttaaccacgagtgtttcaactactttgtatttatccttgactagtaccaaaagttttgttagttagcatgataaatattagaagtgaggtttcatgctaaaatgactagtgttcaagatatgcagattggctaaaatattttacagatacttcccaatattgcacaaatagcacataaaactctagtgagctttttrcccttcgactttcaaagtggtgcctaaggcttgattctaatatagtcctgcctccatctactaacttagatgattctggttgcctgattctggctaagaggttaactgaattctgcttcaagaatgtcgttgtgtctgtatcaagagaatgtttaatgcaaagaatggttggagtatatagaaggatagagtgctggga

SEQ ID NO: 77956 - DNA, 2177 bp, Homo sapiens
gactaaaagactgtacagtcacacctggttttattaatgttgaaatactttggcaggagatgggcccaaaagctgttaagccatttgctatatatttagggataatgtgatttgattggcaccacataacttccagtgacgctcctgatttcagtgtattagcgtttatggcatttcatttcatctcttccttatgaagcttatgctgaagctgttttctctgaagcttctcctctttacttagttttgtatcgtgcttgatgaggcaaaatcctgaatgcttcaaaacagctccttctggaagttcagttgtgggctgaagagagtatagtataggagttaagaggatggactcagcagtcaggcagacggtgggctcaaattccatctcggcctctggaagccatagggccaactctcaccctcagttttctcactggaaaaggaggataatagtgcatcctgactcagggttgtggtgaggattcaaggggaaccatgtgaaatgtagtcagtgcctgccattcagtgcccacttagtacatgggaactaatatttgtccaattgaattattacctatcaatccattgggtgtaaaacagaccttctagcattttttctgtgtccatgactattttgaggaggctttttgggaaaagcctatttagacaagaggatatttatgtttcatcaactttttggaaagtggcgggtataaatagataagaaaatgaatatatcatatgcacaaaatattaactaatacaatgaaagaagaggctctgcctggttctcaccctttgcccgatgcttatgggtaagtgtggaatgaacacaacaatctgctgatattgtctgagctcctgttcagacaatatctgaatatgttcagtgtttgtcagtgatgcatgagagatacaggagatgtgaaaatgcagactgtgttgctctgcatctttgcaattaaccagtgacctcctatgagctttgtaggtatcacccctcatgatcataacctgcaatgtcagaattttcccccatgtcatagaagaggaatggagacagccctgggaggtaaggcagctggmctgtcccatggctaaatggagtgtgaactcaggcctgcatctaacttatatggcccagttccttctcactctgccttcctgcctcccactcaactaaactcaagaagaatatgagttgtggagagagtatctatatgcaggaacaaaacctataacactaagagatacgaaatggggacaaactatggggtagagacaatatggtggctctgggtgttcctattaagaggactggagtacccatgaaaatggtgaagtctgatctgggtcttaaagacaacagccatcagaaacttcaaggaaatggatagggttgtccaagaaagcaggatggcctgaacaaaatggtgattagaggaggcacaggcaaggaggacgaaagattcaatttttttttttttttgagatggagtttcactcttctcacccaggctggagggcagtggtgcgatctccgctcactgcaacctctgcctcccgggttcgagccgttctcctgccttagcctcccgagtagctgggattacaggtgcctgccaccatgcccggctaattcttttttgtatttttagtagagatggggtttcgccgtgttggccaggctggtctcgaactcttgacctcagtcgatccaccctcctcagcctcccaaagtgctgggattaaggcgtgcgaccacacctgctgaaaggttcaagttttatgtttgctcttggattgattggtagtgtactaagttggaaattgtgaagctgtttccgggttagagagaaggctgaccaattggcaatgtgtgcctcaggcaggctattaagtagagaaagagtcatgtgtttgattaagaattgcctacatgactatgactgtacccatttaagtaaaatacagagcaatgggcagaatatggttataagggtaatagaattgacttagggtttttaacctctttcaaaagaaggcccttgacagtgtagaatgagtaatgaaaatcaaaacgaggtataaaatggtacagctgatatagaaaacaagttaaacacagaattaccataatacctagcaattccactctgaggcatatacatgca

SEQ ID NO: 77957 - DNA, 2177 bp, Homo sapiens
gactaaaagactgtacagtcacacctggttttattaatgttgaaatactttggcaggagatgggcccaaaagctgttaagccatttgctatatatttagggataatgtgatttgattggcaccacataacttccagtgacgctcctgatttcagtgtattagcgtttatggcatttcatttcatctcttccttatgaagcttatgctgaagctgttttctctgaagcttctcctctttacttagttttgtatcgtgcttgatgaggcaaaatcctgaatgcttcaaaacagctccttctggaagttcagttgtgggctgaagagagtatagtataggagttaagaggatggactcagcagtcaggcagacggtgggctcaaattccatctcggcctctggaagccatagggccaactctcaccctcagttttctcactggaaaaggaggataatagtgcatcctgactcagggttgtggtgaggattcaaggggaaccatgtgaaatgtagtcagtgcctgccattcagtgcccacttagtacatgggaactaatatttgtccaattgaattattacctatcaatccattgggtgtaaaacagaccttctagcattttttctgtgtccatgactattttgaggaggctttttgggaaaagcctatttagacaagaggatatttatgtttcatcaactttttggaaagtggcgggtataaatagataagaaaatgaatatatcatatgcacaaaatattaactaatacaatgaaagaagaggctctgcctggttctcaccctttgcccgatgcttatgggtaagtgtggaatgaacacaacaatctgctgatattgtctgagctcctgttcagacaatatctgaatatgttcagtgtttgtcagtgatgcatgagagatacaggagatgtgaaaatgcagactgtgttgctctgcatctttgcaattaaccagtgacctcctatgagctttgtaggtatcacccctcatgatcataacctgcaatgtcagaattttcccccatgtcatagaagaggaatggagacagccctgggaggtaaggcagctggcctgtcccatggctaaatggagtgtgaactcaggcctgcatctaacttatatggcccagttccttctcactctgccttcctgcctcccactcaactaaactcaagaagaatatgagttgtggagagagtatctatatgcaggaacaaaacctataacactaagagatacgaaatggggacaaactatggggtagagacaatatggtggctctgggtgttcctattaagaggactggagtacccatgaaaatggtgaagtctgatctgggtcttaaagacaacagccatcagaaacttcaaggaaatggatagggttgtccaagaaagcaggatggcctgaacaaaatggtgattagaggaggcacaggcaaggaggacgaaagattcaatttttttttttttttgagatggagtttcactcttctcacccaggctggagkgcagtggtgcgatctccgctcactgcaacctctgcctcccgggttcgagccgttctcctgccttagcctcccgagtagctgggattacaggtgcctgccaccatgcccggctaattcttttttgtatttttagtagagatggggtttcgccgtgttggccaggctggtctcgaactcttgacctcagtcgatccaccctcctcagcctcccaaagtgctgggattaaggcgtgcgaccacacctgctgaaaggttcaagttttatgtttgctcttggattgattggtagtgtactaagttggaaattgtgaagctgtttccgggttagagagaaggctgaccaattggcaatgtgtgcctcaggcaggctattaagtagagaaagagtcatgtgtttgattaagaattgcctacatgactatgactgtacccatttaagtaaaatacagagcaatgggcagaatatggttataagggtaatagaattgacttagggtttttaacctctttcaaaagaaggcccttgacagtgtagaatgagtaatgaaaatcaaaacgaggtataaaatggtacagctgatatagaaaacaagttaaacacagaattaccataatacctagcaattccactctgaggcatatacatgca

SEQ ID NO: 77958 - DNA, 2177 bp, Homo sapiens
gactaaaagactgtacagtcacacctggttttattaatgttgaaatactttggcaggagatgggcccaaaagctgttaagccatttgctatatatttagggataatgtgatttgattggcaccacataacttccagtgacgctcctgatttcagtgtattagcgtttatggcatttcatttcatctcttccttatgaagcttatgctgaagctgttttctctgaagcttctcctctttacttagttttgtatcgtgcttgatgaggcaaaatcctgaatgcttcaaaacagctccttctggaagttcagttgtgggctgaagagagtatagtataggagttaagaggatggactcagcagtcaggcagacggtgggctcaaattccatctcggcctctggaagccatagggccaactctcaccctcagttttctcactggaaaaggaggataatagtgcatcctgactcagggttgtggtgaggattcaaggggaaccatgtgaaatgtagtcagtgcctgccattcagtgcccacttagtacatgggaactaatatttgtccaattgaattattacctatcaatccattgggtgtaaaacagaccttctagcattttttctgtgtccatgactattttgaggaggctttttgggaaaagcctatttagacaagaggatatttatgtttcatcaactttttggaaagtggcgggtataaatagataagaaaatgaatatatcatatgcacaaaatattaactaatacaatgaaagaagaggctctgcctggttctcaccctttgcccgatgcttatgggtaagtgtggaatgaacacaacaatctgctgatattgtctgagctcctgttcagacaatatctgaatatgttcagtgtttgtcagtgatgcatgagagatacaggagatgtgaaaatgcagactgtgttgctctgcatctttgcaattaaccagtgacctcctatgagctttgtaggtatcacccctcatgatcataacctgcaatgtcagaattttcccccatgtcatagaagaggaatggagacagccctgggaggtaaggcagctggcctgtcccatggctaaatggagtgtgaactcaggcctgcatctaacttatatggcccagttccttctcactctgccttcctgcctcccactcaactaaactcaagaagaatatgagttgtggagagagtatctatatgcaggaacaaaacctataacactaagagatacgaaatggggacaaactatggggtagagacaatatggtggctctgggtgttcctattaagaggactggagtacccatgaaaatggtgaagtctgatctgggtcttaaagacaacagccatcagaaacttcaaggaaatggatagggttgtccaagaaagcaggatggcctgaacaaaatggtgattagaggaggcacaggcaaggaggacgaaagattcaatttttttttttttttgagatggagtttcactcttctcacccaggctggagggcagtggtgcgatctccgctcactgcaacctctgcctcccgggttcgagccgttctcctgccttagcctcccgagtagctgggattacaggtgcctgccaccatgcccggctaattcttttttgtatttttagtagagatggggtttcgccgtgttggccaggctggtctcgaactcttgacctcagtcgatccaccctcctcagcctcccaaagtgctgggattaaggcgtgmgaccacacctgctgaaaggttcaagttttatgtttgctcttggattgattggtagtgtactaagttggaaattgtgaagctgtttccgggttagagagaaggctgaccaattggcaatgtgtgcctcaggcaggctattaagtagagaaagagtcatgtgtttgattaagaattgcctacatgactatgactgtacccatttaagtaaaatacagagcaatgggcagaatatggttataagggtaatagaattgacttagggtttttaacctctttcaaaagaaggcccttgacagtgtagaatgagtaatgaaaatcaaaacgaggtataaaatggtacagctgatatagaaaacaagttaaacacagaattaccataatacctagcaattccactctgaggcatatacatgca

SEQ ID NO: 77959 - DNA, 600 bp, Homo sapiens
aggtggcttctcatcccagtggtctcgtgctgcacttcagggcctccatcacctgatctgggggctgtgggggtcctgggagagggctcatgggtaggggacagtttttgatgttctcttagtgaaggacagagaagaaggatggggggctggtggcggcggcagggagccaggatggtgctggtcccgcctcccttccttccatccctgctgcaggcctgccctcttcatgcctggctccccgcagcctctccctgtccccrtctgtcccgccactactggaaccccaccctgcctctgggtagtgtgcaccccatcctcagagcggaacccccatcccctgggcttgtgggggcttcacttcctgctgtttccccgcagcccacggccattctcctgctcctcccacccctcctcactgtccttcctggcactccaggcccctccgccgcatctttctgactcgtgttgccacatcatctgccctggctggggttttatctccctggcaactggaaatgtgttggttaagatatggtgagttaggccgggtgcagtggctcatggctgtaatcccagcactctgggaggccgaggcag

SEQ ID NO: 77960 - DNA, 616 bp, Homo sapiens
caatctcctggcttactcccaggttcaaaccatcctcctacctcagcttctccagtacccggaactacagacatgagccactgtagctggctctatttatttatttatttatttatttatttatttaaatgacactggagctgtcatctgctcctactcatttctgcaactcagagaaccaagaattggaatgagccagctgggttagaaaaccacaaaccacagttcaaaacccaaataggtgtgggttttgacccaaagatctgaagtcatcctagtcaagggccagaggcagccaataagagaaaatattcaagggaaactgaaagcatttggctgaagagttcccgagccaggsctcagactgtatcggctgtcttggtactttctggatggtggtgggaaaattagctcctgaaaatgatgggctggaggcaggctgggcaagccttggtcactgggacagatctcagcagggctgggagcggaatcaagtaactggctctctgagaatcacccaaatcaatcaataatgatcgattatgcctgctttccagactgctggctgcttcctgtgtgatcctgggttagtgagtgagtgggacagccccaggga

SEQ ID NO: 77961 - DNA, 547 bp, Homo sapiens
tcgcttgaacttgggaagcggaggttgcagtgagccgagattgtgccactgcactccagcctgggcaacagactgagaatccgtctaaaaaaaaaaaaaaaaaaagaaaccattgaaacctctcggaaaaagcaaataaacaaaaatcaatacacatctggctatcttagcagttaattctttcaaaaggtttatagtttttaatgttgaattttctatatcaaatattgtaatatttaataaatacaaggacactggagttaaatgtaagatttttcatcttatttcattacctgagtctgttattgctgggcttctcagttctttcatttaatcttaaatgtgaagctaataattttcctttctaagtcaaaaataaaatattaaacagagaaaatttgttcacaacttccmtctaagtaaaaaacatggtgttcaaggtctgaaaacgctttcctagattatagattgtaagcatatcatgctgataataacaagtagtacataatgatttacgagttgcacattacacagagggaataagaaa

SEQ ID NO: 77962 - DNA, 642 bp, Homo sapiens
agcaaatgtagcatttgataagccaggaagtcctggcagctttatgtaatggacaaactctgcaaccatataggacacagactaaatcaaattcacttggtgacttccgtacttatatgatgaatcactcaacaccagagcttctgtggttcttggtcttctcatagtcaacctctattcaacctcagccacccactttcagtagagcttagaatgaccagtagctggggcatttctaaatgttcacttgaagaatcctgcattgtcgatgagaacacatagacacatggtgcgggataatacatactggggcatgttggagagttggggggaggaggtggaacaccaggaagaacagctaatggacactgggcttaatacctaggtgatgatatgacctgtgccrcaaaccatcatggcacacgtttacctatggaacaaacctgcacatgtactcctgaacttaacaaaaattaaaaaagagaagaatcctacattctcggtctcatttcctactcttccagctgggtttctccagctattcatcaatctccaaaccactcattctctcactttttgccatctttacatttgcattgtcttcctgccccaagttgagagctcatgatttggacataaact

SEQ ID NO: 77963 - DNA, 2240 bp, Homo sapiens
gcatcaaattgtcatactaattttagagaaaaaaagcagtgctagagatacaaaaaactttactaagattatgagcatttattaaagaatgtataacagttatctaaaagtaaaagacgccaggcgtggttgctcatgcctgtaatcccagcactttgggaggctgaggtgagagaattgcttacgcccaggagtttgagaccagcctagataaaatagtgaatctccatatctacaaaaaataaaaataaaaaagttagccagatgtggcctatagtctcagctactcaggaggctgagttgggaggattgcttgagcctaggaggtcaaggctgtaatgagccatgatcatgccattgtgctccagcctgggtgatggaaccagagcttgtcttaaaataaataaataaaaagtaaaaataaataaatttaaaaagaccgatttgatgatgaataatttgcaatgctttactgaatatttaaaagttaggtttaaatgttgggtactatattaaacaataaaaattactgtaataaagtaaccttactgagaacctagtagtagtgtttatttataacaaattatatgttgtgtaattacagagctgtgtggagttactggtttatgcacaattaattaagtactggttgcttcataaaataaatatccaattcaaaaatgaccaaaacaggtaataatgataaacatataatatgtaaatctctccaaatcaacagaaaattttatgcagcttgtgcaagacttaatattttcctggagtatttagagaaaaatgtaatatagattagtaatgcctttcaaactctgtgtcacataaaatgaatatttataattaggacacagagaaatccaaggttaaaatgtgcttcaaaaaagttaaaaaatcaatttttaatgttttgttggtaggcaayatacaaagcatagatatagaaatacgagacttttcgttcagcttatgttgtaaaatgtcttaaatgcattaaatgtagcacacatgcacaagcaaataataatgttacaattaaataaaacaaattatatcaagagaagaatatgtgacatgtgtccaacaaattattataaaaacagattactgaattgaaatttacatattattaaatgaaaaagcattgtgctgcaattctgcaaatatagagagtgaaatgtaatcatcagagagtaactgagtagtatagtctcatttttattgttgtctttttgaaataggaatagtattgtctaaggaacactggcccccataagtagtaaagcccaacatttcagtgattcagcacaatagatttagcacatttctcgcacatgtaactgcacaatgtgggtgttcctagtcagtgtcagtttccatcttatgatctgcccacccgctaggcctccgggtcctctgaaggtgaaaagtaaagggaagaacatatagtgggaagccatgcctgcttcttaattcactcagcctacaaacaatatataactcactttctctcgcatgactttggtgaggatttgaaactgtacccctaggattggcagctgcttcccaacgagtactcagtaatgccggatatttgtttccccacaaaattcatgtattgagatctaatacccagttgatgctattagtaggtgtggcctttgggaggtgggtaggtcatgagggtagagcccttataaatacgatttgtgcctttataaaaggggcaccagagagctgccttaccgcttccatcctgtgagaacacagtgagaaggcaccatctgtaaaacaggaaactggccctcacaacgcgacagtgaatccacaggtgccttgatcttgatcttccagtcttcggaacttgagaaataattttctgttgtttataaactactcagttaatggtgctttgtactagcagcccaaaaagatcaaggcactgatctatggcaggggaagtacaagttttggtggatagttggtcatctctgccactagaatgaaatacagctatgtttattttctatttggaggtaattaggattaaaatttcaaaccaggtttttaaggaaaagctagaggtagttattcattcattcaacacacacacacatgcacacattttacacacaaacacacacagatatccgattatgtgcctctggtgttagggttggaattcaggcctggaattagccagaactgatccattgaaatgagaaatg

SEQ ID NO: 77964 - DNA, 576 bp, Homo sapiens
ttaaatagattcatgcccaagtgtcttagtctgtttgggctgctataacacaaatatcacagatcgggtggcttaacaacaaacatttatttctcacagttctggagggtagaaagtctatgatgaaggcattggcagattcagtgtctgatgagggcccacttcctggttcacagatgaccatcttctcactgtgtcctcacttagcagaaggggtgaggaagctctgtggggtttctgttatagggcactaatcccatttatgagggctccaccttyatgacccaatcacctcctagaggccacctccaaacaccatcacttgggattaggcttcaatgtataaattttagggggacataaaaattcagtttttgcgccaagcatgggaaatatagcactgaaggccgtatcctctcatcaatttttcaaattggtaataacaacaataatagtgataaaaatcattaaaataatgacagttatttataaccttgcacccccacccataaaaccagcctcatcttttccactattcgctctgtgaaggcccaaacaaggcaatcaaattattca

SEQ ID NO: 77965 - DNA, 505 bp, Homo sapiens
acaaacctgacaaaaacaagcaatggggaaaggattccctatttaataaatggtgctgggaaaactggctagccatatgtagaaagctgaaactggatcccttccttacaccttatacaaaaattaattcaagatggattaaagacttaaatgttagacctaaaccataaaaaccctagaagaaaacctaggcattaccattgaggacataggcatgggcaaggacttcatgtctaaaacaccaaaagcaatggcaacaaaagccaaaattgacaaatgggatctaattaaagagcttctgcacaacaaaagaaactacaatcaaagtgaacaggcaacctacagaatgggagaaaatttttgcaatctactcatctgacaratggctaatatgcagaatctataaaacttacagtgtttttaaaatactcttttgaaaataaaaaatatagaatagtggggtttttttttttttttgccttttagcctatgttctgagttcctc

SEQ ID NO: 77966 - DNA, 637 bp, Homo sapiens
gtggggtgcatgaggcctcaggtgccactcacagactctggcctcctcaggacccagccccactcccgcgggaggtctgctgtgattctccatgccccctgacgccccaaagcctggccctcccgtgctccagcttctgcccccgagtttgtcagtttctgccggtgcctcccgtacccccaccaccattcacgcgcctctgccagcctggcctttccctgtccatttcctcctggccttgctgccaggtgggcctcctgggccagtttggctcggccttgcccatgatctgcggggcttagctcccacaccctccagatacataaacaagcattccccacagcatggtcccaaggacggtggcaggagggccccagggatgggtttgcacgttgggcaaaggcctsagtatgtccgcacctgctgcaaggagcggctttgcctgcccggctactccaggcccctccccacagagagggagccccggggagctgccgagatggggtttgctgagagctccatgcagccaggtgcaccctgtccttcgagccatcctgttggagggtgggcaggctaaatggcccatgcgtgcaggtagatgcttaaggactggctagtgttaagggccaggaggctg

SEQ ID NO: 77967 - DNA, 550 bp, Homo sapiens
gcacagctgcgggaggagcggctacggcagtacgcggagaagaaggccaagaagcctgcactggtggccaagtcctccatcctgctggatgtcaagcctgtgagtgggcggggtggggcttcagggggccaggcactgccctggtgcccgcctagccggctcagcctgtgaccctccccctgcctctgggttctggggagactttaaagccgagtttagaagtcttgggataaacacaaacttggaggcaggaaggtgtgaatttggattgttttctgtgggccctttaaggaaacagaattgtggacacacagtggttgagggtagggtgcatgcaggtacttcctgggtgttctgagggtggctgaccccagcttttcctcccctttccccacagtgggatgatgagacggacatggcycagctggaggcctgtgtgcgctctatccagctggacgggctggtctggggggcttccaagctggtgcccgtgggctacggtatccggaagctacagattcagtgtgtggtggaggacgacaaggtgggg

SEQ ID NO: 77968 - DNA, 627 bp, Homo sapiens
tccctagggaaggccgacagaggaccaggcgtcagggggctyagcactgggccacacgcttacagggtgaccagcagcagagggaccccagagacacacctgggtggacacaccccttctagtctgacccttccatagagggcactttgcgggtatcccctgagcccccagcagggaggactcccatggcagccgtgcccactgatgctggctctcctttcaatatgggagctgcctctgtggccagaggctggggctgcattgttgggatggtggggtggagaacagaaaaaccctccctcctgttccagcacccctgaaagatgcatgtgtgctcaatttacgttcttcctggggaccccttctgggggccccagactctgagagccccaggcaggtgcactggtgggggaggggctgagtcctggcctcacggctgtggggtggtgagaatgaagtaaggcggtgcggggaggctgcttggatagggctggcctcccaggaagtcctccatgcctgtcccacctcctgcctgccccggtgggtgcctctggagggttgcaggcgtggcttgtttctgggccctttgaaaacacaagtagcagatgccccatgtgcaggaggccc

SEQ ID NO: 77969 - DNA, 627 bp, Homo sapiens
tccctagggaaggccgacagaggaccaggcgtcagggggcttagcactgggccacacgcttacagggtgaccagcagcagagggaccccagagacacacctgggtggacacaccccttctagtctgacccttccatagagggcactttgcgggtatcccctgagcccccagcagggaggactcccatggcagccgtgcccactgatgctggctctcctttcaatatgggagcygcctctgtggccagaggctggggctgcattgttgggatggtggggtggagaacagaaaaaccctccctcctgttccagcacccctgaaagatgcatgtgtgctcaatttacgttcttcctggggaccccttctgggggccccagactctgagagccccaggcaggtgcactggtgggggaggggctgagtcctggcctcacggctgtggggtggtgagaatgaagtaaggcggtgcggggaggctgcttggatagggctggcctcccaggaagtcctccatgcctgtcccacctcctgcctgccccggtgggtgcctctggagggttgcaggcgtggcttgtttctgggccctttgaaaacacaagtagcagatgccccatgtgcaggaggccc

SEQ ID NO: 77970 - DNA, 558 bp, Homo sapiens
gtggggtgctcaggcctggggtaacgaggaatgcaaggcttactcatttttaacctttgcgctttcaagacacatgagctcatcttaccgaaagatgagctcccaaccccaggtccctcccattgcactatggtctggggccctgaaggccagggctggcactggccccggtggttctcacccacccttccctgtgttggccccgaaggctggagccccagggcattggccaggagtctagttagggggaatggagctggtagggggcctgtctgcagcctgcctccccagctcctaccctgacccgaatgctgggccactgcctgcctggccctgtgccccactgcccccagtcagccgtcagcacactcgctgctacccctcycctcccctccttcagaggccggtgagtcaccttcctggggaggccggcgtagtgctcgctgcaccctggcctggccttagcccccatagggtccctcgctcactgtgcactggggatgcatcaccgggaggcaggcattgctgctggggctgcaccccgtgcttggggatgga

SEQ ID NO: 77971 - DNA, 601 bp, Homo sapiens
caggttctgggaacttcctggcgggcttcccactctcacaggcccacattcccaccccaggaagtccctgaggatcagggcttggcacagcctggtgggggcagcccctgagggacccccagtcactcacacttggtgctgtggacagagggccatgcagggggcctggaggcacttggcccagtaggcaaagctgtggagctgacttgcagcattgggaggctgaaaagagccagcggccacgtgggactgggagctggttcctgccccctgagtccccagggcctctggagcctctggctcccaggactgtgctggcccagctccccttagccgggcccaccacacactctggggtgcaggggtgtgaaccgcrctctgtgcatctgctgcctgtgtctgggggaagggggcgtggtgtaagggccctgccgtggctagctgtgttccggagggttggccccaccagtcactgggcagcagccttgccttagctggctttgctaagcgtaggaggcactagcgtgagcagaggctcagaggagattctgcccaggagccctgtcaccccagagccctccttgtcggtgtctcggccttc

SEQ ID NO: 77972 - DNA, 1212 bp, Homo sapiens
cccgaagagttctgtcagctggccgatattgaggktcaccacataatggaaacagtgcttagcatttcccataactcacatcaaatggagaagtttgaaatatatactgtattgtaatttgattattaactgaggaaatgtatgtgtatatgtatatataatcttgagtgggatatacttgtttgtatctcctaccctcaagaaacacaattctacgcatatcttgggatttcaatgcatctataaccaagtatatgaataatattttgacacagaagaaaacaatgctgaaaaacagcacaaccaaaaccattttcaaaacccagcacagtgcctgcctcccggtaccctccagtgacactttccttgctagatcagggataaccacaacaagtaacaggtaagagaggcagtctctgtctttttttttttttttttttttttttgtataaaatgatgctacatagatcttttgtattgaccacttcctcaaccactgaaaggagggacagggattttctttttcttccaatttgaacactactcagttcactatcaaccatgcctagatcttggcagggcaggggtaagggaaagtgcatgcaaattgtctacactgcagaaaagatgagaaagagagggagagaaagaactctcactaaaggggtgtgatggcctcacaggccatgaaatgggcgatatcctttgagacgtgcaggacaaggcccagaagcaacaagaaggcactctcagggctggtgagcaggcagcggactttgccctccacgtgccccagaattttgctgtgcggtttcattaacatgaagataaaatggaacgtggctgagttacagcaactctagctcatgtttgcttaaaaagaaaataaagttctgtatctcaatccatcttgctttggctggggggccggccaggttcccgtcatgtcagtgctggcagtgcagggagagagggtgtggatctgggactgccgctgccggcttgtttagaaacatacacactgccggccacatcaacccgatttggtggtaaacaggggtgccgttcatcatgacagtgtcctcatgcaagaaactttgcagttacagccacgagggaagaaaggaaaagggtccctgtttgtgtcagccggaaagatagcagaggctagcgtgtttccccttctgctacgggcttcagctgctccatgca

SEQ ID NO: 77973 - DNA, 868 bp, Homo sapiens
gttttgatcagtcaagtggtattcgtttccaaggacaactgacaatagatgagcagattcatgagtgctctraagtcaggagctcttacattcataaatgtgataccaacacacaaaggccatgcaatatcactgggcctgacaagcctcaggcccaaaatgggaatcacagcctggatgacaaagaggtgttagaaactgatttttggaagcacggcctctctgctcatggttcaggcaaaggtcagagggtgtgagtaccactgtgtgtgcgttcctcagataggaaaatggtgcagagcttgccagccacaggctccctactctgggggacatggttcgcagtcttctgcatggcctggcccagcctctgggaccttctgcgatctggaaggtcacttttcaaatatgaatatatatatatatgaatatatgtatatatattagactcttgccaggtggaaagtacagagtagaatcacattttctatctaccagaagcctctgggctcgttggggaaataagacatacttctcatccagctagagaaaggacagaaggaagcagcattttggaatggagacaaccactatgtgggacagtttcacaaccaggacagtgtgtgtcctgagcatgaatctgagtacgcaaacgagcagccagacatggagaggccagggtgccagagaaggaccaagtgagaagggcattcagccgaggtaggtgcttccatagatgctttaattcatagtttgggggagtttaataaacataattgagttgattgctcaaattccaaaatgagaagactattttaagcatgcagggcttacagaaacacacatacagtatgcagatgtttcaaag

SEQ ID NO: 77974 - DNA, 711 bp, Homo sapiens
tcagaagagttaggagcccmctacttcttccaatgtctgggagagttagtagaggggctgctgtactcagccaatagtataccaggaagagaaagctttgatccatacatgcctccctgaaacctaaaattttcacaatcctctcttgccaaatcattctcatcttgaaataaaacaaatcctctctctttctctattcccatcctttaaaccttagctctaatgtaacctctatgaagtcttccccaattctttcaaatagagtttgtttctcccataacagtgtggtatttctgtttccatcctgcaaaccgtaccataattgtttccattctcttcccaaccagcctatgaactccttaagcgcaaagcctgtgacctattctagtttgtatctctagaatctaacacagggcaggatgaatggtagatgagaagccactgggtaccttgaactgctccaggcagaactgtcaggatcaatgcttcctaaccatttggggacatgatctccactttgaaaatctgaggaaaaggatattaagctgtaagtcaagagatctggattctatccctggttctgccaaaaactctcagtcctcaaaccagtcactctcacagtaccttaatattccaattgacaaaggaagaaactatcatttgcccctcaactatctttcattagatgtctgtaataaaaagtataaggag

SEQ ID NO: 77975 - DNA, 953 bp, Homo sapiens
ttgttacatttaattctgcaatgctttcttacatcactgagtcaggatttcaatcagtagaaaccttaacccaaggattcttcacgatcaatgactgacttaaacctggatttacacccactcacacatatacagagtccagttctgtgtgcacactgggaaaagtaggggcattatctaactccttattgactcaagaaagaggaaggctgtaaagcagtatgagtctgggaaaatttggaagcgcaggaagccatgtgtggtaaacagaaactcaaaacaaagataattggtgacagtgacatcccagtacatagcataaaggttaggcatagtagacatttgtggctaaccgaayctttcccctacaccttccacaacctgcaaaattagcttactagttctaattagaaacagagaatgttactcccccactcagtaccctccacccagatcaaactacatctatgacataaccactaccaaaatgcttgtatttcctttggattccagaagctctatgataagaggaaatgggcacagaattagagccgtcaagaaccgaggtactggctttgctactcaatacttaacttgaggcacattccagtttcatcaattttgaaataagaaagtgaaaaatcattacatctccagcttcaagactctaccactctcatagtgaaaccatggaggaggagatgtaaaatataagtgacatgtcaatgagagcaaggacagagggtgagttcacttatgggaagaaatatttaacttaattttgtgaccaaatctgcttgtgttcaaactaaccattgcaattacaacataactatttgattatatttgtgtactggttaaaggaaatacagaggaatgccattaatttttctcctgttttaaagtaaacacttttgggtaatataactcatttttaattacatatagaaaaa

SEQ ID NO: 77976 - DNA, 774 bp, Homo sapiens
cctagcaaatgctccatgcaaaacactaatattaaaaaagagagtaaactatagactttacacattaataattaataaatactacaaacagctctgtatctgtaagttagacaatttaaataaaatgaactgattccttgaaagacactcacccaagaaaaagtaggtcctttgtctgttacagatagtttgaaacattccaataaataaaactccaggcccagatggcttcactggtcatttcaacctaatatttaaggaagaaataataccaattgcacaaatctcatccagaacatagaaaagcatggaagacttttaccttttttcatgaggctagcgtaattctaatacccaaaccagagaagcacattacaagaaaagaaactataaaccaatatttctcctgaacacagayacaaaaatcctcaaaacaacactaacaagtcaaatccagcaatacattttaaaaaaataacaactgagtgggatttatcctaggaatgcaaggctgaatcagtatctgaaaatcaatgcaattcattgttagccaactgtattaatatattgtaaagctaaagagaagaactgtactcaaatactacattgtagtctgtgaacttagtttctcagttatgaactatgagagtcacataacatgtaagcaactcatacagagtatgagttagcgattttgaaacaacattctatgtgctagagttgaacaaataaatagatgtaactggaaataataaaccctaggtttctcatact

SEQ ID NO: 77977 - DNA, 1244 bp, Homo sapiens
attttgcttcagattttttaaaaaagtgatcatgctggctgctgcatgagaatagacagtcaggctagagggagtatgggcagagagcagtcagcaggctgcagcagttacccagggcagagacggcagcgacttggacgcagtggcagcagtggggaatgagacagatttggaatgatagtcttctctagagcatcttctcttgggatgacagccctcataaatctcctctctcccctttacagtattgcaccatgggacccattgcactaattctacaaacactatcgacagccatccatgccaagtacctgatcattttcctcttctcaggattctgtttatatatattgggatcctgcctgtgttccaaaccagactctatcccttattagtgcacaatcttgggcaagtttagtaactttccagagcctcagtactatttttatgtaaatggggataatacttaacatttatcctgaggacttattacaaggattcgacgtagataaaataatgcttattcttaggtttaaatcaataatggcaaagtggctagtccactatctggcacacagtgtgtagtgaagaagggatacacccttcccttcttcccyagtctccctaactaggttggtgcttctattcttgtcttccagaccacatagtgagccacaatgataggtgtgctgcgggtcctaaataaatatctgctttggttattggccaaaaatatcacaaaataagatacttcgcggagtggattctgggtgcagatttgctcagctgagaatgtggttttagagagcatggctttgccctaattagaacccaacaaaactcaaaatttcaaatgtaactcagatctttgtgggctcagctcaactttgtggttgcaaagttttcaaaaaatgtggttctaaataaaggctaaggtaaaagccttgctttaaaaaaagctaataaagactattgacttaaataatgctttatgaagcaatattatgatgtattaaaagcaaaaagaaagaaagaaacatatggattagattcccctggaaatatatcaacttttaaagtgtagggaaatggcactcaggaaaatatggaggctttgttcaactgaaaacacaaaccattttctgagtttattaagacgtttgcatccatgtgataagctcagagtgggctccctattttttggtcaagtggtatcagaccactcatcttcaaaagccagtcaa

SEQ ID NO: 77978 - DNA, 1239 bp, Homo sapiens
gccctgtgaatctggggtccagcggctcttctgtcctgccccttctctctctctctctctctctctctcgtcctctgactccgcaggctttagccttgtctcctagccggggcatgtgtgaggtcctttgcaagtgactggggactctggaaacatgaggtggtgatatccaggggtgaactcctgacacgtggcttgattttcccaagtcaagaccctctgcttttcctaggggtctgccttgggtgtgggtttgagcattgcgggaggaagaaggagagggaggcagtgggctgtgctctgcctggaagcatgcaggaagctgatgggaaacagctgagccaatagctctgcacacacagaaaataaatcctggcttccgaagaagctgcagaaaattgattttttgcagcttcagtggtcatcttgaaggatttgggggatggaaayggggcccatttctcatctctgttctgtgctgctgggtcaggtgttcctcaggcccgggtcagtacccctcgctcctccttgtctccccaccactctgtgtagagaggaaggggccgagggctggtcttcctcagcttacccctagtgtccagctgctttctgcctgttgcctgccctttgggcccgctgccatggatgggagaggtgcgcatgttcgtgcagccaagctgggattatggcatttgcacagggatgtagctgtgggtctgtgtgtctgggttgttgggggacaggctggggtgggtgccctttagagcttggcctctgcatgactgcctagtccctcagtgaatgctgcaattaattggctactagggagacattagccagctaggtaggtctgctgtaaccatccccctgtgtctgagcaggcttgctaggggccagggccgtgtctgggaacaagggctggccctctggcatgtttcccctacatgtgtggagagtggacttatcccaggcccaagggatctgaagatccccacagccagggaggaagctgcagctccagatggatggttcccggaactcctgttggctttggatgatttcatggaaaacttggccagggtgctgtgaggcagagctgtgacctctcagctcagcagccaacacaaggagttccttcaccttgtagagacatgcagtgtgggccgccacaaccctcccctggctctgtgtcagccctgccctgtggagccagctgggtctctctggtccccagcctgt

SEQ ID NO: 77979 - DNA, 977 bp, Homo sapiens
acttaattcaccagactgttacaaaagtccaacttgcattttattcattcattcaattattgaacaaacacctggtgagttcctaccctgtgccatgcatgttctgcacacaggagataccacactgattgtcaagatccatgccaccacagtgcttccatcctagagggaggaaacacacacaaaacatggaaagartgaatgaacttaaatctgagataatgaagacaatgagaccagggccaaagtagtgttgtgggcgggggaggggggaggggtgctactccagagtgaggattagggtcatatgagtttatgcatgtgagcacagtatggctagaacagatatctactataatagtgtactattatggtgtagatgaggtgccatcctgcatcacagcacaactaggcttactgaattgtgaggtgcctgcaagacccaaaaactcgggatgcctcatgggagctgatggcatgcctagagctttgctgctgccacttcattatctggaatgatttctggggggcttatcccagaggtagattatactcctcccacctctaccactgccaccaagtcctcctgcctccgctcagggcgagtctgtaggatccccagtcccttccctggtgatctgtaagggccaggcccatgcctgtcctgctcaatgaccagcacacagcaggtgctctgcacaagtgaaggagctgagcttgaatcaggtggtgctgcaagtgtgacccagctcagcccccagaacagacctaccccagatgcagggtccgaggaaggaagccacattttgtccagaacaactgtaatatccagatagggcaagagactcatgccacgtcatatgctggtcgcagtgccaagtcccttctggctcccctttcaataatctcgattacttctggcccatctttcttgttgagtcgagcgccacccccctcccacccatttcccgctctgc

SEQ ID NO: 77980 - DNA, 663 bp, Homo sapiens
atccataggtgaagctcacacattttaaggtctcccgcgatctgaatcaaaaatgtattctttttgcaaattcacttagaactgagttttctacaaattcatggcccaaagacacacggtttgtagaagcaaaggtggatggtgtagacagaggggtctgragggtggcctggtgggcatgcagggggccagacctgtatgtgctgctgcagcctcttcttctcggtttgcatttgacggctgcactcctcctcctcgcccacgcgagcctccagctctgacaccaccagctccagctcctgcttgcgggctgccagcctcccccgcgtctcctcggcctctgcacacagttctgcctctgctcgcaattgctctgccaggcgggcgcgctcctcttccagctggggagtgtgtgggaggttagtggtcagcaggcagtgctcccagggcaacctgcactgggtgcctactgccttgtaacttgctttggcctttaagttctccagggcaggactgaggggcaggaggacacggtgtccccacctcctccccctcaggtccccatctcaggatgagcccacatccccctaatcactaagtcagaatcctggggatgccctccctcacctctcacagccatcagtctgcacccctgctctctct

SEQ ID NO: 77981 - DNA, 1029 bp, Homo sapiens
tatctcaattgagccacaaaaagacagaaataaaaaataaagttgcatattctagaatgtcttataaagagagtgtaagtttggggagggaatgtatgtgtgagagaaagaaagagagagaataaggaggaggagggagaggaagtaaaagcgggaaacaatattgcatcttcatttgttaaatcagagatttcagcctatatagactcctatacttgaatttaaatcattccagcagatcaagtctagggattttgctaatgagtgaataaccacactatcctgaccataaagtttcctcaagtagaatatgtatatattatatgcagagaaatggttcaaagacagagaaaatatatatgttttatagaagacctaaacacaaatctaatttgtacatgattagttcaaatgatgatttttatattgtaagaaattgaagagaattcaaacaggttagttgcacaattgtatggcttaatcattgggagctgttgaacataattcaaactggagatctctctgtartcttgcaattgtttcaattaaagttttgacaactgggaaacagtaaacacaacagcttcctggtgataactgcagctacggccaagagaatctggcctcttcccgttgctatgaacagtccaagcaaaattccagacaatatcagaatggagctagaaagttccatagatgtatacagactgtgctctgttgagctgttgttgcctttgtggttattgtttctctttacatttttctaagtttagatgtaatgtattctcatagccttagattctggcaaactcagtatgccaacaagaagagttttagttctcatttcttttattcatacaatgtttgaagttgcaggagtaaaagaaatttgctgcactgatgagcaaatacatgtggcagtgggtttaggggtggagtaaacccactgccccacttgatgtgaggcttggccttgctacttgtgtagctccatggaatgtgtgcagaaatgatgatggttcagttcca

SEQ ID NO: 77982 - DNA, 929 bp, Homo sapiens
ttctgataccttttttttttttgagacggagtccactgtgtcacccaggctggagtgcagtggggtgattttggctcactgtatcctctgcctcctggattcaagtgattctcctgcctcagcctcctgaatagcggggattacaggcatgtaccacgaagcccaactaatttttgtatttttagtagagatggggtttccctgtattggccaggctggtctcgaactcctgacctcaggtgatctgcctctcttagcctcccaaagtgttgggattatagatgtaagccaccacacccagcctgattacttcttcaggataaatttcaggaagttgcagagcaatgtcatgttgcagcctctaccacctccttcttttcctcctccttccatttttttttgttatctgtaactatctcaagtctgactgctcgccagtcagaggccaaaaacatgagaagtgagatatggtgaaaggaaagcaactttattgattgaatgctagcagatgggagatggccaggcttctgcctcaaataagccatcttagttttttgggccggatgaaggagtttgagagggaaaaggtgtgggagtatgctagagtggtgcaggaggttgcaagtctatgttttattccgatggctatcaagtaatcgcccgttggaagatccggtttgcatcaccttgactttggctcrgtagtggtggactatctgtatctgtaattcctcctaagcagtaggattctgcctctgggtctctctctgcctgatttgtttaaaaattggcccctggaattttaaggcaagcacataattacataagcgagcactgttcactgaaatgcctggtgggaaaggaggaaacagagtttcaaagtatgtttcaaggctgaaagcaagaaaggaaaaaagttttaaaatgca

SEQ ID NO: 77983 - DNA, 785 bp, Homo sapiens
agtcacaataaggtcagccctacccctgaacttttcggtcaccacagccaacaaatcaccctttttctttcaccctctaggttgtgtgagccccagctgctctgtagagggacaaaaggaaaccctcgtacctggaggttgtatggcgagaccacagcaatgtcacgggctggaacaccagcgtccaccagagcctggatgtgcaaactgacgaggcggacttcgcctggagggaaagaaagaacgggtgagcagcacaaggtcgccccaagtgggcatccaccaccaacacgtgtttcgggcacgtttctgtctatcatggccagctgatcctccactcagrtggcttcctgggagctaatcatctgtgtcccagggccccaggaccagccatgcccagctaacttgaatttcacatcagcaatgaaggccttttgactcctatggccgtgcatcctgttcaacgtggaactggggagatgctggtgtcagctgagcaatgacagttcccatcaccagaccagccaggcagagctgggccaccattcaggagaaggccgtaaaatgctgccaggcccatctcacccaggagcggtctgctcaccctggagaaaacgatgctgctcagcctcttgcagtgtggggctccgttttttcacggccatcaacaactgctctcagctcctcccggaattaggcaattaaagtgccttttatttttaaagagctggaggtatgtttaaacaaaaaagctggccatctgcaagcaagctcaccagggttcc

SEQ ID NO: 77984 - DNA, 724 bp, Homo sapiens
agggagcacatcagggggccacagtgcagcactgaggccccacccaacagaaccgacccctcccacgaggaaaaggcttaggtaggggaggacaatgagcacatcaggacatcagaagggagggagcgggcctgacccagctctccagggcaaggccaccctctcttccaaaaagctagcctcagagtcgactttcatgcagaaagcttcactttagcttgctgcgtagaaacaggtgacgcagaggattagccagggcagaaggatggggcggcgggtggtgccgagctactcacctcaggaggtgccttgccacggaagagtgggctgtgagctgcccaaggtacatggtgtctgaggcccagcgcatgatagcctggtgcatgcggtactgcaccgtcagtgtccgcaccaccctcgcgccgtactcctcagccaggcgttccatcaggctgagtgacagtcctgccagcgcagccctgcgcccaggagggagaaagggggaaggcaggcctgagccccagagtccaggtgtgaaccacagsaagtgaggaggacaggccccaaacctcaggacccaactctcccctggattctgacccagaagtaaccaaggggcgggtttggctgaatcacagccccaaaggcacctacatccaatcgccaaggcccgtgaatgttcccttacaggacaacagggacgctgcagctgagatgaagttaa

SEQ ID NO: 77985 - DNA, 678 bp, Homo sapiens
tggccactggtattcacatcttgcataatcccttcccctcaaatgtgggtggggcctgagacttgcttctaatccacagaacaggggaaaggtgatgagatgtgacacccttgataacattacataagacgataacccattgtgctaggagactgtgtctcttgctggcttttaggaagcaagcagccatgttggcaaggcctaagggcaaacagctaagagcgscctccagccaacacccagcaagaacccacagggaactgaatgctgccaacaaccacgtgagcctgaagaaagatcctttccaggcaagtttcagatgagactgcagcccccactgacacctcgatcgcagccttgtgagatcctgagcacagcaccttgttcagccgggcctgggctctccgcccagataaactgtagaataataaacgtgggttgttttcagctgctacctttgtggtactattatcacacaggaacaaaccagaggtctcacaaacacattcctaaaccccaaaagagtggttgacaagattcccacaacagtcacaaggtacacagctctgtaacgggagtgctctctcctggctacaagagagaatgtgcgtcctccacctctgcccaagatggaatagcagggactgcatttactctcccatctcaaataacaacccc

SEQ ID NO: 77986 - DNA, 504 bp, Homo sapiens
cttgagcccaggagtttgagaccagcatgggcaacataatgagaccccgtatctacaaaaaatttaaaaattagcctcgtgtggtggtgcatgcctataatcccagctactggggaggctgaggtgggaggatcgttggagcctaggargttgaggctgcagtgagcagtgatcatgccactgtactccagcctgggagagagagagaccctgtctcaaaaataaacaaacaaaaggtacactttaaatgagtaaatgtatgatatatgaattctatctcaataaagataagtttttttttttttgaagagtaaagagaggtggggaagtaggtgatgggtgtgctagtaggataccaagcaagaaggaacttaccccgtccagcattcagtttcacctctcattttagaagactttacttttcaaaagatctctttgttgaagtataaccaatggtctcctggagctggctcaactgagcttgcaagaaccaatcatatgtct

SEQ ID NO: 77987 - DNA, 504 bp, Homo sapiens
cttgagcccaggagtttgagaccagcatgggcaacataatgagaccccgtatctacaaaaaatttaaaaattagcctcgtgtggtggtgcatgcctataatcccagctactggggaggctgaggtgggaggatcgttggagcctaggaagttgaggctgcagtgagcagtgatcatgccactgtactccagcctgggagagagagagaccctgtctcaaaaataaacaaacaaaaggtacactttaaatgagtaaatgtatgatatatgaattctatctcaataaagrtaagtttttttttttttgaagagtaaagagaggtggggaagtaggtgatgggtgtgctagtaggataccaagcaagaaggaacttaccccgtccagcattcagtttcacctctcattttagaagactttacttttcaaaagatctctttgttgaagtataaccaatggtctcctggagctggctcaactgagcttgcaagaaccaatcatatgtct

SEQ ID NO: 77988 - DNA, 602 bp, Homo sapiens
acagctgtttatctgagctttaattctggtgttcaggagctcaagtgtttgtgtacgggctgctgtgctcacacacagacatgcacactctgctttcttctcwgtcactcacattgtacgtgcaccaagtcaccctgtgtgccagctccacctctagctcccaagtgcacagtggctgtccatgacatgttatgagaaatgctcgctgtggggccctctggcaaatgccttaatttccgaatccggaacttcattgcccttcatggttcacccctccctggtgctgacctaatggtagagggccgggacaggccagctttgaccagcagcagccaagaggcagcagagggttgtggccaggagctccatggctgaaccctgatgtcagggctcaaaattcttgcctccacccttcatgagtgacttgactttttggcacgccacggctcagctgctctgagtatcagtctcctaatctgtgaacggggaaagtaacagtccctgcctctcagtactgctgagagaactgcaatcgtgctgctcaagcgcttggcctggtgctcagcccccgtggaggcctcagtatgatgagctgctggtgg

SEQ ID NO: 77989 - DNA, 1039 bp, Homo sapiens
gacaatatacgataaagtacaatgcacaatayacaaaaaatagaaaaaagagtactatagctcttttagaatttgtccagcaggctttctagttttcccacactaagaaacaaaaaaacctgtagaaacaaatacaaataaatacaataggcaaaatacacttttatattatttaaagtttttaaaatggaaaaagaaaagcatttggccctttgagtatagctgaattcggctcagtgaaacgagggtatggctgggtggcacacgcctgccgtcccagctactcaggaggctcaggtgggaggattgattgagcccaggagtttgagaccaacctgggcaacatagggagacccctgtctctaaacaaaaaataaaaaagaaaatgagggtacagaggaatcccattgtatgtttgatgcactgagggcatcttcggaatgtgctaagttgtcttgatacccagtgggggtgttacctgtgtatgtgtgattatccgagggtctctcatgcttgagtgtgataaccttggagagagtttctggatgtctagttgtctgctgtgagagacagagtggacagagggagacagcctttcttgacctggtgaggccaaaataaataaatagataaataaataaagcagagtctttttggttaccgcagcccctagaattaggccccttctgactttgtcattgttcctgcacgtctcaaatctgcagttgaaggccccatccaggagttgatctgaaagggcttcggcctcctgggcctttggatttgatcccatagtccttgaggccctgcctgagtggacctgtctcagaataaatgaggaataaacgaggtatgacctttgaacgtcccccactgtcccccatgatcaatgtggttggaaaatgcttctccctagataaactcatcattgtcccaacaccttggacacctaaaaccaaaagaagaggaacctgatctttcgttttccctgatcatccccaaatagctgctgggtgaggagggagcatttgattccacc

SEQ ID NO: 77990 - DNA, 1527 bp, Homo sapiens
aaatggttgtggttttatgccactaagcttgaagtcatttgctatgcagcaacagatgcctggaacaggatttggtacctggaagtgaggcactgccgtagcagaacctaacrtgtgtgggaggcgcctgacaccctcagtgagaccgtgcgtgaaagctggcagggccttgaggagactgcgggcgaaggctccagggaaagttgagcgaaacattactggaatctggaggaacagagactctgatatagtggtggacagttgagtgaaactttcatctgtgctaatgtgaaagataaaaaaggtctaattaactgatgactctggctaggattttcaggcagtgttgaaagtgtgtttggcttatttgagccttgcatcctaagatacagatagtgagaaaaaagctaaagaaagaattattctgttttttaagcagaatttggaggagatataaaaagcccaggataatctttccagccaaggaagaattgtcaaagtaataaaaaagccttggggcaaagatcaactccagagcactgtcaggaacacacagtctctgggtaaagatgaagtcaaagctatgactgtgaaagcagtcattaagcatcagaaagatctaagcgggtgcctcaatccttcagacaggcagaagtactcctaaggatcccacaggcatttgttgcagacccactctgttaaacaatcggacttctaaggatcttttccccccaacaaatccacttttatttgttgacttttcattagttgaaacccttgaggggtacagcatcactcagattctgtgtccagtgggcttagcaggaagattgtttcggaatttggcacgaaccttgccactgtttccgtgggccctagttacctttccccagactactctggttttgtttggtttgctaccaggagtcactgtggtgtcctttgctttgtatacataagcacatctcttgcccaaatagaattctgtttcatctcgggcataaaccaccttcaattttaagaactgctgtgtgctccctttgattccagagactgtgcttatagtcagcaaaaatggccttggaccacagccttccagacatatttccttttagaagtcctgctcccagcaggcctccacaggattcaagatggcaggaagagaaagaccttctaaggatcttaaggatattattcctctgcagcctcactgggtacccaagatagagaaggccttgtcttaaagagacttatcagtgtgatttttgtctaatggaataatcctccaataagattcatagagaccaggtgcagtggctcacgcctgtaatcccagcactttcagaagctgtgacaggaggatcacctgaggtcaggagtttgagaccagcctggccaacatggtgaaaccctgtctctactaaaaaatacaaaaattatccaggcttggtggcacatgcctgtaattccagctactcaggaggctgaggcaggagaatcgcttgaacccaggaggcggaggttgca

SEQ ID NO: 77991 - DNA, 1527 bp, Homo sapiens
aaatggttgtggttttatgccactaagcttgaagtcatttgctatgcagcaacagatgcctggaacaggatttggtacctggaagtgaggcactgccgtagcagaacctaacgtgtgtgggaggcgcctgacaccctcagtgagaccgtgcgtgaaagctggcagggccttgaggagactgcgggcgaaggctccagggaaagttgagcgaaacattactggaatctggaggaacagagactctgatatagtggtggacagttgagtgaaactttcatctgtgctaatgtgaaagataaaaaaggtctaattaactgatgactctggctaggattttcaggcagtgttgaaagtgtgtttggcttatttgagccttgcatcctaagatacagatagtgagaaaaaagctaaagaaagaattattctgttttttaagcagaatttggaggagatataaaaagcccaggataatctttccagccaaggaagaattgtcaaagtaataaaaaagscttggggcaaagatcaactccagagcactgtcaggaacacacagtctctgggtaaagatgaagtcaaagctatgactgtgaaagcagtcattaagcatcagaaagatctaagcgggtgcctcaatccttcagacaggcagaagtactcctaaggatcccacaggcatttgttgcagacccactctgttaaacaatcggacttctaaggatcttttccccccaacaaatccacttttatttgttgacttttcattagttgaaacccttgaggggtacagcatcactcagattctgtgtccagtgggcttagcaggaagattgtttcggaatttggcacgaaccttgccactgtttccgtgggccctagttacctttccccagactactctggttttgtttggtttgctaccaggagtcactgtggtgtcctttgctttgtatacataagcacatctcttgcccaaatagaattctgtttcatctcgggcataaaccaccttcaattttaagaactgctgtgtgctccctttgattccagagactgtgcttatagtcagcaaaaatggccttggaccacagccttccagacatatttccttttagaagtcctgctcccagcaggcctccacaggattcaagatggcaggaagagaaagaccttctaaggatcttaaggatattattcctctgcagcctcactgggtacccaagatagagaaggccttgtcttaaagagacttatcagtgtgatttttgtctaatggaataatcctccaataagattcatagagaccaggtgcagtggctcacgcctgtaatcccagcactttcagaagctgtgacaggaggatcacctgaggtcaggagtttgagaccagcctggccaacatggtgaaaccctgtctctactaaaaaatacaaaaattatccaggcttggtggcacatgcctgtaattccagctactcaggaggctgaggcaggagaatcgcttgaacccaggaggcggaggttgca

SEQ ID NO: 77992 - DNA, 1834 bp, Homo sapiens
  misc_feature (1)...(1834): n = A,T,C or G
cgaattaacagagttaagaaaggctagggctttttcagcttgctcaaaatacaacctgagatgaatctctgtgatgaaaggttttccaggagaaagaatcatcaatctcatcatttcccaggagctaaacaggtatgtgtggcaaacactaccagcaatagcaacagcagtagcactttacagcctctgttgcgagaaaggcgaagtgcctagcaaccaaaaggaagcagtcagcctgaaatgtcaccactgagctgctaaaataacccaaaggtttttaccattctagaagaggaaaccttttaagaaagcgttaacatgaaggaaaaaaaagaaaggtaaatctagtttcccctagcgtattcatttcaatagactttccctgtcggcagtaaactaaatttactctgacttcctgggattaagagactgctcttctccagaaatctatttaggtccttgttggttgatctgagggcaagctaaagttcaatgtcaatttacagcacacctttatccactaaccaagatgatcttatctgtaggctgtgttttactggttgaaaaataaggtaataccatccatatcttaataaacagtgacatgccttccttactgttccttctacctgaactctcagttcctactttccctcttacttactgaaattttaacaattttttttagttgtaaaggtattttgtttccatttttaaagctgtgtttattcacgtcaaagcaggcacagctcttatgcataattttttaataatccacttaaacatttaacttgtgttactatcaccttcctaaactgtatataggcacatttttataaaaatccactcaaatgttcatcttgactaaaatgttaccaaaataccaagggttcagtctagatcctactgctggccgcctggaaagataatcactgaaacaagttttgcctaggaagaaggctttaattgggtgctacagctggggagatgaagctcaatctcaaatctatctccctgactgactaaaactaggggtttatatagcagggaagaaatgtaataatgtgcaaaaaaataataactagggaggggcaaagaggcatctggtgaagtgatctggtaattttcagttcttggatacttttttttgagaggcctaaaggtcgtttcctgaggaagaaactcaaataaatacaagtttcaagctttaacaccagaagggtcaatctctatgtttatccaaaaacaactatctatggcactactgggttgatttcaaaaatacctggccaagatagagactctaatatgccaacaagtttacatttcaaagtgtgggtggatgtcccgtgaatttccctcccttgtcaacwctagcacttacagattatacaatgccaggaggaaaaagtgagtatcggtgtggaaaacaataaaaataaagctcatacttttctccacgctactaacttaaaacaaagtaatatattttgtctttttcaggaaaggaatacagtttttaagaacttttcctatgcccagtatatcaggctctctcaattttggaactactgacattccagcctggataaccctgttacgggaagttttcctatgcatttttaagatgtttcacagcatccctagcctccatccaccagatgcagaggcagctccccaccaacacacacccacacccacacatccacacacctcagccccattgtggcaannnnnnnnnnnnnnnnnnnnnnnnnnnnnnnnnnnnnnnnnnnnnnnnnnnnnnnnnnnnnnnnnnnnnnnnnnnnnnnnnnnnnnnnnnnnnnnnnnnnta

SEQ ID NO: 77993 - DNA, 1427 bp, Homo sapiens
ggccttgtggtgtgcgcctgtaatcccagctacccaggaggccgaggcaggagaattgctggaacccaggaggcagaggctgcagtgagccaagatcttgccactgcactccagcctgggcaacagagcaagactctgtctcaaaaataagaagtgggtttgtayttaaaaatgtggtctggcttgcaaatacagatttgaatgatactgacctagaagtcaggagttctcaaccctttttcccagccacatgcttatatgttcctggagatccagtttacctaactaaataatttcagtatgttttttctcatactatggttacaatatgatgcagaaatggggaaaggaagagagaggctgaggtgatgataaaagatacagtttgtatgtttttgccaggaaccagttagaacatttattcaacattctgcttgggcaaaactgacctcctatgggcctctgactgttgtttaactttaccattcctaataaatgataaaatccaggaggggcatgtctcatcaagttcaccagtgtatctatggcagcaagcactgtgcaggcacgcatattacaagcttgataaatttaaatagtatttgtgaacacaaagtcaccctgtatcaaaggacacaaaatttgtaactgtctatacttcaggaatattggtggcctaaaaatctttaccttctttctcctcaaccatttctttaattttttttttttttatgaaaagttttacttaagagtccacactggaaagaagccttgaccatttctttagttgaatctcaggccagtggcctctgtaaagcttgcatgttaataaacagcatgatagtctttacttgcatccctttgttcctccctaaataaatggcaagaaaagacagttccaggagagaaacaatacatgttccaaaacatgctcaactctccaacaggtggtagggcacttactggatgaaagtgcacagtactcactggctcagagcacacagtatggcctgtcctactacacttcattagctgagagggtgtgacagcctcagtgtacagggaaaattttataaacagtgtactagactgagtgtggtggctaatgcctacaatcctaacactttgagaggctgaggaaggaggaacacttaaggccaggagttcaggaccagcctaagcaacacagggaaaacctgtctctaccaaaaagcaaaaaaaaaaaaaaaaaaaaaaaaaaaaaaaaaagcccagtagggtgacacatgcctgtagtagtccccacctactccagaggctgaggtgacgtggaaggatcgcttaaacccaggatgccagggctgcagtgagctatgattaaaccactgtactccagcctggccaacagagggagaccctgtctcaaaacaacaataaaagatagtatc

SEQ ID NO: 77994 - DNA, 837 bp, Homo sapiens
ttttgctagaaatagaaattataaaaatgcagcttaaagaaaaaatggaaatagtaacagaaaatatgcagagagcagcctgtttagattatttaaaactgaaaatagtaaatatgaacagacttttgtcaagcatgacccacacaaaatttgagaacagggcattacaagtttattttgtgaaaatttagctattgatcaaaagagtaaatatgagcaagaaaattattctaatcaaatccacaatttgaatgatttcatatttccaacttcagtcataaaacatatacttttacatatatttttatttggtttttatgaacaaatactgattatggacaaatgttaagaatttttgttgtagtcattaacaggttggtttataacttttaaatgttaaaaaatatatagcttgtgagtctccaactgcacccctatcccaggccctgcaatgctgatggcaggcctgtcataaattgcagcagaggctgttttctggatgaacatggataaaatctgcacactgtcatcagattgttcttccttaaagacggtttttgatcatagaaatcccaaactcagaaggtttctatatatccccattgtctctagttcaaattcctcagactgacaagcaacaatgtccagtttctccagaacctacttttccttccttacttcttgacattctctacccaaattttctactctagtagactggycttccccagggcctcctgcccaggcattgcacagccacgctcatctgcaatggctattcccgcccactccacccatttcaactctcagaccaaggctgcctccttgatgacacct

SEQ ID NO: 77995 - DNA, 1087 bp, Homo sapiens
cgtgtgttgtgtatagataaaaataggtatgtataattattataatatgccttaattcgcttttaaaaagggagaacatgttagagataactatgtaaacatgtgccgttcgcaaagtggctaagtcactctagaatgccaagtgtgggttgacagtgtaagaagggaaggtcggccccagcgggcaatgattcacccagtctcgctaacaaccctcttccctcccagacttgcacagttagggaatagaggaaggaattccacatgaatttcggcttacaacatgtgtttaaaaacttaaagtcttgccaccaaaatatgaaattcatgattttaatattccaccagcatacctctttagtataatgtgaaaaaatgtccgcttttattttcatttgtcttgctatcctttctagtttttgactgtttcttcacaacatggttcacattttgttctcatggtgtttgttgttttgttaccccttaatcatgtgtttctgagacggttgtgccaggcatggctacatgggcaactctggcgtctcaggtggctgctcttggcatgactgtcctgaggacggctgcgtgggggactccggcatctcaggtggctgctctcggtgtggctgtcctgaggacagctgtgtgggggactccggcgtctcaggtggccgctctgggtgtggctgtcccaggcatggctgcgtgggggactctggcatctcaggtggctgctctcagtgtggctgtcccaggcatggctgctcagaggactcttgttcctcaggtgtttattcttcttgtcttagtgaygatttttcttgtgattgtcccatcggtggttctctgtgggcttctatttctactggggtttctagtagtacaggtgtattttcttcctctagaatgtcatatgattctttttcttgttttcagtaaataaaataaaacaaaatcaccaataaatctagtagccacctaagtcaactgaaataaatcataaaaagacaaacattgctgctatatcattgacttagtagtgacagtgataatactaacaaaaatacttttcacatagggtattaca

SEQ ID NO: 77996 - DNA, 981 bp, Homo sapiens
tgcatccagtgacaacttctttaggatcatttggaagagggctgtctacaaataggagaaaaccaccccaagtttttacggctgccaggaaggcaaaggaaatgttccttctcggtgcagtcatatgtccaaagcacacgatctttgatcactactgaggaaagtcgccaagtaaatcctactcggaattgctcagaaacaattttacaaaactcaaaagatcattttatcaggctgaaattatccaccccaagagactgaagaaaggctgtgtttaaatcaaatgccatacaggaagtgagtgagttcggccaacaaagaaagaaatagaaatttgagattctcagaaaagagttacatttagtagtaagcaaagtatctgaggcaaagaaaaatgtagtgaacactcttctagaattgtttggatcttgttctgtctgaaggcgaagagtctgtattcagagttcaaacaaccacccaccgtgagtcaaggtcaatcccaccacagagcccaaatggaccactaagcctctggtcccatggctcccctttaacctgcccagccacatggagtggggtcgcgactacggggtgcagcttcctgctcatgcccatcaggctcaagaagacaagaggaagggctgaacctgtgtggagttcacaaatttcccaagagctggaaccaagaaggagcatctaattccttggcctcatcttaccaatgaggacatggggcccctgcaatgggcctgagtggatacagcccctcgacagcaggtccagggctactggcaggtcttgtggatgcaggcccagtgcttgctctcctctgcaccacactgcagtactaggcatcattttacacctaagcaaaagatcacagaacatcactaatggatgaacaaaaaaaaaaacctccaataaaagcactcrttatttccaggatcacaagaaataccaagtggctaggttgtcacctac

SEQ ID NO: 77997 - DNA, 861 bp, Homo sapiens
attcagtgaaataattttctgcacggccaacatccttatctacagcccagggctgccctcccagcctatatggcactaacattcagatgccctgacggcttcttcacagagggcagccacttccaytccacaacagaagctaagacttagagcggcaagcttcagaagctgacactgacttaatttcacattatgtgtcaataactgataacagccatcaaaagcagaggttttatccaccagccacctaataggaagaggaaaagcagggacgaaaggattctgtgagtggtgagagagaaccgaaggccccgaaacccagagattttctactctgcttggggtggtcttaacgaaaatcataaaaacagcagggaaaatgagcagaagcctggttcaggggagtaaatctctgtagctttacccaaagatattaagaaagaattaaaaaataaaccattgtgattaattttgcttggagcaggctgttatcacaagtcaaaagaggctgtccaaatagacaggaaaagattataggaaccgcgcagcacgaccaggatgtgcttttgaactgggaacatgtgatcaaaaaggcaggtcgggcaggcaactgtgtgctccactctccacgagggcctgccctgcctgctaaactctgtcaccaagtgccagtagctttttgaatgacaatcaataacagttcctcacagagccaagctaatttatgatcataaaatgttaaaaattcatttttaaccattccttagttgccagattgactaaaatcaatgcaaaaaaaaaaaaaaaagaaaaagacatctaatgaagccttacggaatgagaatccagcctgaaaatgct

SEQ ID NO: 77998 - DNA, 817 bp, Homo sapiens
caggctagactggaaccatttcatttccttcttcaggaccctagttgtgatttctaaaattgtcgtgaatacaacaaaacwgcttccatggagcccaccacacgaaaaggcgattggtccatccgtgactgtctcttataaaacgctaatgcaataccgtgtgtttgattaatgaagagtggagcccaccacacgaaaaggcgattggttcatccatgactgcctcttataaaatgccaatgcaataccttgtgttttattcatgaagagcactgcccagagcatcttttctgtttttaagtgaaaatctttctcctattatttgagtccaaatgaatctcctatgtatagagggatacaagctttctacttctagaaccacaaaattttctttttttttgagacagagtctcactctgtggcccaggctggagtgcagtggcgcgatctcggctcctgcaagctctgcctcgcgggttcacgccattctcctgcctcagcctcccgagtagctgggactacaggtgcccaccaccacgcctggctcattttttttatatttttagtagagacggggtttcgccatgttagccaggatggtctcgatctcctgacctcgtgatctgtcctccttggcctcccaaagtgctaggattacaggcatgaaccaccgcgcccggcctagaaccaaataattttctaaaagtttcattgcttaatatttcaccacgacaccacttagcattactaatgaccttagacttcacttttgagactccaatgttgattgctattgaccttgtctcttagagaagca

SEQ ID NO: 77999 - DNA, 817 bp, Homo sapiens
caggctagactggaaccatttcatttccttcttcaggaccctagttgtgatttctaaaattgtcgtgaatacaacaaaactgcttccatggagcccaccacacgaaaaggcgattggtccatccgtgactgtctcttataaaacgctaatgcaataccktgtgtttgattaatgaagagtggagcccaccacacgaaaaggcgattggttcatccatgactgcctcttataaaatgccaatgcaataccttgtgttttattcatgaagagcactgcccagagcatcttttctgtttttaagtgaaaatctttctcctattatttgagtccaaatgaatctcctatgtatagagggatacaagctttctacttctagaaccacaaaattttctttttttttgagacagagtctcactctgtggcccaggctggagtgcagtggcgcgatctcggctcctgcaagctctgcctcgcgggttcacgccattctcctgcctcagcctcccgagtagctgggactacaggtgcccaccaccacgcctggctcattttttttatatttttagtagagacggggtttcgccatgttagccaggatggtctcgatctcctgacctcgtgatctgtcctccttggcctcccaaagtgctaggattacaggcatgaaccaccgcgcccggcctagaaccaaataattttctaaaagtttcattgcttaatatttcaccacgacaccacttagcattactaatgaccttagacttcacttttgagactccaatgttgattgctattgaccttgtctcttagagaagca

SEQ ID NO: 78000 - DNA, 840 bp, Homo sapiens
ttttttaaaccattatcatagctaggaatatcttctgcacttttttaaaccattattatgatagccaggaatattttacaaatatattaattaacaactattaatatttgttatattaagattcaataaagagagagagggacaggaagagagagagggagattgactctgattttggggtgatgattttctcttcctccaagagcatcctatgcagttatattaatatamcaaatattaatatattacaatatattaatgactattaatagaaacaaatgcagtgttcatccacagggttggttgattaacttatgttttaccaatagaatggaatacaatacagctgtgaaaataattagatagactcatataacagaaggatgggagctccaagatgttatattaagtgaaaaaaaatcaaagtgtaacagagaatacaggtatgacatgcgccttttgcataagaatgatcaaaaagatgtacataaaaacaaagaatttagaatgggaaacaaaatggaaggaagtaggaggaacagagcagtgagtcagtagtgaggatgaggcttgaggctttacgccaagctcctgaatgatgtttatgagaaagaatttgacctccctgagaggcagagtagaggtgggggagattaaggatttattttacaacatccttcttgcgatagttgattcctatatttgttttttcatactaggataaagaagatgcaaggctttgtgaagacgttgaaagaaaggtttgtatcaacaacaaatgctgtagttttgcgttttctattctgaagacagacctaacaagagaatccacggatcccc

SEQ ID NO: 78001 - DNA, 601 bp, Homo sapiens
agagaaaaggaaatgcttatatactgttggtggattgcaaattagttgaattactgtggaaagcagtttagagatttctcaaaaaaaaggtaawacagaagcaccattccacataacaaacaaactcacctattctaaataaaatggaaatacaaattaatttattaactcattattaacataattaaacataaatcatctgactcactaaaaatctatactattttattaaaattgcattgaatatatagaatatattgaatatatagtaatacagaaatatatagaaatatatattgaatatatagaaaggttaaaggaaaaaatgaacctgcagagatcagaataggttctataaagcctcagatggtaaatatttttggaatttgcaaaccctttagactcttgttcctactcaactcttccactgtagtacaaaagcagccacagacaataaggtaaactctgtaaaagtaaacaaaatcaacaaactgttagctagactaagttggaaaaagtgagaacagacccactaaataaaatcagaagtgaaagaggagacaaaaaactgagattacagaaacacaaattattacagaat

SEQ ID NO: 78002 - DNA, 629 bp, Homo sapiens
  misc_feature (1)...(629): n = A,T,C or G
aaatacctaatgtagatgacaggttgatgggtgcagcaaaccaccatggctcatgtatacttatgtaacaaacctgcatgttctgcacatgtaccccagaacttaaagtataataaaaaataaaataaaataaataaagggaattttttcttaatttttcttcttagatcggtcaccattaatatatagaaatgcaatgcattttatgtattgcttttgtatcctgcaaattttctgacatcatttattagttataatactttttattgcatatggaatatttagggttttctacatataagatcatgtcatctgtgaatacagacaattttacttcatcttttccaatttagatttctgttacttctctttcttgtctaatttttctagctaggaatcccagtacttcaacaatagtaatattgagggtgggcatcctttnccttataatgtgcatccattaacatagatctataattatttgttacttttgtttttaaaatttataccatatttaaaagtgatttacacacttatattacaatwctacacaataaacctttatcagaaggtttatattttcatatggttttgtgttgctatttatcatcctttttcttcaacttgaa

SEQ ID NO: 78003 - DNA, 882 bp, Homo sapiens
atacttttggatcatatccaaaaggtaattgtatagaccaatatcatagagttataccatgtgttttcttctagtagatttacggtgtcaggtcttacatgtaagcgtttaatccatttctagttgatttttgtatatgttgtaagaaaagggtctaatttcattcttctgcatgtggacatccagtttccccagcaccgtttattgaatgtataagagttcttttctctccacatacttgccaacgtctgtcatttttggtctttgtaataacagccattctacaatggccatattcccatactgtgggttgtttcttcactctgttgattgtttcccttgcctcacagaaactctttagtttaatccagtctcatttgtctatttctgggttttgtttcctgtgcttttggggaataaaatcttttcccagagcattatcctggagagtcatcccgaggttttcttctagcatttttataatttctatagctcctccaaggtcacacacctgaactgagattgtaatggtgatctaactgaaagcctatttatctacctatctgaaagcccaccagctttcacttacaccacaatacacaaatccatcaaatgcatcgtctgctcaattatggagctctcttgggaaatacttgtctgtcaactaagaagaaggataactttgttaaatcttcctagcttttcttgtcagataaatgcctgctttatttgctytcccctactcccacgtctctcttgcttcatatcaaagcaggaaaaaaaggaaaaactgcacaataatatgatggcatcactttgtgccaaagtccagaaatagtcttattctaatccaaagtattgcacaaccattttgcttatgtg

SEQ ID NO: 78004 - DNA, 2446 bp, Homo sapiens
aaaattaaaaaaaaaaaaatcacagaaccagaatcacactgaaaggtaaaagaggagaaatattgatatttattggaactagacaataatttccactattatccttataaattaacacctggtggataaatatttgaaagaaaatggcatcattttcataacttgtgaatggtatcattatatgccatagaaaacaattattcagcttaaaaaccactaaatatatgtaagaaaattcagaaaagtagaaagcaatgtacaaaaatgaatagtttttcaaacaatagtgatgactagtaaggaagcataatggagttggctcttcacatccgtggatttcaccaccctggtttcaaaccaactggagataaaaatgttctggtaaagaaaaaatgaatggttatatctgcattgaacatgcacagttttatcctgtctttccccaaaaaataatgtatagcaatgatctacattggattaggtatgtaagtaatttagaaataatttaaagtatacacaaggatgtaggtcgctttgatgcaactagtttgccattttatataaggaacttgagcaactttagattttggtattattaatgcaagtggatcaaaaattaatacaaaaatgaaatcctaatatgtagaagaaagtataaatctacatatggtttcttagaaaaatatttctattaatattaatcatatctaagctatatttagtacccattatcagctgtgaattattctaattattctagaaaaactaacattaaaaaatgaataatgttgcaaacacatctgctgggggaaaaatcataagtataatgaactgcatgataggcatgacaaagttccttctttttattggcaaagtattgaggcaaaactttaaaactaagatccaatagaaaaatatgcaatttatatggactcaaagttcacaaaaaagacacataaatgccaaaataaacctacggaaagatgctaaactttgaaaaaaccttcatactaaacaataaattgttattactcccttatcaattggcagaaattcctggtgatttgtggggaaaatacaattcccacgcacttcaggcgagaaattaaattggcacaaacacttcagagcacagttgctaatagacatctacatttaaaatgcacattaaactgtgatgagcaattccagcattcagaatttaaattatggatacactttttaaaaatcccaagacatgtcaacaagaatacgcatggaccattgttcctaatagtgaaaacgtaaaagtaacaaaaatgtccgtcaagagtaaagtgattttacaaaaatgatttatcccatgatagcataataaggaacattatgcatgtkttacaaagaatgagccagaattttatgggaagagtttgaaactacatcagtaggaaataaagtcaaggaaaccagatagtgtggctttcacaagatattctgtagatgataatggtcgcatagttatgtgtatcattatttttttcaggaaggatatctgaaaagcagacaccattgatttcctttttctagaagggtgtgtgtgttgtgggtgtcagtgtgtcaatggcaggtgcattgcattaataagatggaaaattttgttgttctccagtcttaacctgtgcgtctactacttttacttacaaaccatctaaagaggtcatcttctattctgtaaaacaattgaacgtcttctactgctccctatattattctataacaaaataagtgtgtgtgtatgtgtttttaagtaggagaaaaaatatatggagtaacccatcagtcactggagagtagaatttaaaaagattggtcagccatgccccagtccagcaaactgaaatttaaacaaagattctgagcagtgcagtccacaaacacctttttgtagggtatagggggctctcatattatggctatttgaaatagtatatttgcagaaaaaaattagtttactataaaatttgtatttttcgatattctggtaaaatcaaccatccctgtgtatgggtttgtgtgacatcagaactgctactgaataatgactaaccttgttgggttggaaatgtactttccattctcctcccctcatattttactgaccattgagtttgaaatatctagaaaccgagacctagaagttggaataggatggtgtgtgtgcatgtatatttgtatctttgcttgtctgtgctccagtgaaggtgcagactagcttggtaggatttattatgtccccacttattaatgattaaaaacaaatccagtattttaattacagaaaagtcaagaatagaaaaatatgagaaatcactattgtcaggtaaattccagaatcctgataaataacagataatattgagttttcctgctcattgtgcacactatttaaattataattttagtttta

SEQ ID NO: 78005 - DNA, 1925 bp, Homo sapiens
tccctgcttgctctttggctgcctgatattctgaatggactgaagtaaaacaaagtgagagagaagaaaaaatacattccactttgtagctgcttattataaggtaggctctctatatttaatatttaggaatatgtttactaaattttcactaagccacttgcactaacaaagactattctaggaatgtgaaagatactatttttttgtaaatgaaatgagataagatcatccaaaatgaaactgctacatgtctactatgggaatagattccacattttgaattagatgaagttttgtttatttaaaaataaycaaatcgcgtttagtcagatgattatcttctaaaacctgtgttcctcataatttgccaaaatcgatgaataatttaatatatctgtattctaatggtttgagatctgccacggatttgaatatattccccttgtagagagcaagttttatcacactgaaaaggatgacttagtttttggttatcttttaacatttctgcccttctgtaacagcaagcgtagcgttaaaggctttcttctatattaatgaataatacaaaatcaatgcagcttgtattattaaatgtgcattttgtgaacattttgttaaagtagacttattccattttctgctgatgggaatttttggccctcggtgctaaaaccttcagctccgctctttaactccacagcaataacaacctcacctccctcatgagattatttcctaacacctttattattcttcctgaagtctgctttgctattaacataaaaccactgagcaagtggttgagtgtcacttctgtcgcttagtaaacgtatgacgcttggaaacttaactaacttcttgggacttaatttcttcctctgtagaagagatgaaaataatagagcccaactccaaacactgatccaaagattagaggagttcatatatgcagtgcccttggaaaaggccccggcatacggggattgctccgtgtgtatttgtggttgatggtactttcatttagtctcctctggaataagtattagtctaaaaaactctaaataaagtctttgtcttctctggaataagtattagtctcctctgaaaatggaaaatcagttattgttatgtctctcatatgaaagagagcaaacagacagtgcctactaaaggcatattgatcttgtgattggttattatgcattctccttcaacagaacatgtggaaagatgggaatactttggaatactctgcttaagaggaattggtatgcattgttaactgtcaaacaacagaggaagaaattgagtccaaagaagttcgtcgagtttcccaggatcatacatttactaagtgagagaactgagattcaaccatcagctcagtggttttatgttaatagcaatgcagatttcaagaagaataaaggtgttcaatcgacaatacattgtcaaacatgtttccatgtaaaatcaactggggttttacactagagacagaggccttaggtctcatttaggttgtttcattaggaccttccatagcatttacttaaactacccaataaaaaacatttacacaactacaatagagttgtatgtttttattaaaatatgtatcataaattgattaacatctgtcatatagatttatacaacacattaagttttatattgcaaatataagaggttttacttttgtcccggaaaagtggatgtagctatccagagtactcattatatctttctagacaaatattctcttaaaataatgagtattttattactgttttagagcaagagagagcgagagagagagacagagcaatgtcaaatttgaacataggacactttggtgactttagtaatccagtaatttctgaaaaagatacattatagagttactgaattcccaatat

SEQ ID NO: 78006 - DNA, 1925 bp, Homo sapiens
tccctgcttgctctttggctgcctgatattctgaatggactgaagtaaaacaaagtgagagagaagaaaaaatacattccactttgtagctgcttattataaggtaggctctctatatttaatatttaggaatatgtttactaaattttcactaagccacttgcactaacaaagactattctaggaatgtgaaagatactatttttttgtaaatgaaatgagataagatcatccaaaatgaaactgctacatgtctactatgggaatagattccacattttgaattagatgaagttttgtttatttaaaaataatcaaaycgcgtttagtcagatgattatcttctaaaacctgtgttcctcataatttgccaaaatcgatgaataatttaatatatctgtattctaatggtttgagatctgccacggatttgaatatattccccttgtagagagcaagttttatcacactgaaaaggatgacttagtttttggttatcttttaacatttctgcccttctgtaacagcaagcgtagcgttaaaggctttcttctatattaatgaataatacaaaatcaatgcagcttgtattattaaatgtgcattttgtgaacattttgttaaagtagacttattccattttctgctgatgggaatttttggccctcggtgctaaaaccttcagctccgctctttaactccacagcaataacaacctcacctccctcatgagattatttcctaacacctttattattcttcctgaagtctgctttgctattaacataaaaccactgagcaagtggttgagtgtcacttctgtcgcttagtaaacgtatgacgcttggaaacttaactaacttcttgggacttaatttcttcctctgtagaagagatgaaaataatagagcccaactccaaacactgatccaaagattagaggagttcatatatgcagtgcccttggaaaaggccccggcatacggggattgctccgtgtgtatttgtggttgatggtactttcatttagtctcctctggaataagtattagtctaaaaaactctaaataaagtctttgtcttctctggaataagtattagtctcctctgaaaatggaaaatcagttattgttatgtctctcatatgaaagagagcaaacagacagtgcctactaaaggcatattgatcttgtgattggttattatgcattctccttcaacagaacatgtggaaagatgggaatactttggaatactctgcttaagaggaattggtatgcattgttaactgtcaaacaacagaggaagaaattgagtccaaagaagttcgtcgagtttcccaggatcatacatttactaagtgagagaactgagattcaaccatcagctcagtggttttatgttaatagcaatgcagatttcaagaagaataaaggtgttcaatcgacaatacattgtcaaacatgtttccatgtaaaatcaactggggttttacactagagacagaggccttaggtctcatttaggttgtttcattaggaccttccatagcatttacttaaactacccaataaaaaacatttacacaactacaatagagttgtatgtttttattaaaatatgtatcataaattgattaacatctgtcatatagatttatacaacacattaagttttatattgcaaatataagaggttttacttttgtcccggaaaagtggatgtagctatccagagtactcattatatctttctagacaaatattctcttaaaataatgagtattttattactgttttagagcaagagagagcgagagagagagacagagcaatgtcaaatttgaacataggacactttggtgactttagtaatccagtaatttctgaaaaagatacattatagagttactgaattcccaatat

SEQ ID NO: 78007 - DNA, 805 bp, Homo sapiens
gcctttcttgttatttgtcactcgattctagtcaatagattatagacggaaaattggcactatgttcataaaaactttctataacctctcctccgtgagctttcctccccctcctcttgacagctagaatgagaaatacgtccagagtaatccccagtgtaacattaagagctttgtattgaagaactacatgtgtttcataattttaacttgaacaaccttggtgagaagggtttgtatccatctatcataaaaaatgttcttcagaaaccttggaatacagcaaatacaattattaaagagtctaaagtttggccgggccccgtggcttacgtctgtaatcccagcactttggaaggccgaggtgggtggatcacttgaggttaggagttcgaggccagcgtggccaagaaggtgaaacccaatcactactaaaatacaaaaattagccagatgtggtggcagacacctataatcccagctactcgggaggctgaggcaggagaatcacttgaacccatgaggaggaggttgcagtgaactgagatcttcccactgcactccagtctggacaacagagtgagactctgtctcaaaaaaaaaaaaaaattctaaggtctaatacaggacctgattgtgaggggcatgctgatctgtttaagccacatcgtcattaagcctgtgacatatatatatrtgtgtgtgtgtgtgtgtgtgtgtgtgtgtgtgtctgtgtgtgtgtatatatggacttcattgctttaattaacatggggcatttttttttccactattcagttaaagt

SEQ ID NO: 78008 - DNA, 1001 bp, Homo sapiens
acaaattytgttctggtttctcaaaatgggtctataggcagggcacagtggctaatgtctataatcccagcactttgggaggccaaggagggtggatcacctgaggttaggagttcaagaccattctggtcaacacggcgaaaccccaactatactaaaaatacaaaaattagccaggcatgttggtgggtgcctgaaatcccagctacctggaaggctgaggcaggagaatcgcttgaatcctggaggtggaggttgcagtgagccgagatcgtgctattgcattccagcctaagcaacagagcaagactccgtctccaaaaaaaaaaaaaaaaagtgtctaccttcatgtaaaaaggactattctataatttagaagacgaaaggacatgcggaaatatcagagacattccaactgaagacccttataaacaagtagaagaaacactaatttgagtccagccaaaattgctgatttacagattgtgaccaaacaaaaaactaaattttgagatgatttgttatagaacattagatactgaaacaaacatgttgaggtaagaatcataatacaaatgtcaaagcacagctggctacttttaagaacagtcatgggttgtttggtacaaaatgatttttcttccaggactactttggtaaagacatatttctaaagctatttggaaaaaaaaatctgttcctgtaaacaaaacattttacatcctgattgatcagtagttctttatgattagtattaacttatatctacagaaacccacttttataggtttctattttttcaattttctttcattaatattttgagtcagtgacaaatggcattagaatacacctactaagcctatgcaaatatttgtgaacagcacttgcattcagttgatatggacctggcaagtccacctttgagttttccttttgttttgaggtagaatgaagtggagcattgaatcttttcactacagtgtttattcttttgttca

SEQ ID NO: 78009 - DNA, 1001 bp, Homo sapiens
acaaattctgttctggtttctcaaaatgggtctataggcagggcacagtggctaatgtctataatcccarcactttgggaggccaaggagggtggatcacctgaggttaggagttcaagaccattctggtcaacacggcgaaaccccaactatactaaaaatacaaaaattagccaggcatgttggtgggtgcctgaaatcccagctacctggaaggctgaggcaggagaatcgcttgaatcctggaggtggaggttgcagtgagccgagatcgtgctattgcattccagcctaagcaacagagcaagactccgtctccaaaaaaaaaaaaaaaaagtgtctaccttcatgtaaaaaggactattctataatttagaagacgaaaggacatgcggaaatatcagagacattccaactgaagacccttataaacaagtagaagaaacactaatttgagtccagccaaaattgctgatttacagattgtgaccaaacaaaaaactaaattttgagatgatttgttatagaacattagatactgaaacaaacatgttgaggtaagaatcataatacaaatgtcaaagcacagctggctacttttaagaacagtcatgggttgtttggtacaaaatgatttttcttccaggactactttggtaaagacatatttctaaagctatttggaaaaaaaaatctgttcctgtaaacaaaacattttacatcctgattgatcagtagttctttatgattagtattaacttatatctacagaaacccacttttataggtttctattttttcaattttctttcattaatattttgagtcagtgacaaatggcattagaatacacctactaagcctatgcaaatatttgtgaacagcacttgcattcagttgatatggacctggcaagtccacctttgagttttccttttgttttgaggtagaatgaagtggagcattgaatcttttcactacagtgtttattcttttgttca

SEQ ID NO: 78010 - DNA, 1001 bp, Homo sapiens
acaaattctgttctggtttctcaaaatgggtctataggcagggcacagtggctaatgtctataatcccagcactttgggaggccaagsagggtggatcacctgaggttaggagttcaagaccattctggtcaacacggcgaaaccccaactatactaaaaatacaaaaattagccaggcatgttggtgggtgcctgaaatcccagctacctggaaggctgaggcaggagaatcgcttgaatcctggaggtggaggttgcagtgagccgagatcgtgctattgcattccagcctaagcaacagagcaagactccgtctccaaaaaaaaaaaaaaaaagtgtctaccttcatgtaaaaaggactattctataatttagaagacgaaaggacatgcggaaatatcagagacattccaactgaagacccttataaacaagtagaagaaacactaatttgagtccagccaaaattgctgatttacagattgtgaccaaacaaaaaactaaattttgagatgatttgttatagaacattagatactgaaacaaacatgttgaggtaagaatcataatacaaatgtcaaagcacagctggctacttttaagaacagtcatgggttgtttggtacaaaatgatttttcttccaggactactttggtaaagacatatttctaaagctatttggaaaaaaaaatctgttcctgtaaacaaaacattttacatcctgattgatcagtagttctttatgattagtattaacttatatctacagaaacccacttttataggtttctattttttcaattttctttcattaatattttgagtcagtgacaaatggcattagaatacacctactaagcctatgcaaatatttgtgaacagcacttgcattcagttgatatggacctggcaagtccacctttgagttttccttttgttttgaggtagaatgaagtggagcattgaatcttttcactacagtgtttattcttttgttca

SEQ ID NO: 78011 - DNA, 1001 bp, Homo sapiens
acaaattctgttctggtttctcaaaatgggtctataggcagggcacagtggctaatgtctataatcccagcactttgggaggccaaggrgggtggatcacctgaggttaggagttcaagaccattctggtcaacacggcgaaaccccaactatactaaaaatacaaaaattagccaggcatgttggtgggtgcctgaaatcccagctacctggaaggctgaggcaggagaatcgcttgaatcctggaggtggaggttgcagtgagccgagatcgtgctattgcattccagcctaagcaacagagcaagactccgtctccaaaaaaaaaaaaaaaaagtgtctaccttcatgtaaaaaggactattctataatttagaagacgaaaggacatgcggaaatatcagagacattccaactgaagacccttataaacaagtagaagaaacactaatttgagtccagccaaaattgctgatttacagattgtgaccaaacaaaaaactaaattttgagatgatttgttatagaacattagatactgaaacaaacatgttgaggtaagaatcataatacaaatgtcaaagcacagctggctacttttaagaacagtcatgggttgtttggtacaaaatgatttttcttccaggactactttggtaaagacatatttctaaagctatttggaaaaaaaaatctgttcctgtaaacaaaacattttacatcctgattgatcagtagttctttatgattagtattaacttatatctacagaaacccacttttataggtttctattttttcaattttctttcattaatattttgagtcagtgacaaatggcattagaatacacctactaagcctatgcaaatatttgtgaacagcacttgcattcagttgatatggacctggcaagtccacctttgagttttccttttgttttgaggtagaatgaagtggagcattgaatcttttcactacagtgtttattcttttgttca

SEQ ID NO: 78012 - DNA, 1001 bp, Homo sapiens
acaaattctgttctggtttctcaaaatgggtctataggcagggcacagtggctaatgtctataatcccagcactttgggaggccaaggagggtggatcacctgaggttaggagttcaagaccattctggtcaacacggcgaaaccccaactatactaaaaatacaaaaattagccaggcatgttggtgggtgcctgaaatcccagctacytggaaggctgaggcaggagaatcgcttgaatcctggaggtggaggttgcagtgagccgagatcgtgctattgcattccagcctaagcaacagagcaagactccgtctccaaaaaaaaaaaaaaaaagtgtctaccttcatgtaaaaaggactattctataatttagaagacgaaaggacatgcggaaatatcagagacattccaactgaagacccttataaacaagtagaagaaacactaatttgagtccagccaaaattgctgatttacagattgtgaccaaacaaaaaactaaattttgagatgatttgttatagaacattagatactgaaacaaacatgttgaggtaagaatcataatacaaatgtcaaagcacagctggctacttttaagaacagtcatgggttgtttggtacaaaatgatttttcttccaggactactttggtaaagacatatttctaaagctatttggaaaaaaaaatctgttcctgtaaacaaaacattttacatcctgattgatcagtagttctttatgattagtattaacttatatctacagaaacccacttttataggtttctattttttcaattttctttcattaatattttgagtcagtgacaaatggcattagaatacacctactaagcctatgcaaatatttgtgaacagcacttgcattcagttgatatggacctggcaagtccacctttgagttttccttttgttttgaggtagaatgaagtggagcattgaatcttttcactacagtgtttattcttttgttca

SEQ ID NO: 78013 - DNA, 1001 bp, Homo sapiens
acaaattctgttctggtttctcaaaatgggtctataggcagggcacagtggctaatgtctataatcccagcactttgggaggccaaggagggtggatcacctgaggttaggagttcaagaccattctggtcaacacggcgaaaccccaactatactaaaaatacaaaaattagccaggcatgttggtgggtgcctgaaatcccagctacctggaaggctgaggcaggagaatcgcttgaatcctggaggtggaggttgcagtgagccgagatcgtgctattgcattccagcctaagcaacagagcaagactccgtctccaaaaaaaaaaaaaaaaagtgtctaccttcatgtaaaaaggactattctataatttagaagacgaaaggacatgcggaaatatcagagacattccaactgaagacccttataaacaagtagaagaaacactaatttgagtccagccaaaattgctgatttacagattgtgaccaaacaaaaaactaaattttgagatgatttgttatagaacattagatactgaaacaaacatgttgaggtaagaatcataatacaaatgtcaaagcacagctggctacttttaagaacagtcatgggttgtttggtacaaaatgatttttcttccaggactactttggtaaagacatatttctaaagctatttggaaaaaaaartctgttcctgtaaacaaaacattttacatcctgattgatcagtagttctttatgattagtattaacttatatctacagaaacccacttttataggtttctattttttcaattttctttcattaatattttgagtcagtgacaaatggcattagaatacacctactaagcctatgcaaatatttgtgaacagcacttgcattcagttgatatggacctggcaagtccacctttgagttttccttttgttttgaggtagaatgaagtggagcattgaatcttttcactacagtgtttattcttttgttca

SEQ ID NO: 78014 - DNA, 742 bp, Homo sapiens
ctacctgggcctctccataggacagctagcttgccttcctcacagtgaatgagaatgtggacaaagtagaagctacagtctttttgtaaacgcaatctcagaagtgatgtcccatcatgtttgtcatattttattcattagaaatgagtcccttgatctgccttatactctaggggagaggattctgcaagaatctggactaccaggcagtgggatcattgggtgccatcttagaggctgccttgcacagcatctaggaggtggctgcagaatggattttggagcaggaacagggggaagggaagcagggaatcagaagggtgtggtccacaagctaatggaaggaggatagaattcaagtataggctaggttatgatgtcrtaacaacaagtcataatctgaggggcttgaaataacaaagatttatttcttcctcatgcagatagtaattacaggctgttttgggctttgtgccatatcatcacacgtgggacatgttcatcacgggtcatctggggattcttctttatgtcattttcactgtgggacctaagctgacaaagcagcttgaatgtggaaaaactccaactgtgcttcccccactatactctcacaaagcaaatctgacaccggatgtgtggggatttctgcccaccagcaagcaagcagtcagttctgcagtgcacaccaactgaatgtcctttaattgaattctgacactgtctacctggagacagcatc

SEQ ID NO: 78015 - DNA, 742 bp, Homo sapiens
ctacctgggcctctccataggacagctagcttgccttcctcacagtgaatgagaatgtggacaaagtagaagctacagtctttttgtaaacgcaatctcagaagtgatgtcccatcatgtttgtcatattttattcattagaaatgagtcccttgatctgccttatactctaggggagaggattctgcaagaatctggactaccaggcagtgggatcattgggtgccatcttagaggctgccttgcacagcatctaggaggtggctgcagaatggattttggagcaggaacagggggaagggaagcagggaatcagaagggtgtggtccacaagctaatggaaggaggatagaattcaagtataggctaggttatgatgtcgtaacaacaagtcataatctgaggggcttgaaataacaaagatttatttcttcctcatgcagatagtarttacaggctgttttgggctttgtgccatatcatcacacgtgggacatgttcatcacgggtcatctggggattcttctttatgtcattttcactgtgggacctaagctgacaaagcagcttgaatgtggaaaaactccaactgtgcttcccccactatactctcacaaagcaaatctgacaccggatgtgtggggatttctgcccaccagcaagcaagcagtcagttctgcagtgcacaccaactgaatgtcctttaattgaattctgacactgtctacctggagacagcatc

SEQ ID NO: 78016 - DNA, 643 bp, Homo sapiens
agttaaaatgaatttttaaaaatttggtgctgaaatagtaaacttcagtctttaggcattcactttggtaaaattcctggaaagcaccaggcatgtcaagtgctataatacaaagttttacaaatagggatttgaagtgattgcttttatggcatggaataatgccaaagaagtctcttgttaaatatggacagtgagccgggcgcggtggctcmtgcctgtaatcccagcactttgggaggcttaggcaggtggatcacgaggttggaagttcgagaccagcttggccaacatggtgaaaccccatttctactaaagatacaaaaattagctaggcatggtggcgcgtgcctgtaatcccagctactctggaggctgaggcaggagaatcacttgaacccgggaggcggaggttgcggtgagctgagatcatgccactgcacttcagccttggcgacagggcgagactccatctcaaaaaaagaaaaaaaaaaggaccagtgtgttcttggagacagagtcttgaagtagaaaatgcttaggcacattcttgatttgcacatgctgacgcctgcatgtgttccgctctgtttggaaatgtatccctagactgtaagcttcatgagggtaaggtcttagtcca

SEQ ID NO: 78017 - DNA, 643 bp, Homo sapiens
agttaaaatgaatttttaaaaatttggtgctgaaatagtaaacttcagtctttaggcattcactttggtaaaattcctggaaagcaccaggcatgtcaagtgctataatacaaagttttacaaatagggatttgaagtgattgcttttatggcatggaataatgccaaagaagtctcttgttaaatatggacagtgagccgggcgcggtggctccygcctgtaatcccagcactttgggaggcttaggcaggtggatcacgaggttggaagttcgagaccagcttggccaacatggtgaaaccccatttctactaaagatacaaaaattagctaggcatggtggcgcgtgcctgtaatcccagctactctggaggctgaggcaggagaatcacttgaacccgggaggcggaggttgcggtgagctgagatcatgccactgcacttcagccttggcgacagggcgagactccatctcaaaaaaagaaaaaaaaaaggaccagtgtgttcttggagacagagtcttgaagtagaaaatgcttaggcacattcttgatttgcacatgctgacgcctgcatgtgttccgctctgtttggaaatgtatccctagactgtaagcttcatgagggtaaggtcttagtcca

SEQ ID NO: 78018 - DNA, 643 bp, Homo sapiens
agttaaaatgaatttttaaaaatttggtgctgaaatagtaaacttcagtctttaggcattcactttggtaaaattcctggaaagcaccaggcatgtcaagtgctataatacaaagttttacaaatagggatttgaagtgattgcttttatggcatggaataatgccaaagaagtctcttgttaaatatggacagtgagccgggcgcggtggctcctgcctgtaatcccagcactttgggaggcytaggcaggtggatcacgaggttggaagttcgagaccagcttggccaacatggtgaaaccccatttctactaaagatacaaaaattagctaggcatggtggcgcgtgcctgtaatcccagctactctggaggctgaggcaggagaatcacttgaacccgggaggcggaggttgcggtgagctgagatcatgccactgcacttcagccttggcgacagggcgagactccatctcaaaaaaagaaaaaaaaaaggaccagtgtgttcttggagacagagtcttgaagtagaaaatgcttaggcacattcttgatttgcacatgctgacgcctgcatgtgttccgctctgtttggaaatgtatccctagactgtaagcttcatgagggtaaggtcttagtcca

SEQ ID NO: 78019 - DNA, 643 bp, Homo sapiens
agttaaaatgaatttttaaaaatttggtgctgaaatagtaaacttcagtctttaggcattcactttggtaaaattcctggaaagcaccaggcatgtcaagtgctataatacaaagttttacaaatagggatttgaagtgattgcttttatggcatggaataatgccaaagaagtctcttgttaaatatggacagtgagccgggcgcggtggctcctgcctgtaatcccagcactttgggaggctwaggcaggtggatcacgaggttggaagttcgagaccagcttggccaacatggtgaaaccccatttctactaaagatacaaaaattagctaggcatggtggcgcgtgcctgtaatcccagctactctggaggctgaggcaggagaatcacttgaacccgggaggcggaggttgcggtgagctgagatcatgccactgcacttcagccttggcgacagggcgagactccatctcaaaaaaagaaaaaaaaaaggaccagtgtgttcttggagacagagtcttgaagtagaaaatgcttaggcacattcttgatttgcacatgctgacgcctgcatgtgttccgctctgtttggaaatgtatccctagactgtaagcttcatgagggtaaggtcttagtcca

SEQ ID NO: 78020 - DNA, 643 bp, Homo sapiens
agttaaaatgaatttttaaaaatttggtgctgaaatagtaaacttcagtctttaggcattcactttggtaaaattcctggaaagcaccaggcatgtcaagtgctataatacaaagttttacaaatagggatttgaagtgattgcttttatggcatggaataatgccaaagaagtctcttgttaaatatggacagtgagccgggcgcggtggctcctgcctgtaatcccagcactttgggaggcttaggcrggtggatcacgaggttggaagttcgagaccagcttggccaacatggtgaaaccccatttctactaaagatacaaaaattagctaggcatggtggcgcgtgcctgtaatcccagctactctggaggctgaggcaggagaatcacttgaacccgggaggcggaggttgcggtgagctgagatcatgccactgcacttcagccttggcgacagggcgagactccatctcaaaaaaagaaaaaaaaaaggaccagtgtgttcttggagacagagtcttgaagtagaaaatgcttaggcacattcttgatttgcacatgctgacgcctgcatgtgttccgctctgtttggaaatgtatccctagactgtaagcttcatgagggtaaggtcttagtcca

SEQ ID NO: 78021 - DNA, 801 bp, Homo sapiens
tggtccccattgtttaagttggatgcacgctaatgtgctgttgcggcattctggacgaatgctgaggagactgtatttgttcatgacatctgatgtgagtcttgaacttgttacatttatttctctgcttttggtcacatcttggtctgatgaccaaacaaggcaactgtgcccttttctagactgatgtctgtttgtcaagcacagttttcacatttttatatttttctctattgttaacaaccccgaagcagaaatgaaagctttttatcacgggaggaggggtatcggcttcacttccatcccattcaccattcactctgaatatctgtggtttgttttaaaccgagtgccagtgyctcttcttggaggtataaatttgcacagggtctggcagacgctgcagacaggatgttgactcttgagtgtcttgactgactaggaggcccaatggcggtgctgcatggctccaggcaatctgtgcctctagccaaggcctccaaaacccaaagttttaaagtgcttgcttaagattttgggggctgattcacctaaagggatctaaaaattgcattttttttcctccaaaggaccaagcacagaagttgtgccagtggtttccctgttaactcctgactggcctgatttttgcttctcagacttataattcctaatcacctggtaggtgccactcgggatggtcttctgcctctggttagtcctgagcttgttttctcactggtgcagcaggaccttagaccaaaatgacctccagcatcctgtgagtcttggatctctgtg

SEQ ID NO: 78022 - DNA, 801 bp, Homo sapiens
tggtccccattgtttaagttggatgcacgctaatgtgctgttgcggcattctggacgaatgctgaggagactgtatttgttcatgacatctgatgtgagtcttgaacttgttacatttatttctctgcttttggtcacatcttggtctgatgaccaaacaaggcaactgtgcccttttctagactgatgtctgtttgtcaagcacagttttcacatttttatatttttctctattgttaacaaccccgaagcagaaatgaaagctttttatcacgggaggaggggtatcggcttcacttccatcccattcaccattcactctgaatatctgtggtttgttttaaaccgagtgccagtgcctcttcttggaggtataaatttgcacagggtctggcagacgctgcagacaggatgttgactcttgagtgtcttgactgactaggaggcccaatggmggtgctgcatggctccaggcaatctgtgcctctagccaaggcctccaaaacccaaagttttaaagtgcttgcttaagattttgggggctgattcacctaaagggatctaaaaattgcattttttttcctccaaaggaccaagcacagaagttgtgccagtggtttccctgttaactcctgactggcctgatttttgcttctcagacttataattcctaatcacctggtaggtgccactcgggatggtcttctgcctctggttagtcctgagcttgttttctcactggtgcagcaggaccttagaccaaaatgacctccagcatcctgtgagtcttggatctctgtg

SEQ ID NO: 78023 - DNA, 801 bp, Homo sapiens
tggtccccattgtttaagttggatgcacgctaatgtgctgttgcggcattctggacgaatgctgaggagactgtatttgttcatgacatctgatgtgagtcttgaacttgttacatttatttctctgcttttggtcacatcttggtctgatgaccaaacaaggcaactgtgcccttttctagactgatgtctgtttgtcaagcacagttttcacatttttatatttttctctattgttaacaaccccgaagcagaaatgaaagctttttatcacgggaggaggggtatcggcttcacttccatcccattcaccattcactctgaatatctgtggtttgttttaaaccgagtgccagtgcctcttcttggaggtataaatttgcacagggtctggcagacgctgcagacaggatgttgactcttgagtgtcttgactgactaggaggcccaatggcggtgctgcatggctccaggcaatctgtgcctctagccaaggcctccaaaacccaaagttttaaagtgcttgcttaagattttgggggctgattcacctaaagggatctaaaaattgcattttttttcctccaaaggaccaagcacwgaagttgtgccagtggtttccctgttaactcctgactggcctgatttttgcttctcagacttataattcctaatcacctggtaggtgccactcgggatggtcttctgcctctggttagtcctgagcttgttttctcactggtgcagcaggaccttagaccaaaatgacctccagcatcctgtgagtcttggatctctgtg

SEQ ID NO: 78024 - DNA, 1060 bp, Homo sapiens
gtcactgattttggttgccagtaaagtcagggacaggataaaaatgcccactattataatatggacatgatattggaggaattagccaatgaaattaaatgagagcaaataaggrcataagaattagagaagaagaggtaaatgtacttctatttgaaaatgatacgattctctatcacagaaactcaagaaaacccatgaattatctactacaatccataattaagcactgacctatgttctaaaatcatatcattttatcccagatcccccaaaattaacaaaaaattaccatttccaaattgttttgtagcaggcgaattgaatttgacataatacatcatattttgctgatgatcctcattgcttatattcttatagtttgctgtggcatgcaaactttgaacatcaaaataataccaatacagaaagtgctgtttcatatatatatgaaagttaagattttgaggcttttgaaaattcaatgatcctaaagttagttttagaacagatataaaattgtttggatttatgtacaagtgtatagagttttatgtaaggtaagtagaaggaaaatacttttttcttcagattgatgcttagaccaagaaattcttaagatgtatgatatctgtagcttcatgtgcactagttgaaagagccttgttaccttgtcaacttcttgtcctaaattcacgctaacagtatgaactttgaattttgctcagatgtctgtacaagaaaaaaggcatgtatggtattcaacataattttttcctgctgtttatataaatccgaaacaagagtagagatatcataagataatattatgagaattaggtagaacttgatgaattattttgagttacttctaataaattatttgtaaaatcttaaactcattctaaaatacacaaacattaaggtcatctgtttatagtagacagataatcaggaaaattcaaatgcaaataatcatctctttattaactatctattaaatacaacattctattttagctattttctgcagttacttgatttagctaaaggcacaaga

SEQ ID NO: 78025 - DNA, 1060 bp, Homo sapiens
gtcactgattttggttgccagtaaagtcagggacaggataaaaatgcccactattataatatggacatgatattggaggaattagccaatgaaattaaatgagagcaaataaggacataagaattagagaagaagaggtaaatgtacttctatttgaaaatgatacgattctctatcacagaaactcaagaaaacccatgaattatctactacaatccataattaagcactgacctatgttctaaaatcatatcattttatcccagatcccccaaaattaacaaaaaattaccatttccaaattgttttgtagcaggcgaattgaatttgacataatacatcatattttgctgatgatcctcattgcttatattcttatagtttgctgtggcatgcaaactttgaacatcaaaataataccaatacagaaagtgctgtttcatatatatatgaaagttaagattttgaggcttttgaaaattcaatgatcctaaagttagttttagaacagatataaaattgtttggatttatgtacaagtgtatagagttttatgtaaggtaagtagaaggaaaatacttttttcttcagattgatgcttagaccaagaaattcttaagatgtatgatatctgtagcttcatgtgcactagttgaaagagccttgttaccttgtcaacttcttgtcctaaattcaygctaacagtatgaactttgaattttgctcagatgtctgtacaagaaaaaaggcatgtatggtattcaacataattttttcctgctgtttatataaatccgaaacaagagtagagatatcataagataatattatgagaattaggtagaacttgatgaattattttgagttacttctaataaattatttgtaaaatcttaaactcattctaaaatacacaaacattaaggtcatctgtttatagtagacagataatcaggaaaattcaaatgcaaataatcatctctttattaactatctattaaatacaacattctattttagctattttctgcagttacttgatttagctaaaggcacaaga

SEQ ID NO: 78026 - DNA, 642 bp, Homo sapiens
aatttggaaactgtaacacaagtagcattcctaatgtcttccctcagttactctaggtcccaagtagccatgtagcacccaggaggaacttgcaggccagggcctgtctgagtccatcaggacagaagacaaagcagtaaagactatacctggaggacccaactcctcccagaatagataggaagcaaaacagggaaagcagaggaagaagggggccatatagggcttgattctggcctgtagctgctggtctatgcactaagaacatgtctccagacctcatcatgactgcctatctagacccctgaatccagagactctaaaccaaagacataagctcacggtcaaatcaagcaagaatctaattatatttcactgataattttgaaaccatttctattttatcaacaatttcaaaactaaatttatttaccaaataycacatatacataacacatggagacatacaaacataagaaacagatcttatagttctcataaaggattttcatttgatggcttttaaactttttttttcttttccgcatttggtctatcagtcttccaattattggttttattgccctaagcaattgttaactaggtgtgatggttaatattgagtgccaacttgattgaagg

SEQ ID NO: 78027 - DNA, 711 bp, Homo sapiens
tttcattttatttccaaatttgagatttatatttcatgttttccagaagaaaagaactaatcaaagtgatttgtcaaagttgatacaaccatcactagcagaacaatgtttgtaacctagactcccagcagcaaaccagagagcaatgtgggagctgaggggctgcctgaagccacctcgagaaaggcctgcaggaagctgagctacatatcaaacaggattccctgcttccatcagtgaccattttccttrtaatgtaatggaagtgcagaatatttattattctcttaaacattttgaaaaacaaattcaaatgaaaatcaccaggagcatttaattttagtaagataaatacttctaaaatttcttcaggaactaaatttctaaagataaaaagcacaagatttggtttacaatttataattctttaattctaactgaaatataacatgctaaatattccaacaagctacaattttctcaaaaaaagttaatttttcagcataggagaagagagatggatgaatatatatgggtatttgaacgaagcacttcaaatcatttgttgtgtcaagaaaaagcagtcaaactctgcaaaatgtttgaagggatttattctgagcctaatatgagtgaccaaggcctgaggcacagtctcaagatgtcctgagaacatgtgcccaaagtggttgggttacagcttaattttat

SEQ ID NO: 78028 - DNA, 939 bp, Homo sapiens
catatatctgagggaagaacaatttagaaagaggcaatggtagatgcaattagtaactgagcagccaaatgtttggtgggtttgaggagcagcaaaaaggcctgtggctagagcagttctctagtttgagagtggtaggagagatgtggtaagaagccagaagttgctcagttaggatttgtgtctcacattaacaactttggatttattttgagtgtgrtggggcagcacattaaatggaattaatattaatagcacttaatgtaacttgaagtattaatactgaaatattttcttttgacaatttttgcgaaatattctaggatctccttttactgtaatttcaaagaagttgtgaatatgctttttgtcataccaacgcttatattatacctatgaaaaggctttttcctatacctgttcctctatacagatttgtttgctttgagttttgttttgttttttttttggctatcaattttatgacttggaattcattataataattcacatacccttcatttgttttcccgccattgtaggaaaagtttacacaattaaaaatggctttaagagaattccatgtaaaagacattctgggtttcagaggaaatgttatcgaaaaagggtcttgatccagaccccaaaagaaggttcttgaacctcgcacaagaaagaatctgggcgagtccacagagtaaagtgaaagcaagtttattaagaaagtaaagggatgaaagaatggttactccattatttcttgattatgtgctaaacaacggatggattattcatgagatttccgggaaaggggcagggatttcccacaactggggtttttttcctcctttagaccctgtagggtgacttcaggatattgccacgacatttgtaaactgtcatggtgctggtgggagtgtcttttagtatgctaatgca

SEQ ID NO: 78029 - DNA, 723 bp, Homo sapiens
tgctgtctagggtgctgtgtgagccatctcactgcggccactgctcctggcacttgctgatggctatagcccagatggccatatcaagggcacagtcctttaacattcctaaagccatgtgggggcctgctgttcctggaactgtctatctctgctgtatactggaaagctggatgcctgtttcccccaaggtctagagggtccctctatttaagctcaactgagcactggagtcaggccctgttatcccagctcatagtgcactttgcctacagtctaamagtagtgattctacgtattatggtattagtatatcacaagcacaatagacctagttcccacaggccccttggtagtgctgaggtatgttattgccagcacacatgcacacacacacacacacacacacaccaggttatagaaccttgatgtgggccgacctcctgggcccaggagctgtttgtaggtaaaataaatgcaaatgcaatcaatgcaaacaaaaaaaaaaaagaaggaatggagtctttggaaaaagcagttgtttcacgaaaatgcatttcctcacagaagaatcaaaaagcatttgacatgtttgatctgtagataagaatatttggctagctctttaaatgccttgtttgtctacctctgctagaatcaagttttataaaattcattttagctttaatataattagaatgatgtctttatagtgctcctgtt

SEQ ID NO: 78030 - DNA, 1188 bp, Homo sapiens
tttttaatgaaggtttctacttacatctgaccacacctcattcaccatttaagaacatcaatgtgcttggggcatgcatgtttattttatatactgttactctaagctgtataggtcactaaatgtctcttagcttttttattgttcaaattacaaataccttgggccattccatttttcatatttgtgctattcatccatctgtagccccttggaatttctaaagcccatgtgactcagaatcatagccaggtttgagaagaactagaatttattgaatatcttggtataataataatcctacttattaactaaaatctctttattaactggcaccagttaatggcctgaaataatggaaatttttcaaaatacatcccatttgtgcacagatactagagcagtctttaaatagaatatgtcttaacaccacaactgaattcacagtagttatcactcctgtgcatcttctatgctccaagttgtttatgaacatgaatctctaatctttagaaatgccatccaaaggactataaatcatgctgctataaagacacatgcacacgtatgtttattgcggcactattcacaatagcaaagacttggaaccaacccaaatgtccaacaatgatagactggattaagaaaatgtggcacatatacaccatggaatactatgcagccataaaaaatgatgagttcatgtcctttgtagggacatggatgaaattggaaatcatcattctcagtaaactatcgcaagaacaaaaaaccaaacaccgcatattctcaytcataggtgggaattgaacaatgagatcacatggacacaggaaggggaacatcacactctggggactgttgtgtggtcgggggaggggggagggatagctttgggagatatacctgatgctagatgacgagttagtgggtgcagcgcaccagcgtggcacatgtatacatatgtaactaacctgcacaatgtgcacatgtaccctaaaacttaaagtataataataaaagaaaaaaaaaagaaaaaaaagaaatgccatccttggtgtgagatggcactcaacatcctagcactaggacctgttctttgaattgatttctagatatgatgtagcacacactgttggttatttcctcaacactcactaccctctcctttctgatgtgttggttaca

SEQ ID NO: 78031 - DNA, 2518 bp, Homo sapiens
tgtagaaagcagggtcttaggctgggattgaaacaagggtggccactggaccagactagtttggggcagccagcaaaggcagccaatcctgggattggacacatgtatgagatggtcctatctgaggagctctgcccgggagactacttcaagcaagtttgaatgaggagccagaggaagagccagctgtcagtagggagaagaaagtgatgtcgcacacaaagatacacagggccagagtaggaggcaccctagcaagagagcacgagaatggagatcttgacatcttgtaactgaggagggtgacaaaactactcagatctgagacctgtcttggatcttgaaggggagggggcaggctgcccttggtttctatgagattcttcacctgtctcttacccccatagttatgttaataacaaactccattacttaagtggtttgaaggaatttctatcccttgcaaccaaaagaacataacaaatgtcaatcttggtcttagtgcatatgaactggaaccatgtgggaaaatgtaatttaccaaaccacacagaggagaaagtctcttccaggggacacagctgatgcaggaataaagacacagaaggccaaggtgagtccagagagtggtgggaaaatcagtgtgaccagagggaaggatgaaggaggatgacagactgtgagggtggaatagcaggatccagattgtcgggggtctgcttgtcatgctgatgcttggacaagatgcttaagcagcagggaggatgggtacatgatcagattcacctctgctcgttcccttcaggttacaaagagcagttaatgttggtaaagatacacactgagaagaaggccaagaatgtatcacatcagctgcatattcaggtctcatggagaaacagaatgtcagtcagggcacagttatagctctagggaatttaaattggggctttaaaaacagtattttaaattctaaatgatgccattttgcttttcacaacttggcattccaatcacagaattgccctcttgcaccgttttcctacttgaagtttccagggcttgaataaaagacgtgtaaggaatattttcaaattgtctttcacacttaaattcaaatgttcatgcttaatgaaccacagaccactgatctaaaccagagagcattaattgttctagggccagtgtgaagtcagcattagtgtgaggcagggaattcatttgaccacactatttaaattacaggatgtttgtccttcatgaagcatggcaagaaaggcctgggtaatatgtggtaattaaaataatcataaaaatgttttcttcattttctagttagtaagcaccatggcttataaagactgaatcactgtgatgtgatgggcttctcatttttatgatcctacaggaacaattttaaaaacatagtaaactttaagggctagagaaaaaaatatgtgatctgtattgggccctaaaagcttcatttcataagctttaaaggaaaacactcttaaaaaataattcgatctaatgtctcaaacaagggcaatacatacagcaggttgctttcccactgtagtttctataatgaaaattgtttataacttataaaaaatcgctgtttgcaaacactcccacagtgctggtcagtgttgtaaattggtgcacactttctggaggaccatttgatgatgtgtaccagagaccttataaatgatcacatactttaacttagacattctacctgtaggaatagtatcctagggatcctaatcagagaagtttcaagattgttatccaaggatgtttataacagcattatttatgctagagccaacttaaagcaacaaaaaggtcgaaatatagggaacttgtcaaataaatgatgacagagtgatacgatgaatgttaagaagtcataaaaatgttgtttcaaagaatatttaatgtcatggaaaattacaacacaactttgagaaaagaaggacataaaacaatgcatatgcatatatatacatacataataaagtttttaatatgcatttatatattttaaaaaatgctttaaaagaaaatctggaagaaaataacaccaagttgaaataggaaataatcaaaatgttaagagcatttatctgttcacagtaggattatgtgttttaatattttctttttaaatttccaaatacttatcaatgtattatatgctattaataatcagaaaaaaagctatttaagccacatacatatatatatataaatacacacacatatatataaaaacacacacacgtgtgtgtgtgtgtrtatatatatatatatatatatatatatatatatatacatatatatattttttttagatggagtctcgcgctatcgcccaggctggagtgcagtggcacgatcttggctcactcctacctcagcctcctgtatagctggaattataggcacttgccaccacgcccagctaatttttgtatttttagtagagacggggtttcaccatgtt

SEQ ID NO: 78032 - DNA, 184 bp, Homo sapiens
attaaataatatggcaataaattaatattaataatggccagaaaagaaatgaagctagttaaaacttttmtttaactttgtgtaaactatatgtcaaaaagtaaaaagtaaattttaataaatgtaatatttgtttaataaaaaaagagtctgcagaagatacagtataggtaattactaaatc

SEQ ID NO: 78033 - DNA, 606 bp, Homo sapiens
aattagaattaggatccyaaacaacaacttcctaggaggaaaaaaaaaaaaaaagccaagaccacttcctgaaaaccgtcatcagccatctttaactttgtagttctcattcaccattatgtgtccggaattggtggcttcttggtctcactgacttcaagaatgaagctgcagaccctcgtggtgagtgttacagttcttaaaggcggagtgtccggagtttgttccttctggtgggttcctggtctcgctggctcaggagtgaagctgcagaccttcctggtgagtgttacagctcataaaggcagcgtggacccaaagagcaaaagaacaaagcttccgcagtgtggaaggggaccaagctggttgccactgctggctcgagcagcctgcttttattttcttatctggccccacctgcatcctgctgatgggtctgttttgacagggtcacaacagctgagtggtctgttttgacagggcgctgattggtgcgtttacaatacctgagctagatacaaaggttctccacgtccccaccagactagctagatacagagtgtccattaggtgcattcacaaaccctgagctagacacacggtgct

SEQ ID NO: 78034 - DNA, 1481 bp, Homo sapiens
taaattaaaccaataattatgtattgaatacattaactggcaatttttttctaagctgttacattttcaaatatgatgtaatatgttctctaaaagttatgtatatttttgggtggtttgttgctgtgatcttcaacattaacacttccttgacatagttattttcctagtcacttctaactcactttctgcttggaaactctgtcaaaacatctttctaaaatgcttcacatccccctttaccttttgctgatgggtgacctaatctcctaagttacagaaaaagtaaatgcctcttagcacctataacttcagtccactaacctatagctgcagagatcttcctgaatggaaaaattcttcatgttaggacctttcagttatgtcgcattgtgtttatagaaagcttttttgcatgtgctatagatcgtgctatggatgggattatgaaatacttcttcaaactaccttcttcctttctcaattgtattacaaagactgcatcattaaacattaagaatcctacctcccttgcagctatatatcaacataatattggccatgcaaattattggggaagaataagacttttttcttcccaaataatgatatagatacttaggtagaggaggttgctctyggcataactcctaatgatacaaggcaaagtataatatttataacattaatacatattagacacaaaggattaaaatttccctagtactctgttaatgtatgtatatgccatatctccctactattagaaaaatcatagaaggtagaattattatttcagttttatacatccaaaaacatatatttgaaaagaagtttagtgcctggcccaagcgcacatatctaataagtaacaaacttggacacatactaagaacaatatgagccccaaatccatatgtttggatactatcaagcttcactatgctttacaagaccctttattaatagcccacttctaacctactcggttttcatctcactcctgtttctattacttttctattttaaggtaatatggcacatctctctatcactttaagacactatactctttgatttatttgggctttggctgataatctctgttcttcttcacgtctttcatttctatcttgtgaatgtcctgctaagtttcaaatggccttaccacttagtttgcttagttttcattattttgtactcccacatactctagttcttctatcagggtgtttattattaaaaatgtattttatgtcaaagcataagaggctatctcttgacacccaatatgtgctctgtctcgtgtatgtttctataaaaacgtctagcccacatgagcagaggatgataggctggctcgaaggaaagaaaagtgagcctgtagacttgggatttaatctccaactaagatagtaacaatgtttcagtttattttttatgcagaaattaaatatattgcacaaaaactctatttagtt

SEQ ID NO: 78035 - DNA, 2567 bp, Homo sapiens
tagcagagtactaagtcagcatttatatagtttaaacaagttctccatgtaaattgtccacttgtataggtggttcaagtcagtgttgtctgtgctgtaatgagcactctgtggggaaaaggttaaaagaaaggtctcaataagtagtagccattaaacatttattaatattatcagattgcatccagattagacaaattatactaaaatgcttttgccagagaaaaaacctgtcaatataatttacagaaataataatttgtgtctcaaattccttctattaatatccaataattctaaaaatatgatcaaggtatactgaaatatatttaataaaattaaacacacattgcatttaaaataataagtaaattaggaatagggaaatacgtcttaacaaagagccaaaattgtgtttagtgctatatgaccaatagctttctcactgtactctgaacaaaagataagtgtgcccaataggaatgctctcacttaacttctttgtggaccttatacaacaggaacatagaataatgaaaaaagaagaagaggtaaatatttaaatttagcagtctaaattacaattatttcatgtggcatgattgctaagttggatggcctgagctaaaccatgggaaaatgattcaaaattataagaacatttctttctttaaaaaatgtaatattcaaaaattaataattttattacatacacaaaagatttttattctagaaatatgtgaggaaatcccatttataacattaacaatactaacaagtactaaaatatctctaggatgtatacatagaaacacacacacaaatctactcagtgacattaaaattaataaaagaatattccctaagtcacatggaaagttactaatataaagatgccaattccctccaccactcaaattattataatgtttaataatgttaatgatgataacgataagaatatattacacacttactgagcttccactaagtacctatggctgaaactgataaattgtctcatcacatctattcttgcaactttacctctatgctaaaaatgaacacatttctgtctacctggaatrtcgtcatagcatttctttaacctagaatgaaagcataagtaatgtgctaaacttcaaggtcattttataaaacagaaaacattgtacccaggctgcaaaatggcaacaactgcagagaggaaagacatgcattatggacagtggagccaagtgctcctggaatagagtcatccaccagataattttcaactgttacatgtgaaagaggaagtttactatcctatgtaaaccaattaattcctaaggcagcatatcttgactctcaattttaattatgttttgagggagaagaatgagagttggtttatgtcagaaaataattcgagcaatcaagacacatgtcataagacatgtggtggactcttacatacactcctacactcacatacctataagtgttttgtcttgatatcatgggaagtgaacttgcagattcaacttctccaaagtagaataattgtttccaattttctatataactgacagagttttcacatttcagtagggcttatttcagattgacacaacttattaatcactcaaaatttaacaaaagatctaaaaatgtaaggatatttccaggtaactgatgggttaatggttacaaaagccgtcttctcagagtactcatggcacaaaaaacaccagttgaacacttgctatccttctcccaaaatgagataatcaccaatgttaaaaaatattctccaaggaagttgcaagaaaaaaaaatgccaagcaagataaatgctgatgaagatcacccaagtggaagaaatgttgacttatttgctattccactgatagttaaaaacgaacagcatgacctattttgtatctgataattccagaagtggaagaagaagtgaagtagtcacgatctgccccctcatccctagtgtggaaaataaaatatcatttgtctttctattttctatagcaacgaaatcctcccaaatgtatcatggtaatagaacaagtccttaaaataaaggttaaaaatgttccaaatgtatctgtattttatccacataagaattattataacaactagtaacaggaaatgtgtaccaatactaattattggagcaataaaatattactggttatatgtaatcatactcagtcatgtttcactaataagaaaaacaaaaataatatacagttaaaaatattatcttgtctttcaactgaccaggaaaactcaggctctagctctgcttaaaatccctgttggagaaggtaatcgtcatcccacaactcttagcctttgttgtaaatgcagaaatttttaaaatttattttataagaaaattagtagaaaatatgtatcctgttctttttctagtgcaacacacaatatatatctaataacccttagatgcatacagcatgactttcaagaccatgttcaatatagaaaccaagcagtagtatttcaattgaaattcacagaaaaatttttttgttacagtaaaa

SEQ ID NO: 78036 - DNA, 960 bp, Homo sapiens
aatgtatctctgtcattaagtgagacatgattttatatatataattcagagataatgaatgttgagacataaaaaagattttactttaggccaactctcctgaaaaagtggtaggtgtatatgatctccgcataaagtgaaaaatatggtttctgctgaccagaggttagactgtggcaaagactgcttttgctcaaaatctattatcccttccgaaatgtatagagctgtctggtaagtaacttctcagctaaatcagtttcccctatgctgaactctctatcctcttataattggtgtggccatgttacttgttattaccagcagaatggaagcagacattatatgtatttcttccaggccaagaggttatgtttttttaaaattccatcttcttcattctctttcctacatgttttaagaggtttctgggmtcctaggtatggtgatgatacaaaaatggaagaaacctgggtatttgaatcactgtgtggaaaggacatgttcattaacataagcacccatttggactgtcttaagagtgagacaaacttctatgtgtttgaactactaccttttgtggcatatctgtttcagaaataaagctccaacaattaaacctttctttactatacctgacaaaacatatgagtaaattaaaagatgactttctaaatggatgataaatcaatgttttacaatatcctcccacttctgcatatttatagacctaccaaacctatatatgtatatattgaaaacctgtttttatatattctatagtcatatttctatacctcagtgttatatagagtaatagcaagaaatattagcatgaccacaataaagacacatttttcccctaatagtcatataaagacatagattcactaaataatattggaattatccaaattatttgtgatgatcttgctacctaaattgcataacctacaaaca

SEQ ID NO: 78037 - DNA, 927 bp, Homo sapiens
ttcattgacctcctttagttttacaggaggctggaaacgttattatttagataggcctattttcatgcaaaataaaaatcagttacatgtctttttctccacgcatctgatactgtcttgaaagaaacacctcccrtggcatctgtccagaaaatgttctcctgataccacacactgcctgtggtgaatatgattttaattttctatgagtaatcatatatatttttaccatctttcctttaatttttttcagttattgatgtacatgtgttagtttgtgtattattgtgcatgataaataaaatgcctaagagcttaactatgttaggtaatataataagtcaactttttcccacaaaattagtaaatattaaggcaattagacattcagtatatatttattgaatttgaattaatcaactaatgctaatgctttatattaaaaacctgggattttttttttcagtggcaatacacatttatttctaacttgaaagtgaatatatgggactgtgtttttatctgaacaaatttccaagtatatattaaccagttaagcaattctaccattcccttctctccatgattgaatttattttagaacaagttttgagttccttttgaatgtgactgatgttagaagtttgaatctaaatagagagctttcttggaaacaaggacatgtttagtatgtcctttatagtgatgaatatctttaaaaaaacatctgtcataagttagctaaattattatattccatcttagagaaatgtcatgctgaggtaactttttttaaatgaagtcatttcttagatatccgtgctgaacttattttcaatgactaaaattttaaaaagtattcattccagaaatgacccaaactcctttgaataaaattactaaaatctcactagctgggaacatgca

SEQ ID NO: 78038 - DNA, 927 bp, Homo sapiens
ttcattgacctcctttagttttacaggaggctggaaacgttattatttagataggcctattttcatgcaaaataaaaatcagttacatgtctttttctccacgcatctgatactgtcttgaaagaaacacctcccatggcatctgtccagaaaatgttctcctgataccacacactgcctgtggtgaatatgattttaattttctatgagtaatcatatatatttttaccatctttcctttaatttttttcagttattgatgtacatgtgttagtttgtgtattattgtgcatgataaataaaatgcctaagagcttaactatgttaggtaatataataagtcaactttttcccacaaaattagtaaatattaaggcaattagacattcagtatatatttattgaatttgaattaatcaactaatgctaatgctttatattaaaaacctgggattttttttttcagtggcaatacacatttatttctaacttgaaagtgaatatatgggactgtgtttttatctgaacaaatttccaagtatatattaaccagttaagcaattctaccattcccttctctccatgattgaatttattttagaacaagttttgagttccttttgaatgtgactgatgttagaagtttgaatctaaatagagagctttcttggaaacaaggacatgtttagtatgtcctttatagtgatgaatatctttaaaaaaacatctgtcataagttagctaaattattatattccatcttagagaaatgtcatgctgaggtractttttttaaatgaagtcatttcttagatatccgtgctgaacttattttcaatgactaaaattttaaaaagtattcattccagaaatgacccaaactcctttgaataaaattactaaaatctcactagctgggaacatgca

SEQ ID NO: 78039 - DNA, 499 bp, Homo sapiens
ggctagcattttagtcaaatcaatgtggtatggttttagactatgaggcagaattcagaaaagaaagcagagaggaaaagttatccaaggccattttagtatcaaggctgagaagaaaatcatatggattatagctgggagttagggggaagtgtagaatcacacctaaagtcatgttaatggggagataatgatcttgagataaccaagccaggtctcagactccacctgaaccaagtctcaagtgttccttgggctaaaagctctaatagatggagactttctatttctatagcaatgggaactatagataaatatagttgtcagtgtcaggtaaaaagtgtgaggagagggtggctttcagaagcagacagactttaggatastacctgaaacaacttcaaagttgcaaagccacaaggacatcatcatgttattttgacaatatttgctaaatctgtttatggcctgttatcatgccatatgccagacactgtgc

SEQ ID NO: 78040 - DNA, 596 bp, Homo sapiens
actgaggtaagagaatgcagtcaatatgataaaaaatgttttgctctctactgaaattccagtatcatttttcacagaaataggaaaaaaatcctaaaattcacatggaaccacaaaaaaaaccccaaatagccaaagcaattctgaaaaaaaaaagttggaaacatgaaacttcctgatttaaatttatattacaaagttatagtaaccaacacagtctgatactggcataaaaacagacacatagaccagtggaatcaaatacagagtcccaaaataaatccaaacacagataatcaacgaactttttttttttttttgagacagagtctcgctctgtcrcccaggctggagtgcattggcatgatctcagctaactgcaacctccgcctcctggtgcaagtgattctcatgcttcaacctcccgagtagctgggattacaggtgcccaccaccacatccggctaatttttgtatttttagtagggatgagattttaccatgttggccaagctgatctcaaactcctgacctcaggtgatctgcccacctcagcctcccaaagtgctgggattacgggtgtgagccactgcacc

SEQ ID NO: 78041 - DNA, 596 bp, Homo sapiens
actgaggtaagagaatgcagtcaatatgataaaaaatgttttgctctctactgaaattccagtatcatttttcacagaaataggaaaaaaatcctaaaattcacatggaaccacaaaaaaaaccccaaatagccaaagcaattctgaaaaaaaaaagttggaaacatgaaacttcctgatttaaatttatattacaaagttatagtaaccaacacagtctgatactggcataaaaacagacacatagaccagtggaatcaaatacagagtcccaaaataaatccaaacacagataatcaacgaactttttttttttttttgagacagagtctcgctctgtcacccaggctggagtgcattggcatgatctcagctaactgcaacctccgcctcctggtgcaagtgattctcatgcttcarcctcccgagtagctgggattacaggtgcccaccaccacatccggctaatttttgtatttttagtagggatgagattttaccatgttggccaagctgatctcaaactcctgacctcaggtgatctgcccacctcagcctcccaaagtgctgggattacgggtgtgagccactgcacc

SEQ ID NO: 78042 - DNA, 669 bp, Homo sapiens
ggaagataggagcctaacttcaatgggtacccattaacaaacacagatgacctcataatagagaaaaacattggcaaactcaggaataacaatgtgttcaacacattttattgattaacctttcatactagtgtcctccaatgtttttccagtagttcatctcagtgcttaaaaaccctcctgtcttctgtttcagtggaattaacttcattcgctttcccctattgcagtagtcttgactaaagtctttttgccccgtttgagtttgttccatgcaatttttctttgatatctcctgctttttctcaacccctacattaaaccagggtgagctaaaggtttattctacagagactgaaaacaggatatgaagtggaagatgtcactggacttaaatagcctatctatgaaagctgggaagtggagarctggcttgtttcatcagtattatcaggtccaatctgctaagagtgagtgccaactaacagggagatttctgaaattattgaccctgcaattgaaatgtcagccatcctatggccccagttaccccgtagacggagcagacaacaaaccacttcatgggtttgaatttctcaactagacccagaactatttacaggacagctttacagcattgcccgttatttcatttctcttgaaatgaca

SEQ ID NO: 78043 - DNA, 669 bp, Homo sapiens
ggaagataggagcctaacttcaatgggtacccattaacaaacacagatgacctcataatagagaaaaacattggcaaactcaggaataacaatgtgttcaacacattttattgattaacctttcatactagtgtcctccaatgtttttccagtagttcatctcagtgcttaaaaaccctcctgtcttctgtttcagtggaattaacttcattcgctttcccctattgcagtagtcttgactaaagtctttttgccccgtttgagtttgttccatgcaatttttctttgatatctcctgctttttctcaacccctacattaaaccagggtgagctaaaggtttattctacagagactgaaaacaggatatgaagtggaagatgtcactggacttaaatagcctatctatgaaagctgggaagtggagagctgrcttgtttcatcagtattatcaggtccaatctgctaagagtgagtgccaactaacagggagatttctgaaattattgaccctgcaattgaaatgtcagccatcctatggccccagttaccccgtagacggagcagacaacaaaccacttcatgggtttgaatttctcaactagacccagaactatttacaggacagctttacagcattgcccgttatttcatttctcttgaaatgaca

SEQ ID NO: 78044 - DNA, 669 bp, Homo sapiens
ggaagataggagcctaacttcaatgggtacccattaacaaacacagatgacctcataatagagaaaaacattggcaaactcaggaataacaatgtgttcaacacattttattgattaacctttcatactagtgtcctccaatgtttttccagtagttcatctcagtgcttaaaaaccctcctgtcttctgtttcagtggaattaacttcattcgctttcccctattgcagtagtcttgactaaagtctttttgccccgtttgagtttgttccatgcaatttttctttgatatctcctgctttttctcaacccctacattaaaccagggtgagctaaaggtttattctacagagactgaaaacaggatatgaagtggaagatgtcactggacttaaatagcctatctatgaaagctgggaagtggagagctggcttgtttcatcagtattatcaggtccaatctgctaagagtgagtgccaactaacagggagatttctgaaattattgaccctgcaattgaaatgtcagccatcctatggycccagttaccccgtagacggagcagacaacaaaccacttcatgggtttgaatttctcaactagacccagaactatttacaggacagctttacagcattgcccgttatttcatttctcttgaaatgaca

SEQ ID NO: 78045 - DNA, 669 bp, Homo sapiens
ggaagataggagcctaacttcaatgggtacccattaacaaacacagatgacctcataatagagaaaaacattggcaaactcaggaataacaatgtgttcaacacattttattgattaacctttcatactagtgtcctccaatgtttttccagtagttcatctcagtgcttaaaaaccctcctgtcttctgtttcagtggaattaacttcattcgctttcccctattgcagtagtcttgactaaagtctttttgccccgtttgagtttgttccatgcaatttttctttgatatctcctgctttttctcaacccctacattaaaccagggtgagctaaaggtttattctacagagactgaaaacaggatatgaagtggaagatgtcactggacttaaatagcctatctatgaaagctgggaagtggagagctggcttgtttcatcagtattatcaggtccaatctgctaagagtgagtgccaactaacagggagatttctgaaattattgaccctgcaattgaaatgtcagccatcctatggccccagttaccccgtagacggagcagacaacaaaccacttcatgggtttgaatttctcaaytagacccagaactatttacaggacagctttacagcattgcccgttatttcatttctcttgaaatgaca

SEQ ID NO: 78046 - DNA, 1364 bp, Homo sapiens
ctttctctgataagaaaaaataaatataaaactgcttgtattttatgtgagtctcattaaccttgttttctaagttgttaatttttaactagaaagaagtttctattatgaattggcttatcttctgaggaagagagagattaaacaacctctctaaggcacacagctggaatgtggcagagagggaactcaagtacaagcagcctgactccagattagggctcctaaccactctgctttgctcatggagtgatttatttagatatctcaatatgacacttttaaggggcatttaggaaaaaatgctcaggtattaataatatgacagaatgttaatagccttccttttatgaatgcctcactctctgctcagaagataacatttatgtgtacactgaatatgtgaaatggaaaatagttcaatcattttatataattcacagaaaagcatgttttgatacactcttgtttgtttccagatgactattagggatggtcagaatactttgaaatattatgtctaccctcagctctacctggaaggatgaacttcataaatagatacacaacattaaacatcacagtgaaaagtaaaattcagccaaacgttggatttttcaaaataraatgtaaaaatattatataaacaactctttttaaaaatatcttatcagaatgtttggcattacgtagacgtagtaccaataatattttgggtaaaatacaaatattccttgagagtaagtgcaaatgagcatctgtagtgaactgaataattatttaattgttttcattagaagagttcagtatttctctttagtaatatgaatcataaatattggcaaaattctcaaaaattgaccaatcaacacattgcaaattaaattcactggatgaaaaataagcacaatagacattgtaatttacaaataaatatattttaagacattaaagttattcattgttacttcttaattttaaattgtttaaaccacctacacaaaagatggaatacttttccaataaattagatttgctttaaatatagttctttatattttctaaatttaaaatgtgctgtctgacatcagtgtatctaccttaaaaaagaaaaaggaagaatatatttagttaatactcatcaactatttaatcatcggttctcacaaactaatgattcaaacacagttcactctagcatcaccattaagtaaaccagaagaaactaaagatgaataccgtaattaagaactttgccaagtagacagtagattatgcaggcaacaaggtacatttctatgcccatttaaaatgtaaaaattacctttccaagctttgctatatttcggtacaaggataaaggc

SEQ ID NO: 78047 - DNA, 2868 bp, Homo sapiens
caataaaaaataatttgggagaacttgacaaaataattctgaaatttatcaaaaagaataaacagataagaatagctaatatccccagctatcataaaaaatgatctaacattacattaactttttttttttgagacagagtctcactttgtcacccaggctggagtgcagtggcacattcagggctcactgcagccttgaactccccagctcaggtgatcctcccatctcagccacctgagtagctgggagtacaggcatgtacctacaggcacatgccaccaggcccagctaatgttttgtattttttgtagagacatggtattgccctgtttcccaggctggtctcaaattcctggagtcaagcgatcctcccgccttggtctcccaaagtactgagattacaggcatgagtcactacccctggctacattaatttaaaaaatacatacaaaaataacaaggattatctcatgttttatattattttttgtgttcacattattattttaacaaaatatttttctatgaaaaatgcaagcagaaattttatattataaattataaattggtaaggttcagatgccatgagtagcatagtaaaaataaataaataaataaataaataaataaataaataaataaataaataaataaaaagaggagcattaaggtagtaagattttattttatcaagaattgggaccaggcacggtggctcatgcttgtaatcccagcactttgggaggccgaggtgggcggatcatttgaggtcaggagttagagatgagcctggccaacatggcaaaaccctgtctctactaaaaatacaaaaaattagctgggtgtggtagtgcatgcctgtaatcctagctacttgggaggctgaggcaggagaatcgcttgaacccaggagaaggagactgcagtgggctgagatcacaccactgcactctagcctgggcaacagagcaagacactgtctcaaaaaaaaaaaaatcttagtaggcaattttctccatgatagaaaaatatattttaaaacttgagtttgaactgttacatattcagctagtacaatatttcaatgttttcaatagctggattgcactcacatataatttcatttaaaattagcttagcttttggttttttatatttaggcagccaccattattcctaaatacttaagataatgacttaaatgatgaattcatttattaaatgatgaagtttcagcatcaaatgaatggttggtccaacctctctaaaagtggtactttgagatctgttaatcaaaagataattcattgaaataattcctttatcctattaggtcatttgaaaccaaaatccttctttttttttttttttttttttgagacaggctcttgctctgttgcctggagtggaaagcagtgacgccatcatggctcactgcgctcattgcagccttgaacttctgagctcaggccttccttcctcctcagcctcatatggagctgggactacaggtgtatgccaccactccaagcacatttttaaataattttttttgtagagacgagcggtggtgggggctgagggagggctgacttgctatgttacccaggctggtctcaaactcctggtctcaagccatcctcctgccctcctgcctcagcctcccaaagtgttgggattgcatgcatgagccaccatgcctggcctgtaaggctttttaaaatttgtatttttccctacttgggagctaacaagttaccagaatgtgttttaaatatacatttatactcctatagaaatacaagaagcaacatatgcaggattgttacaatagtataaacaccaaatcttaaagtttcagtaataatggatatggttgtggatactacatgtaaaactggtgtttactgaagtgcatagtttcagtgagtttttaaaaaagtgtaattatggtaatggattaggacaatggattcatctttgaaaagtagttcaatgatatgggtgtaatttcagtactaaagtgttgattcaattcttacagttctcattaaaattttttttgtaaaccttttttttttttcttttttgagacaagttctcactctatcgcccaggctggagtgcagtggctcaatcttggctcactgcaccctccaccacctgggttcaagtgattctcctgcctcagcctcccaagtagctgggagtataggtgcatgccaccacgctcagctaatttttgtatttttttgtagaggcagggtttccccgtgttgcccaggagggtcccaaactcttgggctcaagtgatctgcccacctcggcttcccaaagtgctgggattacaggcttgatccactgcacccgaccgccaaaggcattttttaaaatcacaagacagccaggactaaatgattaactaatatgtccctggatgctcaacaaaacaagaatacaatttaaagattagacacaagaacccataaatagttgtaaaccattccttagattctagagtgaaggagataactagtcataagaatgagatcttcagggaacctgtggagatggatataactggcactctcccaaagtgctgggatgcccggcctggtaaactcttttgttttctctctctttttttttgagactgagtctcgctctatcgccatgctggagtccagtggcatgatctcggctcactgcaacctccgcctcctgggttcaagcgattctcctgcttacccaagaccattttttgatataattatccataatttatacatggcaaaatgttcatgtccaktatttaaaccaaatcacctattaaaaaaatagcaaaaattcagtaggattagatgc

SEQ ID NO: 78048 - DNA, 656 bp, Homo sapiens
gagctgtgggttgacatccttccagttataatcaattatccccgtaccttttagtaacttgtttatccttccctcatagagttgtgctgccacctctacaataatccggtttctacataggcatgtttctctacctaggctctctattcttttccataagatcacttgtctgttcctacacaaatatccaagtttcctaatcattatggttttttaataattcttgatatatggtaaggaagtctcccaactttgttagccttcaacactctcttgcctattttaggcctttcagttttctctagaaacaaatctaagcatcttccatagtgttccataataaaccttgcttgggactttaattttgaatttatagatttatttggaggaaaatagaaataactgatgtgtttaactttgaaatccttcaggtttctttttttttttttttttgagatggaattttgctctgtcgcccttgctggagtgcagtggtgagatctcggctcattgcaacctccgcctcccaggttcaagcaattctcctgcytcagcctccccagtagatgagattacaggcgcccgccaccacgcccggcgaatttttgtatttttagtagagatggggttttaccatgttggccaagctggccttg

SEQ ID NO: 78049 - DNA, 2191 bp, Homo sapiens
ccagctgagtggtcctctggccccgcttccaacctccagtgatagggagcctacatcctcctggggtggctgtgataatgtcattcatcagcccagcaacaccatccacctgactgtagctcctcccttcagagtctaagcaggccccttgaagcctcccagggcttgtggaatccttatgcaacccggcactcaacgaccctcctccctgacaaccaggtttggcctgctccaggccaacaccccgccttgctttcccatctgctcagaccacctcaaccaggtccctcctacagcaatcggacctgggacggggtcctgaagacagcagtttgttggagtcaataagagacaattggaaaatattcaggaattttttgagtcagttattaaactattagttgtttaaaatctgccactgtgggggcatttacatcaaggaaattggcaaacactgtaaaccaggaccttttccccacctggagaactgatttagtagcatgccactgccccattcccayagcccaagtgtttggaaaggtctaggggattttgtgtgggtgtgtgcgtgtgtgtgtgtgtgtgtgcatgtgtatgtgcctgtgtgtgtttgcttttgtgggtgtccctgtatggatctgtttacgtacatacatgagcatgcacgaagtgcatgtgcatttgtgtgtccctgtttgtgttctgacagagtggattctctatggcaagaatttcccatcataggggaattgtcccctagaggtctagcaaggagctcagcacagagagcctgccctgtgatggcacaggctttcttcagccatccatgggggtcttggtccccaccgtaattgtatagtaaaaggctggggcttctgcggaaagaaatccagtcgcggctccagagtcacagcacctggtccagtagccacttgctacctctgttcaccagctgtgttctgatgcatttggttgttatctgatgtttaaatcctcacgggaaacaaagtttggtccttttggaaagtcttaaatagaaagcagtttaaaaccagcaacaacaactactggaggttagtgaagggataacctgtagttttccaagtcaaatggtgttcatagtgaatccagaacagatcagtgaggaggcagaaatggagggcctgtttctatgtggctctgttcactacgacaggtggggacaggccaggactcagctgagccaggcacttgtggaacgaagtgggaactttttctctcagtcaaaaaagttaccaggtacacctgggggcgtctgcaaatgggagggacaatgagtaagtcagagtgccgtgtcccccatgctggccacacacagcaggtgctcagtaaatgttttcagtaatattgttttatttgggaacttttttcctagagaaagaaaaaataaaacctgaggtgtctgcataccttgggtcccctggaccctggtcggatcccaagatgtaaagacaaggacccaggcccctcttccccttcccatcttcccgaaggcctgagaaggactttgttgctttggtcccaaaggaaagaagccagggaaggcttctacttgcagaaaggatgactagaagggtacggatctcaggctaaggcccattcactctctaatcctaactggccactctttttgggaactctcagagaagttggttgtaaactttctgagaaagagagtggggccatagctgaccaccagctggaccagccctcctggccttagcagctgtcctcagcggcacttggatgggcttggctctgcctccaatcccttgccaacccaggacacgacagcacattcggctcactggagccactgataaaggaggctacttgggaggaaccaatccagggaccacaaactagaggcttggcttcctagtgctgggcagctgctctctggcagaattctaggggttcccccaacccctgagatgactcagaatgtggggaaagggaaggggagtggcaaataaagacacttaccccaagctgttatctgctttgcataatgggcttatacaaaagatttgttttgaaaaagggtttggccactttttaaaacctgcaagtcattagtctaggagtggcaatcctcactgcattgtgtaagctggttaataacccataggggattccacatgtgtgtgag

SEQ ID NO: 78050 - DNA, 2191 bp, Homo sapiens
ccagctgagtggtcctctggccccgcttccaacctccagtgatagggagcctacatcctcctggggtggctgtgataatgtcattcatcagcccagcaacaccatccacctgactgtagctcctcccttcagagtctaagcaggccccttgaagcctcccagggcttgtggaatccttatgcaacccggcactcaacgaccctcctccctgacaaccaggtttggcctgctccaggccaacaccccgccttgctttcccatctgctcagaccacctcaaccaggtccctcctacagcaatcggacctgggacggggtcctgaagacagcagtttgttggagtcaataagagacaattggaaaatattcaggaattttttgagtcagttattaaactattagttgtttaaaatctgccactgtgggggcatttacatcaaggaaattggcaaacactgtaaaccaggaccttttccccacctggagaactgatttagtagcatgccactgccccattcccatagcccaagtgtttggaaaggtctaggggattttgtgtgkgtgtgtgcgtgtgtgtgtgtgtgtgtgcatgtgtatgtgcctgtgtgtgtttgcttttgtgggtgtccctgtatggatctgtttacgtacatacatgagcatgcacgaagtgcatgtgcatttgtgtgtccctgtttgtgttctgacagagtggattctctatggcaagaatttcccatcataggggaattgtcccctagaggtctagcaaggagctcagcacagagagcctgccctgtgatggcacaggctttcttcagccatccatgggggtcttggtccccaccgtaattgtatagtaaaaggctggggcttctgcggaaagaaatccagtcgcggctccagagtcacagcacctggtccagtagccacttgctacctctgttcaccagctgtgttctgatgcatttggttgttatctgatgtttaaatcctcacgggaaacaaagtttggtccttttggaaagtcttaaatagaaagcagtttaaaaccagcaacaacaactactggaggttagtgaagggataacctgtagttttccaagtcaaatggtgttcatagtgaatccagaacagatcagtgaggaggcagaaatggagggcctgtttctatgtggctctgttcactacgacaggtggggacaggccaggactcagctgagccaggcacttgtggaacgaagtgggaactttttctctcagtcaaaaaagttaccaggtacacctgggggcgtctgcaaatgggagggacaatgagtaagtcagagtgccgtgtcccccatgctggccacacacagcaggtgctcagtaaatgttttcagtaatattgttttatttgggaacttttttcctagagaaagaaaaaataaaacctgaggtgtctgcataccttgggtcccctggaccctggtcggatcccaagatgtaaagacaaggacccaggcccctcttccccttcccatcttcccgaaggcctgagaaggactttgttgctttggtcccaaaggaaagaagccagggaaggcttctacttgcagaaaggatgactagaagggtacggatctcaggctaaggcccattcactctctaatcctaactggccactctttttgggaactctcagagaagttggttgtaaactttctgagaaagagagtggggccatagctgaccaccagctggaccagccctcctggccttagcagctgtcctcagcggcacttggatgggcttggctctgcctccaatcccttgccaacccaggacacgacagcacattcggctcactggagccactgataaaggaggctacttgggaggaaccaatccagggaccacaaactagaggcttggcttcctagtgctgggcagctgctctctggcagaattctaggggttcccccaacccctgagatgactcagaatgtggggaaagggaaggggagtggcaaataaagacacttaccccaagctgttatctgctttgcataatgggcttatacaaaagatttgttttgaaaaagggtttggccactttttaaaacctgcaagtcattagtctaggagtggcaatcctcactgcattgtgtaagctggttaataacccataggggattccacatgtgtgtgag

SEQ ID NO: 78051 - DNA, 2191 bp, Homo sapiens
ccagctgagtggtcctctggccccgcttccaacctccagtgatagggagcctacatcctcctggggtggctgtgataatgtcattcatcagcccagcaacaccatccacctgactgtagctcctcccttcagagtctaagcaggccccttgaagcctcccagggcttgtggaatccttatgcaacccggcactcaacgaccctcctccctgacaaccaggtttggcctgctccaggccaacaccccgccttgctttcccatctgctcagaccacctcaaccaggtccctcctacagcaatcggacctgggacggggtcctgaagacagcagtttgttggagtcaataagagacaattggaaaatattcaggaattttttgagtcagttattaaactattagttgtttaaaatctgccactgtgggggcatttacatcaaggaaattggcaaacactgtaaaccaggaccttttccccacctggagaactgatttagtagcatgccactgccccattcccatagcccaagtgtttggaaaggtctaggggattttgtgtgggtgtgtgygtgtgtgtgtgtgtgtgtgcatgtgtatgtgcctgtgtgtgtttgcttttgtgggtgtccctgtatggatctgtttacgtacatacatgagcatgcacgaagtgcatgtgcatttgtgtgtccctgtttgtgttctgacagagtggattctctatggcaagaatttcccatcataggggaattgtcccctagaggtctagcaaggagctcagcacagagagcctgccctgtgatggcacaggctttcttcagccatccatgggggtcttggtccccaccgtaattgtatagtaaaaggctggggcttctgcggaaagaaatccagtcgcggctccagagtcacagcacctggtccagtagccacttgctacctctgttcaccagctgtgttctgatgcatttggttgttatctgatgtttaaatcctcacgggaaacaaagtttggtccttttggaaagtcttaaatagaaagcagtttaaaaccagcaacaacaactactggaggttagtgaagggataacctgtagttttccaagtcaaatggtgttcatagtgaatccagaacagatcagtgaggaggcagaaatggagggcctgtttctatgtggctctgttcactacgacaggtggggacaggccaggactcagctgagccaggcacttgtggaacgaagtgggaactttttctctcagtcaaaaaagttaccaggtacacctgggggcgtctgcaaatgggagggacaatgagtaagtcagagtgccgtgtcccccatgctggccacacacagcaggtgctcagtaaatgttttcagtaatattgttttatttgggaacttttttcctagagaaagaaaaaataaaacctgaggtgtctgcataccttgggtcccctggaccctggtcggatcccaagatgtaaagacaaggacccaggcccctcttccccttcccatcttcccgaaggcctgagaaggactttgttgctttggtcccaaaggaaagaagccagggaaggcttctacttgcagaaaggatgactagaagggtacggatctcaggctaaggcccattcactctctaatcctaactggccactctttttgggaactctcagagaagttggttgtaaactttctgagaaagagagtggggccatagctgaccaccagctggaccagccctcctggccttagcagctgtcctcagcggcacttggatgggcttggctctgcctccaatcccttgccaacccaggacacgacagcacattcggctcactggagccactgataaaggaggctacttgggaggaaccaatccagggaccacaaactagaggcttggcttcctagtgctgggcagctgctctctggcagaattctaggggttcccccaacccctgagatgactcagaatgtggggaaagggaaggggagtggcaaataaagacacttaccccaagctgttatctgctttgcataatgggcttatacaaaagatttgttttgaaaaagggtttggccactttttaaaacctgcaagtcattagtctaggagtggcaatcctcactgcattgtgtaagctggttaataacccataggggattccacatgtgtgtgag

SEQ ID NO: 78052 - DNA, 2191 bp, Homo sapiens
ccagctgagtggtcctctggccccgcttccaacctccagtgatagggagcctacatcctcctggggtggctgtgataatgtcattcatcagcccagcaacaccatccacctgactgtagctcctcccttcagagtctaagcaggccccttgaagcctcccagggcttgtggaatccttatgcaacccggcactcaacgaccctcctccctgacaaccaggtttggcctgctccaggccaacaccccgccttgctttcccatctgctcagaccacctcaaccaggtccctcctacagcaatcggacctgggacggggtcctgaagacagcagtttgttggagtcaataagagacaattggaaaatattcaggaattttttgagtcagttattaaactattagttgtttaaaatctgccactgtgggggcatttacatcaaggaaattggcaaacactgtaaaccaggaccttttccccacctggagaactgatttagtagcatgccactgccccattcccatagcccaagtgtttggaaaggtctaggggattttgtgtgggtgtgtgcgtgtgtgtgtgtgtgtgtgcatgtgtatgtgcctgtgtgtgtttgcttttgtgggtgtccctgtatggatctgtttacgtacatacatgagcatgcacgaagtgcatgtgcatttgtgtgtccctgtttgtgttctgacagagtggattctctatggcaagaatttcccatcataggggaattgtcccctagaggtctagcaaggagctcagcacagagagcctgccctgtgatggcacaggctttcttcagccatccatgggggtcttggtccccaccgtaattgtatagtaaaaggctggggcttctgcggaaagaaatccagtcgcggctccagagtcacagcacctggtccagtagccacttgctacctctgttcaccagctgtgttctgatgcatttggttgttatctgatgtttaaatcctcacgggaaacaaagtttggtccttttggaaagtcttaaatagaaagcagtttaaaaccagcaacaacaactactggaggttagtgaagggataacctgtagttttccaagtcaaatggtgttcatagtgaatccagaacagatcagtgaggaggcagaaatggagggcctgtttctatgtggctctgttcactacgacaggtggggacaggccaggactcagctgagccaggcacttgtggaacgaagtgggaactttttctctcagtcaaaaaagttaccaggtacacctgggggcgtctgcaaatgggagggacaatgagtaagtcagagtgccgtgtcccccatgctggccacacacagcaggtgctcagtaaatgttttcwgtaatattgttttatttgggaacttttttcctagagaaagaaaaaataaaacctgaggtgtctgcataccttgggtcccctggaccctggtcggatcccaagatgtaaagacaaggacccaggcccctcttccccttcccatcttcccgaaggcctgagaaggactttgttgctttggtcccaaaggaaagaagccagggaaggcttctacttgcagaaaggatgactagaagggtacggatctcaggctaaggcccattcactctctaatcctaactggccactctttttgggaactctcagagaagttggttgtaaactttctgagaaagagagtggggccatagctgaccaccagctggaccagccctcctggccttagcagctgtcctcagcggcacttggatgggcttggctctgcctccaatcccttgccaacccaggacacgacagcacattcggctcactggagccactgataaaggaggctacttgggaggaaccaatccagggaccacaaactagaggcttggcttcctagtgctgggcagctgctctctggcagaattctaggggttcccccaacccctgagatgactcagaatgtggggaaagggaaggggagtggcaaataaagacacttaccccaagctgttatctgctttgcataatgggcttatacaaaagatttgttttgaaaaagggtttggccactttttaaaacctgcaagtcattagtctaggagtggcaatcctcactgcattgtgtaagctggttaataacccataggggattccacatgtgtgtgag

SEQ ID NO: 78053 - DNA, 645 bp, Homo sapiens
ggtgagaagatgatgattgctccagtgcaggaacactgcaccaggcaactgcactggcttggctagaggcactagccagctgctgactgttggtgggagtatcctgccctctgctggatttggcgggaaacatgaatttgcattgcctgctaaagaattaaggctgaaagcttttagaactgaaaataaatatttgcttgtgtgttgatgaggtttaattaacttgggaatgcattccttaaatgacatcgggattctcaggtaatttccaggtgtcaaggaaaaaaaatcgttttatatcatatacagacctcctgttcagtaaatttgggtgcataatataaagtgccagcattttgttctgtaaagaataaaarttgcatctataataattcttaaagtgttcacatagtgttgtaatttgatgaaagaataacaagagtgcagttagactgttggggtttatatattaattctgcaagatactgaatctctctgagactcggtctctttatctgtaaaaagatgccatactcatcttgaagggttgctgtgaggatcaagtgaactaagaatatttacaggagcactttactatgcccactaaaagtatgtggttttaaacatacatgctattcacaggtt

SEQ ID NO: 78054 - DNA, 1444 bp, Homo sapiens
aaattggctaagaagatatcatgtgctcttgaagaatgaagttttttaagtagaaaaggtgggtgtgcgtgtgtgtgtgtgtgtctgtgtctgtctgtctgtctgtctattgaagctgggtgggggcaggcttcaagacagagggtaccaggtaagcatcacatactgttatgaaaacctatgctgtggccagagtgataaggaggatgaagatgaggctgaggctggaaaggtactttggggccaaaggaaggtgctacttaactgctaagatgtggagcttgaatttcatggggtatgtgtgttaaccaatacatttgaatgttggatcaatattatacctccatcatattctggttcrtcagagaagtattttttagggaggaatgttgggttttaagtggcattatagttctctacaactttaaaaatatatgtaaatttctgagtgagaaccacaacagcctctatgttcagtccaaactagggtgggttagtgattccctgtgtaacccagggttccaggtttttgggtatgcactgtgaggaaatccccacttgtgtctgttgtatcttgagttcttatttcaaaaatctctgggaagaagctcagccctggaaaaactaaaactggctggatccagagatgcctgagttggagaggaactttggccaactctcctcattaaccatagtaagaaaccttgctcagggagaagtttatttgccattttctgtacatgcaatgtatgtagaagcatgatcagcaggcgactgcactgcctttatgccacttccacatacaatgactcagctaaccagcctagtacaagtcctgcttttactgttgttcctggaggcactgctttgggaaactatcccagatgtcctccttccttgttgcaaataataaaatctccctcttaaatactccatggttgtgctcattggactgtctcctgcctagcagtttaacccacctgttgtgtgggtaacacctcaacagactagaatccttagcttgcatctttaaaagacaacagcttgagtccctttcaattcatcaaaaagccatgcattttttaaaagcagccaccagcctctttcatccagttagtcttagacaaccatctactctaaaatatctggagtccgatgcctaaagaataatttagaaacggcatcaacccctttctatatctgacctgccattttgtcacatcaaataaaagagagatcataaaaagacccgtggataaaggctgtctgcatcaccaaacatgcttgctcatctaattaatgatttaaaaaatacagattatttatataaactatttggcaccatattactgatcttaactccccttattcactatagcaattccacaaactcgaaagagacaaagattgcacacactaaagcttgtttatggcaccttaaaag

SEQ ID NO: 78055 - DNA, 1620 bp, Homo sapiens
aggtctcattctgttgcccaggttgcagtgcagtggcccaatcatagctcactgcaaccttgaactcccaggctcaagcaatcctcccaccacagcctcctgagtagctagaactcttggtgcacattttgttttccttttttttttttctttatagaagagacttcactttgttgattaggctcttctcaaacttctaggctcaagtaatcctcatgtcttagcctcccaaactgctaggattacaggagtgagccactgcacctggcctgcctagaacgttggatttacagatgatcttatccttacttcagagccgttcaaaaaacaaagctgttataaataaacagcaattatgcatagggtatctttcaataaagacacgtaaagtgatgataataatcttgaacattattgaactcctcttgtcttcaatattatatttcaaatgctggaggcaatatagacacaatcctatggttagggtacttgaaaaacagtgaagataaactaaacagtatgtagaaaattataattaaacctaacatatgagtagcctagacccaaaactatatagcttcaaaaagagtcaaagtttatctatatcaagtttgtaaatcaagcaagcatcagaacattattcacttgagataaaacttgaagaagaaatattatttgcataggtaggaattataggaaatatattttagaagagagaaacacaatttactactcataatctgatgatgattaaaattcaggttcacctcttgcaaatatgtatgaactatcctagggctttgatgagatrctaaaggataatgataaatacattacacaaaaagagtccaacaatatggttgttacagtgaagattttgggcattagtaaaatcttataaaatctactttctaaaaatttttcagcaacaacctagtattaactgcataagttttgcattgcttctttgttaacctagcaattttactgctgatttttaccctcaaaatgtaagcattatattgataatatctagcaaatattaataattatgtactacacattggcatttattatcaaacccaatcttcacaaaacccctggagctagattctatccctgtgttacaggcatataaacagagactccaacagcttgagtaatttgaccccccaaaatagagctaacataatgtagagcctacttacaacattcagtctgattttacaagttatgttctgaacaatcaaggaatgatttaagcttctctgagtaggcatatatcaagtttattaggaaacacaaacactaccaatgaaaagcctattcaaatacatgttaaaactaatttaaatattataaatattaatacttgatttatccatcaaatcctttggaaattataagctaattttatctcaactgttactttaggtacttgtcaccttagcataatcaaataagactaagagaacaatcaggtagttcttaggctgatcttgttatttctgaacaatatgatggttcagttctatgtgaaggtcaaaataatataaaaattgaccaatagtgtgtaaaccttgtcatgaaaaaaaattttaaatgtatgctgacagtaaa

SEQ ID NO: 78056 - DNA, 769 bp, Homo sapiens
ctacaaaagtcataatacaacaagctagtgacctccagctgggctttagctgaaaagacgagctgtgtggctgggtaacgtttctcaatctcaattgatgttaagaatcaccatctaagagcatttttataaagcaaagaatccaaggcccaacatctagagatgctgatgtggtagatctaaggtggggcaagtgcccatgtgagtctcatatttgagaaaggtggaaagcactggtcagtgaagatgagactgggtaatcctataagaagctgacaatattaataataatacacacaaaagttacaaatgttaggtgaaaatattcatacagtaaaattactatcattgagaattccttcatcccaaaataccataatgtaaatgaaaacacctgccaaaacaaaagaagacaggcacaatgtactaataggagaatgtagagcaggagtctcttactggaggggtagaaattagcatgacttcagaaaatgatgggcattaccaaggctgaacatggacataatttgacactgcagttttacttaggtatgagaccaaatgaaatgcttgcacagctataccagaagacatgtatacccacattcttagcaagaaaacttggaagaaaaattgttgaaagcagaaaactgaaaacaacccaaaygtccatcaataataaaacaaatgaaaaagttacagaataatttcataacagtaagttatataccagtgcaaataaatggaccacagttactgcagctatgtt

SEQ ID NO: 78057 - DNA, 769 bp, Homo sapiens
ctacaaaagtcataatacaacaagctagtgacctccagctgggctttagctgaaaagacgagctgtgtggctgggtaacgtttctcaatctcaattgatgttaagaatcaccatctaagagcatttttataaagcaaagaatccaaggcccaacatctagagatgctgatgtggtagatctaaggtggggcaagtgcccatgtgagtctcatatttgagaaaggtggaaagcactggtcagtgaagatgagactgggtaatcctataagaagctgacaatattaataataatacacacaaaagttacaaatgttaggtgaaaatattcatacagtaaaattactatcattgagaattccttcatcccaaaataccataatgtaaatgaaaacacctgccaaaacaaaagaagacaggcacaatgtactaataggagaatgtagagcaggagtctcttactggaggggtagaaattagcatgacttcagaaaatgatgggcattaccaaggctgaacatggacataatttgacactgcagttttacttaggtatgagaccaaatgaaatgcttgcacagctataccagaagacatgtatacccacattcttagcaagaaaacttggaagaaaaattgttgaaagcagaaaactgaaaacaacccaaacgtccatcaataataaaacaaatgaaaaagttacagaatratttcataacagtaagttatataccagtgcaaataaatggaccacagttactgcagctatgtt

SEQ ID NO: 78058 - DNA, 1238 bp, Homo sapiens
aaacttacagaaagcaaaacgtggaaaattagtaactttaactgatagtgtacmcctaaagaacctacaccggccgggcgcggtggctcacgcctgtaatcccagcactttgggaggccgaggcgggaggatcatttgaggtcaagagatcgagaccagcctgaccaacatggtgaaaccccgtccctactgaaaacacaaaaaaattagccaggcgtggtggcacatgcctgtagtttcagctactcgggagggtgaggcaggagaactgcttgaacccaggagacagaggttgcagtgagccgagatcgcgccactgcactcgtctgggagacagagcgagactccgtctcaaaacaaaaaacaaacaaaaagaacccacccaacagaattaagtaccaacataataaatacgaagaattttagattcttggtttttaaaaaacatacaaagatgatattccttcaaaatatctttacaaaacatattgagactgtgatgctttatattgattgtatgaaaacaatgaaaaagaaccagcactgtttcactataaaagctttactaatgtaaatttataaatcctttcttaaatattttgagttaattctaattttatgatagaaattcattattttcagcaaaaacagctggcatttgggaaaccaaaggctcaaaaactaagaatagtaaccaaagaaacttgacaaaacagtccttttaaaactctcatctacactataaggggaaactttgatcacgtcccttctccttcatcaatcgtagaactcaacattaaggactacacaatcccacatccctctccgagaaaaagcaaaggctttgtgttgtagcaacaacgcaagacatggagggaagctccactcaagacttccctgcctgctccttccccaaagccactccagaataccagggagggttgagaggtaaggcatgaagggcgcaatatccaatatgagcaacgcgtgtgatgcatctggtcaaaatgcatacagaggacttgtctctgtccctagatagaagtcctccgtcctgcagtcatgagggtcaattgctgaggcttcacagttcccttctctcttacactcggaccgtcacgctcctcacctactaccccgatgcagaggtagactcaggatccctgcacttgtcaaggattcctcggcaagctcacggggcgggagtggccacaagacggagctcgcctggtcctggc

SEQ ID NO: 78059 - DNA, 755 bp, Homo sapiens
tcctgcctctgtctcccaatttgctgggattacaggcatgagccactgtgcctggccctatttctgcatttagatactaatatagccaaacatgatgaagagatcattgagtcatggatggtaacagagtcttctgcccatttttgaaggatactttttttaacttttcccatattaaaggaaaagtgattccatwtcaatgcactgttacattcaaacttaaatatcaccacatcaccacgtgtatgaatcctcattgatatatagggttgtaaaaataatagtataggaaaactacagaagttgtgtattaattagcaaattatgatataattgtggaaattttaaaatataacttcacctggcctcttaaaactgtgtgtgtaaagttcttttgaaagctttgttaagacgttagcaagagcatttctgatttttcaaaaaacaaactagtccacatgtatttggcaggtttacagcattattaataactttactgtttggcagggaggcatcctaatgaaaaataatttctaaatggtataagactccatgattcccatccaattattggtctggacctaagtatgcttctaacttagaaagtgacactgggcttagtacaacttcattctgttgtttgggttaagcgacttgctctcccttggaagatatccagaagctacagccggggcagaatgtggggtcgtttggctactgtggatggagctgcagggagcacattccatcagtac

SEQ ID NO: 78060 - DNA, 755 bp, Homo sapiens
tcctgcctctgtctcccaatttgctgggattacaggcatgagccactgtgcctggccctatttctgcatttagatactaatatagccaaacatgatgaagagatcattgagtcatggatggtaacagagtcttctgcccatttttgaaggatactttttttaacttttcccatattaaaggaaaagtgattccatatcaatgcactgttacattcaaacttaaatatcaccacatcaccacgtgtatgaatcctcattgatatatagggttgtaaaaataatagtataggaaaactacagaagttgtgtattaattagcaaattatgatataattktggaaattttaaaatataacttcacctggcctcttaaaactgtgtgtgtaaagttcttttgaaagctttgttaagacgttagcaagagcatttctgatttttcaaaaaacaaactagtccacatgtatttggcaggtttacagcattattaataactttactgtttggcagggaggcatcctaatgaaaaataatttctaaatggtataagactccatgattcccatccaattattggtctggacctaagtatgcttctaacttagaaagtgacactgggcttagtacaacttcattctgttgtttgggttaagcgacttgctctcccttggaagatatccagaagctacagccggggcagaatgtggggtcgtttggctactgtggatggagctgcagggagcacattccatcagtac

SEQ ID NO: 78061 - DNA, 800 bp, Homo sapiens
acgttttgtcagaaagttaattaatagatattctttggagaactgttaggcagttttacatagatgtactaggagctaagtaatttcaacctataacaatgcttacaaaagagaaattaggagttaccattatccaatttgcaataggaatgaccatacagtttcttttaatagcaagatcctttagtacagttaaagtgtgattcaattattataaaatccatatagaaagaattatttgggaacataagtaaaatccacctgcatttagtgttgggagagaatggccmaaggcgtggcctcccctgccatctaagggcacaacattaaggtgatcacgcataactgttggccgaaggacaagatgtctactgccttggcacaagtgacactcacacttctttgcattcttgaaagtgtcttagtttggacagtaaattacatgcttacccctacaacataatctaaatatgagaaatcaactcagcagcttaaattatttaccatgcaaaaagttagaaaacctggagacattaatctaagaagaaattggaggcaaaccatccctccctgcagaacttgatgccaccaatgaagatagcaggatgacaaagaatggcatctcatgtctacgtgtgtttatagctgatataaattttaccctatactacgtgctggatattcagatccgagtctacagtacatggtttatattcctgatgacttcagattcctcctccaaatcaccccagtcaccctagaatatattcttctattttccaccggctaccactggatcc

SEQ ID NO: 78062 - DNA, 1108 bp, Homo sapiens
actgcccacatgtagaccatggatatttacaatattatgtaccaataacagaaaaagtatagagaactagaaggtgaagacaactcttgaacccaggtcttcagactaggaagtcttctttcttataaagggcttactaaccattacttttccaggcttcatttgctgtcgtggttttacgttgtgcaaatgcgtaagatgctacgggataattctattttataataatttttttttgccggtagataatttaaatagaatctgaactaggcaaaaatgtgaaatagatgaaaaaaattatctgcttctccctactgacccagtcctctcaaactccctttctcccattatcatcccagggaaaacttcctctataggaagccatctaaaattcattgatattaatttttaaaagagcagtaatgaccactaaaagtattaacttctgacccctgtcccttccaccgggacttttgcattccaagtaattaggtagagggatgctgttttaattgtcaacaagagcctatgagttttttttgtttgtttatttttgtttcttaatttaagctgagaagtcaattgttttctaacatttctgcaaggaagcacacattacatacatgctgcatttttatagtagtggttgttccaatttctccatggaataaaagaatttcctaccttatcaggtgcaaaggacaaaataatatacattctttcaaactttctgattctgtgaagtagtggctcagcacgtaattgctgatgggacgcrcactctcttcttctgaccacacacctggatttgcatctgcccaaatgtttcactgattcattaaaaaaatatatattgagcctctgctgtgacctagttccatgcacttggaattctattgtgaagaaaacagtcaatctctctgtccttagacaacttatattttgtgcattttctaggaatcaaacgcccaagaataagcctctaacttcacctttcctaaacacacaaattacattcagatgtatgtgggccttaaagacataaggggtataggttatactgtatcatttaattagccaatatctattaagcattacctgacattca

SEQ ID NO: 78063 - DNA, 695 bp, Homo sapiens
catgcttcactactggtctagatagtgacagactgatagatccgtcaaaatcaaggccacccctataagaactgcttgtctattcataggtgttcgatctgctccactccttcccaaccctcataacctccactcctcccaaagcctttcaaacacacagggctctcatcctctcaccatcctcctttcccaagaatgcacactcagaaaaacaaccaacatctctcagtgaacccgagtgtaaacttcctacacctttragttacccagagacaagttatagctcatttccacctcctgctaaaggaagtacaggtattggtggaaaaatggcagcagagcgtttccagaacctgaaactcattccaggagaaagagcatggtgggaagaggtggatagagagggggtaatagagatgggtgggcagatgaggaggaagaaattcatatgtgtaagtttaactaagcaaagtcgcctattgagaaattatattaaacttacatttcacgagtgcaaacacttctggcaggaagcaaagctgctttcttcttcacaccatccagcacccccatctccattctatgcctagatatttctgagtcctgggtccttagggcacacaggagtcattttataagaaagagagacagggagtaaaacattttggtttgcaggttctgggacagctcatatg

SEQ ID NO: 78064 - DNA, 695 bp, Homo sapiens
catgcttcactactggtctagatagtgacagactgatagatccgtcaaaatcaaggccacccctataagaactgcttgtctattcataggtgttcgatctgctccactccttcccaaccctcataacctccactcctcccaaagcctttcaaacacacagggctctcatcctctcaccatcctcctttcccaagaatgcacactcagaaaaacaaccaacatctctcagtgaacccgagtgtaaacttcctacacctttawgttacccagagacaagttatagctcatttccacctcctgctaaaggaagtacaggtattggtggaaaaatggcagcagagcgtttccagaacctgaaactcattccaggagaaagagcatggtgggaagaggtggatagagagggggtaatagagatgggtgggcagatgaggaggaagaaattcatatgtgtaagtttaactaagcaaagtcgcctattgagaaattatattaaacttacatttcacgagtgcaaacacttctggcaggaagcaaagctgctttcttcttcacaccatccagcacccccatctccattctatgcctagatatttctgagtcctgggtccttagggcacacaggagtcattttataagaaagagagacagggagtaaaacattttggtttgcaggttctgggacagctcatatg

SEQ ID NO: 78065 - DNA, 695 bp, Homo sapiens
catgcttcactactggtctagatagtgacagactgatagatccgtcaaaatcaaggccacccctataagaactgcttgtctattcataggtgttcgatctgctccactccttcccaaccctcataacctccactcctcccaaagcctttcaaacacacagggctctcatcctctcaccatcctcctttcccaagaatgcacactcagaaaaacaaccaacatctctcagtgaacccgagtgtaaacttcctacacctttaagttacccagagacaagttatagctcatttccacctcctgctaaaggaagtacagrtattggtggaaaaatggcagcagagcgtttccagaacctgaaactcattccaggagaaagagcatggtgggaagaggtggatagagagggggtaatagagatgggtgggcagatgaggaggaagaaattcatatgtgtaagtttaactaagcaaagtcgcctattgagaaattatattaaacttacatttcacgagtgcaaacacttctggcaggaagcaaagctgctttcttcttcacaccatccagcacccccatctccattctatgcctagatatttctgagtcctgggtccttagggcacacaggagtcattttataagaaagagagacagggagtaaaacattttggtttgcaggttctgggacagctcatatg

SEQ ID NO: 78066 - DNA, 695 bp, Homo sapiens
catgcttcactactggtctagatagtgacagactgatagatccgtcaaaatcaaggccacccctataagaactgcttgtctattcataggtgttcgatctgctccactccttcccaaccctcataacctccactcctcccaaagcctttcaaacacacagggctctcatcctctcaccatcctcctttcccaagaatgcacactcagaaaaacaaccaacatctctcagtgaacccgagtgtaaacttcctacacctttaagttacccagagacaagttatagctcatttccacctcctgctaaaggaagtacaggtattggtggaaaaatggcagcagagcgtttccagaacctgaaactcattccaggagaaagagcatggtgggaagaggtggatagagagggggtaatagagatgggtgggcagatgaggaggaagaaattcatatgtgtaagtttaactaagcaaagtcgcctattgagaaattatattaaacttacatttcacgagtgcaaacacttctggcaggaagcaaagctgctttcttcttcacaccatccagcacccccatctccattctatgcctagatatttctgagtcctgggtccttagggcacacargagtcattttataagaaagagagacagggagtaaaacattttggtttgcaggttctgggacagctcatatg

SEQ ID NO: 78067 - DNA, 1246 bp, Homo sapiens
aacagaaaatctgcccattctgagcacctgcaaggcaggcactttacatacgtatctcttatttcatcctattcctattctcattttagagttgaaaagaaacaggtttataaacagaatgaaaaattttcttgaagaaactcagacattagtagaaaaatctggatttaaacccaattttatctgaggccaaaacccttcttttttyactctgggagactgccttggcacttatagcacgtaattataatgataatatttgtttacctacacctttctgcaagtgccaaagtgctgtacaaaagcaggcaactgatttctctctatgcccatgaggttagtatgtgtatattataactcgcaggcaggcggccacacagactgcactgaaagtggacctgtgtctcaggactctgtgtaaaagcacttcttactcttgagcacatttccaaaacaaataaaatggaaagaacaggaataccaaaactagatggcctcctaaccttggttcttatttgattttttggctttatgcctgggcatatattttttcatctagaaatcatttctctaaaatatgttcttcatggtatctactccatctcctctgctctactccagtgtgtgccgcaacccccattcacactactctcacctgcctgtagaagaaacacacaaaacactgagaatgaaacaaaaaccactcgccttttcttggatccagaaacagtcaataccagcatttttggcctctgcttcctagttctgtctggcctctccacctctagctctgtctttgttatgtccacttagtgggctttgctttcttttgtttaaacacattcagtcactctgcctgtattgtttttgtggcttgccgaacttaaacctgtcgctgctcttcattccagtcaaaaggatgaagagggagcttataaaagcaaaaacagatcatttacattgaagataagaaaacaggcagtatttctctagcaattctgggaagcaaggtgccaattcttttggatataaggttctccccaaaggattaaggaataggaatcctccacaaaatcttatttggtccccaagttatgaagatttttattttctttttttccttctttcttttcttcctcctcctcctccttttttttttttttttttttttttttttttgtgtgtgtgtgtgtgtgtgtgtgtgtgtgagatggtgggatggggtttcattctgccacttagggta

SEQ ID NO: 78068 - DNA, 957 bp, Homo sapiens
aaattgtggctcaatggctatagtatctaagttgctatttattacttaacctatgctatgcgataattgaaagaggtaactctgttgtagatagaaatatacttaaaaatcaaacaaaacatgatccgtgtattattttttgaaaagcaatacctgaacaattaattatctcaaaagaagtcataagatttttctggatcgttcatgcaaggtcctcatttatacacataatcatctagatatgtttgtagcattctaataaacaagctagacagtactaatttttataaaataatcatttacaaataatcatatcttcagctaatgttgaccacaattttgttattgattataatgtaaaatgaaaagaggttacgcattttacggggcaaaaaaaaaaaaaaacaggaagaagtattcctttcttccaagtgcttgactctttttatagtatcccaaattataatcaaccttctttcatgcctgcggtgattagaaaattttgcttgtcatcctggatcaaagtaagtccatcaagaacttcatcaacgtttattgtgtttctaaaatgtgccagtttcctgctggatgctggggtacccaaggtcaaaagatactcttattcagctcctgggttggaggcatatggtaataaacaactcaaatacgataaaggctataaaacaggagagtatagaaccatatgctccaaatggacacatgacttctgcttgtagagagaggaagagaggagggtcccgtgaatgccaaatgtacattcacccgaaaagaggaaaaaggcttttccaagtctacaaagcagttgaggtcataaytaggaaattagaattagctaatatagctaagactattggtaaggtacctcaatgatcagataagacaaaatggaaatctcagtcagaagcaggctctaacagtaaagagatggaatgatag

SEQ ID NO: 78069 - DNA, 565 bp, Homo sapiens
tgtccccttccccaagatgtccccatcctaattcccggaacctatgaatatgccaccttgcactgcaaaaggaagagactttgcaggtgtgaataaagatctcgagacgggaaggttttctgggattagcttcttggacccaaggactcacaagggtcctcatgagtgaaaaaggtggcaggagactcccattcagagggatgtggcatgaaaaagactcagttggtcattgctggctttgaagacaaaaggggtccatgagccaaaggaggcaggcaccctctggtagctggaaaattcatggaaactgatcctcacctagagtctccggcaggaacacagctctgccaacatgttggttttagcccaggaagacccatttctgacccctcacccagaactstaataaacgtgtgttcttttcagcttctaagtttgttacagtagcaataggaagctggcacagatgtcctggcacaattttccactcctttcctctgcatccctgtcattttttacacatcaagcagtgccttcctcagtgtgtccccgctacttatttgtg

SEQ ID NO: 78070 - DNA, 1128 bp, Homo sapiens
caaatcaaattatgtagtattrgagccttttttctttttttggacttagcagtcttttttgttgccttggaaaggcttgcttttgtgctgagctgttcaactgaaggtctttgttaagaagataaccaggacttttaggctcacaaacaggctttttgcaaacttttctatggaatattttaacatacataagcaaccttgaaatgtgtgcttaagtttgagttgaagatgaaagccgaaactcaaagtgatgtttagtttattgatattcatagtgacaattttaatgtgtttctggaaaacttagtatgaaccttggcctttcaaatttaaggttaatatttttaagtcaaagccctagaagcaaacatttaaaataagactgtttctcccatcatatttgacattttccttgcaatttcttatataatttttgaaagctataatgttacatacataatgtaccaaataaatgtttacttaatgtagaaggtgatatatgcaaaaatattttggaaggcattataaagttttgaaatattaactttaatattttaatgtgaattcatgcaaccctttgaaactctggccaaaccagtggattagaagagccttcgggagaaaatcgttctcattaagacttgaatatagtatagaatttaagtactgttttgtcttgttttctctttctggttgtggggactaggataattgctctgttgggctaagagaaaaaaaaggagtttgtcttctcttttctctaccagctgccgtttctctgccagtattatgatcacaccagttgcttgcttcatagcaggtacaaaataaagcaatttcctcagctaccatcaaaggctgtctgcagggtatggaataacagcagaaccctcatcctaggataattttgtcaattccactcccactcatgcagtaaaaactcagctagtagcagctaatagtagctaatagttattgagtacttactatatgctaagtgctttgcttggattatttcatccaactcttgcacaattagcaattccgctccattgccacagtgaaactaggctatattacggctatcagcagctgatacatattgagcatttactatgtgctaaatgc

SEQ ID NO: 78071 - DNA, 1128 bp, Homo sapiens
caaatcaaattatgtagtattagagccttttttctttttttggacttagcagtcttttttgttgycttggaaaggcttgcttttgtgctgagctgttcaactgaaggtctttgttaagaagataaccaggacttttaggctcacaaacaggctttttgcaaacttttctatggaatattttaacatacataagcaaccttgaaatgtgtgcttaagtttgagttgaagatgaaagccgaaactcaaagtgatgtttagtttattgatattcatagtgacaattttaatgtgtttctggaaaacttagtatgaaccttggcctttcaaatttaaggttaatatttttaagtcaaagccctagaagcaaacatttaaaataagactgtttctcccatcatatttgacattttccttgcaatttcttatataatttttgaaagctataatgttacatacataatgtaccaaataaatgtttacttaatgtagaaggtgatatatgcaaaaatattttggaaggcattataaagttttgaaatattaactttaatattttaatgtgaattcatgcaaccctttgaaactctggccaaaccagtggattagaagagccttcgggagaaaatcgttctcattaagacttgaatatagtatagaatttaagtactgttttgtcttgttttctctttctggttgtggggactaggataattgctctgttgggctaagagaaaaaaaaggagtttgtcttctcttttctctaccagctgccgtttctctgccagtattatgatcacaccagttgcttgcttcatagcaggtacaaaataaagcaatttcctcagctaccatcaaaggctgtctgcagggtatggaataacagcagaaccctcatcctaggataattttgtcaattccactcccactcatgcagtaaaaactcagctagtagcagctaatagtagctaatagttattgagtacttactatatgctaagtgctttgcttggattatttcatccaactcttgcacaattagcaattccgctccattgccacagtgaaactaggctatattacggctatcagcagctgatacatattgagcatttactatgtgctaaatgc

SEQ ID NO: 78072 - DNA, 585 bp, Homo sapiens
catggtctaatgtagactgaatcaattcagttaaaacatccaccaggaaaacatttaaaaaggtgatggctttctgcccctaagccctaagtagcagtcctgagtagtaagttaaaattagaatttgttaaaagtatgcagtatgtttatgaagggtaagggatatttgaaagcaatatttaaatatttttaaaacatgtctgatgcagaagagaagatttcactttctctttagagttactgaggcgcaagataagagtaggaaagttcacccggccatgtatattttactgcaaacatgtcattttagacatctttcaaaatgtatctggaatatggaaaacagtcctactgagctattgtttggcatagctcattgacatatttatgtttgcaaaatcaatcagatcagggcaactgtgagttttgggttkttttttttttcctgtttgagagaatggagtcttggagatttcagtaaaagtaaaaataaaagaaatgtgcaatgcattttgcctattatgttgcccttaaaattaagaaaaaaaaagacagaaaaagggagaaattaggagaatgatttag

SEQ ID NO: 78073 - DNA, 680 bp, Homo sapiens
aggctagtggtctaggactgaattgaatgacttcaagcaaaatgccttcaacagatgctcctttgtcgggacaaagggccgcagcctctttggggatctattgtgaagcccaagtccaagtccctgagggcatctccacaaaactttaggcattcagtggcatgaggtggctattgtgcctataataactgtgagactcaggaaataaaggtccatggtgagctgagcacacttgctgtgacactgttctttcagctctgatgcctgaaggggaaatttacccaagagaaacggggagaaaaaaagtcagcaacagataaatatgtattctttggctgagagtcacttataccagttccccaatctttggtaacctccacctcatcgccaacttttggagaatacattgcccctcagaggcaggttaattctaaatatttagcaatttctagtactttactaggygggtggtccctcctaatttgtaggatgaagttattaaaagcttagaagagctacctaaatagcatgaccagctttttctgacatacccatcacttccctagttaatttagagctctggcagtcccagaacatctctatgtcctaggaaaactgggacaattgttcaacctagccctaaagaataatatcttgctgtcaaattaatgctcagacca

SEQ ID NO: 78074 - DNA, 1607 bp, Homo sapiens
ttttttttctgcttgtaatagttggtgagacaagctggctataggaggtccaaaaatgtgtacatgctgtggactgtagctgcctcccctagactgtaattttaagcctccaagttagaaatcccaggagatatttatatccaggaggatttcagctaactatgtgtttgcctccaggcagcagcctcaacaggcgctgtgtttactttccaacattgaatggaaaacatcattttgaaaaagcttaatttccaaaaacccatcccacaacagcctaattttagaacctatgaaagctaataatttcaaaattcttcccaacagtttcttgtttatgttttgcagcccaagtctaaatatatcataaaggagattttaaatattactttatccatttgttaacttattactgcatttatttatttatttcctgaagcaaaagcacagcaacttattgttttcagtttctgtttgtcctctagatgtgagatgttttactcatgataagataaggacctagagagaactttcatcatcaaacagatgaagaaaaatcagagttcacaattaaactctctggtacaaaaataatcaaatccaatagcctgccactttaacagcactagctccctgcactctcttattaacattttctatttctttaaggatgattaaaataaaaaaggcactgcactgagtctaaaccttccatgaagaaaataataactaaactggttctcagaaagaatataattggccacaatacagaactttaaagagatcattttaaaagatccaaacttctctgcaaaaatttatcagagtcttcttaggaattaagcttcttgcataaaaatattgaaaggatccttcaaataagagcaatttcaatattaaaatttaaggaaaagtcacgctagcttgaagaaaagggcgacatgtcctaggggatagatggaatttggggttttgccaaactcattttggaaggtttaggtatgtgattaaatcaaacatagcaacttttgccttgcctttcttgaagattgagagccctgtttagagatctaggatggaggccacctcttcctgagaaacactgatgttttcatatgattgataccttgagatttactgagaatttttatgctgataaaactgtgtcttgctcccagtttggtaatttttctttggatctgtgaggaaagacatgtctggtgaagcctatatctctaaaagtccttttttggaagaaattagaaagttgcaccgagcaaaatgcctaacttaggagcagcagcctacttagtccatctgtccgcagcttcccatttttgtcttttctccatgtctgtggtcaggaccaagtggttcttgaagtgccaagttggtctattcacttcccctctaggaaagcctggtatatgagaccttttacaatctggctccgacatatacccacrtggttccatttcctccttccccccacatatcactgttcctcccgcaagtagccccgttcccttcctctactttctagccacacactttgttgcttgaaaatgccatgcttttttgttctcctaccccatctcagcgtctgtctg

SEQ ID NO: 78075 - DNA, 1130 bp, Homo sapiens
catgtcaccatgaaaaaattaaaatccaatagaacatccattatcaaatttaattaaaatttaaagccaaaaatgttttcttatggcctaaaaattagctaaatccagcaaagaaagaacttcagtgggcgagaagttaaaagcagttgtccaggatactgaacatcttacccttctaataagatgtaatcatgtgattatgtggaggaggaagccataaagtaatggccaaatttgttagtggcaccaagattaaataattcccttgataaaaagcagcagctaaggaggaaatgtagatggaggacttggccacaggaatggtagaggaaagtacacaaggctaagatgaactaatcaaataataaaattgcacaacccttttatagttggatcggtgagtcctaagcccctaatctattacacacattctcataatgctgagctcagtctcctcactaagatcattagcttctttcaggtaaagtaagaataataacttagacttcttgtatcctgcttaatggccagcattgtcaaatgggagctgtctttgtgttatttattcagtttcaggaaaggcaggctttacacatcatataaacacagccgcaccctttcaacagcttcatcaaacttgaaaagtttcatgaaactgttcttaataaattcagaagaacatgtgaataatgggaaagacagcatgttagcacgagaaagccagtcctgaaaatgaaactctctgtgttcccgtccaatcacatttctaattagtcctaatactttaaataaattgtttaatatctgtgagcttcmgtctatttgtatgtgggattaaaatgttgtgagattaaaatgtcggtgaactttaacgcgagaattcccagccttggagctattgacatttgggactggatgattgtttattatgggggctgtcttgtgcattgtaggaggtttagcagcaactctcttctctacttattagacaccagtagcactcctctgccccccaggtcctcattcaaaaatatctgtagaaattgccaactgtccctggggagtacaacctcaaccccttcccagtttgaaagccattgctgcacacttttggtaccttctttcctttc

SEQ ID NO: 78076 - DNA, 669 bp, Homo sapiens
atcactcatcctcctttcatccctgctttagaatctctgttgtctatcattccatactctgtgttgacgcatacacattatttaactcccatttgtaagtgaaaacatgtggtatttgtctttctgtttctgagaccacgagtttgagacctcacttctgttttaaataagagcaacctgtgacacagagaagttgagtagaggctaagcctgaattcatacagctggcaaatgatggagccaggatgtcagccatggcagtacggctccagggtccattctgttcccaccacactacattttcctgccattttgatcawtttcacacaaggcagcacttataataatggctaaagatgatgtgacttggtagacctgtcttattaagagataaaatttatatttattaatttaataaatttatcaacttaatgaatatttgaatgaccatatcaaattggtttctaaaatatttctaggtatatacctataaagtttggaaggataattaaaacttagctctgtcaaggaatgttaagttgagctttatgaaattataattttgtgttaaaacacagctggatatcaccgcttcatagggtccaatataattttaataacaatcggtacttaagtattactgtcctaggtattttataaaagttaacg

SEQ ID NO: 78077 - DNA, 1023 bp, Homo sapiens
cattagcctaaccaaagccaatgctatgcaatgtcgatgtctacaattctttttaaaattagcaaattaccagatgtttttggctactgaatataygctcagccaaaagatagacacattagggagtaaaaaaagtataaaaaacatttttctgcctcaagaagttgtcagtctacatgaataaataatattttttccatgctgatcgtaatttgacactttaggagcctctctggtgttggcacagatctgtttgtttcagaagcactggtttgtctctgtacacagggtgcaagcgctgagagtgcgaagatgaggtcttgcagttgtgattcttggcacatttaagaaatagtgcagtgtgggtactggtccgtcagaatggatgttgtcatcaaccatccatgtggtcataccagtggcccgattcccagtgcccccatggtaacactgatttctgtgcttagcacaaagtacttgataaatacttgtgcttaattaagttctacaaagtaagatacacagataagtctttaccatctctgggtgaccaaaaaggagtttataatctgtatgttgcttttctttttcctagttaaaagaccattaagctattagagtaatggattacacactgtcgattacaagtagatgaatgtcttcacatacatttttcctttaaaaatcaatactgaatgcaattcagccaacattaaaaatatcctgcagttatattatcaaaaacattgaagttttaaccacactgccaaataaaaattttatctttttatttatggaaaatgtctaccattgcttagaatttgatgcattaaaaagcattgattctatcaggaaggaaaacctgctatgacctgagagggctaatccaatataggaaaattcttctggactttgagattttcataattttttaaaattctttttagcattcttttaaaaagcatgctaattatggaaaataaaataagtaatctttactacaattaaaaataatttttatta

SEQ ID NO: 78078 - DNA, 1023 bp, Homo sapiens
cattagcctaaccaaagccaatgctatgcaatgtcgatgtctacaattctttttaaaattagcaaattaccagatgtttttggctactgaatatacgctcagycaaaagatagacacattagggagtaaaaaaagtataaaaaacatttttctgcctcaagaagttgtcagtctacatgaataaataatattttttccatgctgatcgtaatttgacactttaggagcctctctggtgttggcacagatctgtttgtttcagaagcactggtttgtctctgtacacagggtgcaagcgctgagagtgcgaagatgaggtcttgcagttgtgattcttggcacatttaagaaatagtgcagtgtgggtactggtccgtcagaatggatgttgtcatcaaccatccatgtggtcataccagtggcccgattcccagtgcccccatggtaacactgatttctgtgcttagcacaaagtacttgataaatacttgtgcttaattaagttctacaaagtaagatacacagataagtctttaccatctctgggtgaccaaaaaggagtttataatctgtatgttgcttttctttttcctagttaaaagaccattaagctattagagtaatggattacacactgtcgattacaagtagatgaatgtcttcacatacatttttcctttaaaaatcaatactgaatgcaattcagccaacattaaaaatatcctgcagttatattatcaaaaacattgaagttttaaccacactgccaaataaaaattttatctttttatttatggaaaatgtctaccattgcttagaatttgatgcattaaaaagcattgattctatcaggaaggaaaacctgctatgacctgagagggctaatccaatataggaaaattcttctggactttgagattttcataattttttaaaattctttttagcattcttttaaaaagcatgctaattatggaaaataaaataagtaatctttactacaattaaaaataatttttatta

SEQ ID NO: 78079 - DNA, 1023 bp, Homo sapiens
cattagcctaaccaaagccaatgctatgcaatgtcgatgtctacaattctttttaaaattagcaaattaccagatgtttttggctactgaatatacgctcagccaaaagatagacacattagggagtaaaaaaagtataaaaaacatttttctgcctcaagaagttgtcagtctacatgaataaataatattttttccatgctgatcgtaatttgacactttaggagcctctctggtgttggcacagatctgtttgtttcagaagcactggtttgtctctgtacacagggtgcaagcgctgagagtgcgaagatgaggtcttgcagttgtgattcttggcacatttaagaaatagtgcagtgtgggtactggtccgtcagaatggatgttgtcatcaaccatccatgtggtcataccagtggcccgattcccagtgcccccatggtaacactgatttctgtgcttagcacaaagtacttgataaatacttgtgcttaattaagttctacaaagtaagatacacagataagtctttaccatctctgggtgaccaaaaaggagtttataatctgtatgttgcttttctttttcctagttaaaagaccattaagctattagagtaatggattacacactgtcgattacaagtagatgaatgtcttcacatacatttttcctttaaaaatcaatactgaatgcaattcagccaacattaaaaatatcctgcagttatattatcaaamacattgaagttttaaccacactgccaaataaaaattttatctttttatttatggaaaatgtctaccattgcttagaatttgatgcattaaaaagcattgattctatcaggaaggaaaacctgctatgacctgagagggctaatccaatataggaaaattcttctggactttgagattttcataattttttaaaattctttttagcattcttttaaaaagcatgctaattatggaaaataaaataagtaatctttactacaattaaaaataatttttatta

SEQ ID NO: 78080 - DNA, 649 bp, Homo sapiens
tatagaaaatactcattcctcattagaaggagcactgctgtcataaggcaaattcattatctaaacagtccagggaactccatatgggattgggatcattaatgtcaataaatctggtgccaaaaaagcaagtgcctgtaactccagggtgctggccccttactctgaaggcaattttagagcttggtattatgtctgggtgacttatggggtccaggctaattacaggcaagtggttggctttattgtttccagcattcagagaaacattctactcacaaaataaacttctagacttgtgtttggaatctttcctcaattcctatggtgcccttttatcsacctgggatgaggttaagttcaccactccctgcccatcaacactgtagaaggcacttcatttggacattttctcagaacactcttctgctttggcaggtgacatcagcatgacaccatgcagcaaggaagaagctgcctgcaggtccaactaaaacacagaatcccttcatgtcagccctacttaaaatggagataggctgcatttgaacgctaaagtgtccacttcctctaaaatatctgctctatcacttatgttattattaccttatattttttcttaactcttatactattattcaaatatcca

SEQ ID NO: 78081 - DNA, 702 bp, Homo sapiens
gagataaggctaacttgattaacgtgcttaatgtgaatgccacaccttgggtttcccaggaagaagactctcagatgaagaccagtgtttaggaagcttattaggaatgcttgcgggatcaacacctgytggggaagaaaggcagcaagattgggcagaggacagagttgggctatggtgcagtctcagtggaggtttccatcggccatcgggagttctgaagctgggctggcccttcggggtggtcccaagttgggggctggatctttatgcctcgccttagtccatcattagatgttggccatcccaggaaggagtatgaccttgggtgaggtggctcccctctgccacagtagtccttggcagctgagggctacttaaatgatttcaacttcttccttttgttcccccagcaccaggagtgatggttcctcagcagtggagggagggagtccttccttcctgaaggggatctgggtgggccagttcactgttcatcaccgtgagacaaggtggcacatggtgatggggagcacaacatgctggggtgggtgggggtgggcagtcaatagatgcaggtctaaaccttgctgcattggagagaagataagagaaaaagttgctgagttggtttcctgggcctatgtgctctcagagtcctttccttttcttagcttgcccagtggtgctgacacctgcagg

SEQ ID NO: 78082 - DNA, 702 bp, Homo sapiens
gagataaggctaacttgattaacgtgcttaatgtgaatgccacaccttgggtttcccaggaagaagactctcagatgaagaccagtgtttaggaagcttattaggaatgcttgcgggatcaacacctgctggggaagaaaggcagcaagattgggcagaggacagagttgggctatggtgcagtctcagtggaggtttccatcggccatcgggagttctgaagctgggctggcccttcggggtggtcccaagttgggggctggakctttatgcctcgccttagtccatcattagatgttggccatcccaggaaggagtatgaccttgggtgaggtggctcccctctgccacagtagtccttggcagctgagggctacttaaatgatttcaacttcttccttttgttcccccagcaccaggagtgatggttcctcagcagtggagggagggagtccttccttcctgaaggggatctgggtgggccagttcactgttcatcaccgtgagacaaggtggcacatggtgatggggagcacaacatgctggggtgggtgggggtgggcagtcaatagatgcaggtctaaaccttgctgcattggagagaagataagagaaaaagttgctgagttggtttcctgggcctatgtgctctcagagtcctttccttttcttagcttgcccagtggtgctgacacctgcagg

SEQ ID NO: 78083 - DNA, 702 bp, Homo sapiens
gagataaggctaacttgattaacgtgcttaatgtgaatgccacaccttgggtttcccaggaagaagactctcagatgaagaccagtgtttaggaagcttattaggaatgcttgcgggatcaacacctgctggggaagaaaggcagcaagattgggcagaggacagagttgggctatggtgcagtctcagtggaggtttccatcggccatcgggagttctgaagctgggctggcccttcggggtggtcccaagttgggggctggatctttatgcctcgccttagtccatcattagatgttggccatcccaggaaggaktatgaccttgggtgaggtggctcccctctgccacagtagtccttggcagctgagggctacttaaatgatttcaacttcttccttttgttcccccagcaccaggagtgatggttcctcagcagtggagggagggagtccttccttcctgaaggggatctgggtgggccagttcactgttcatcaccgtgagacaaggtggcacatggtgatggggagcacaacatgctggggtgggtgggggtgggcagtcaatagatgcaggtctaaaccttgctgcattggagagaagataagagaaaaagttgctgagttggtttcctgggcctatgtgctctcagagtcctttccttttcttagcttgcccagtggtgctgacacctgcagg

SEQ ID NO: 78084 - DNA, 702 bp, Homo sapiens
gagataaggctaacttgattaacgtgcttaatgtgaatgccacaccttgggtttcccaggaagaagactctcagatgaagaccagtgtttaggaagcttattaggaatgcttgcgggatcaacacctgctggggaagaaaggcagcaagattgggcagaggacagagttgggctatggtgcagtctcagtggaggtttccatcggccatcgggagttctgaagctgggctggcccttcggggtggtcccaagttgggggctggatctttatgcctcgccttagtccatcattagatgttggccatcccaggaaggagtatgaccttgggtgaggtggctcccctctgccacagtagtccttggcagctgagggctacttaaatgatttcaacttcttccttttgttcccccagcaccaggagtgatggttcctcagcagtggagggagggagtccttccttcctgaaggggatctgggtgggccagttcactgttcatcaccgtgagacaaggtggcacatggtgatggggagcacaacatgctggggtgggtgggkgtgggcagtcaatagatgcaggtctaaaccttgctgcattggagagaagataagagaaaaagttgctgagttggtttcctgggcctatgtgctctcagagtcctttccttttcttagcttgcccagtggtgctgacacctgcagg

SEQ ID NO: 78085 - DNA, 769 bp, Homo sapiens
gagcttgtatagaaatgaataatattcctggagaaaatttgtatatccctagggatatatagccacatcagtttgataatgatttctatatcatgtcacacttaactcattgcattttaagtacttgttcatgtcttttctctaactaggcccatgatcctttaagtaatgagccaaacctcacttattttttagtctcaaatacaaagcataataacaacattacagatgttacatgaataattaaatgaatacatgaagatttcacattccctttatttttgtcattctatatttataaaatctttccagcaagctctccaacrtcatcttacataatctttactcaagctacactggctttctttcctgtcctcaaatgcactaacatattgctcacctcaacatttccacaaatgttcttttattcattccttgattatttttgccttgactaacttctattaataattcaaatcataattcgtatttgaattcttcttccaaaacgcttcttccaaaacacttatcctgattcattcttccaacattaataaggtcgtccttctcatgtgttctacatagcatatatatgtgttatgtatcatatatatgtgtgttatgtatcatatatatacttaaatagtccaagagaaggcaatttattttcactttatcgatcaaaccatgcaatcatatgtttcactgaaggaaaaacaacctccttaatatatttttatattttcttaatataactgtatttcatgga

SEQ ID NO: 78086 - DNA, 769 bp, Homo sapiens
gagcttgtatagaaatgaataatattcctggagaaaatttgtatatccctagggatatatagccacatcagtttgataatgatttctatatcatgtcacacttaactcattgcattttaagtacttgttcatgtcttttctctaactaggcccatgatcctttaagtaatgagccaaacctcacttattttttagtctcaaatacaaagcataataacaacattacagatgttacatgaataattaaatgaatacatgaagatttcacattccctttatttttgtcattctatatttataaaatctttccagcaagctctccaacatcatcttacataatctttactcaagctacactggctttctttcctgtcctcaaatgcactaacatattgctcacctcaacatttccacaaatgttcttttattcattccttgattatttttgccttgactaacttctattaataattcaaawcataattcgtatttgaattcttcttccaaaacgcttcttccaaaacacttatcctgattcattcttccaacattaataaggtcgtccttctcatgtgttctacatagcatatatatgtgttatgtatcatatatatgtgtgttatgtatcatatatatacttaaatagtccaagagaaggcaatttattttcactttatcgatcaaaccatgcaatcatatgtttcactgaaggaaaaacaacctccttaatatatttttatattttcttaatataactgtatttcatgga

SEQ ID NO: 78087 - DNA, 769 bp, Homo sapiens
gagcttgtatagaaatgaataatattcctggagaaaatttgtatatccctagggatatatagccacatcagtttgataatgatttctatatcatgtcacacttaactcattgcattttaagtacttgttcatgtcttttctctaactaggcccatgatcctttaagtaatgagccaaacctcacttattttttagtctcaaatacaaagcataataacaacattacagatgttacatgaataattaaatgaatacatgaagatttcacattccctttatttttgtcattctatatttataaaatctttccagcaagctctccaacatcatcttacataatctttactcaagctacactggctttctttcctgtcctcaaatgcactaacatattgctcacctcaacatttccacaaatgttcttttattcattccttgattatttttgccttgactaacttctattaataattcaaatcataattcgtatttgaattcttcttccaaaacgcttcttccaaaacacttatcctgattcattcttccaacattaataaggtcgtccttctcatgtgttctacatagcatatatatgtgttatgtatcatatatatgtgtgttatgtatcatatatatacttaaatagtccaagagaaggcaatttattttcactttatcgatcaaaccatgcaatcatatgtttcactgaaggaaaaacaacctccttaatatatttttatrttttcttaatataactgtatttcatgga

SEQ ID NO: 78088 - DNA, 591 bp, Homo sapiens
gcattaggtctaactattagaagtaggggctctgaagtcagaaaaacctggtgttaaaagcagccttcaagacggcccacaatggcccttatattctgatgttcatgagattgtgtaatctcctccatggtgggctggaaaaatattcttgcttttcattragagaatatggcagaagtgttgggatgtcactttcaagcttggttatttaaagacagtcgctattctcttgggtgtgctctcacttcctcttggattgctcattccaaagaaggccagctgctctatccctgagcctgggaacagatcttctgtagcctgacaacaccgtgtggatgagcttggaagcagatcctcatgcagcttgagattatggcagtcctggctgacaacttgattgcagtcttttgagatatcctaagctagagccacccaccaaagccactgctagattctttagccacagaaactgagagataataagtatttgctctttccagtcagcgttttataggaatttgttacacaacaacaaaaaacagatgcacttgactttacattatcattctttctcttcctggctggatgtcc

SEQ ID NO: 78089 - DNA, 610 bp, Homo sapiens
tgcattttcgacagagcttgcaaagctcaaaccccgtgagctctggggtttttctggcaaaacacaggggctgagttccacacactgggtccacatcacatgaggcttattcagactatctcctgcctatgagcgatgatgttcatgttccatctcatatgcccaatgcagcgatggggcagaaagagcacagagggagctcatcgggggcactggaggaccccaaagtttcaggcccacgaggcgcatggttctgcctgctccaggcacaagggggcttctctctcagtgtgtcctggggtgggagtggrgggtgggtgtgtggacgatgggcaaacagtgaagtcatttctgtgcccaaattcaagctctggagttgtggtgaagaaaggacagaccacacccccctgagaccagggagcatttattcaaggaaacacttgtctttagaggatgttgacgatgccccaaacttactgtagctgtcaggaaaattaggtgagctatttagtatcattgagcttcattttacagaaccagcatgttgtccttagacttccctctgatccttttaggtctcaacttacatattgccctcttgagccttcta

SEQ ID NO: 78090 - DNA, 574 bp, Homo sapiens
atatgttggagaaaagcagtgtrttctggagtcaaatacatgattttgggtgggtgacgtaatcggctactgtcctccttttctagatagccaagatttttgaagcatttaacatccctgaaaggcaggactaatgctatgtctaccatgcactgctaattctgacactttgacctaatggataaatgccagtacagtgggtctagccagttagcttggtcagagaacaagatgactaagattctctccccctttcctcaccaaattgattagttgtaggacagaactgactgaagcaacctgttgttttggcaacccatggacaccacctgtttcttccattcctctgtccagcctctcactgccctagtgcagtgctgtgtgcacagtgggtaggagatcaatgttgttgctaaagaatgtagcaataaagaagagtagattgctttttttccaagcttttgtgtttttaaggcaccccgctggttttgacattcgttgctccagctgaactgctctatgctgaagccctgcaggtctcaagtgtttggttcagagtaatttcaggccatat

SEQ ID NO: 78091 - DNA, 574 bp, Homo sapiens
atatgttggagaaaagcagtgtattctggagtcaaatacatgattttgggtgggtgacgtaatcggctactgtcctccttttctagatagccaagatttttgaagcatttaacatccctgaaaggcaggactaatgctatgtctaccatgcactgctaattctgacactttgacctaatggataaatgccagtacagtgggtctagycagttagcttggtcagagaacaagatgactaagattctctccccctttcctcaccaaattgattagttgtaggacagaactgactgaagcaacctgttgttttggcaacccatggacaccacctgtttcttccattcctctgtccagcctctcactgccctagtgcagtgctgtgtgcacagtgggtaggagatcaatgttgttgctaaagaatgtagcaataaagaagagtagattgctttttttccaagcttttgtgtttttaaggcaccccgctggttttgacattcgttgctccagctgaactgctctatgctgaagccctgcaggtctcaagtgtttggttcagagtaatttcaggccatat

SEQ ID NO: 78092 - DNA, 574 bp, Homo sapiens
atatgttggagaaaagcagtgtattctggagtcaaatacatgattttgggtgggtgacgtaatcggctactgtcctccttttctagatagccaagatttttgaagcatttaacatccctgaaaggcaggactaatgctatgtctaccatgcactgctaattctgacactttgacctaatggataaatgccagtacagtgggtctagccagttagcttggtcagagaacaagatgactaagattctctccccctttcctcaccaaattgattagttgtaggacagaactgactgaagcaacctgttgttttggcaacccatggacaccacctgtttcttccattcctcygtccagcctctcactgccctagtgcagtgctgtgtgcacagtgggtaggagatcaatgttgttgctaaagaatgtagcaataaagaagagtagattgctttttttccaagcttttgtgtttttaaggcaccccgctggttttgacattcgttgctccagctgaactgctctatgctgaagccctgcaggtctcaagtgtttggttcagagtaatttcaggccatat

SEQ ID NO: 78093 - DNA, 516 bp, Homo sapiens
agcctcaagcaatcctcccgtcttggcctcccaaagtgctgggattacaggtgtgaatcattgtgcctggcctgtgcacactttttataatgggatttctcttccttacttttgatgtcccctctctcatacttagttaaccattttgaattccacttagtaagaaaagtttccattttctttttcttcaggggacttagatatgatctgcacctagatggtaagaagattttccatattttgaagtagaaactttctgtatgcctgaatcttgctgtcaagaatgtcttggctaatcatgaaggaagaatataagaatgtgagtaaaaacaattcaacagtccctgagaacaacgycaataaatattcaaaattgcataaccattttagtgactaaagcactgagactcatccaataatactgtggtttgataattacacagttgtgaatttatgatactgttaaattggggagacatcttgatgcatacaggtcaaccctttcatacatcatta

SEQ ID NO: 78094 - DNA, 1044 bp, Homo sapiens
catatgagtatgtcctgtgaggcttttccttgtattaggacttgagatctggaccctttaacagtaccattcctaagtgattcttattaatacttatgtcctattaaaatcctttatcaaatatgatgtttccctaaggggtcttttgtaaaggaagtcttggttactagcatctccatctgtggcccaggcttgagtgcagtagagcaatcatggatcactgcagcctccacctcctaggctcaagccatccatcctcctgcctcagtctcccatttttaaaactttttatagagacacggtctcacatgttgctcaggctggtctcgaattcctgggctcaagtgatcctcccacttctgcctcccaaagggctggaattacaggcctgaaccactgtgcctggccagttagtagcttcttaacacatagcaacataatttccatactattttcaactaatttttattctttcagttgggacctttatatatttcagtgttcagtgaagaagtaggagaatctggttcttaggctctgcctatatccttttacctgtcttgrgtaactgccaagaaattaaatcaacaaattttggcctgcagtctggcattaatagatgtgaatttagctaggtttctttcaacacagtctccaggtcaatcgtaatcttatgtgaagtttcttattcaggcatgtctcattagcaccattaatttcacacaggaattctttttttctccctttttttgtgactaagcaaaatgagaaatatttctctttcaggatatggagaggcttaattaaattctttaattttgtctacatctgcccttatgaatgatagcaaaggaatgggggatatcagaatatgagaaaaagtaatcatctaaaaatttccaagcactttaaaatttgttaagctagcataaatatgtgggtgtgatagaggttttcattaggcctcctctcaacatacagtagttaggaatgaagtttagtgtctctccgtcctcctgtcatatgtgtgtatgcacacatgtg

SEQ ID NO: 78095 - DNA, 1044 bp, Homo sapiens
catatgagtatgtcctgtgaggcttttccttgtattaggacttgagatctggaccctttaacagtaccattcctaagtgattcttattaatacttatgtcctattaaaatcctttatcaaatatgatgtttccctaaggggtcttttgtaaaggaagtcttggttactagcatctccatctgtggcccaggcttgagtgcagtagagcaatcatggatcactgcagcctccacctcctaggctcaagccatccatcctcctgcctcagtctcccatttttaaaactttttatagagacacggtctcacatgttgctcaggctggtctcgaattcctgggctcaagtgatcctcccacttctgcctcccaaagggctggaattacaggcctgaaccactgtgcctggccagttagtagcttcttaacacatagcaacataatttccatactattttcaactaatttttattctttcagttgggacctttatatatttcagtgttcagtgaagaagtaggagaatctggttcttaggctctgcctatatccttttacctgtcttgggtaactgccaagaaattaaatcaacaaattttggcctgcagtctggcattaatagatgtgaatttagctaggtttctttcaacacagtctccaggtcaatcgtaatcttatgtgaagtttcttattcaggcatgtctcattagcaccattaatttcacacaggaattctttttttctccctttttttgtgactaagcaaaatgagaaatatttctctttcaggatatggagaggcttaattaaattctttaattttgtctayatctgcccttatgaatgatagcaaaggaatgggggatatcagaatatgagaaaaagtaatcatctaaaaatttccaagcactttaaaatttgttaagctagcataaatatgtgggtgtgatagaggttttcattaggcctcctctcaacatacagtagttaggaatgaagtttagtgtctctccgtcctcctgtcatatgtgtgtatgcacacatgtg

SEQ ID NO: 78096 - DNA, 998 bp, Homo sapiens
tatgtgggcagggagagaaggcccaaggggagcagcacagtggggagcaacccacagccttggggaaggcacggcaggagaagagcatggagaaaggggcaggggagctgtcagagcattgaccatcaccgtggttttcctggttcacaggcttcctgagggctcctcagaaacatgtgttagaaaagaaaagctttccggtctgtccagtctcctccatgaccacagtttctcacccacataccattgtctggcttggaatggatcctggaaggaggactcaagagaaaccatagaaacagacaacaggaagtaagtgtgagggaagttttggacggtgaaagtattagatttgtcaactgggaagcagtataatattataattaagccctacatagagtcaaacaaatgttttcawatcctacctctgacactcatttttaaaatattttattttttggagcagttttagattcacagcaaaattgagcagaaagaatagaaatttctcatatactccctgtccccacacatgcaaaggccctctccattatcaacatccccacacagagtggtacattttttacagctgatgaacctacatcaacccatcatcaccatccaagcccatagtgtaaattaggattcactcttggcatcgtgcattctatgggtttggacaaatgtatgacacgtatccactattatatatcatacagagtattttcgttccttaaatatcctctgtgctctgcctcttcatccctcccgaggacaacccccagcaactattgacctttctactgtctctatagttctgctgtttccagaatgtcacatagttggaatcatacagtatgaaggctttttagattagcttctttaacttaataatctgcagttaaggttcctctacatcttttcacgtcgtgatagctacattcatttttctgtgagattttgggcatattggtctgtctctgtaagcttccatttcc

SEQ ID NO: 78097 - DNA, 2333 bp, Homo sapiens
catatgccactaatttaatccatactcctctgtagttgtttaagtctcctctcaatatgtccaaacaaacttggtattccatcagtttcatctggaagagagctcttccagagcctactgatctgctcctctctgggctaactgacctctaggcctgctgtgcatctgtcatcttgggacttccctttacccacatcctggggactctcttcacctctgtgttgagtgctctggttcctgaattccacctcttcctctttcttgactcacaacactgttttggtggagcacattcttcagtagtttcctaagagagagtgcagggaagatatagcatttgccatcagtgccctgcccaaattctcttggcacttaacatccaggccttcaaaactgccagcacatatgtctgtttgcctgagggctttttctagctactgaaagtttgctcaggaagtgttggggaattaacccccttttccctgggagagacccttaaccaatgactgatgagagttagtagataaatatcccagcttgctcaaccatgagggggtttaaccctgaagcatgctttctacacaggtctcccagagttccccgatggagtcaagttccactggttcacagtaacttgcaagatatattaacttccgtaggatccttttctcgttactttactcccgtacagatgtttactggggtcatctcccaaataaactaattttgctcttatattttttattttccatctgttatctttctgctttcctttctactttccaaatctactaagcttttttatatttttgctatcatatttaaatttctaagttttttttgttctctgaatgttccttttaaaacatagcattctgttcttatttcatatatgcactagttctcttatttctctggagatattattaatacttcttgttttctttttctttcagagatgctgtcatttctgagttatctttggagcatttctctccagtgtgtcagggtttcagagaaggctttcctaacattcaggctggctgtcagggtttcctaagtaagagaagatggcagaaggcaatgggtttataatctcctgttttttcccagcatgttgtcctttcacacaatagtgccttgtcccttctttgtcttactctcccaccagaaaaacctccattcttggacatcgtggggaaggggcaatccatctaacagcaagaggaagagggggcctggagctttcattgtttcctgaactgattttcaatgcaacttactgtttttagccacaacttcacccttatttccaaaagtacctggtgccmccaattgctgagcatttgggggattctgaaatgtaaagtgagttgctttacctttctcatctgcaggcttaggattcagctttctcaggtctcttgattcagttaccactcattcatctatgttctagcttttatttgtttatttatttattttttgagacgcagtctcactctgtcacccaggctggagtacagtggtgcaatctcggctaactgcaacccccacccccgaccttcccggttcaagtgattctcctgcctcagcctcccaagtagctgagactacaggcacccgccaccatgcccggctaatttttgtatttttagtagagatgggtttttaccatgttggccaggctggtcttgaactcctgacctcaagtgatccacctgcctcagcctcccaaagtgctgggattataggcgtgagccattgtgcccggccttatgttccagcttttaaaattatctttcttactcttgtcctttttatattcttttgtccttgtaggtttctccttaaaaaaaactcaccaaaattcttacttgcttacatatgcataaagaaactctggaaacacgcataagaaagcataacagtccttatttctggacagggagaaagtggaaactgagctgatgggagacatagatgagggaaacgtttcaggctgtgcctctttgtatttttctggttttaaaaccatgtgaatgtatcacttaatcaaaacattaaattttggttgagttctaggagggagtggagcatgtgtttaatctgctgtctttaaccagaagtctcaagtattgtttttctaaattagcagcttcaatgttgaaaccatgagaagctacccagccaaaagccattccaaacaaatccagagccataagcaaaaatatagacaaatttggctttgtgaaaattaaagatttatgcaaagcaaaaaccaaaaatcaaatcaaatttaaaaagatcagaaaaccaaaaacaaattggga

SEQ ID NO: 78098 - DNA, 1176 bp, Homo sapiens
tacttgcttttcttttcctgttttcttaagtttgaataatagtcatgtagctgtttaagaatcagacagaaggaaaactcatccgcttagtacttttcttaaattgtccagtttcttttggcctctgaataccagagtcttttatgtgtaagattagaaacatctggccagcatatctgagtaaggctgagctaaagcgggatgaaactaggtagaatggcctgcctttctgaattatagaattttaagcattgatgggactcaaacttaataaattctacctcttcattttgcagatgaaaagacagtcccaagaggttaggatttgcttaatgtcacacagcctgcatcagaggtgaacccagaacccaggtctccatactcctagtctggcactgtttttatatatatatccatgcttagagaggacttgtgtattaaaatttttttataaaagtgcatcatccctgtctttgaaacacccaattattttgcaattcttacccactgtgtatatattctttaggagaagagagagagttaatgttcatagaacacctattatgtgccaggtttttcctacrtcttctcatttaattttcaccatgctatgaaggaggtattattctacctgttccacagatgataaaactgagaggttaggtacacttgccgaagttcacataactaggaagtagtggactcaggattcaaatccagatctctctcatctgcagctcccagactgtgctacaccacattgccacagccactgtgcacatcacagcttacagtaacatactttccacttttcaaattatgacccaattttcataatcactacttttgtggatgtattcactcattcagtaaattatttattaagcagctactctgtgccaggaatagtcaagacactgaggatatagtagtgagcaaaatacataaatccttgctctcatagagcatgggttacagggggaggaatagacaacagcccagaaaaataagtcaggtaaaatgataagcgttggaagaataaagcaaggaagaacaggatatgctagaggctgagggatgggaggaagatagcaagtttaaatacgattgtcaggaaaagaaagtatcattggttacatttgaacaaagatctgaaggcagtgaaggaacaaacta

SEQ ID NO: 78099 - DNA, 1172 bp, Homo sapiens
gcatggatattatttcacttacagaaaggatttgtacttagtttgaaaagcattcctgtaggtgactgtattttaaatttatatcttgttttgagtgcacaaatggctgtatcacttcccatacaccatgaacatttctatgaagttgaatctactacaagaaagacaaaaaaaaaaaaaaaaaaaaaggtttaacccaaccctggattggaggcaacatccatgtggacagagtggaaatcacaattacaaaggaacaattaattgatttccaaaagctaactcaatgaggccaaagagggcccttggcaagggaaccttagctacttcatatttcagtacatgttttctatatattatgcctttctctaggatgcagtattagctagtcaatacatggcttcaccattctaagccacttcattgatcaaaacatgattcccttctagaaacctcccaaggtctaacacaataccacacaaaaagttgtcatcaacattctttttgttgaatgaataaatgaatgaatgaatgcccatttagaggtttttaaataccattttctctattgctaaaatttttcaaatctattttccagattttttatcatgaaaggagaaatataaataccaatcttataataatagtactttatgaactgtgaaggtaataataataaatatttaataatgtcatctggtagtagtagaatttgaatctaaatgatagtcacacaaagtcacctgtgtgtgattatgattggagaacctgtagagcctattcacatgagtatcaaggagacttccaaggagaagctcattctaagagacagtcagaaaagtaatctgtaagtaataggttggggttaaagactatgttgcaatttgggcctttgttgattgtattaacttttagtcctaattgcttccctttcccctgtttcttcttaatttgtgccagagtagaggagtgaaaatataraaaaaaaatttttaatagctacttaattaaaacatctgttaggcattggttacataagtcagcactatcctgggatccgtataagagaaacatgggcaaaaaaagtatagtgttatgctaggaacagacccttttactcaaggaagtgttgtgccaaacaggcaactagatagataattcctcaacactgt

SEQ ID NO: 78100 - DNA, 871 bp, Homo sapiens
caacatgattgtggttctaagtaaaggaagtcatgaatctgaaaacagatkaggacaggtagggaggccaactgatgtgattatccacccaatttatttaaaatgcttttgaattttgaaggtgatcagattaaaaattttaatgtaatgggattcttgtcatagtttggattatcccaaaagcaaatccttagattcatattaggaacagattacttgggggttgatcccagaatgctggagtgaaggagtagggagaatgagacaggatggatgaaaagctaattaaaatgggttattgagcaaaatgggttattgagcagattgttactctaggtggtaacagtcctgctgtggatctattgggaaactatgtagaaggaatctcagaattgtcccactaaagaatgtgagtctggggcatacatccattcactgagacccatctctgactgactgaagttgcttctaatgtttatctactatacttatggactgtgcctttggagtaagatgccctaggagctagggcagggaagtctacagtatgtccaagaactgtctgccacagctatagattaaagtagagctgctctagggaaccccttggatacctgctaggtgtggagtaccaataatgtctaatatacatgtatatgtgcatttaatatatatttttttccagctactactttaaatattaaaatgtatatttttataacttaaattgctccaagggatagggatgaactgaagaaagtaacccagtattaaagaatttgtaaaatttaaagcaaatctgaaaaggtgattgatagaaaaggagcaccatcatctcagacaaacaccgccattttaagttacagtacag

SEQ ID NO: 78101 - DNA, 871 bp, Homo sapiens
caacatgattgtggttctaagtaaaggaagtcatgaatctgaaaacagatgaggacaggtagggaggccaactgatgtgattatccacccaatttrtttaaaatgcttttgaattttgaaggtgatcagattaaaaattttaatgtaatgggattcttgtcatagtttggattatcccaaaagcaaatccttagattcatattaggaacagattacttgggggttgatcccagaatgctggagtgaaggagtagggagaatgagacaggatggatgaaaagctaattaaaatgggttattgagcaaaatgggttattgagcagattgttactctaggtggtaacagtcctgctgtggatctattgggaaactatgtagaaggaatctcagaattgtcccactaaagaatgtgagtctggggcatacatccattcactgagacccatctctgactgactgaagttgcttctaatgtttatctactatacttatggactgtgcctttggagtaagatgccctaggagctagggcagggaagtctacagtatgtccaagaactgtctgccacagctatagattaaagtagagctgctctagggaaccccttggatacctgctaggtgtggagtaccaataatgtctaatatacatgtatatgtgcatttaatatatatttttttccagctactactttaaatattaaaatgtatatttttataacttaaattgctccaagggatagggatgaactgaagaaagtaacccagtattaaagaatttgtaaaatttaaagcaaatctgaaaaggtgattgatagaaaaggagcaccatcatctcagacaaacaccgccattttaagttacagtacag

SEQ ID NO: 78102 - DNA, 871 bp, Homo sapiens
caacatgattgtggttctaagtaaaggaagtcatgaatctgaaaacagatgaggacaggtagggaggccaactgatgtgattatccacccaatttatttaaaatgcttttgaattwtgaaggtgatcagattaaaaattttaatgtaatgggattcttgtcatagtttggattatcccaaaagcaaatccttagattcatattaggaacagattacttgggggttgatcccagaatgctggagtgaaggagtagggagaatgagacaggatggatgaaaagctaattaaaatgggttattgagcaaaatgggttattgagcagattgttactctaggtggtaacagtcctgctgtggatctattgggaaactatgtagaaggaatctcagaattgtcccactaaagaatgtgagtctggggcatacatccattcactgagacccatctctgactgactgaagttgcttctaatgtttatctactatacttatggactgtgcctttggagtaagatgccctaggagctagggcagggaagtctacagtatgtccaagaactgtctgccacagctatagattaaagtagagctgctctagggaaccccttggatacctgctaggtgtggagtaccaataatgtctaatatacatgtatatgtgcatttaatatatatttttttccagctactactttaaatattaaaatgtatatttttataacttaaattgctccaagggatagggatgaactgaagaaagtaacccagtattaaagaatttgtaaaatttaaagcaaatctgaaaaggtgattgatagaaaaggagcaccatcatctcagacaaacaccgccattttaagttacagtacag

SEQ ID NO: 78103 - DNA, 3134 bp, Homo sapiens
atgtttaatgtgaaaaaaaatcctttgaaataattcatataaataaaattgtattggaatactgtttttcaggcacttttttttataaagaagtaaagtagagaaatgtaaagaatttcgaaaccttaaggcataacactgcaagttacttacaactctgatttatatgaagccagtggtaaactgatcccacatgtgaaatgagtcaaactctttctaaacattagagtgtgttaaaggaaagggaagctttactaaatagtttatcctgctctacaagatttaatttttcacactgagaaaaactgattccctccaagaaagtgactgacttgtccaggctcagtatattatcagatgtgtttgggttggacttaagcctataaacatggcttaagaatttaactctacagaaattgcatcatatgtctacttgtatttccaggccctccttatagaaacccttttaaaaaaaatcaacttctattgccttatgtgtaaagctaaaacatatctttttaaaaatcttaaataatttgaatcattttaattagttaagaatagactttatgaatttttatgttttaatattgtatttgttttctatggcttcataacagattaccatacacttggcactttaaacccaatttattatttcactgctgtgtaattcagaagtttggatagtcttcttaactaggttccccacttagagcctcacraggccaaaatcaaggtgtaggctatgctgggaaagaatccactttcaggctcagtctagtgttagcagaatccaatcccatgtggttgaaggaccaaggttccagtttctttgctgactgtcaaccaatgcaccctctcagtttttagagggtgcccttcgacccttggacttgccccctccatctccaaagccagtaaaggagcattgatcccttctccaggcattgatcccttctccaggcattgattcactcaggtggaaaaacttctctgcctttaaaggtttcatgtgattaaattaggcccaataggaaatattcccttttgccacataaaattacataatcatggaagtaacaccagagaataaggtcatgggagacattttaaagttcttctcaccaccaatatgcattaaaatgctagtatttaaaagtgtaagcaataaaaaaccactgtattcatgttagtttcaaataacaataaatttagtttaaaaataaagccccaatgaatacaagaagctattaataacaattttggttacttgtaaaagttcaacatacagcatatgacatacagatggtaatggtttcatattagaagtatttgaggcattaatcaagatagctaataacctaaataaatgacctaaattttaagtagtaacataagggaaaaaatatcgtaggtaaaaacagaaaaagaaaatggttttaccatatacgttttaaaacttctttaaaaatatcaactatgtttaacagtaatcatactaaggcaaattagtattgagatataatttatatgtaagaaaatctcaatagattatgtttgaactttctataaaagatgtcagcatcaaagtcttttcacccatttctcttattattctcaaaaaatatcaataaaattttaaaacaaatgcaggctggtgcggtggcttacgcctgtaatcccagcactttgggaggccgaggcgggtggatcccttgaggtcaagagttcgagaccagcctggacaacaaggtgaaacaaattccagctactcaggagactgggacagcagaatcacttgaacttgggaggcagaggttgcagtgagccaagattgcgccactgcactctagcctgggcaagacagcaagactccatctcaaaataaataaataaataaaatgcaaataaaataatttaattatgcaacagatattacctgcaaataaaatgtgtaattttctaccacatggaatgaagtatgatataaatcaagtagaacaccaattctcacatatatcagccaagatgtttgccaagatgtgttattctcatgcattatgactaaacataatttacataaatcttaagaaaactctaacaacgcctcttttctccaaacaatgtggcaaaaactgttgacaggccagtgactaaatcagggaaaattccaatcagtccttggggaaagtggagcaagggaagataaaactccaacatgctgtttttcattttctgtgactcaaccttcaatcatcagaaatagcaaggacttaaggagtaaaagggagaggaaaagccacagtcaccacatagttgttgaccagagtcagttcagcagagataaacaagcagaaaatcaatagcccaaaatgctggcagctgtgctataaagtcaagaggcatctctgcttggatgctagtcctttacattttctttattttcttgatgatttgtgttatttcagtctctgctataatataaccaactcatagctaccctccctgaccaacttatcacaatcaatactcctcatacacatgtacaaacatctcatcacctttcatccctctaattgctgtttttcatatagcgctaattatatccaaaatcatgtttaccaccttttctactagaaagttccaatgtgaaaggaggaaattttcctatattttttagtactatatacttaacatttggaataatgctcagaatttattggcattcaatatatacttaaccagtgaataaatggatgaatgacagaatcaggaagagaaaagaacagagacaggaagagccagagacagagagacagagaaacagagtgagacagagtgagacagaagtaatacatatattctcacaggctgtgctgaacatttgactttcttatggggagggatccaaaaggactataactttggggcaaatttacatttctgttatcaaaaatttgaggctaaaaataaaaaaaatttaaagattttttgtatgcaaggtatacagtcatttgtaatattagtcaatatgctgtttgggagttatacaaaatcaaactgtaaagaaagcacatgaaatttaagtcaagaaaagtgaaaagtgggtattttacagattaccttagaga

SEQ ID NO: 78104 - DNA, 1301 bp, Homo sapiens
tagcataaaagtacacatacaattccactattttactaaggctgacattttgaggttgagttacaactgcagggcagttttcaaaaaattgccctacaaacatcatatgaatacattttacacatttataggtagaaaaagaaagatatttccaaaagttaacctagaatgctgccccagcatttgctggtttctatgcttgacaaaatcattcttcattgatttagaaaaagttaccaaaacaatatgatgactgaatgatttcttgtttcaccagagctgcgtggtttctttgagtgtgctttaagagagagggagaagccagggtgggcatgaagagccagtatgtaagctgtattcaaggtggtctctgtctttttagagctaagggaaactgtcttttgccttgtcttattcatcgatttagtagaaagcttgtgtgtgttttatattttggaatattcagtcttttagatttacttccaaataatttatttctacattatgcttctttgtttgtagagaacaatacttacacaagtgttttatgaagtaaaatgaaccaacactacactctacaaagggaatttcaaaataaaaaccattacggatgaatggcatacattacagacatctctaccatatgtcttaatgggtctgttgtactgagcccatttacaaaattcataggcctaatttatctaagaaatagagcgataatgctttcaagacaaggaaagaaatagaaatgtggtaaatataaaagacacattaataatttttcctatgaccctgatttctgtcttttcttttaaattattcagagtcatatcagaaggatagttttaataatacagacattattcaatatcagtagaagtttggcaacattacttcctagagtaggtggttttgagacagagtagggacagggcttggcttcacccccactagaggattcttttatgcagtcccacwgatcacaaaacctataccactacctcactgaagccgtaatgtttaaccataccttttacttaattccagaaactggccttaagagatccaaatattaaaccaagattgtggagtgtcccacctcaggaaggaatgctggacaattgatttacagcctgttgctgttggtcagaccaccagttggtctcttattcaagataatttctataccctactcctcacatactttgcccagcccagacggcatgccttattcctgatgtcagttcccacactttgcctaataaaaaacctctgctggcttttttggggggtcagctgga

SEQ ID NO: 78105 - DNA, 552 bp, Homo sapiens
aatgtacagtgggttcattgggatatactcctattgtaagccaaggaatatctgcactttctaattataagcacatctctaaaaataaatgtcaatcytacagtaatggaggcgcaacttaagtgttcaccttggaagatgttaagagacttggcagctgtgtgttttaactttgtttactccatatgatgccaaatcaataactgacagaaaagaaaataaaaatgttcaaatgggttagttgtagaacttttaagtaactagagtagcttcacttatttgattttagctactgtccaaaatagttccaacctaagagagatgagttagcactcatgtaatttctcccatgaaccctccttctaaagttacaggtgaaatgggcaacatttttatttcaactttctgtcagtgatcattatagttcttttacagagatgcatgaagagctcaacacaactcttcacggcattgtcaaccttgttctgtaagagcattgggccatttttccaaaggtttctctgagaaactcttctgccaaagagcctttgg

SEQ ID NO: 78106 - DNA, 698 bp, Homo sapiens
attttcttgctttttcctgcttccagaggctacccccatccctttgttcattgccttcttccttcatcttcaaatctgtcgaagacaagttgaatccttctcctactgtatctctctagcgttgcttctgtaatcacatccccttctctcactggtgactctcttccctttcccttctctgctggtaaaaatccttaaaattacatggacccacccactcatccagaatatcctccaaatccctacttaatcacatctgcaaagtccctcattccatgtagggcaacatatttataggttctgtggattaagatgtggacatattttgggaacattattctgcttcccacagttagtatgcttttctcttgttttttgcttttcttttttcatttttcaggatctgatctaaattgtataagaaaagtttgcattagtcactgcaaaacttgcaagagacagaaaagggcttacrtatggacaattattagaataaaaactattttctaggataatataaccctaaaagggcagcaaacgactataggatcttaaaaagaacgaaatagtggaagaattaagtcaatcacagcacctaggacacattctcataatgtgtaaattggagcaaattaactaaccactctgagcctcagtttctttaacctttcagggattttacaagaattaaggggata

SEQ ID NO: 78107 - DNA, 1033 bp, Homo sapiens
tttaaatttctaattctatcaactatctttctgcttttcaaatccatagctgcagtggatgagtcaakgaccaagaagagtttctgtatagacactgattggaaggtaccaatcactgataagatagcaggagaggatcaaagaacttgtgaatagtaaatagtgtcagaaacaatcaagacatatgcctgcttgcgaagaagccacaaaaaaaacaagataagcatggtctggctcttcagctgtagactttgccctgtagtctccctgtctctgcatccccagaacccaatccttcatctcattccacatctctgctttggttcacatcagatattacgccagcttctttcatcactttatttttctaattgtctttcatggctcgatcatgttattcattctgaatatttaacttggtaaacctattggttcaatatgtgtcctattcccaaacaagcttttcctccaagctcctcctgccagccaaaggtgtaataggatgaatttgttaaaatgccaaagaccacaaaaagcaaagtgatcaggagctcattagggtagaggcatacatgcttgaacacatgattatcatcagggcatcattgtattatgaaagtacaatatgattatttcattgactctgagccataaaaatatcaaggaaacagctacatataaaataatacagcttagaaaagctcctacttctgttgtacaagttgttaaaagcttaattgctttaaagtcatgattgtccagattaactctttatgattattggagagctgtttctggtttgctctgatttgtgatgtgtctcttcctttttccttcctttcctctttctgttctaccttatgtctttctttctttctctttctttctttctttcttttctttcttttctttcttttctttctttttctttctctttctttttctttctttctttttttctttgtttctcttctttttctttcttcctctttctcctctttctctctctctgtctctctctctctctcacaca

SEQ ID NO: 78108 - DNA, 1033 bp, Homo sapiens
tttaaatttctaattctatcaactatctttctgcttttcaaatccatagctgcagtggatgagtcaatgaccaagaagagtttctgtatagacactgattggaaggtaccaatcactgataagatagcaggagaggatcaaagaacttgtgaatagtaaatagtgtcagaaacaatcaagacatatgcctgcttgcgaagaagccacaaaaaaaacaagataagcatggtctggctcttcagctgtagactttgccctgtagtctccctgtctctgcatccccagaacccaatccttcatctcattccacatctctgctttggttcacatcagatattacgccagcttctttcatcactttatttttctaattgtctttcatggctcgatcatgttattcattctgaatatttaacttggtaaacctattggttcaatatgtgtcctattcccaaacaagcttttcctccaagctcctcctgccagccaaaggtgtaataggatgaatttgttaaaatgccaaagaccacaaaaagcaaagtgatcaggagctcattagggtagaggcatacatgcttgaacacatgattatcatcagggcatcattgtattatgaaagtacaatatgattatttcattgactctgagccataaaaatatcaaggaaacagctacatataaaataatacagcttagaaaagctcctacttctgttgtacaagttgttaaaagcttaattgctttaaagtcatgattgtccagattaactctttatgattattggagagctgtttctggtttgctctgatttgtgatgtgtctcttcctttttccttcctttcctctttctgttctaccttatgtctttctttctttctctttctttctttctttcttttctttcttttctttcttttctttctttttctttctytttctttttctttctttctttttttctttgtttctcttctttttctttcttcctctttctcctctttctctctctctgtctctctctctctctcacaca

SEQ ID NO: 78109 - DNA, 1802 bp, Homo sapiens
ctatgtagatggccagtgagcgctctgagcctgctgggctggggggaaagaaacccgtgtccacttctgggctcagtcagggcctaggctttgatgcctttgtgaaatagcagggaggggctcagacactttgcctataggaatcaataactcatcagcagggccatgaaggcgtgttggggctggggcgggaataagatgagacatccgagggtcagagttccttccattatctgaactgtcaaagggcccaagctgtgagtttacaagcgccctcctccctggccctcacatcccggagtggagggaatgttccaccttggctcctgaggcctgcctgcttttgcagcaaagagggaccgtctcatgaccttgtgacacgtggcgtctccacagaaggccttgggatgctaggtccacatccacgctccggtctcatcccagcccagaacagcagtgcagggaagttgacccaccttctggaagcaagctgcaggttcccctagtctgccagtgctgtctgccccataaggctctcctggttccattccatgcagggtccctggcatccaaccacaaagccgggatcccactggcaacctctccccacacacttcactgggtcatgaagccacatccatcttctgccctgaggctccccgccagggtcctcatgcccaagagagaaggaattccctcatttgtgtgcaaagttcaaaaatgttgtctatgcatctatgcctacagctctgccttcctggccaggacaaacttggtggccgtttgtgggaagtcctgagctggtgctgggaggaaggagggaggttccccttcatgcttttgtgattgtacccttctccycttcttcagccatattacacggcacgattttaacatactgtccacaggagtcacaaagcaggaagccacagtggaagggttaagcaggaagcctccagagattcagggggaagggatcagttccaggcccagcaggggctgcaggtctcagcctgtgcactggcaggagtactcagtgcggaggatgggagggcacgcctttggcaggaggcacatgtggagagggcgctcgagggagtagggcagtgtggttcccaacacgccaggggacgggcgggaacaagagccccaggcctccttgaggggctctagtgagacagatactgccacatggtcacagaaggaggcccagctgtgtcacatcccacagaagggtccagggtggcagcggagcggacagtggggtgttttagctgcgtcctgggaaacagtcaggttgtccagagggagggaaagtgtgtggcagggccgcagacacggatgcccccacgacttggggcgcagcggctggaggaggtgccctgtggaacgggggatgatagacgcagggacagcagccaggctgaggagggcccgggtgcctgtggaactgccgagtccaccctctgggcaaaagaacagcaccaggtgacggaggagagtggaacctggaggccagcacgcggagtgcagacacgccactgccagggcggggagctagaggggtccggccgcgtttctggaaacggagcctggaagggaggcagtacttccatgaacaccaacactgctatcaggaagagggacagacctgatcaggagtgggagcagggaaggaaatggcaggtttcaccaagggtcattgaaattctggacgcacactcaaacgtgtcactcacaccacgtcccaaatccccccagtttgtcactatggtaaataggaaagcgtttataatactttg

SEQ ID NO: 78110 - DNA, 1802 bp, Homo sapiens
ctatgtagatggccagtgagcgctctgagcctgctgggctggggggaaagaaacccgtgtccacttctgggctcagtcagggcctaggctttgatgcctttgtgaaatagcagggaggggctcagacactttgcctataggaatcaataactcatcagcagggccatgaaggcgtgttggggctggggcgggaataagatgagacatccgagggtcagagttccttccattatctgaactgtcaaagggcccaagctgtgagtttacaagcgccctcctccctggccctcacatcccggagtggagggaatgttccaccttggctcctgaggcctgcctgcttttgcagcaaagagggaccgtctcatgaccttgtgacacgtggcgtctccacagaaggccttgggatgctaggtccacatccacgctccggtctcatcccagcccagaacagcagtgcagggaagttgacccaccttctggaagcaagctgcaggttcccctagtctgccagtgctgtctgccccataaggctctcctggttccattccatgcagggtccctggcatccaaccacaaagccgggatcccactggcaacctctccccacacacttcactgggtcatgaagccacatccatcttctgccctgaggctccccgccagggtcctcatgcccaagagagaaggaattccctcatttgtgtgcaaagttcaaaaatgttgtctatgcatctatgcctacagctctgccttcctggccaggacaaacttggtggccgtttgtgggaagtcctgagctggtgctgggaggaaggagggaggttccccttcatgcttttgtgattgtacccttctcctcttcttcagccatattacacggcacgattttaacatactgtccacaggagtcacaaagcaggaagccacagtggaagggttaagcaggaagcctccagagattcagggggaagggatcagttccaggcccagcaggggctgcaggtctcagcctgtgcactggcaggagtactcagtgcggaggatgggagggcacgcctttggcaggaggcacatgtggagagggcgctcgagggagtagggyagtgtggttcccaacacgccaggggacgggcgggaacaagagccccaggcctccttgaggggctctagtgagacagatactgccacatggtcacagaaggaggcccagctgtgtcacatcccacagaagggtccagggtggcagcggagcggacagtggggtgttttagctgcgtcctgggaaacagtcaggttgtccagagggagggaaagtgtgtggcagggccgcagacacggatgcccccacgacttggggcgcagcggctggaggaggtgccctgtggaacgggggatgatagacgcagggacagcagccaggctgaggagggcccgggtgcctgtggaactgccgagtccaccctctgggcaaaagaacagcaccaggtgacggaggagagtggaacctggaggccagcacgcggagtgcagacacgccactgccagggcggggagctagaggggtccggccgcgtttctggaaacggagcctggaagggaggcagtacttccatgaacaccaacactgctatcaggaagagggacagacctgatcaggagtgggagcagggaaggaaatggcaggtttcaccaagggtcattgaaattctggacgcacactcaaacgtgtcactcacaccacgtcccaaatccccccagtttgtcactatggtaaataggaaagcgtttataatactttg

SEQ ID NO: 78111 - DNA, 582 bp, Homo sapiens
acaaagtgagaccctgtctcaaataaataaataaataaataaataaataaataaaacgtatagtcacatgactaaattgcaattttcttgtaacagaaataaggctactatttctctggaagaaagtttagaatataacaatttcaagaataaagctgtaagaccttggacaagctacttgaattgatcaagtctcaagttttctcatttataaaatgactgggctgggcaaggtggctcacacctgtaacctcagcactttgtggggctgaggcgggaggactgcttgagcccagggattcaagatgagcttgggcaacatggtgaaatcctatctctacaaataattaaaaaattagccagakgtggtggcacatgcctgtggtcccagttactcaggaggctgaggggggaggatcacgagcctgggaggtcgaggctgcagtgagccatgatcgcactactgcactccagcctaggtgacagtgcaagaccctgtcaaacaaaaacaaaaacaaaaacaaaaacaaaaacaaaaacagacaaaaaacacaaaaaagtgactgcattgtactagacaga

SEQ ID NO: 78112 - DNA, 582 bp, Homo sapiens
acaaagtgagaccctgtctcaaataaataaataaataaataaataaataaataaaacgtatagtcacatgactaaattgcaattttcttgtaacagaaataaggctactatttctctggaagaaagtttagaatataacaatttcaagaataaagctgtaagaccttggacaagctacttgaattgatcaagtctcaagttttctcatttataaaatgactgggctgggcaaggtggctcacacctgtaacctcagcactttgtggggctgaggcgggaggactgcttgagcccagggattcaagatgagcttgggcaacatggtgaaatcctatctctacaaataattaaaaaattagccagaggtggtggcacatgcctgtggtcccagttactcaggaggctgaggggggaggatcacgagcctgggaggtcgaggctgcagtgagccatgatcgcactactgcactccagcctaggtgacagtgcaagaccctgtcaaacmaaaacaaaaacaaaaacaaaaacaaaaacaaaaacagacaaaaaacacaaaaaagtgactgcattgtactagacaga

SEQ ID NO: 78113 - DNA, 526 bp, Homo sapiens
cgggggccagactccatctcaaaacacaaaaaacaaaaacccgtatgttccaaattgggactcttaaacatccctatcatcttattacactcatcagtcagcatccgtttattcttctatgtgctacaccttaactcaattcgcaagtaagggtgtgtacaaaagtcttcattatttcagaaaaaatcttcagagaggagatttattgtgaatgctgggatagttcatggcaacaggactgcttgtgtttcccctaagggcttctcaaggaagactgtgtgcttcccccagggtgcccttcccaggcaggaaagaggggtctcatggccagggggaaaggtgggagtcctggccctggcgggggccctcctagtccctgtgccgatcccatcrggaattgttgatgacagaggagaaaccagggctgcagagctggggtagcctgtccagcatggaatttaaacttgcaggacatcaaagccaccacaccttaagttttggcctttgggtgacttggatgaaaccc

SEQ ID NO: 78114 - DNA, 526 bp, Homo sapiens
cgggggccagactccatctcaaaacacaaaaaacaaaaacccgtatgttccaaattgggactcttaaacatccctatcatcttattacactcatcagtcagcatccgtttattcttctatgtgctacaccttaactcaattcgcaagtaagggtgtgtacaaaagtcttcattatttcagaaaaaatcttcagagaggagatttattgtgaatgctgggatagttcatggcaacaggactgcttgtgtttcccctaagggcttctcaaggaagactgtgtgcttcccccagggtgcccttcccaggcaggaaagaggggtctcatggccagggggaaaggtgggagtcctggccctggcgggggccctcctagtccctgtgccgatcccatcgggaattgttgatgacagargagaaaccagggctgcagagctggggtagcctgtccagcatggaatttaaacttgcaggacatcaaagccaccacaccttaagttttggcctttgggtgacttggatgaaaccc

SEQ ID NO: 78115 - DNA, 985 bp, Homo sapiens
cctccttccttctcccagctcacagccttgacctttactgaggatcacagacaccccaactttcccaggaccatcctggtctcaaaagctccctcctggcatccctgcatgtcatcaaactgtcctaggtattatgtggctttgctggccacaagcagaactaccaacagcaatgagcagaggcttgagcaggtgtctcggttcctcggggaaaagcttgttctgtggcctgttgggtgacaccaaaggccaggtgtcaccacagagactctgacttgttggtggggacctggacaccgggctttgaaaagctcatgggggctccaacacacaggtttggggaccctcaggggttgagggttgcaggtgatcctccagcccagccagccctgcatgtgcaggggaccctggggaggggcaggggagctagggtgggtgtggctgcagcacccyctgaggccccctcaggagagccgggttacccatcgctggcaagcagctccctgcatgtgtgagtccctaggttgccgtctccaaacggacatctgtgcggctcagtcaccagacaaactggggccacccattgccacagctgcagaggcgcgacttaaagagcgaagtgtaaagtattcgggttgggtggttctgactgtaccaagggacgtgtgcatcagacctgcttacctcaccccaggggggacaagcctggggcaattttagggtcgagggtgcgccaccgtatcccagatccccaggacccagcccaggctgagctggacactagtctggggcctgccagcccctccccaccctggacagggcttgtgcactcagcagggctttcttcccaggggttttctgctcagccccctgcactgagggtttcctacaactagcttagtcactggggtctcggcttatcagcctcaagtcacacatgacatcagcacccagaggtgtgagcccgtccccatccattcatttc

SEQ ID NO: 78116 - DNA, 741 bp, Homo sapiens
ggaaggccgcagagctccacaggggtagagcgggtcagggctttagggtcaagcaggtctgcgtttcaatccacactcacaacttacttaggctctctgaccctcagtttctcatctgcaaaatgggtcgatacccactcatggtgttaggattgaacaaggtaacacaggtaagtgcagggtgtagcgcctgccccctaggacacacggtgttaaatgtaagtgccctgctcccatccaatatcaagtggcaaagagcagagtggagtcagcagacccaggaatgaccccaatcctaacctctactggctttgtgaacctcagtttccctgtctgtaaggtggggagaagctctgtgggtgctggaggaccttggcagcatgatgccctcccagggtggacctgccagagccagcggcctcgcacattgcayggcgtctggggatggacagcccagggctgcagagacgacctgcaaccccgccgtggccttttcattatcacagaaatagcttctttcacgtaaaatgatgtgagcaaagaggaccctgaactgtggcttcagcagatcgcttcttgcctgcacagatcttctccaggggccctgaggtctcaactccctgggctgatgtttatcagtgaattcaacggccggcagcaagggcgacagagaggccactgagggaggcaatcctgggcccccaggattcacctccagtctgatagtcctctgccctgggg

SEQ ID NO: 78117 - DNA, 741 bp, Homo sapiens
ggaaggccgcagagctccacaggggtagagcgggtcagggctttagggtcaagcaggtctgcgtttcaatccacactcacaacttacttaggctctctgaccctcagtttctcatctgcaaaatgggtcgatacccactcatggtgttaggattgaacaaggtaacacaggtaagtgcagggtgtagcgcctgccccctaggacacacggtgttaaatgtaagtgccctgctcccatccaatatcaagtggcaaagagcagagtggagtcagcagacccaggaatgaccccaatcctaacctctactggctttgtgaacctcagtttccctgtctgtaaggtggggagaagctctgtgggtgctggaggaccttggcagcatgatgccctcccagggtggacctgccagagccagcggcctcgcacattgcatggcgtctggggatggacagcccagggctgcagagacgacctgcaaccccgccgtggccttttcattatcacagaaatagcttctttcacgtaaaatgatgtgagcaaagaggaccctgaactgtggcttcagcagatcgcttcttgcctgcacagatcttctccaggggccctgakgtctcaactccctgggctgatgtttatcagtgaattcaacggccggcagcaagggcgacagagaggccactgagggaggcaatcctgggcccccaggattcacctccagtctgatagtcctctgccctgggg

SEQ ID NO: 78118 - DNA, 741 bp, Homo sapiens
ggaaggccgcagagctccacaggggtagagcgggtcagggctttagggtcaagcaggtctgcgtttcaatccacactcacaacttacttaggctctctgaccctcagtttctcatctgcaaaatgggtcgatacccactcatggtgttaggattgaacaaggtaacacaggtaagtgcagggtgtagcgcctgccccctaggacacacggtgttaaatgtaagtgccctgctcccatccaatatcaagtggcaaagagcagagtggagtcagcagacccaggaatgaccccaatcctaacctctactggctttgtgaacctcagtttccctgtctgtaaggtggggagaagctctgtgggtgctggaggaccttggcagcatgatgccctcccagggtggacctgccagagccagcggcctcgcacattgcatggcgtctggggatggacagcccagggctgcagagacgacctgcaaccccgccgtggccttttcattatcacagaaatagcttctttcacgtaaaatgatgtgagcaaagaggaccctgaactgtggcttcagcagatcgcttcttgcctgcacagatcttctccaggggccctgaggtctcaactccctgggctgatgtttatcagtgaattcaacggccggcagcaagggcgacagagaggccactgagggaggcaatcctgggcccccaggaktcacctccagtctgatagtcctctgccctgggg

SEQ ID NO: 78119 - DNA, 669 bp, Homo sapiens
tttaactgtttttcattttagatattccagtttattcaatgattttgttgaatctgaattttttttgattgatggggattcattacttatcacatgtatctgtgagatatcatttaagcctgggcagaacctccatttcttctatctggttgaacgctatcttgtggatcttattagcaaaggaggacaattcaccatagttttcttcaaggtaacatgatagttgagttcttttttataatatgagaactaaaactaaaatttcctaaattattatatatatatttttcttattacaaagtagattatatctataaaagttcagaaaattgaaaggaaagaagagaaaaaattacccacaatcccagtattcagaaatcaccacacttgagattatgttttatttgaatgaagagaactttattgtaaggacacacaggatcatgagagaggatgagaaagctcctcaatagcggcccagttgaactctggattccagttctcctgctctgagaactayttctgttttcaaaactcagcaggcaatttatatgagcccagaggaaaatatatctgagcctagggacagtcattaataatgctttgttggctgggcacggtggtgcatgcctgtaatcccagcacttcgggaggctgaggtgggaggat

SEQ ID NO: 78120 - DNA, 665 bp, Homo sapiens
tggcccacaatgcactaagcctgccccagcccaaagtacttggcaggctccagtgggggacaggctgggggccacgtgtcatgatgggactccagggcgtcaatgagcctctcccgcagygtctgcacgtcagcaccagccactgtaaatgaaaacaggcgtgagcggagtgtcaggagagcagagctgcttccacagcacactggccaccttcactcccagaaacaaagggccgagggcacagccagctctgacagagacagacgaggcgtcagtccttccctgtgctagaagaatggggcttgagtagtcctcctgtggccccaagtagtgcaaggacacccatccctcagacaggaaagaatccctcagaactgggagtcgtcaggactttccccaagggctctggtctgctctctgggcgccaaccccattgtgacagaagagctcttctgggaacatggtgcccctgccccgaccctagggccctggatatgtccaacctgaagggcttcttcatcctgcctttccctaaagctgactgggaggatagttttgggaagacacaagttaggcttcccgtggggaccgcctcaccctcgaccctgccgactgccagggctttctccaccccaatagaaacccaggtgaagagggaggttggg

SEQ ID NO: 78121 - DNA, 660 bp, Homo sapiens
cgggcagggctccgggcgcgagctgggctccttctgcaccacattcagcggctgccaagaggagccgacgggcgctcgcaggctcagcgcgcgctgcccgcggcaggacccggccgcctccgccgccgccgccgcccctaagcctcccgaagccatggccgggctcggccaccccgccgccttcggccgggccacccacgccgtggtgcgggcgctacccgagtcgctcggccagcacgcgctgagaagcgccaagggcgaggaggtggacgtcgcccgcgcggaacggcagcaccagctctacgtgggcgtgctgggcagcaagctggggctgcaggtggtggagctgccggccgacgagagccttccggactgcgtcttcgtggaggacgtggccgtggtgtgcgaggagacggccctcatcacccgacccggggcgccgagccggaggaaggaggtaactgccgactcgaggggcgcggccggggsgcgcgccaggccctcccccgccgccggccgccgtgttgcctggggagtcgcgccattggccctcgggctagtagttcacaacttcccgtcggggggcgagtgtgtgtgtgtgtgtgtgtgtcagagagtcagagagaagttcattgttcacacctcccggctgccggcagc

SEQ ID NO: 78122 - DNA, 1241 bp, Homo sapiens
tcatgttttcacttgttacattgtagagagaccctgaattgttgggacgaaaaagggaaatgcttttcttggaccaattttttgattggtccacttgctgagataagcctcctgctgaatcaaatgtatgtttttgtgttggtcttggatcttatctgcctgcagcagcagcaagcttaatagcaaatgaggttcaaaaagatgaagcagctatttcagcctcttatcctaatgttttcaaagagctctgtagatttggtcattatgcccatcctaatcaaactgtctgaaagcttatcttctgccaccatttcctacagactttccgcaaagcaactatgatttgtaatcgttagtagaatggtatgtggtatgtaaatatatgtaataattatatttctaaaacagtctttgtgaccatcttttaaaggatctcagcttgacaatgaattgcctatttttagttttcaaatcagggtatttttcaattatcttgcagttgattttctaaattcactcttcaattcatgagagaaatggcttttatagggcaaatacatactatttgggcattagagaggacagagattattttattctttttgtattgaataattttgcaggaagctgctgctgattacaaggagagttatatgtattaagattgataaagagaaatatttttaaggcttttagatttccctataaggagataggatttacattccaactttgattttcttcaaagggatcctgtttgcttaaattctcagaaaatatgattggacttctcagtcaactgagctgtaagagtggtgaagaacctgccctcaggaagggacctgtcaacatttagagggtgtgggggtggtgatattggggatggagactggcatgatggaagggatgaggcctagaacacaagcatatcgaacccacttgcctctctgtgaatggggctcttgcacacagccaggcctgacttccctccccgctgttcccactcacccagcacagtagactgatccagccctgccaggaggtggctgtccttcaccagcgccaactcctggctgcacgctgtgctycacagagccttccagcccagccagcttggctgtcggggtctcagatttcaactcaaggtgccagcagagtcccttcactaaaatcatattttttcacctgataatttgatcattttacagttggtgggtttcatccacaaaaaatggttttct

SEQ ID NO: 78123 - DNA, 1298 bp, Homo sapiens
actttttttttccccagcaagtcactgctgggaaaaaaaaacgatgcatcagacccttcagtagcttacaggttaatgggggagataagtggtgtgtacacaatggagacacaaggaggaagatgatacatactacaaagaggtagggacaataataatgaacacttctttacacaggctccatgctaagtgccttacttggattatcccagggtgctgtgggagttgagaggatggagagatgctctcagctggggtgatctggaaaaacttcatggaagtggaggcgtttgaataggaccttaaaaaaaacactacttctggagcattttgcttaaccctggttgtacaacagaataggcccaatggctttctctaaagatgtttggtataagcctatcttaaaggaaatactgtatctgataaaatgggattgtttctactgaagactcatctggctacaaaacagaactactatcaacctgagaaagaatccagctgttgctttaaaattaacaacttcccattacatcatcaagcctgataatcatcttgcctgcaactccaattccatctcaccctttaatactccttctttcccctaggtcactgggaagcttgcttgtggcactctctgggatccctgtttccagttactggttgcgtaatgtattgataaagcaaagccaaatatgagtaagaagaaaagcctaattagaaatgaagcacgcagtgtcccaacaagaaaaatgccagggcttcaaaaataggaaatcagtgatgcatagtttcttctgtcactgaagaaatcatcccagtacttaataagccagaaaatggattaagcagatgggggraagttgtcagcggcaaagaatgggcacctacggagaaacagaattatttagaatcaaaatgactgactggcacacattaaagaatatctgtttgtgtcttgaaatgaatgctatagaaaatatagtaggtatgaaatatagaaaatatagtaggtatgaaaacaaatgcaaaatcggccaccaagagagaacatcacaggctatgggctgatgtagaaatgctggagatgctgacttttttttctttatcgaattgactatttgagtgaagcaaccaaaataataacttggagtagagtgtggatgcagcttaattctaataaacttgcccttaaatataaagaaaacctttctttcataagaatccactcgtacagcatatgtatctacatattcttctctccctacacatatctgaacatgtttctagctagctgactg

SEQ ID NO: 78124 - DNA, 1298 bp, Homo sapiens
actttttttttccccagcaagtcactgctgggaaaaaaaaacgatgcatcagacccttcagtagcttacaggttaatgggggagataagtggtgtgtacacaatggagacacaaggaggaagatgatacatactacaaagaggtagggacaataataatgaacacttctttacacaggctccatgctaagtgccttacttggattatcccagggtgctgtgggagttgagaggatggagagatgctctcagctggggtgatctggaaaaacttcatggaagtggaggcgtttgaataggaccttaaaaaaaacactacttctggagcattttgcttaaccctggttgtacaacagaataggcccaatggctttctctaaagatgtttggtataagcctatcttaaaggaaatactgtatctgataaaatgggattgtttctactgaagactcatctggctacaaaacagaactactatcaacctgagaaagaatccagctgttgctttaaaattaacaacttcccattacatcatcaagcctgataatcatcttgcctgcaactccaattccatctcaccctttaatactccttctttcccctaggtcactgggaagcttgcttgtggcactctctgggatccctgtttccagttactggttgcgtaatgtattgataaagcaaagccaaatatgagtaagaagaaaagcctaattagaaatgaagcacgcagtgtcccaacaagaaaaatgccagggcttcaaaaataggaaatcagtgatgcatagtttcttctgtcactgaagaaatcatcccagtacttaataagccagaaaatggattaagcagatggggggaagttgtcagcggcaaagaatgggcacctayggagaaacagaattatttagaatcaaaatgactgactggcacacattaaagaatatctgtttgtgtcttgaaatgaatgctatagaaaatatagtaggtatgaaatatagaaaatatagtaggtatgaaaacaaatgcaaaatcggccaccaagagagaacatcacaggctatgggctgatgtagaaatgctggagatgctgacttttttttctttatcgaattgactatttgagtgaagcaaccaaaataataacttggagtagagtgtggatgcagcttaattctaataaacttgcccttaaatataaagaaaacctttctttcataagaatccactcgtacagcatatgtatctacatattcttctctccctacacatatctgaacatgtttctagctagctgactg

SEQ ID NO: 78125 - DNA, 1298 bp, Homo sapiens
actttttttttccccagcaagtcactgctgggaaaaaaaaacgatgcatcagacccttcagtagcttacaggttaatgggggagataagtggtgtgtacacaatggagacacaaggaggaagatgatacatactacaaagaggtagggacaataataatgaacacttctttacacaggctccatgctaagtgccttacttggattatcccagggtgctgtgggagttgagaggatggagagatgctctcagctggggtgatctggaaaaacttcatggaagtggaggcgtttgaataggaccttaaaaaaaacactacttctggagcattttgcttaaccctggttgtacaacagaataggcccaatggctttctctaaagatgtttggtataagcctatcttaaaggaaatactgtatctgataaaatgggattgtttctactgaagactcatctggctacaaaacagaactactatcaacctgagaaagaatccagctgttgctttaaaattaacaacttcccattacatcatcaagcctgataatcatcttgcctgcaactccaattccatctcaccctttaatactccttctttcccctaggtcactgggaagcttgcttgtggcactctctgggatccctgtttccagttactggttgcgtaatgtattgataaagcaaagccaaatatgagtaagaagaaaagcctaattagaaatgaagcacgcagtgtcccaacaagaaaaatgccagggcttcaaaaataggaaatcagtgatgcatagtttcttctgtcactgaagaaatcatcccagtacttaataagccagaaaatggattaagcagatggggggaagttgtcagcggcaaagaatgggcacctacggagaaacagaattatttagaaycaaaatgactgactggcacacattaaagaatatctgtttgtgtcttgaaatgaatgctatagaaaatatagtaggtatgaaatatagaaaatatagtaggtatgaaaacaaatgcaaaatcggccaccaagagagaacatcacaggctatgggctgatgtagaaatgctggagatgctgacttttttttctttatcgaattgactatttgagtgaagcaaccaaaataataacttggagtagagtgtggatgcagcttaattctaataaacttgcccttaaatataaagaaaacctttctttcataagaatccactcgtacagcatatgtatctacatattcttctctccctacacatatctgaacatgtttctagctagctgactg

SEQ ID NO: 78126 - DNA, 1113 bp, Homo sapiens
ctggcaccattagcagagagtacaggtgtagccacacctttcccattgtttttgtttgtttgtttgttttgagatggagttttggtctgtcacccaggctggagtgcagtggtgtgatctcgactcactgcaacctccacctcccaggttcaagtgattctcctgcctcagcctcccaagtagctgggattataggcgcmtgccaccacacccagctaatttttgtatttttagtagagatggggtttcaccatgttggccaggcttgtctcaaactcctgacctcaggtgatccactcacctcggcctggcaaagtgctgggattacaggcgtgagccactgcgcctggcccccagtgttttttattctcattttttaaaaatgtttttcaatttgatgggcaagacaacaacatctccttattgctttaatttgcattatttgctcactggtcgagtgaacattttgtgtgtgtttatacctgagagagctgtgttcctgggcagaggcttactgaagtctcggttttcatgcaagtgacctctgtcctgctgttgatgagtcggtgcatgtcctgtgtgccacagtccactgcacctttaacttgtcccttagagttgagtcactggggtgtcacctttctcaccattaccagtgtccaggaaccaggtgccagctcttgtgggcactgtggtctggccttctggtgccaagccaactgcaagcttgacctaaggtaacctcaccgaggggtctgccttggttgctgcctggagagcccccacagggtcatcctactctggccccaaaaaccagatctttctaaaaatgttcaactcatccagttactctaccagtgaactcaaagggaacgctttttgctgaacaacataagacagtggacagatagccccaggggaacccaggaggggatttggtttggagaggacagtatcgccagtaggtacatcaggcaagttccagccggctcagttacccaaagggttaagccctttaagccaagtggctgcacagttcctgctgtcctagcatcttgtggtctggaacatggtttgcagggatgaggtgcttggccggccttatcagccttc

SEQ ID NO: 78127 - DNA, 1113 bp, Homo sapiens
ctggcaccattagcagagagtacaggtgtagccacacctttcccattgtttttgtttgtttgtttgttttgagatggagttttggtctgtcacccaggctggagtgcagtggtgtgatctcgactcactgcaacctccacctcccaggttcaagtgattctcctgcctcagcctcccaagtagctgggattataggcgccygccaccacacccagctaatttttgtatttttagtagagatggggtttcaccatgttggccaggcttgtctcaaactcctgacctcaggtgatccactcacctcggcctggcaaagtgctgggattacaggcgtgagccactgcgcctggcccccagtgttttttattctcattttttaaaaatgtttttcaatttgatgggcaagacaacaacatctccttattgctttaatttgcattatttgctcactggtcgagtgaacattttgtgtgtgtttatacctgagagagctgtgttcctgggcagaggcttactgaagtctcggttttcatgcaagtgacctctgtcctgctgttgatgagtcggtgcatgtcctgtgtgccacagtccactgcacctttaacttgtcccttagagttgagtcactggggtgtcacctttctcaccattaccagtgtccaggaaccaggtgccagctcttgtgggcactgtggtctggccttctggtgccaagccaactgcaagcttgacctaaggtaacctcaccgaggggtctgccttggttgctgcctggagagcccccacagggtcatcctactctggccccaaaaaccagatctttctaaaaatgttcaactcatccagttactctaccagtgaactcaaagggaacgctttttgctgaacaacataagacagtggacagatagccccaggggaacccaggaggggatttggtttggagaggacagtatcgccagtaggtacatcaggcaagttccagccggctcagttacccaaagggttaagccctttaagccaagtggctgcacagttcctgctgtcctagcatcttgtggtctggaacatggtttgcagggatgaggtgcttggccggccttatcagccttc

SEQ ID NO: 78128 - DNA, 564 bp, Homo sapiens
tcccagcagaaaggagggcaggactgcagtcrcccctgggattgcgactgatcctctgtgtctgtagcaccggagctgagttctcctcccagcaccctgaccgctcagggcgatagagctgctgctgcctgtgaggtcacgaccagcacagagggccccagaaccttgggctttccaacgttctctctctccgcaaattaagatctcaaggagatttttttttcagactctgaggcagtagctgcacagggagaaatcccaggcttctattaatagtccctagacaggaaggtcctggaagacgtgcatggtgttctgaatctcaggaagaaagacaaagttagccaggtagtggttcctcaggaatctggtgtctatttacccactgaggaaacggaggcccagagagatcaagtgaccggcttaaggtcaaagagcattccagaccgctcagcaataaaaaggaatgaactattgatacacgcagcaacacggatgaatcgcaaaatagtcacactgggtgaaaggagtcaggccaaaggggagaacgtactctatggttcc

SEQ ID NO: 78129 - DNA, 564 bp, Homo sapiens
tcccagcagaaaggagggcaggactgcagtcgcccctgggattgcgactgatcctctgtgtctgtagcaccggagctgagttctcctcccagcacccygaccgctcagggcgatagagctgctgctgcctgtgaggtcacgaccagcacagagggccccagaaccttgggctttccaacgttctctctctccgcaaattaagatctcaaggagatttttttttcagactctgaggcagtagctgcacagggagaaatcccaggcttctattaatagtccctagacaggaaggtcctggaagacgtgcatggtgttctgaatctcaggaagaaagacaaagttagccaggtagtggttcctcaggaatctggtgtctatttacccactgaggaaacggaggcccagagagatcaagtgaccggcttaaggtcaaagagcattccagaccgctcagcaataaaaaggaatgaactattgatacacgcagcaacacggatgaatcgcaaaatagtcacactgggtgaaaggagtcaggccaaaggggagaacgtactctatggttcc

SEQ ID NO: 78130 - DNA, 564 bp, Homo sapiens
tcccagcagaaaggagggcaggactgcagtcgcccctgggattgcgactgatcctctgtgtctgtagcaccggagctgagttctcctcccagcaccctgaccgctcagggcgatagagctgctgctgcctgtgaggtcacgaccagcacagagggccccagaaccttgggctttccaacgttctctctctccgcaaattaagatctcaaggagatttttttttcagactctgaggcastagctgcacagggagaaatcccaggcttctattaatagtccctagacaggaaggtcctggaagacgtgcatggtgttctgaatctcaggaagaaagacaaagttagccaggtagtggttcctcaggaatctggtgtctatttacccactgaggaaacggaggcccagagagatcaagtgaccggcttaaggtcaaagagcattccagaccgctcagcaataaaaaggaatgaactattgatacacgcagcaacacggatgaatcgcaaaatagtcacactgggtgaaaggagtcaggccaaaggggagaacgtactctatggttcc

SEQ ID NO: 78131 - DNA, 640 bp, Homo sapiens
gcctctaaaaaaaataaaaggttgggcttggtggctcacaccttgtaatcccagcactttgggaggccgaggcaggtgggtcacctgaggtcaggagttcaagaccagcctgaccagcatggagaaaccccatctctactaaaaataccaaattagctgggcgtggtggcacatgcctgtaatcacagctacttgggacgctgaggcaggagaatcacttgaacccaggaggtggaggttgtggtgagccgagatcacaccattacactccagcctgggcaataagagcaaaactccatctcaaaaaaaaaaaaaaaaaaaaaaccaacacagcaaaaacaacaacaacaaaaatccgccccaatcaatcttccatgatccactccctccccatcctttcaaatagcattcagagaacagrtatcgtctttcattccaatctcctgatactcactggcttctgaccaagatgcctttctcctcccaccccctctaatgaaattactacacattttgcagcttaaaaacaacacccatgtattgtctcctggttttagagagtggggagtctcagcagaatttaatcatgccgtctgctcagggtctcaccaggctgcaactgatgggtaagctggggctg

SEQ ID NO: 78132 - DNA, 1192 bp, Homo sapiens
tgggtgatatttgggtgattttcaaaaggcaaatatgtattcactattttatgttgttgttgagatggagtttcactcttgtcgcccaggctagatagagtgcaatggcatgatctcagctcactgcaaccttcgcctcctgggttcaagcgattctcctgcctcagcctcccaagtagcagaaattacaggcgtgagccaccacacccgactaatttttgtatttttagtagagacagggtttcaccatgttggtcaggctggtcttgaactcctgacctcaggggatccacccacctcggccttccaaagtgccgggattacaggtgtgagccatgatgcctggcctttgctattttataggcatatcccacttagcttgcacaaccgaggtcctcctctattgcccaccctctggaaggatgaatgataggtggggtggggtggggcgatraaggggtgtgtccccccagcaccttctgtgagttcatgataggagatggcagaaattcatgttaatagctcacacaccttacatttttcacatgcattatttcatttgatccttacaacaatttcatgaggtcggtattatcacctcctttcactaaatggagaggctgaggcttagagtgctgacatggcttgcccatgatcaggcgggaggaagcaactgcagagccaggattccaactgccagatgggtaatcaaataccctgcactgttttcatccagactagggcgtagtcgaccaggtgttacacctctgatctcgtcatctgttgaaactgtagggagccaatcaataacactcttttttttttttttttttttttttgagatggagtcttgctctgtcgcccaggctagagtgcagtggtgccatctcagctcactgcaccctctgcctcccaggttcaagcgattctcctgcctcagcctcctgtgtagctgcgactacaggtgcccaccaccacacccagcaaattttttgtatttttagtagagacagggtttcactgtgttagccaggatagtctcgatctcctgacctcgtgatccgcctgcctcagcctcccaaagtgctgggattacaggcatgagccactgagcctagcagtaacaccctttaatccccttcagagtacaataacaattgagacatgtagtgtattagttatatgtaacaaa

SEQ ID NO: 78133 - DNA, 1299 bp, Homo sapiens
gcatacaaagcgttggaaaacagtttcctgttctaaataaactatttggttttctggcctcttgtgagcttggctaatgggaaacagtttgttctgagccaaatctccccataagattaaatgtgaatctgtaaagctacaggatctagattctgaatggctggtgttaatagcgctaacaatataataacagctagcgtttactgagtgcttagcgtrtgtgaacccctttctaagccctgtttctttcagtcctcacaacagactactcggctggagcttcttgtattttatagaggaattaagagactcagtgaggttcagtagcccacacacagacacggagcttgtaaatggcagcagtgagactgaacccaggctgctcaaccctagagcccacacccctaaccacttagctacacaatcagctatgcttggaatagcttgaatccgtgccactgaggacacccagaaaagcgagaggttgattccttcaagtacttcttaccttacggcagcaaaccacttgtattgattgattgattgattgatcgattgagatggagtcttgctctgtcgcccaggctggagtgcagtggtgcgatcccagctcaccgcaacctccgacccccaggttccaaccattctcctgcctcagcctccctagtagctgggattacaggcatgtgccaccacgcctggctaatttttctacgtttggtagagatggggtttcaccatgttggccaggctgttcttgaactcctgacctcaagtgatccacccgcctcagccctcccaagtgctggaattacaggcgtaagccaccgctccctgccaccatttgttatttttacatacatgatttctttccagcttgtattaactttgttggttgcatacataatgctgatgatgtgtatccccagtgctgggagtactgaatcgaaggatgctgtccctgtccccttaagcatttacagagcacacacattaagttagagaggaagcatatgctgtgattgcagcttgcaaagagaggcaagacaggtgcgtgttttctacacatgtagaaagaacatacaagcaacagataaagtcgtgtcctgcgcggcacatgctattattgtctgttgctagggatttagagataagagagaatcttggggttgggaggagctagaaaaagccttgtggggaagatgcgactttatcttggctgtgaaaaatggtggggttggttggagcaggtggcagggacagttggtctaggcagaagaaatggcttgaacaaatgca

SEQ ID NO: 78134 - DNA, 297 bp, Homo sapiens
aattatttaaaaactagttatgagatgttttcactgctggaaaagctgaaatttaagttattctttttattatactttgagttgtagggtacatttgcacaacgtgcatgtttgttacatatgtatacatgtgccatgttggtgtgctgcacccattaactcgttatttacattaggtatatctcctaatgctttccctcccccctccccctrccccacaacaggccctggagtgtgatgttccccttcctgtgtccaagttttctcattgttcaattcccacctataagtgagaac

SEQ ID NO: 78135 - DNA, 352 bp, Homo sapiens
taagttcctagtatgtgccagaaactgtgcatgctgctaaagagttaagtatatctaagatctaatccctgctctcaacgattttggcaacagcaagttgwgaacataatgaactttacggcaaagtttcaaatgctttcataaaaaatttagttttgtccctaacacaagcttgactcatttttgttcctgtgattcagacgtatttctggtatctggaggactgcgggtgggtgtgcacatcatatatgttcgtatggttaacaaactcaggagtttttttgtgaaaaaaaaaatgaattatcctaaaagagacctacaaggagtatcatgactggtttaaggcaaataa

SEQ ID NO: 78136 - DNA, 777 bp, Homo sapiens
catcattcttggataaagcaattggccttttacatcaagaccatggcctgtctaacagaggtgatagtgtgggcttcttgaaacaaagtttttttttttgttctcttgattaaaagataaagaagggcagttatcttcagtgcacaaaagtgtgtatgtaaaggagaggatgacattatatttgcatgagggcttaacatttcctaatcatgcacctaagtgttcttcgccaagaaaggtcttattgtaggtgagaacaattcataacattgcattcaaaatwacattcttcttaatctgactttgtagctcatttataaatcaagtctaagctcattttgaaagggaaaacagtcaaggtgagaggttctgaaaataaatgtgaatgctgcctctgtttatcctctagcctttcctaaagttgagacgctagtttcagggattttattatactactcttcatcaggaagttctttgtgctaaattattctgtgaacgtccctgggtcatacttctgtaaaatatgtcattttgatagcctttcataggattcaatcaagttttggcatttgccttttcatttattttgttttgtaaaagggaagagagtaggtaagaattgcaaaatacaaaatataagaaaattattaagcacgcttcaaaggaatcctaagcatcttttacaaaataagtacacatatacatttatcagaaatactgctggaagggaaatgaatgccaggaagttacctcagtattccctgacttatcattcag

SEQ ID NO: 78137 - DNA, 777 bp, Homo sapiens
catcattcttggataaagcaattggccttttacatcaagaccatggcctgtctaacagaggtgatagtgtgggcttcttgaaacaaagtttttttttttgttctcttgattaaaagataaagaagggcagttatcttcagtgcacaaaagtgtgtatgtaaaggagaggatgacattatatttgcatgagggcttaacatttcctaatcatgcacctaagtgttcttcgccaagaaaggtcttattgtaggtgagaacaattcataacattgcattcaaaataacattcttcttaatctgactttgtagctcatttataaatcaagtctaagctcattttgaaagggaaaacagtcaaggtgagaggttctgaaaataaatgtgaatgctgcctctgtttatcctctrgcctttcctaaagttgagacgctagtttcagggattttattatactactcttcatcaggaagttctttgtgctaaattattctgtgaacgtccctgggtcatacttctgtaaaatatgtcattttgatagcctttcataggattcaatcaagttttggcatttgccttttcatttattttgttttgtaaaagggaagagagtaggtaagaattgcaaaatacaaaatataagaaaattattaagcacgcttcaaaggaatcctaagcatcttttacaaaataagtacacatatacatttatcagaaatactgctggaagggaaatgaatgccaggaagttacctcagtattccctgacttatcattcag

SEQ ID NO: 78138 - DNA, 681 bp, Homo sapiens
aaaaaatgtgaaagatgcacataaggaaaatacacacatgttaaatgtggaaccatcatgccttttttcatcgtgccagaaagaaaaaaaaatgtacaaagctggaaacgagtcagaatatatgttgggggtgggaggtggataagattttagataaaggagccagggaagtcctcactcctccacacataaaagaaggagatgcacaactgcagataaataccaaatacatttgcacagatggccagggggaggagaggaatcagagtggggacaagagataaagagagaagttatagggggaaaaaaaaacccttcctggtacctaaaaagatagtgttgcatggactaaagagtataattaactcaactatctgcattcaaactgaaaaggaaaaagaaatcttagaccctaaaagcagtacaattatgtaaaattaatatcaacgtccagtacttggggcaacgcagggccacgtcactggcactcatcaaaaaaaaccattggagactcagtagtcaaagaatcatgaagacagatgctttgctttctctcaccaggataccagttagtctgtgatacatatccagaaagtgaaacctgtgaacttgagctctattgagggaaatcgcccacccacagagaaaagygttgactatatctggggtgaaaaattcccc

SEQ ID NO: 78139 - DNA, 586 bp, Homo sapiens
atttctattttatagataggaagatagatattactgttagtttattgagatccttgcaaagatttgcatyagttatatgaaactcacccttttgcatcatctgtggaggtactggagatctaaaaacaaacttttttgggctagtgggaagattgcttttgtaacaaaaaccttgctttgtgtatatcaactgtctgccagaatctgtagattctgtaatataagagacaggaatgaaatacttccatcttctattcaggagcaagagagtgctggtggagaaatagtgacttagatttattaggctcttcacagcagtggaatcacagaaataaaagttcaaaagaaaaaatagaatccattgtatgaagtataggtgacaaaaatacattgcattgaattatttctcttctgggaagtttttgtcttggggcagggtggcctctgcacaaacacatttgctatgatcccatgtaaatagaatttcatagaatatttcagttggattaagaatttcctaagtttagtccttaaatttcattctgagattgaaaaaatacgctcctaagttgggatatttgagttt

SEQ ID NO: 78140 - DNA, 509 bp, Homo sapiens
ttatgaacttaagggggcttgattcctgaagaagtaaggtttaagttctgaactrtaattccagggatcttagagtaagcataaattctgttgctgaatcacagagcaatttggatatgggatttccattattgggtttgcactttatattctttgtaaaataagattacccttttctatttcggaaactaatattttctgtttttgttgatcacaggggagggctatgagccataatgaaatgtagagcaggttggaacaaggctttgttcctatgcaacatctgtctaggtttgatcagtgcttcagtatttgcaattgtaatcatctggtcattttcttttcctgtctgctcagcatgcaacacacactgtggaagctgtgattcacaggccagctgtacctcctgccgagatccaaacaaggttctgctctttggggaatgtcaatacgagagctgcgccccacagtactatcttgacttctccaccaacacgtgcaaaggtaaa

SEQ ID NO: 78141 - DNA, 509 bp, Homo sapiens
ttatgaacttaagggggcttgattcctgaagaagtaaggtttaagttctgaactataattccagggatcttagagtaagcataaattctgttgctgaatcacagagcaatttggatatgggatttccattattgggtttgcacwttatattctttgtaaaataagattacccttttctatttcggaaactaatattttctgtttttgttgatcacaggggagggctatgagccataatgaaatgtagagcaggttggaacaaggctttgttcctatgcaacatctgtctaggtttgatcagtgcttcagtatttgcaattgtaatcatctggtcattttcttttcctgtctgctcagcatgcaacacacactgtggaagctgtgattcacaggccagctgtacctcctgccgagatccaaacaaggttctgctctttggggaatgtcaatacgagagctgcgccccacagtactatcttgacttctccaccaacacgtgcaaaggtaaa

SEQ ID NO: 78142 - DNA, 729 bp, Homo sapiens
tgacctcaagtgatccacccgcctcagccgctcaaagtgctgggattacaggcatgagccactgcacctggcctgcactgtactttctaacttcttttataaacaagtaagataaaattttaatgaaaaaggcaatacaaggaagtgacacataagtgcgtatattgagacacaaatattaaaaataaaaatctatctcccttccattcttacaactggtcatatcaagaaagaatcaataactgattaaagatccaaaacattgaaaactttagtataaaatggacacccaaattcaattgattcatccttccttagaccttggatctaaaagaaaatagacaaggtcacygtggcctatttaatcgagtcaaattaaatcaaaagtgccttgtagatgctaacatgctatacaaataatacaattatttaacaatattaataatcaaaaagacaatgtccaatccttttgtagttcatgagcatgatgattgtgtgttcacacacaagcgtgagatgtgccacactcgaaccttcttacgacgtctgcacattacccatctcatctgaaaaaaagatttaaacaaaaaccaaaagaccaggtccaatagctaatagtatagaaaaacactggtattttccattctagttctggttggtgacaggctttcaggctaggctaaactgccccttactggaatgctcctctccttctgcttgcccactcat

SEQ ID NO: 78143 - DNA, 729 bp, Homo sapiens
tgacctcaagtgatccacccgcctcagccgctcaaagtgctgggattacaggcatgagccactgcacctggcctgcactgtactttctaacttcttttataaacaagtaagataaaattttaatgaaaaaggcaatacaaggaagtgacacataagtgcgtatattgagacacaaatattaaaaataaaaatctatctcccttccattcttacaactggtcatatcaagaaagaatcaataactgattaaagatccaaaacattgaaaactttagtataaaatggacacccaaattcaattgattcatccttccttagaccttggatctaaaagaaaatagacaaggtcaccgtggcctatttaatygagtcaaattaaatcaaaagtgccttgtagatgctaacatgctatacaaataatacaattatttaacaatattaataatcaaaaagacaatgtccaatccttttgtagttcatgagcatgatgattgtgtgttcacacacaagcgtgagatgtgccacactcgaaccttcttacgacgtctgcacattacccatctcatctgaaaaaaagatttaaacaaaaaccaaaagaccaggtccaatagctaatagtatagaaaaacactggtattttccattctagttctggttggtgacaggctttcaggctaggctaaactgccccttactggaatgctcctctccttctgcttgcccactcat

SEQ ID NO: 78144 - DNA, 562 bp, Homo sapiens
atcagagcataaacaggtcggtggcttgcccttactcacaggcctaaataagtggcagagcccgagtcttagcatacctttcattgaaatcytttctcttagagcacaggtgcctttaaaggagcttaaagtctgagtgtaagtgaacagccctatgcaagagaatttcaggtacgtaagatttgatgaaaagggaaaggcaaaactttttggaatctatcagattttggtccattgtatttaattgaattgttgaaaatgtatctttacaaatatccacatataattgtctgatattaaggttatgaccaaaggattctgatactccatttgatgtataagaggaattctgtggggtatttgcttgaaaagactcttcatgttagaacttttagccagcaagtcatgttgaagcctgctatgcttcttaatgcacaaacaaaacaaaactaaactaaactaaactaaaaaacccactccagcctaattttgttttgctcttttctctcccttttccagtgttgctttttgactctatactgcccttgttgtacttgcatga

SEQ ID NO: 78145 - DNA, 722 bp, Homo sapiens
taaacactgcctcctgctaaatggtctagaaagcatctgtaagaggggctctgggctgtggggtttccgaggatggtgagtgtgggaatgttttgtctgtagagttggggctgggggcttccacatcctgcccactgccacatctggggaagtcatctgcactgggctgatggctccccgagcactcctgctttaatggctcgtggtgccgcaagaagtggccctgtaatggccattccaggctgccccggggaagggtctgggcaggccccaggcagcctgtttgctctcctcccaccccaggccagccagcacctttcacctcctctttgcctaggtgagctggcctgaaccctagttgggagcctccagctgtggggagacagtgggactagaggccttggacatttagagtggggataggacttggtcccgygcttcctgaatgccatccccttgctaaggcacaggctcctgcatctgtcattgtttgcgttcttctcttgacacagctctgccaaaacctcatctctttacaaaatgaggctaatggttatggggtcaggtccaagaccaagtggtgcagaaggagcaggaacaccatgctttgaaagaacctgcttcgcatggtgttagggagaggtatggaaggagaaagcagagaaatgtgctgaggcagctcagagggctcccgcctctgctatcccccagggcccaagagg

SEQ ID NO: 78146 - DNA, 1018 bp, Homo sapiens
aattccacacttctacactcattccttttcattcactcattcattgaacaaacattggaaatcttatgtgtcagtctttatgctaaccactaaattcaaacagaaataagatgctgcccttggacttgagaattcacaactgagtggatacctttagccaagccctagaaatcgtcactgaaacacactgttctcaacttactccaccaaagagattttaatctacccaaaccaagaactagtaaatcacagtgcaaaagtgtgaagcatccaaaagattcattagctactgctttttgtcactggtttctaccagattttttttccttctcctctttatatttacaatctgctgacacatataatctataccatatagccatgaaatcagccacagtaaccaattttgaacaggtgaagaatcctgacccagtgaaacccatagactggagtcactcatcaagagctaggattaaatgttggctcaaaagagccgtctgatcttgcttcagtcacctctaactcctctgtgggtgaaagcaggaatttacttttccaaamctttgaaatgttacctgaagcagaattctacagaaagacacaaactatactgataattctaaatttcaactccccctttgctacttataaatccaaaaaatcaaatcactcttcctgagctacccacctgccttatttcttaacatttctaactctctattcaacaaaatcacacgttctactctaaccatattgcctttcccatatttaaaattgcctgattgaaagggtaggttgcaggcagggagaagaggagggggttctacacctcatagatgggtgggattccgggagtcaaccatgtttcttatagcaccaagtcacgcagaagatttggtcaccagagtgcttacttagaggaatagaggaaggagaatgtttgtcattagcaaatgcttcccgtttggacttatttcacttgcagcaccccgctgtttttcccattattcaaagaaag

SEQ ID NO: 78147 - DNA, 529 bp, Homo sapiens
agtcatcctgtggctacattcacctccaaacccataatatctaaagwgcaactcactttctttttcctcctcatgtctccccacaagatacttgccccttttctagattctccttcctgttgcctaatctagcaattcacttggattgatcacttatactagaatttgttcagctttcgtttaccctccttacctcacccaacaccatcagcaacaaatcctttcgtgttagggactttccttatatacctggtgagctctggctatatgtttctatgtaaagataagtcactgaaaattgactaatgcttgtgttgaagtggggctggaagggaacactctaaaacgtgtttcctggtggctggtgatctggttgagacccagctctgtttgagaagtttctcaaatgctctgtgaaagagcaagtgaaaggtttgtgttacttctgtgtcttcctgttacctttgcttccattttttactttatgtattccgtttttttctttctttcttccattttcgctataatg

SEQ ID NO: 78148 - DNA, 1854 bp, Homo sapiens
tgctgtctgagaattgcatcattaggcaatgcacatccttgtgcagacatcatagagtgaacttacacaaacctatatggtatttatttatttattttttttataagaaaaaccaaatagcscagcaccattactgaatgtcaatcatttcctctactatgcaatgccaatatcaagtgtcatacatccggtttctatatatgctccattataatcatatgggaccaacatcatgtatagaaaatcatcgttacagtgcatgactgtactaagtctttattacatattggatgactgattaaaagctattttcttactttaattggaaataaacataaagcgctacatgttttaacctgtgatgcaagaagacaatcttttcttttaatgcccatttttcccagagaatattctctcctgaacttaatcagtgataatgccgaacgttctttattctgtaagttcctaaatcgttatagcattttccacatgttttcagaggttggtctttacatgaaagacccatggttgactgagacttgttcttggacagcatgctttgtttatgtctctgccttaggatcaggcttcagaaactacccactcatcaaccagcttttatattttacaccagcatacatgactctgtgagattttctgtgtgtgtgtgtgtgtgtgtgtgtgtgtgtatacagaactattgtcccagaacatgtttacctgtttggaaagtgttgtagtgttgtgcaatttagtaggaatatgggaagcaagaaaaaaatttcttgtacgtatcacattatccctttttgccgtccgtgaaataatcgaacagtttcctcaagggactggctctgttctgaaaaccaaaagcccattagtctcactcctacttcctttccaggcctccagagctctgaataaaccatactagcaaacagcctacactgaccaacttctgagatttctcttttcctctttttgtttttacctagttgttttataaattgccaaaagttacagaaggctaaaaagaaacctctctgttgtgagctttacctccagtacctttgttatatctgttttctatgtgatgcatttcagaaagtgtgtaattttaagaaacttgggacgtattttagcattcagtgttttaaaacacaaacaaactaaccatttggattattttatgatacatgatttttgcacagtatcaccaaagtgttgtcaaaagtctatttaatctccaatagtcaccctagaaatacagacagacacacacacacacacgaaacaccttcaagattcaaaggaaaatacaattgcattttggttggcttaaatccaaaattttcaagtttagtaaagactctgcaactgcttggtatgcaacaagactctaatcttaaaaagtaacttaaattttatatttcataagtaaaagtacatggtttatattgaatttggaagctgagcttatgaaggttagcacaaagaagaaaaagtaaaataaaactatatcatgttgataaagttagatcttaaaatctttttttttttttttttgagacggagtctagctcttttgcccaggctggatggagtgtgcagtggcgcgatctgggctcactgcaagctccactcccaggttcacgccattctcctgcctcagcctcccgagtagctgggactacaggcgcccgccaccacgcccagctaagtttttgtatttttagtagagacagggtttcaccgtattaaccaggatggtctcgatctcctgacctcgtgatccatccgcctcggcctcccaaagtgctgggattagaggcgtgagccaccacgcctggccga

SEQ ID NO: 78149 - DNA, 1854 bp, Homo sapiens
tgctgtctgagaattgcatcattaggcaatgcacatccttgtgcagacatcatagagtgaacttacacaaacctatatggtatttatttatttattttttttataagaaaaaccaaatagcgcagcaccattactgaatgtcaatcatttcctctactatgcaatgccaatatcaagtgtcatacatccggtttctatatatgctccattataatcatatgggaccaacatcatgtatagaaaatcatcgttacagtgcatgactgtactaagtctttattacatattggatgactgattaaaagctattttcttactttaattggaaataaacataaagcgctacatgttttaacctgtgatgcaagaagacaatcttttcttttaatgcccatttttcccagagaatattctctcctgaacttaatcagtgataatgccgaacgttctttattctgtaagttcctaaatcgttatagcattttccacatgttttcagaggttggtctttacatgaaagacccatggttgactgagacttgttcttggacagcatgctttgtttatgtctctgccttaggatcaggcttcagaaacyacccactcatcaaccagcttttatattttacaccagcatacatgactctgtgagattttctgtgtgtgtgtgtgtgtgtgtgtgtgtgtgtatacagaactattgtcccagaacatgtttacctgtttggaaagtgttgtagtgttgtgcaatttagtaggaatatgggaagcaagaaaaaaatttcttgtacgtatcacattatccctttttgccgtccgtgaaataatcgaacagtttcctcaagggactggctctgttctgaaaaccaaaagcccattagtctcactcctacttcctttccaggcctccagagctctgaataaaccatactagcaaacagcctacactgaccaacttctgagatttctcttttcctctttttgtttttacctagttgttttataaattgccaaaagttacagaaggctaaaaagaaacctctctgttgtgagctttacctccagtacctttgttatatctgttttctatgtgatgcatttcagaaagtgtgtaattttaagaaacttgggacgtattttagcattcagtgttttaaaacacaaacaaactaaccatttggattattttatgatacatgatttttgcacagtatcaccaaagtgttgtcaaaagtctatttaatctccaatagtcaccctagaaatacagacagacacacacacacacacgaaacaccttcaagattcaaaggaaaatacaattgcattttggttggcttaaatccaaaattttcaagtttagtaaagactctgcaactgcttggtatgcaacaagactctaatcttaaaaagtaacttaaattttatatttcataagtaaaagtacatggtttatattgaatttggaagctgagcttatgaaggttagcacaaagaagaaaaagtaaaataaaactatatcatgttgataaagttagatcttaaaatctttttttttttttttttgagacggagtctagctcttttgcccaggctggatggagtgtgcagtggcgcgatctgggctcactgcaagctccactcccaggttcacgccattctcctgcctcagcctcccgagtagctgggactacaggcgcccgccaccacgcccagctaagtttttgtatttttagtagagacagggtttcaccgtattaaccaggatggtctcgatctcctgacctcgtgatccatccgcctcggcctcccaaagtgctgggattagaggcgtgagccaccacgcctggccga

SEQ ID NO: 78150 - DNA, 1854 bp, Homo sapiens
tgctgtctgagaattgcatcattaggcaatgcacatccttgtgcagacatcatagagtgaacttacacaaacctatatggtatttatttatttattttttttataagaaaaaccaaatagcgcagcaccattactgaatgtcaatcatttcctctactatgcaatgccaatatcaagtgtcatacatccggtttctatatatgctccattataatcatatgggaccaacatcatgtatagaaaatcatcgttacagtgcatgactgtactaagtctttattacatattggatgactgattaaaagctattttcttactttaattggaaataaacataaagcgctacatgttttaacctgtgatgcaagaagacaatcttttcttttaatgcccatttttcccagagaatattctctcctgaacttaatcagtgataatgccgaacgttctttattctgtaagttcctaaatcgttatagcattttccacatgttttcagaggttggtctttacatgaaagacccatggttgactgagacttgttcttggacagcatgctttgtttatgtctctgccttaggatcaggcttcagaaactacccactcatcaaccagcttttatattttacaccagcatacatgactctgtgagattttctgtgtgtgtgtgtgtgtgtgtgtgtgtgtgtatacagaactattgtcccagaacatgtttacctgtttggaaagtgttgtagtgttgtgcaatttagtaggaatatgggaagcaagaaaaaaatttcttgtacgtatcacattatccctttttgccgtccgtgaaataatcgaacagtttcctcaagggactggctctgttctgaaaaccaaaagcccattagtctcactcctacttcctttccaggcctccagagctctgaataaaccatactagcaaacagcctacactgaccaacttctgagatttctcttttcctctttttgtttttacctagttgttttayaaattgccaaaagttacagaaggctaaaaagaaacctctctgttgtgagctttacctccagtacctttgttatatctgttttctatgtgatgcatttcagaaagtgtgtaattttaagaaacttgggacgtattttagcattcagtgttttaaaacacaaacaaactaaccatttggattattttatgatacatgatttttgcacagtatcaccaaagtgttgtcaaaagtctatttaatctccaatagtcaccctagaaatacagacagacacacacacacacacgaaacaccttcaagattcaaaggaaaatacaattgcattttggttggcttaaatccaaaattttcaagtttagtaaagactctgcaactgcttggtatgcaacaagactctaatcttaaaaagtaacttaaattttatatttcataagtaaaagtacatggtttatattgaatttggaagctgagcttatgaaggttagcacaaagaagaaaaagtaaaataaaactatatcatgttgataaagttagatcttaaaatctttttttttttttttttgagacggagtctagctcttttgcccaggctggatggagtgtgcagtggcgcgatctgggctcactgcaagctccactcccaggttcacgccattctcctgcctcagcctcccgagtagctgggactacaggcgcccgccaccacgcccagctaagtttttgtatttttagtagagacagggtttcaccgtattaaccaggatggtctcgatctcctgacctcgtgatccatccgcctcggcctcccaaagtgctgggattagaggcgtgagccaccacgcctggccga

SEQ ID NO: 78151 - DNA, 1202 bp, Homo sapiens
tgcatttggggcttattgctgctaaatttttggagctttttgaggtcaaatgctatgtcatgtgcctctcagtttcctctgtagctccccagctgttgtggcttactcatagaagagttcagtaaacatccttgccttgattagcaccgaacagaaccactctcttgtgatccatataaaatcctcttgagcaattactaggtaatttccactgtcttataggagcataatcatagcaatattgaggtgagatatcttttcttttttaataaaagaactctaaaatgaaaacttcagtgcaaaggaatagtgagtcagaggtctggtggggatggttttagaaatgccagtaacagaacagtaaataacttgatcatttagtgcactgagtagaaaaaaaaccctcatagatgactcttctatatacttcttgtgattttaacacctacatttagctcctaggcatgagtttgaagtcaaatatgtaaccattaaatctcacctttacctgaagctgttgaaatatccttagaaattaaaggaaaaaatagagactggcagtttttcatagattaaactctttcatacctgtcttgattgagtactgtggtggctccagtgctcaggtggcaggcagttaaatctgttagcagacactgaaaagaacttacgtaagaaatgaaatagtgaattatttgataactgtcctgcactaaatttttctttaaacagctgcaggaatattgccaaccgtttccgtttttacgagtaacactgtcttacttgctgtcattgaaccagttggaaacaaatgcgaaaataaaaaccatgagaatatttgatatttccatcttttcagaaaacagcctcagaaaatgtgccctaataagtcaatgaactgaatatgcttcacactcacacatgcctaattcaattattgttcaattagagaaaaacaacaacttctgttcttattcctaagtgtactcttcatatcatctcttcattatttctgatcattmctctgttctgatttagttttactgccaggtctgcatatttccaattgttaagcatcttccccttggtggccagtctcagtctccccatagctgagagtaatttcctgctgtcaggaaggcccatcttggctcccagagggccgggtcccatcctatccctcagacagttatgcgcatgca

SEQ ID NO: 78152 - DNA, 1511 bp, Homo sapiens
aatattcaaacaaaaataaatacagttttcccaaaactaactattacagactggcacataayagcctgagttcaaacttaaacgagattatctccttgaagaaaccccataagtcttgagtgacatacatttttctataggaattgttcagtttacaagatcactttatcacatttgataggaagcatttactctgaggcttatcactggattcccaaccttgctggtcatgcattgcctcacataggaggtgttcacagcactgcagaggacatgtgactatagcaaagggcaatctatcccaaagctgattaaaatccctagcttccacgattgaggaagacagggatgcgcctgctatacccactgggatttttaaaaacaatcacaaaacctctctccttaccccacagccattgacctaggtcagtcctgcagctctgccaacaccttctaggacttgaacagattatatggttgtatggtctcattgtgatgcttcctctccacgtgtgactctggatattaacctataggcaagagagcaaaaacaacagcaaatattaatccaactcacattccacccaagcaccattcttagtgccttacatgccttaatttattttatcccaacaaaaatcttatgacttatatgctattattatctatactctcactgatgggcacagaggctgagtaacttccttcaggacacacagcaaagaagtgcagaccttgggtttgaaccctcgaggtagacttgacttcttgctctaaaaatctgtattgggagaaaaaacttgcttgaagtagttacctgagttttacttggaagtaggtatacatatttgttgcagatctgaaaatgtattccaagagtaaagtagagtcacaatgtaatttgatgtaatatatacaagatatgagataatatacaacttacactactaagggtggttttgagagaaaaaaaaaaaggcttttggtaaaacactaaattctgtgcctcaaggaaaatatataccaaaatcaaacaagcaaacgataccggtaaaaatacaataattttcagacgaaatgtgttttgttattttagtgattgcaaaggaaatttacgaagataatatgactgattatatcacagtaaagtagcaaaggacaaaatttcttgaagtgggatgttaaaacttgctactgacataataaatactttatgcaattttctatgagacagtaatcacatagcttccacaacatatctttattatttttattttactaatttttttggtttgcttgaaattgtgatgaaacactttcagcaattccttttacatacatccaatttggtttaaactctagaaactcagggacacattttcgtgtttgttttgatttctacagatgaccggaaagaaagtaattggctttcactaactgtttttattcaggagttctttttcattaactgttgccaacagatataaaataacattttaaaaagttgacta

SEQ ID NO: 78153 - DNA, 811 bp, Homo sapiens
aaaccaaacagattctgcacagcaatgaaaacaacaacaacaaaatgaaaaggtaacctacagaatgggaaaaaaatttgcaaaccatgtatttgataaggtgttcatatccaaaatatataagaaacttaactcagtattaataaataaataaataactcagttagaacatgggctaagaatctaaatagacatttctccaaaaaataaaaacgatgtacaaatggaccacgggtatataaaaaggtggtcactaatcatcagggaaaatcaaattaaaaccatgtgagataacagcttacacctgttagaatggcgatcattgaataacaaatgataacaagtgttacggatggtgtagaaaaagggaaccctcacacactgttgatgggaataaaaattagtatagctattatgagaaaccgtatggaagtgcctcagacaactaaaaacagaactaccatatgatccagcattcccactaatgaatatttatccaaaggaaagaaaatcagtatatcagatatttgcacctgcatatttattgcaacatttttcacaatagccaagatatagaataaacctcaatgtycatccacaaataaacaagagctaaaggtgagctacaggatgctgcaagcgtgcgatgtgtcttggtgcgtgagcacagatactttctacatgcctagcatatggagaagatgaggcccagggatggctgcagttaagaccaggaggcaaagcctgtaaagaccatgggaaactgagcgggctcagaggctggagcccagtgaaagaaatggccacacct

SEQ ID NO: 78154 - DNA, 811 bp, Homo sapiens
aaaccaaacagattctgcacagcaatgaaaacaacaacaacaaaatgaaaaggtaacctacagaatgggaaaaaaatttgcaaaccatgtatttgataaggtgttcatatccaaaatatataagaaacttaactcagtattaataaataaataaataactcagttagaacatgggctaagaatctaaatagacatttctccaaaaaataaaaacgatgtacaaatggaccacgggtatataaaaaggtggtcactaatcatcagggaaaatcaaattaaaaccatgtgagataacagcttacacctgttagaatggcgatcattgaataacaaatgataacaagtgttacggatggtgtagaaaaagggaaccctcacacactgttgatgggaataaaaattagtatagctattatgagaaaccgtatggaagtgcctcagacaactaaaaacagaactaccatatgatccagcattcccactaatgaatatttatccaaaggaaagaaaatcagtatatcagatatttgcacctgcatatttattgcaacatttttcacaatagccaagatatagaataaacctcaatgtccatccacaaataaacaagagctaaaggtgagctacaggatgctgcaagcgtgcgatgtgtcttggtgcgtgagcacagatactttctacatgcctagcatatggagaagatgaggcccagggatggctgcagttaagaccaggaggcaaagcctgtaaagaccatgggaaactgagcrggctcagaggctggagcccagtgaaagaaatggccacacct

SEQ ID NO: 78155 - DNA, 590 bp, Homo sapiens
tcagctctgtactgctgccaggcagactgctactcactccgtccagcctcagcccaacaagctcattccctctcccaggtgctgctgttcctgggccagcagggtgaacacgtaatagagacgctagaaacatctcctgagctgaactaaaccacatgttttatcagtagtgacccagaacccactctgggctccgaagggcaaggcctgggragtggagggggaaacagccccagcatttgtctagggactgctgtccctagaactcatgagctacggccccacatgcaggagtgggcatccggtgacaaagacaaagctggctggtcaggtgatatgtctgggagcagatagtgaccactcccctttgtcccggttgcctcctccgaaggaggctgcggtattctcaccccctgggccctggctctccactgaacctggagggttccggagaggagagtgggaaactagactctgcagctggaggcactgagatcctccactggccaagtggcctcacttcccgtttcctcccctgggaagcagaactgctgtctctggccaggctgcttcacagggccactgcaagg

SEQ ID NO: 78156 - DNA, 698 bp, Homo sapiens
ggaatttaaatttctgttcttttacatttccaaactatattttttctcttctgaactttaaacttttttacaagtatgcattaatttttttaaccagtagaaacagtaaatgtcaatgaatgtgaaactgacatactcctgagctgatatacaagtgtttgtgccctctactaacaagaatattaccatttaccatgaattgagcatttgttgtgtgctgttagccctgagcatgagacagacatttcacytaactccctcttttcatgcccattttacgaatgaggaaacaggatcagagaaatccaatgacttgctcaaagtcccacagctagagccgcaaccagctccatctgctccaaaggccttgcttgcagccagcctactccacagcttctccgcagccaggaaggttcctttctgcttgcttgcttttctacgcggccactgaaagcagctgtgacgatatgtaggtcatactaaccacaaatattaccaagaccacggaactgggtgggcactttggcagcatcttggttgtgactggtgacttttctcccacagtcaaagaaccaggtcagttcccaggctcacccagcagacagtctggggcagagacaggggcagcgagcaagaacccaggggaggggctttgctacgcaagaaactaaggaaaacactggtgtgcttggggatag

SEQ ID NO: 78157 - DNA, 1724 bp, Homo sapiens
gaggggagcttggcgggtgggcgtgtcctcatcccagggacctggcctctccaaactcgcagggaacactgggaggcccccaatgcccagagcgtgttcttaggcctctctctgacaaggtgccagggagacaagaaggacgggctggtgaggctgatgaggctaccttggccgctctgcctgcttcaggcccagggaatccagggctgcaggagactctgatggtggccctcggccctgtgcgctgtggtgttctccatgctcatcgtctgcacccgtgaagggtggcagaggagagggtcagtgtcctgaggaatgggcaggcttgtggaagcctggctaaagcaagcccgtggttcttggagctggggccccagggccccgagaggcagagggcacacagggcatgggggtggtgcggcatctgggagggaatgagtggggtgtgagcaggcccacatgtgtggcctggggcgtgggggggtctgggcgtgagtgtatgtatatgtgtgtgtgtgtgtgtgtgtgcatgcactatgaggccagcatgagagtgggcacctgtggatgtgtggcctgggcctgagaacctgtggggcctggcgtgcgcacatgtggatgcgggatcgtgtgggtatgggggcccctcgtgagcacacgtgggcccgggtgagtgtatgtagctgtgcgtgcatcggccctggctccagcaggcccggcctgtcccatccctggcagcaaggcgccctcttgtggcccgagcaggtggcgtggggaggaggaaatgagagtgaaccctgagaggtccaccaggctgggacgcaggaggggtggggcgggaggcaggaggcggcaggcaggatgccaggtgggcatgcaagaaggccggatgcacactgccctgggggcctggggatccttgctggcccctgcccrccgctcctggcttcaccaggttcctccctccccgcattggggtgtcctctctgatgcagggcagacgggcttggacggcctcatgggatgcatgcgggtggcctgggccctgtggcaaggcacctctccagccgcccccacttgggaccacactgccaaagaccagcatgccatgtctgcccctcacaccgcatctgcagggctgattccccacaccccttccccgctggggcagctgggatcctgccctcccacaggcaaagagagtgcgtgggtgcatgtgcgcatgtgtgtgtgtgtgtgtgtgcgtgtgtgtgtgtgtgtatgtgcatgagctggtgtctaggacccgcatgtgagtgtgggatgaaatgaggccatctctgcatggctccagggagaggggatgctgggacagagtgcagggcgtggcccctcgtcctccccctcacggatggctgtggcccaggatgttgagtctacagtcatggagcccctggccctcagctcctggattaaacccttggaaagtgtagagcactcctctgcacaaatttttgctcagtaatgaggacagacatgggggatgccacagtcggagagcagcctcagtgccactgacagggctggctgggaggttcctcaccaggaggcctattttcagcaactttcactcacccatgagaagggggagccctggtcaggtgggagctgtgtgggctgctcgtgagtggtgggtgcatgggttggtttctgtttttaataaccccgcactttcaggtggtttt

SEQ ID NO: 78158 - DNA, 1724 bp, Homo sapiens
gaggggagcttggcgggtgggcgtgtcctcatcccagggacctggcctctccaaactcgcagggaacactgggaggcccccaatgcccagagcgtgttcttaggcctctctctgacaaggtgccagggagacaagaaggacgggctggtgaggctgatgaggctaccttggccgctctgcctgcttcaggcccagggaatccagggctgcaggagactctgatggtggccctcggccctgtgcgctgtggtgttctccatgctcatcgtctgcacccgtgaagggtggcagaggagagggtcagtgtcctgaggaatgggcaggcttgtggaagcctggctaaagcaagcccgtggttcttggagctggggccccagggccccgagaggcagagggcacacagggcatgggggtggtgcggcatctgggagggaatgagtggggtgtgagcaggcccacatgtgtggcctggggcgtgggggggtctgggcgtgagtgtatgtatatgtgtgtgtgtgtgtgtgtgtgcatgcactatgaggccagcatgagagtgggcacctgtggatgtgtggcctgggcctgagaacctgtggggcctggcgtgcgcacatgtggatgcgggatcgtgtgggtatgggggcccctcgtgagcacacgtgggcccgggtgagtgtatgtagctgtgcgtgcatcggccctggctccagcaggcccggcctgtcccatccctggcagcaaggcgccctcttgtggcccgagcaggtggcgtggggaggaggaaatgagagtgaaccctgagaggtccaccaggctgggacgcaggaggggtggggcgggaggcaggaggcggcaggcaggatgccaggtgggcatgcaagaaggccggatgcacactgccctgggggcctggggatccttgctggcccctgcccacygctcctggcttcaccaggttcctccctccccgcattggggtgtcctctctgatgcagggcagacgggcttggacggcctcatgggatgcatgcgggtggcctgggccctgtggcaaggcacctctccagccgcccccacttgggaccacactgccaaagaccagcatgccatgtctgcccctcacaccgcatctgcagggctgattccccacaccccttccccgctggggcagctgggatcctgccctcccacaggcaaagagagtgcgtgggtgcatgtgcgcatgtgtgtgtgtgtgtgtgtgcgtgtgtgtgtgtgtgtatgtgcatgagctggtgtctaggacccgcatgtgagtgtgggatgaaatgaggccatctctgcatggctccagggagaggggatgctgggacagagtgcagggcgtggcccctcgtcctccccctcacggatggctgtggcccaggatgttgagtctacagtcatggagcccctggccctcagctcctggattaaacccttggaaagtgtagagcactcctctgcacaaatttttgctcagtaatgaggacagacatgggggatgccacagtcggagagcagcctcagtgccactgacagggctggctgggaggttcctcaccaggaggcctattttcagcaactttcactcacccatgagaagggggagccctggtcaggtgggagctgtgtgggctgctcgtgagtggtgggtgcatgggttggtttctgtttttaataaccccgcactttcaggtggtttt

SEQ ID NO: 78159 - DNA, 551 bp, Homo sapiens
tcctcgcctgcccctggccaggcctgggcgatggaccagcagctcccaaagcgaacctgccgcttgtgaggtggaagccccagtgctttcgaggggagggtctctgaggctcctcctgcttctcagccaccctcttgactggcctagacctgagccaggacagaaggagaactgagtagggggcacaaaacaggggcaagayggcccagcctgggtggcctcagccgtgtgtcccgggctctgctgagccaggctgccccgacagaggaggcctagggtgaggccaggatgcgtcagggcctgaggtccccggggagcctgacccaccttctcctgaccctggctgagcagcctgtttcttggcctgtagagcagccacggtgtgtaaggataaataatcatgtccagtcaaggccagagcagcccggatgacatgctgtgaacaggttctaggtgggtgacagggcactgaggccgactgccttgggtgtcagccacatctgttgagatgcgtgtgcctgacgcccgaacgcgtgccagcgttttttgcg

SEQ ID NO: 78160 - DNA, 792 bp, Homo sapiens
cctccctctcccaatccctgtctctctctctccttccacagccacatgaaattgaagtgggagaacatggtgtgtgagcattattgggggtggggtgcggagcaggcactggctttggttgaggtctgcaaaggaaagcacccccactgccaggctgctcaggagtggctcccaccctcgactgcggggaagtgctggaaccctccgcacgagggcaacctttcttgggctctgaaggcgcctctcatcctctgagccaagaagacttctgacccagaattctgagttgagttccgacgcaggcrtgggcgatggtgagcaactccaggctaccccgagaaagccgctgtgtgaccccattaggggacttggctctcctgccaagcccccacccagcacctgtcccttgtgtcatgactggacttgttacttctagcccaggagctccaggtgaaggggactgtgttggtcctgtctgcccaggactctccccacccgcacagtgtacctgtcccacagtggcaccaacaaggctcagctgagcccttgccagaggagacacggtgggcaccagccccagcgctgccacctgcctgcctcctctgccaccgagggaagccatgtcgccttcctgagcctgcttctctgtccacaaaacaaagactagataattagagtgcacacttggagggacaggatggcttcgtatccatctggctgtgccctgtaactcaagggatgggactgtgtcattggtaaacactgcaacaggcctcctttccaggaaacagg

SEQ ID NO: 78161 - DNA, 875 bp, Homo sapiens
tatgagtcttttccctctggggagccctgcctaacacagtggcatagagctccaggcaggcccctcacctggccttcagcttcagtttctttgcctactgggctgaatattggtgtcaccacccaggatagcaagtccccatcagtgtcactgccacctgtcgaagagatcccccagcccagcactcgggtctgtgagtggcagtggagatgacactaggctctaagtagtggggctgcgtgactccagcgcccctaggaccagcaagggcacccagagcactgtgggaggactggtgccgcctccctgcccccctgctttctcctgggccactgggctagacatggggcctccctgcccccatrtggtttggcctgaaaaagagaggaggtggggtggcacttctggggcagcccagagtgagtgccctgccctgagcccagcgtgtgccctgcctgtgcccctgggtggggggtgcatacagacctcggggggatctggccgttggagtgcgcactgggagggacggagtcagctctttttaatctaaacacacaccaggtgcttaacgtgtttttatcaaaatatcaagcacagctgcaagaggctgctctgctccaaggccctacgcccaggcccgtccctctgccaaagcgagccttttaggtgagccctgccggccacctgctagcccaggccccggctcctggtgggccctggaccaggctgcaagcatatccaagtgcatggcagtgagacgtccaggcctcccagccccaactctgagcctccgttgggtcagtggtaagatggggcagtggcacctacctccccggctgctgtgaaaaccaagtgagcggaagcatggcagcccc

SEQ ID NO: 78162 - DNA, 875 bp, Homo sapiens
tatgagtcttttccctctggggagccctgcctaacacagtggcatagagctccaggcaggcccctcacctggccttcagcttcagtttctttgcctactgggctgaatattggtgtcaccacccaggatagcaagtccccatcagtgtcactgccacctgtcgaagagatcccccagcccagcactcgggtctgtgagtggcagtggagatgacactaggctctaagtagtggggctgcgtgactccagcgcccctaggaccagcaagggcacccagagcactgtgggaggactggtgccgcctccctgcccccctgctttctcctgggccactgggctagacatggggcctccctgcccccatgtggtttggcctgaaaaagagaggaggtggggtggcacttctggggcagcccagagtgagtgccctgccctgagcccagcgtgtgcccygcctgtgcccctgggtggggggtgcatacagacctcggggggatctggccgttggagtgcgcactgggagggacggagtcagctctttttaatctaaacacacaccaggtgcttaacgtgtttttatcaaaatatcaagcacagctgcaagaggctgctctgctccaaggccctacgcccaggcccgtccctctgccaaagcgagccttttaggtgagccctgccggccacctgctagcccaggccccggctcctggtgggccctggaccaggctgcaagcatatccaagtgcatggcagtgagacgtccaggcctcccagccccaactctgagcctccgttgggtcagtggtaagatggggcagtggcacctacctccccggctgctgtgaaaaccaagtgagcggaagcatggcagcccc

SEQ ID NO: 78163 - DNA, 875 bp, Homo sapiens
tatgagtcttttccctctggggagccctgcctaacacagtggcatagagctccaggcaggcccctcacctggccttcagcttcagtttctttgcctactgggctgaatattggtgtcaccacccaggatagcaagtccccatcagtgtcactgccacctgtcgaagagatcccccagcccagcactcgggtctgtgagtggcagtggagatgacactaggctctaagtagtggggctgcgtgactccagcgcccctaggaccagcaagggcacccagagcactgtgggaggactggtgccgcctccctgcccccctgctttctcctgggccactgggctagacatggggcctccctgcccccatgtggtttggcctgaaaaagagaggaggtggggtggcacttctggggcagcccagagtgagtgccctgccctgagcccagcgtgtgccctgcctgtgcccctgggtggggggtgcatacagacctcggggggatctggccgttggagtgcgcactgggagggacggagtcagctctttttaatctaaacacacaccaggtgcttaacgtgtttttatcaaaatatcaagcacagctgcaagaggctgctctgctccaaggccctacgcccaggcccgtccctctgccaaagcgagccttttaggtgagccctgccggccacctgctagcccaggccccggctcctggtgggccctggaccaggctgcaagcatwtccaagtgcatggcagtgagacgtccaggcctcccagccccaactctgagcctccgttgggtcagtggtaagatggggcagtggcacctacctccccggctgctgtgaaaaccaagtgagcggaagcatggcagcccc

SEQ ID NO: 78164 - DNA, 875 bp, Homo sapiens
tatgagtcttttccctctggggagccctgcctaacacagtggcatagagctccaggcaggcccctcacctggccttcagcttcagtttctttgcctactgggctgaatattggtgtcaccacccaggatagcaagtccccatcagtgtcactgccacctgtcgaagagatcccccagcccagcactcgggtctgtgagtggcagtggagatgacactaggctctaagtagtggggctgcgtgactccagcgcccctaggaccagcaagggcacccagagcactgtgggaggactggtgccgcctccctgcccccctgctttctcctgggccactgggctagacatggggcctccctgcccccatgtggtttggcctgaaaaagagaggaggtggggtggcacttctggggcagcccagagtgagtgccctgccctgagcccagcgtgtgccctgcctgtgcccctgggtggggggtgcatacagacctcggggggatctggccgttggagtgcgcactgggagggacggagtcagctctttttaatctaaacacacaccaggtgcttaacgtgtttttatcaaaatatcaagcacagctgcaagaggctgctctgctccaaggccctacgcccaggcccgtccctctgccaaagcgagccttttaggtgagccctgccggccacctgctagcccaggccccggctcctggtgggccctggaccaggctgcaagcatatccaagtgcatggcagtgagacgtccaggcctcccagccccaactctgagcctccgttgggtcagtggtaagatggggcagtggcacctacctccccggctgctgtgaaaaccaagtgagcggaagcatggcascccc

SEQ ID NO: 78165 - DNA, 863 bp, Homo sapiens
gaggggctcttttcagctgcactttcaggatgagagaagggaggctctgagtggccatttgcccaaggtcacacagagctcagggccagcgcttcccatggccaaagcccaggccccctctgccagtcccgcctccaggcttgcaggtggagcagccaggggttccgtactccctgccaggcagctgccagccctccccgctcccctctcagttcctcagcctggctatgggaggcccaagtcccacgtgtcactggaattcgggaggcctggctctcaaagctttctgtrcaaaacaaggagaaaaagagaagccacttttgctgtctggacatgctgtgggtgtcctggggaatgtgctggcccactgcttggggcctgacttggagtgcccaggagctgcgtctgcactgtggcttgaaccgagtgtcgtgctctgtggacagagccatccactctgggggtgctcgtcccatggcactgtcagcccccattctggaaggtcccaactgggtcccccaggcctgtgtcccagagaccttccaggtcttcattcactgatcatgcatttattttgggggtaggataggtcctgaagaccacagggcagggatctctgagttggggcttttgcggagtgagggagtgagagggtgttccaggcagaggaggtggcagagaaaggcaccaagtgaggcaggggcagttggggacatgagtgctcgggagcggggagagggggcagctggtgggtaagcagaggccagctccaaggcccccctgtgggccacattagggagacagggtctggccttgttggtagcgcggcccctcgcagtgatgggtcccctgtcagacctcca

SEQ ID NO: 78166 - DNA, 863 bp, Homo sapiens
gaggggctcttttcagctgcactttcaggatgagagaagggaggctctgagtggccatttgcccaaggtcacacagagctcagggccagcgcttcccatggccaaagcccaggccccctctgccagtcccgcctccaggcttgcaggtggagcagccaggggttccgtactccctgccaggcagctgccagccctccccgctcccctctcagttcctcagcctggctatgggaggcccaagtcccacgtgtcactggaattcgggaggcctggctctcaaagctttctgtacaaaacaaggagaaaaagagaagccacttttgctgtctggacatgctgtgggtgtcctggggaatgtgctggcccactgcttggggcctgacttggagtgcccaggagctgcgtctgcactgtggcttgaaccgagtgtcgtgctctgtggacagagccatccactctgggggtgctcrtcccatggcactgtcagcccccattctggaaggtcccaactgggtcccccaggcctgtgtcccagagaccttccaggtcttcattcactgatcatgcatttattttgggggtaggataggtcctgaagaccacagggcagggatctctgagttggggcttttgcggagtgagggagtgagagggtgttccaggcagaggaggtggcagagaaaggcaccaagtgaggcaggggcagttggggacatgagtgctcgggagcggggagagggggcagctggtgggtaagcagaggccagctccaaggcccccctgtgggccacattagggagacagggtctggccttgttggtagcgcggcccctcgcagtgatgggtcccctgtcagacctcca

SEQ ID NO: 78167 - DNA, 863 bp, Homo sapiens
gaggggctcttttcagctgcactttcaggatgagagaagggaggctctgagtggccatttgcccaaggtcacacagagctcagggccagcgcttcccatggccaaagcccaggccccctctgccagtcccgcctccaggcttgcaggtggagcagccaggggttccgtactccctgccaggcagctgccagccctccccgctcccctctcagttcctcagcctggctatgggaggcccaagtcccacgtgtcactggaattcgggaggcctggctctcaaagctttctgtacaaaacaaggagaaaaagagaagccacttttgctgtctggacatgctgtgggtgtcctggggaatgtgctggcccactgcttggggcctgacttggagtgcccaggagctgcgtctgcactgtggcttgaaccgagtgtcgtgctctgtggacagagccatccactctgggggtgctcgtcccatggcactgtcagcccccattctggaaggtcccaactgggtcccccaggcctgtgtcccagagaccttccaggtcttcattcactgatcatgcatttattttgggggtaggataggtcctgaagaccacagggcagggatctctgagttggggcttttgcggagtgagggagtgagagggtgttccaggcagaggaggtggcagagaaaggcaccaagtgaggcaggggcagttggggacatgagtgctcgggagcggggagagggggcagctggtgggtaagcagaggccagctccaaggcccccctgtgggccacattagggagacagggtctggccttgttggtagcgcggcccctcscagtgatgggtcccctgtcagacctcca

SEQ ID NO: 78168 - DNA, 749 bp, Homo sapiens
atcaagcacctagttcccagtgcaatcactggaggcaatataatgagcctgaaaaaagaaatacctcccaatgacaacaatgtctttttaaccgtgtcaataaaaagagccatgggaggttttgaaaaatataaattgaatcttgactcagtatraacttcagaggttcacatgatcttctgaaaatggttcactcattgtatagcctgccactactatgaaagatacatgtcacttttatatgtcctcaaatgtcatagaggattgtgaattgggatctgagaggatgtctaacactcacttctatttatggctccttcagcaagaaagttattttctggtcctaaatgagaaagtaagtccatgagatgctctgtatatcctgagctgaattcttggtgaaaatattcatccatgaactcaaatagtggctatttattaaatgtagaagacatgatgctagcatagcaagagaccctgttctaccaagtcagagaacctactagtatcttctctctagtgagccaagcaacccttccagtgcaaccgaggtctttctccacacccctgcattgacattagttccacatcaacagcagtttctcttcagcatgttcatcatatcctacatttatatacatgcacaggtcttaaccactgatcaaaacaatcattggtagttcgtagaaaacattgcatttaacacacagtgatatttgctaaagcttaactttaagtttgacttattt

SEQ ID NO: 78169 - DNA, 926 bp, Homo sapiens
caccccaatcctacagatgaggagactgaatctgagggtggctcaggtcacacagctgatcactggcagagccaagatatggacccagggctttactccaagyctgagacattttgtaagataaccagactgcctccatggctcacacctctgaccagaaaagagttgactagcaatttttttttttttttttttttttgagacagagtctcgttctgtcgcccaggctggagtgcagtggcacaatctcggctcactgcaacctccacctcccaggttcaagccattcccctacctcagcctcccaagtagctgggactacaggcacacgccaacatgcccagccaattttttttgtactttagtagagacggggtttcaccatgttggccaggatggtctcatccatcgtgatccacctgccttggtgatccacctcgtgatccacctgacctcgtgatccacctgccttggccttccaaagtactgggattataggcatgagccacagcacccagcctattttttcattcttgatccaagttcctgcaaattcagaaaaccttcctcttatgccagttaagattgccctgctagcattttctttctattttcattatttattataactatttatgtcattgaggagaaattcgttgtgttcagaagactgtacagaactcaaaatattgccctacatgtatatacataaatatacacacttcaaaactaaatatatagacaatttttcaaatgcttaaggttaagaatcagttttatgaaacaatgtagaaatatcaacagagattgagacaagttgtgggctgcactgtagtttattatagcaaagatcagcaacctaagaatgagataaggaggtttaaaaaattaaggtgatttcatccactggagtatgtgcaaacatt

SEQ ID NO: 78170 - DNA, 926 bp, Homo sapiens
caccccaatcctacagatgaggagactgaatctgagggtggctcaggtcacacagctgatcactggcagagccaagatatggacccagggctttactccaagtctgagacattttgtaagataaccagactgcctccatggctcacacctctgaccagaaaagagttgactagcaatttttttttttttttttttttttgagacagagtctcgttctgtcgcccaggctggagtgcagtggcacaatctcggstcactgcaacctccacctcccaggttcaagccattcccctacctcagcctcccaagtagctgggactacaggcacacgccaacatgcccagccaattttttttgtactttagtagagacggggtttcaccatgttggccaggatggtctcatccatcgtgatccacctgccttggtgatccacctcgtgatccacctgacctcgtgatccacctgccttggccttccaaagtactgggattataggcatgagccacagcacccagcctattttttcattcttgatccaagttcctgcaaattcagaaaaccttcctcttatgccagttaagattgccctgctagcattttctttctattttcattatttattataactatttatgtcattgaggagaaattcgttgtgttcagaagactgtacagaactcaaaatattgccctacatgtatatacataaatatacacacttcaaaactaaatatatagacaatttttcaaatgcttaaggttaagaatcagttttatgaaacaatgtagaaatatcaacagagattgagacaagttgtgggctgcactgtagtttattatagcaaagatcagcaacctaagaatgagataaggaggtttaaaaaattaaggtgatttcatccactggagtatgtgcaaacatt

SEQ ID NO: 78171 - DNA, 926 bp, Homo sapiens
caccccaatcctacagatgaggagactgaatctgagggtggctcaggtcacacagctgatcactggcagagccaagatatggacccagggctttactccaagtctgagacattttgtaagataaccagactgcctccatggctcacacctctgaccagaaaagagttgactagcaatttttttttttttttttttttttgagacagagtctcgttctgtcgcccaggctggagtgcagtggcacaatctcggctcactgcaacctccacctcccaggttcaagccattcccctacctcagcctcccaagtagctgggactacaggcacacgccaacatgcccagccaattttttttgtactttagtagagacggggtttcaccatgttggccaggatggtctcatccatcgtgatccacctgccttggtgatccacctcgtgatccacctgacctcgtgatccacctgccttggccttccaaagtactgggattataggcatgagccacagcacccagcctattttttcattcttgatccaagttcctgcaaattcagaaaaccttcctcttatgccagttaagattgccctgctagcattttctttctattttcattatttattataactatttatgtcattgaggagaaattcgttgtgttcagaagactgtacagaactcaaaatattgccctacatgtatatacataaatatacacacttcaaaactaaatatatagacaatttttcaaatgcttaaggttaagaatcagttttatgaaacaatgtagaaatatcaacagagattgagacaagttgtgggctgcactgtagtttattatagcaaagatcagcaacctaagaatgagataaggaggtttaaaaaattaaggtgatttcatccactggagtatgtgcwaacatt

SEQ ID NO: 78172 - DNA, 544 bp, Homo sapiens
ttattttatttttatttttaatagagacggagtcttgctatgttgcctaagctggtctaaactcctgggctcaagcaatccccccatcttggcctcccaaagtgctgggattacaggcatgagccaccacatcttgtcccaacccttgacattttagagccaaccatgctttgttccaggggtctgtcctgtgcacagcgcaatrtttaaccacatccttggcctgcacccactagctgccagtagcacctctccacccagtggtgacaattaaaaatgtctccagacattgccaaatgttccctgggaggccgtcgctggggttgggaaccactgaggtaacgcgttggatgtgtctgtcttccctgctagcgacactgtgtccggcacctgcagagggcctgccgcttagtatgtgctcaacacatattggttgaacgaatcagtgaacctatgttaactttcttaatgaataaatctataagtgtgcatgtataaaatagactcctgggttccatagactggctgcctgagagtcacctgg

SEQ ID NO: 78173 - DNA, 544 bp, Homo sapiens
ttattttatttttatttttaatagagacggagtcttgctatgttgcctaagctggtctaaactcctgggctcaagcaatccccccatcttggcctcccaaagtgctgggattacaggcatgagccaccacatcttgtcccaacccttgacattttagagccaaccatgctttgttccaggggtctgtcctgtgcacagcgcaatatttaaccacatccttggcctgcacccactagctgccagtagcacctctccacccagtgktgacaattaaaaatgtctccagacattgccaaatgttccctgggaggccgtcgctggggttgggaaccactgaggtaacgcgttggatgtgtctgtcttccctgctagcgacactgtgtccggcacctgcagagggcctgccgcttagtatgtgctcaacacatattggttgaacgaatcagtgaacctatgttaactttcttaatgaataaatctataagtgtgcatgtataaaatagactcctgggttccatagactggctgcctgagagtcacctgg

SEQ ID NO: 78174 - DNA, 567 bp, Homo sapiens
ttggttccctcctgtctctcagacacctagaacagtgcttggacatagcaaaagctccatcaatctctgatgaatggatggatggataaacagatgggcgaggcaggaccggaagggaagagatcatttccaaatggacttagaaacaacaacaaataagccacactgcacaccataatctctgagcctccattttctgctctgaaaaagggaatacaaccaccttcccagcaaggcggaaggtacacacagcccctcccctgggtgtgcctcttcccatctcactstgtctgttgacccagccctggatcaagagtcccttcttctagggcagtgtggaaagagaaggggttctcatcagacggggagggctgggctgctgactcttctgtccacaagctgaataaccacaggccacttccccaacctctctgaaccacagtttcccaattggcttaataaccaaatgccctttataagggtcgattcgaaaatgtgcttgaagccctcgcactgtgtgaggcacgaggtgggcactcatcccatgttaagccctcttgctctgta

SEQ ID NO: 78175 - DNA, 549 bp, Homo sapiens
tcacaccccacccaccaggctcaggggctcaggcagacgtgacacctctttccccaggagaagtcagcagaacaaatcttgactagggacaccaaaatccatattcggggccaagagaaggtgctctgccccgcaagtgtcagccaggaccccggcttccttccctcgctgtgtgatctcagtgtgggtttggacacatccccactctgggcttccatttcacatcagaaaacaggacctggaatggctcagtggctctcaatctgcaatcatgatccaggagcccctgascaagtttcagaaaatcctagaagaagcgcacatgcgccccaagctgaagcacacaggaagcttgctcatccaggcactgaagtttatcggtgtgtgcagttcaggctgaacagactcacacagaggtgtctgcaatcaacaaaacgggggaaacagtgactcacctcacacagatggcctgttagcgggcaaatttctccacaaaaggcgacaagaatcaccacgggtccttggcagagcctcaactagactctgctg

SEQ ID NO: 78176 - DNA, 747 bp, Homo sapiens
cccactttaggggacagtcaccggcccagcaggcctcatgtgtggctcatctttccccgctgtggtgtggtttggtttaaaggcaaagtcagaggagacacatcagccctgttgactaaagcgtaatattttccatcaggtgtcacggctttctgtactttctccttttcccctggggaatctcaaaaagagtccatgtgaacatctgaaaataagtgtgcctcatgaaaaagcatgcacgcacacacatgtgtacacacacacacacacacacacacacccctggggcaaagaaccaccaggaacccaaacactaaacaacctccagccccccaccccaggcaaagctccagaagccgtatctgggagacactgcatttttctggaattgtgtcatcattcacaacaaagttcactctcaggccttgcatccacccsggagctgggctgggctgcccagagccacagtgaaaaaagagctggccactcacaccatttttatggtgagccgtgacctccaaacgagctgggtgtgcgccgggctgaagccctggttccagccgtggtggggcagcatcccgcaagcatatcacagcaccctaagctccagggcttagacccaggcaagaggcatgaaaaatagagcagctacacggaggagcctaagcttctgatttaaatataaaaggaacggagggcaggggtggtggggaggctggcttgtccctcttctccacaggcctggca

SEQ ID NO: 78177 - DNA, 747 bp, Homo sapiens
cccactttaggggacagtcaccggcccagcaggcctcatgtgtggctcatctttccccgctgtggtgtggtttggtttaaaggcaaagtcagaggagacacatcagccctgttgactaaagcgtaatattttccatcaggtgtcacggctttctgtactttctccttttcccctggggaatctcaaaaagagtccatgtgaacatctgaaaataagtgtgcctcatgaaaaagcatgcacgcacacacatgtgtacacacacacacacacacacacacacccctggggcaaagaaccaccaggaacccaaacactaaacaacctccagccccccaccccaggcaaagctccagaagccgtatctgggagacactgcatttttctggaattgtgtcatcattcacaacaaagttcactctcaggccttgcatccaccccggagctgggctgggctgcccagagccacagtgaaaaaagagctggccactcacaccatttttatggtgagccgtgacctccaaacgagctgggtgtgcrccgggctgaagccctggttccagccgtggtggggcagcatcccgcaagcatatcacagcaccctaagctccagggcttagacccaggcaagaggcatgaaaaatagagcagctacacggaggagcctaagcttctgatttaaatataaaaggaacggagggcaggggtggtggggaggctggcttgtccctcttctccacaggcctggca

SEQ ID NO: 78178 - DNA, 747 bp, Homo sapiens
cccactttaggggacagtcaccggcccagcaggcctcatgtgtggctcatctttccccgctgtggtgtggtttggtttaaaggcaaagtcagaggagacacatcagccctgttgactaaagcgtaatattttccatcaggtgtcacggctttctgtactttctccttttcccctggggaatctcaaaaagagtccatgtgaacatctgaaaataagtgtgcctcatgaaaaagcatgcacgcacacacatgtgtacacacacacacacacacacacacacccctggggcaaagaaccaccaggaacccaaacactaaacaacctccagccccccaccccaggcaaagctccagaagccgtatctgggagacactgcatttttctggaattgtgtcatcattcacaacaaagttcactctcaggccttgcatccaccccggagctgggctgggctgcccagagccacagtgaaaaaagagctggccactcacaccatttttatggtgagccgtgacctccaaacgagctgggtgtgcgccgggctgaagccctggttccagccgtggtggggcagcatcccgcmagcatatcacagcaccctaagctccagggcttagacccaggcaagaggcatgaaaaatagagcagctacacggaggagcctaagcttctgatttaaatataaaaggaacggagggcaggggtggtggggaggctggcttgtccctcttctccacaggcctggca

SEQ ID NO: 78179 - DNA, 525 bp, Homo sapiens
tgggactccagcacaactactctgccccagcctgatgacttcaatcagaggcagtccagcagtgaaagaaacacccatatgcagagatgagaaagaaccaaagcaagaactctggcaactcaaatagccaaagtgtcttatgtcctccaaatgattgcactagttctccaacaagtgttcttaaccaggctgagaaggatgaaatgacagaaatagaattcaaaatatagataagaatgaatatcattgagattcaggagaatgccaaaatccatccaaggaaaccaagagtcacaataaaataatacaggagctgacagacaaaatagccactataaaaaaagagcctggccagkcacagtggctcacacctgcaatcccagcgctttgggagaccaagagggtggatctcctgaggtcaacatttcaagaccaacctggccaacatggtgaaaccccatttctactagaaaaaaaaaaattagccaggcatcgtggcacatgcctgtaatcccagctgctcag

SEQ ID NO: 78180 - DNA, 755 bp, Homo sapiens
aatttgcaaaaaaaattttttttttgagatggagtctcaccctgccacccaggctggagtgcggtggcatgatcttggcttactgcaagctccacctccctggttcaagcgattctcctgcctcagcctcccaagtagctggtactataggcacgtgctaccacacctggctaattttcgtgttttttagtagagacggggtttcaccatattggctgggctggtctcgaactcctgaccttgtgatccacccacctcaggctcccaaaatgagattacaggcgtgagcatcatccttttatatctgccattgtaaaaggtagaaatgggacggatcttcattttcttctcgttgtttcagttttgctaccttatgtttttcagttattttaaattccttttttaaaattgcatgttcatgttgctttcttgccttatcttttaggctgttgggcttctaaaaaattagtgatgagcaagtattcttttaaaaattgaagtataatagacatactgaagcatcattgatgaaaatcccatagcttaatgaagtttcacaaagtgaacatatctgtgtagccaccactcacactcatcttcccacctgagaagacctgtgcatgccccgtctttgacaccgctccctgccctggaggtgaccaccagcctgaattctaccactgtggatttgctttgtctatttttgaactctatacamaccacatcatacatatattatacaatgagtgcttttg

SEQ ID NO: 78181 - DNA, 669 bp, Homo sapiens
tacattacacatgttcttccctttctcttctctttctctctggttttgcctcccagtttgcttttagtatagttactcttttcattttcttttgggccatttttcttactactgtgtaaactttacctcatgcttattcctaatgtgcccagaaacacctcaatccttacagaggcatcagagctctagattttcaggatctctctcacctgttccttcccacagaaatgataataagggttcctgctcacatttcctccccyactccctctgcttcctaacctactctggtgcttccttgtgtagctctgcatggtgtggtgtaagagttattaacattattgaagatggggtcttgctgtgttgcctaggctggagtgcagtggtgcaatcatagtggtgcaatcactacagccttaaactcctgggcccaagccaacctcctgcctcagcctccttgatagctgggattacaggtgttagagattgggtcttgttatgttggccagtctggtatcaaactcctgacctcaagtgatcctcttgcctcagcctttcaagtcactaggattacagatgtgagccactgcacctgatcttgtgatggttaattttacctattaatttagccggactccaatgcccagattggtaaacattattctggat

SEQ ID NO: 78182 - DNA, 650 bp, Homo sapiens
tttccaccgtatatttccaagggtcacattcaaatgaaaatgtgtcattgtatcattcctaaaaagccctgttttccatcaggttggaaacactaccatccatttttaccttcttaagacacaaacaaaaatcccttggcctctwtcacaagaatatataaaagcaaaatttcaagaacattttcaagtttgtctttgaaaggtttgtgcctcattaaaatttattttgtacaaacagctcctatatttgtcacaatcttctgtaatgatgatggctaagatttaggcttggtgaaccatcattgacttcaactatgttttaaccaaaagtaaagtgtcccagggaactggaatcatagtttcactgttttttttaaaatcataaaataatactatgaagtaaaagagagttatataactccttaccttaaacctctggattcgctccttcctagctaaggtctccaatttcttttttatttcaagctgatggtaacgctaagcatacaggaaagaataaaggagagaatcatatcagttatagcaaagaccagtttagaggaaaataattccaacagctaactatattctcaattagtcctcttgtcattgagatggagaagaatcatctgcatcagtgcacaagtggg

SEQ ID NO: 78183 - DNA, 848 bp, Homo sapiens
ccctatattgtaattgcttatttaaattttggtctatacaagacaataagctgttttatgcaggatacatggctgctcccatttttatccctagtacctaaaacaatactaaacctagagtagatattcagtaaatacatccttaataagtgttatgaatgaattatcttctatgttaagaataccgtttataaaatgaaattgcgatttttgtaaacctcattgtttcctctaggtggaggtgaaaggtgaagaagtatgagtttggctttttttttttttccattttaaaatgactaacagataagtgagactgatttaaaagaagaaaaagtttgatttaataagaaattcaacaattatgattattacaatcttagggaaatcatgacgcccttagccattcagttcaataatcagcagtattccaatggagctaccatgaatatgaatatttatctatataaataagtgtgccagaaagaaaatagattcatgtaagtaatttctttttaatttactaggaattcatttttaaaatgctgaaaccccaaggcattcttacaaaccatgaaatcacccaagttagccacatctgttcaaatgttttcaaaagcttamcctaacattaattagatggcaacccaattttcaccttctctaaaagagaacacagcacactttagctatatgtgagattgcagttgggatcaagatggctgaataggaacagctccagcctacagctcccagcatcagcgacgcagaagacgggtgatttctgcatttccaaatgaggtaccgggttcctctcactgaggagtgccggacagcgggtgcaggacagt

SEQ ID NO: 78184 - DNA, 606 bp, Homo sapiens
agtgggtgtcatgccaccttcagtcttgacctgctcttctcttggtcacggtgattagaaagtggctcacaggaagtttggcaagggtggggacacttggaagttaggtggagggtgaatgaatggactcttggtttggctttaatcattttaggaccagatagggtagctctctctctctctctctctctctctctctctctgtgtgtgtgtgtgtgtgtgtgtgtgtgtgtgtgtgtgtgtgtgtagattggtcagtaataagtgaaccagctgggaaggagctgtagatctgagtgttaatggtgtggtggtcgagggtgcatgtgctgcctgggtcaagtcctggctctaatactttgtgaccttgaacaagtttygtaacctcactaagcctccgtttcctcacctacaaaatgactgcccagtgattgaaactaccatagagaatgaagacaattaaaagagataatttgtgtaaatatttggtatagtgcttggttcctggtcagcattcagcttatattatataaatggctaataattaaactaaggggagtatgtatttaatccagggggtagtggtataaatgagcagaaggatcc

SEQ ID NO: 78185 - DNA, 606 bp, Homo sapiens
agtgggtgtcatgccaccttcagtcttgacctgctcttctcttggtcacggtgattagaaagtggctcacaggaagtttggcaagggtggggacacttggaagttaggtggagggtgaatgaatggactcttggtttggctttaatcattttaggaccagatagggtagctctctctctctctctctctctctctctctctctgtgtgtgtgtgtgtgtgtgtgtgtgtgtgtgtgtgtgtgtgtgtagattggtcagtaataagtgaaccagctgggaaggagctgtagatctgagtgttaatggtgtggtggtcgagggtgcatgtgctgcctgggtcaagtcctggctctaatactttgtgaccttgaacaagtttcgtaacctcactaagcctccrtttcctcacctacaaaatgactgcccagtgattgaaactaccatagagaatgaagacaattaaaagagataatttgtgtaaatatttggtatagtgcttggttcctggtcagcattcagcttatattatataaatggctaataattaaactaaggggagtatgtatttaatccagggggtagtggtataaatgagcagaaggatcc

SEQ ID NO: 78186 - DNA, 714 bp, Homo sapiens
gggatccacacaggccacaggctatgacctcaacggtgcctatgatgatacaataccacctatggagaaagctctagggaaaatggacattcagatagctcttccttctggatgttacagaagagtagctccatggtttggattagctgcaaaacactttattgatagatgaagattactgaggaaatgttggtgctgtactgtttaattttggcaaaaaaaagtttaaagtcagaaaaagtgatcgtattgcacagctcatttgtgaatgaatttttaatccagaaatagaagttcaagctttggatgatgctgaaaggcattcagaagagttaggttctattagaaagtattaaaatttatgctaagaatagaaaatgagaactcatacctttttcttaaaagagtttttgcttaaagcattttggtaaaacttctgtaatcttaatagctttaccttctaaaagtactgcattttcttatgatcaaagaaaagagtacctctgttcagatcacacagaaattttttctgctgayagttgtatgtaaatctgctttgtcctgatataagacagtgtctttttaaaatcaaatgtacatcaattacagaccccaaaaaaccctatataatttaacttagtaaatgatacaccaaaaaaaagggaattgttaagacagtaatttttttaaattactgtcttaagacaagaaaaa

SEQ ID NO: 78187 - DNA, 2557 bp, Homo sapiens
tacacttagtgagcaacatggatggaatgcaggctagcagcagcacagttcccctttagaagaggggaggagggaaacagcatccactggtcacacgacatctgcagactcctgctccagtgggagtcagggtggggtgaggttctgtggtcagttctccagctccgctctgagcttggggttggcggtttcttctttctgatcctccatggccaagcctggcatgggatggggcatgaaagggaccagatgcttggattcctgttctaggggttatgttgccttttgtttatttccacattcccagcctcttacccagtgtatgtacatagtaggttttcactcagtatttgctgagttaataccagtgttgttaagtacactgcctatgaatacacagggcagacattgaatcaggctatggagcatgggagggcatcaaagacgattttgtgaattcatgacttgggtggaactgctcatctcggcaacagggaatgcaggagaagcagcagctttgggataagtggggaatttgttttgagatgccaagttaggggcacccgtgggacattcaaagacctgaagtctcaagatcaaagaatggggctaaaggcaaaaggaggagttcaagagctggaaggaaatgattatgatctgggcatgggaactggggttacatatcggaagtagaacggctctgggtggtgaccggggcgaggccagagagagctgaggagagaggaagtgaaagcccttcagaggtcatggaattgtggccaggagccacaacctacccttcctcaggatccccttcacttcactggctcagggccaactgacatttcagctccaaccccaaggaacagcagggtcatcctgaaaggagagctaaggcctctgggcctgttgtttccatgacacctgtctcacaggtgaagagtcaaaccccaaaccctgataccacctggagcggggttggaccacccagagagtatggcttgtggaagggaacagcagactttacttttcccaatagcatctttgaggatgtgtaactcaatttcgaggccttgggaggaacctctctagagagcctgggcctgagcagacattcttccccaacagtctccatggccctgaggaagccttgaatgaagtggggaaggcagcaggctggggcagggggaactatctcagaaaccttacttctgcttcctggcacataggaggcgcttggtggagctttgttgaatgaatgcatgcatgaatggatgagtgaatgcaagcattcataaacaaatgaatgcatgtttaggtgattcagaagggtgccccagtgcctggtagatgggtgactgtcagtcaatgttcactgggcaatgaatgagtgtgggatgaggactcagaggtttcctgagcccacagagtggccgtaagtcctaaataaacaaacatggctatttcccacagctgacctggaggataacgaagtgcatactctccctttgggagcttcagcaaatcatccctctgcagtttttctttaattttagctcctttgccatcaactggaggctccgttccatttccctgacctagagctaagagggcatccatcgctctcccaggtgggaaggacaaaaagaatcactctccctttcagagttggatggcttggatccttctggcgatccagggcccaagccagaacattccttttgtccctctctccctccttccttccttccatcttcygtctttcctgaaatggattttgagttcactgggggctccgccacatctgttcagtctctggcatggcaccacctcagtgttccacacagcagccacagcagtgttaccatcatgagcatctgtgtctagcatggggtgggcccagtggacacgaggacatctccctcactgttctgccctcagggaacctccaactggctcctaggacaggaggcaaccctagaaggtagtatcgctacagagtggcagcagttcaggagatcagagctccccggaccctgggcatgcctgtccagtgaggtcgggggctaggctctcaggggaacatagaggccctgagctgctggtgacagtcccagtgtcattccacacagcgatccactccccacaggtctagctgccttgctgggaccatccctctaggactaggcctgtgatagcatcctcatgcaagagttttgtgagtgggcaattctcaccctcctttctgcttcctctggggccccagcttcagcccagggctgatggttgggcggaaagttggagttgggatgtacccacagttgatgatatttcatggcactctggagaacatccagccagcagtttggttcaagtaatgagatgtcagggtgcttgcatccatctgttaatttcagatgtgtccttccccagtgtctgttgctggagactctgggagcacagggtagggtgtggccatgaaggaacgggatgggcaatggcatctgccatccatcactgcccagcacttagtgcctggggaccagtggatcttaca

SEQ ID NO: 78188 - DNA, 1277 bp, Homo sapiens
  misc_feature (1)...(1277): n = A,T,C or G
tatcaaatggcattttatgtcaaatacatttatgttacatacattgataaacataaagcttaagggctttatgtttaattatttcatatacataccrtacgtgttctaataaaacacatgtttaattattccacatacagaccatatgctgtattatataacacatatggtatgcatgtgaaataattaaacataaaccgcttcagctgttgtatccaagaaaaacaaaactgatgtatgagatgcatttcctatgttagtatatctgcccaatgatgaatcaaattttcagtttgaattcatattgccagaaacagccagtcaaaatattgggtggaaacaatagcattattagacttgcaaggatttaaaaatatactattcatttattcttcttgaaaagaaatgttaatatatgtcaatatcagtgatactgaaagtaggaaatatatgatttaaacaaaatagtttaagaactaaatcacactaaaaactacaatgtaagtcataacattttccataatagcttatagaactgaatgcaagtatcaagaataatcttaaaagaaaaagtaaatagcgtgaacattaataataaactggatcttaaaactcagattatttaaataaaaactaagaaattgagaaggaatgaaaacacgaaagattgctaaatttcccattcatcatagggagaatcgattttggtttttagctttaatgttgaaatcgagacaaaggcattttttaaacataaaaagcaaagtcgaccgagcacaatggctcagacctgtaatcccagcactttgggaggccaaggtgggaggattacttgaggtcaggagttcaagatcagactgggcaatataatgagacgcccatctctacaaaaaggaaaaaattaattatccagggatggtggtgcatgcctgtagttcctgctactcagggaggctgaggtgggaggttcctttgagcctgggaagttgaggctgcagtgagccatggttgcaccactgcactccaggctgggtgacagagcaagactgtctcaagaaaaaaagcaaaacaccaaagtctagacaaataataacatgatatttttctaattatatctagcttctgtttttacttccagcatcttgctatctttagaaatattttctgttctttttcnnnnnnnnnnnnnnnnnnnnnnnnnnnnnnnnnnnnnnnnnnnnnnnnnnnnnnnnnnnnnnnnnnnnnnnnnnnnnnnnnnnnnnnnnnnnnnnnnnnnt

SEQ ID NO: 78189 - DNA, 1277 bp, Homo sapiens
  misc_feature (1)...(1277): n = A,T,C or G
tatcaaatggcattttatgtcaaatacatttatgttacatacattgataaacataaagcttaagggctttatgtttaattatttcatatacataccgtacgtgttctaataaaacacatgtttaattattccacatacagaccatatgctgtattatataacacatatggtatgcatgtgaaataattaaacataaaccgcttcagctgttgtatccaagaaaaacaaaactgatgtatgrgatgcatttcctatgttagtatatctgcccaatgatgaatcaaattttcagtttgaattcatattgccagaaacagccagtcaaaatattgggtggaaacaatagcattattagacttgcaaggatttaaaaatatactattcatttattcttcttgaaaagaaatgttaatatatgtcaatatcagtgatactgaaagtaggaaatatatgatttaaacaaaatagtttaagaactaaatcacactaaaaactacaatgtaagtcataacattttccataatagcttatagaactgaatgcaagtatcaagaataatcttaaaagaaaaagtaaatagcgtgaacattaataataaactggatcttaaaactcagattatttaaataaaaactaagaaattgagaaggaatgaaaacacgaaagattgctaaatttcccattcatcatagggagaatcgattttggtttttagctttaatgttgaaatcgagacaaaggcattttttaaacataaaaagcaaagtcgaccgagcacaatggctcagacctgtaatcccagcactttgggaggccaaggtgggaggattacttgaggtcaggagttcaagatcagactgggcaatataatgagacgcccatctctacaaaaaggaaaaaattaattatccagggatggtggtgcatgcctgtagttcctgctactcagggaggctgaggtgggaggttcctttgagcctgggaagttgaggctgcagtgagccatggttgcaccactgcactccaggctgggtgacagagcaagactgtctcaagaaaaaaagcaaaacaccaaagtctagacaaataataacatgatatttttctaattatatctagcttctgtttttacttccagcatcttgctatctttagaaatattttctgttctttttcnnnnnnnnnnnnnnnnnnnnnnnnnnnnnnnnnnnnnnnnnnnnnnnnnnnnnnnnnnnnnnnnnnnnnnnnnnnnnnnnnnnnnnnnnnnnnnnnnnnnt

SEQ ID NO: 78190 - DNA, 748 bp, Homo sapiens
atgtattagcaatttatcataaaggtagcaatgctctagtagtcttagggtatgggtgaacttttaaataaattatcctaggggtaaatggatactgataagcaggaaattttgaaaatcaatgtgaatccatcaccatacctgaaaatttcaggtgaattttttatctaaatgaaaaataaatcataaagagagtatctatgtgaagtcagcatgttccttctcaaaaggaacataaaaattactaagcagaattgagaggattgytagatttgacacattaaaattaagactttctgttagaagaaaaagttaaaggacaagcttcatataactgaaaaatgatgtatgtccacaataaacaaaaacaattgcaaatcaaggaaaagatagacaaaccagtggaatagtgggcaaaagatccagacagtaaacaaaagtgagtatgccaacagcatgtatgtgaataaatattcaattttgtgtgtcaccaaataaatgtatattaaaagttcaatgagataccatcacagagagatacctacacccagacttgctaaatatgaaaagaatgacaactccaaaggtttacaaggatctgggacaaatggaattccctacagggttggtgaaattatataaattggtactaatattttgcaaaattgtttgtcagtatctgcaaatgctgaacaaatgtgtaacaatttataatctagcagttctattcctaggtatagacccaaca

SEQ ID NO: 78191 - DNA, 748 bp, Homo sapiens
atgtattagcaatttatcataaaggtagcaatgctctagtagtcttagggtatgggtgaacttttaaataaattatcctaggggtaaatggatactgataagcaggaaattttgaaaatcaatgtgaatccatcaccatacctgaaaatttcaggtgaattttttatctaaatgaaaaataaatcataaagagagtatctatgtgaagtcagcatgttccttctcaaaaggaacataaaaattactaagcagaattgagaggattgttagatttgacacattaaaattaagactttctgttagaagaamaagttaaaggacaagcttcatataactgaaaaatgatgtatgtccacaataaacaaaaacaattgcaaatcaaggaaaagatagacaaaccagtggaatagtgggcaaaagatccagacagtaaacaaaagtgagtatgccaacagcatgtatgtgaataaatattcaattttgtgtgtcaccaaataaatgtatattaaaagttcaatgagataccatcacagagagatacctacacccagacttgctaaatatgaaaagaatgacaactccaaaggtttacaaggatctgggacaaatggaattccctacagggttggtgaaattatataaattggtactaatattttgcaaaattgtttgtcagtatctgcaaatgctgaacaaatgtgtaacaatttataatctagcagttctattcctaggtatagacccaaca

SEQ ID NO: 78192 - DNA, 1146 bp, Homo sapiens
ttgttaacgaccctctctggatgtaagaggttacctacttcccttctcacggactgagtgattcagtttatcatttcccttgactttcaatcacagcaagattgggtgttgtttccccaacacataaaagtgaacagtacagacggatctccttcatttgttatgaaacacatagatgtctttacaggattaaatgagaggtaaacattttggttgttggccttgtagttctttcattgggacatagagaatgagggccatcccttagcatttaccagaatgaaagaggccctaggcatattattgaagctaaacaagcatgcttatatttgtggtttgttctttcagagagggagacaccttttggtagagaatcagggatatgtgttcaggctgcatcttcctagaatctactatattcacactactttttcaaagcatgtttttggtctttttgctacacacttcatataataaagtactggaagtagcttattagactatccatcacattgtttacattttgaaatggaaaatacgttcaattttattaaaaaatgcttatgctgtgaaaatttcatccactaagaaactattcattagttttctcttcagcataaaatgtaaagctaaattaaaaacactttaaagcaaaattaggttttataacattatatagcaaatttaaatgttgctaaatgataactgaggatgatagcagttttcaagatagtaagtatatcattcagagttcaatcatagaaacagaatcaccaggaatgatagacagtataaaatttatacaaaatatttgaacttataccatgtcactaacatctacaattacgtgtgtattttattgcttccgcttttgatgctgggcctgaagagcagggagtgtggcaggaaggaaagatgaatgtgaagcagtggacagtagggataaattggaacccatgaataccaactgtaatctgcactagtctctgaaactctccagctttgaagaggaagttgacatgctggagaaagtggtgtgggtagttgcagaaaattgaaagaaaagattgtgtaagagctgaagaagctgtgtatttggctgcattatcagrccaacaagatgagccagcaaacctcacaatatgc

SEQ ID NO: 78193 - DNA, 1282 bp, Homo sapiens
tgcataaatcataaaatatatattaagtagtgataaagtaaacaggcacaatattacaccggtcaagtaataagattttgctagcaccatgaaagtttcctctatgtaccttccgaagttatatccctctatttcccctaaagaaaacaattatcttgaatttcatagtaattgctttcttactttcttaaaaaaaaattactgcctctgtgcattcctaagtagtgtaatacacttgtttatgttttctaacttctcatagaaactaaattatatgttatgaatctgcaatcctttttatttctagagacgggtcttggtatatgtcctggaggctggcgagcagtggcgtaatcatagctcactgcagccctgaactgttgggctcaagtggttctctaacctcagtcttccgagtgacatcattttgtgcaacattttatttttgagattcttccatgccgatgtttgtattacttatttattacaaaaaagtgtgctatgtttaattataccacaatatttttacaaatttaactgttaatgggcaattttttttccattttggcttttataaatctggtagtaaaaaagtagcctttcttatatctcttagttgtacatgtgtatacattactattatctatatatctgattttttgtatatgtgtatatgactgatcatagtttaagctaattgttgtaggtagttgacggttgttgataaatggatctccttctgtaggaacataacagaaaatttgcagcacacattggttagaataagctaggttttgctgtggctaaaacaactctaaaatttcagtgactttaaatgcacagattagttttcaactcaagccttgtacctcgtgagtcagctargactgtgctcctcaccaccactgtccttcttccgggatccaggctgctggtggtattgctattggagataacgttagctgcctcagaagtgaaaataaaaagcacaggctctcatgcctatgtacagaaatggcatatatcccttcttaacttaatttgtccgagacaagtaaaatggacgctcctgctttcactgggtttgttgtatagtgttgccagagggaagggaacatgattatagtgacttgtggtttaacctgtaagcttcatctggtaatgacaggcaatgtaattgtgtcgaacatattttataaactctatgtttttttaaaaaatcattagttatactctagcatagttattttgtctattttgtttagttttatctttattactt

SEQ ID NO: 78194 - DNA, 1282 bp, Homo sapiens
tgcataaatcataaaatatatattaagtagtgataaagtaaacaggcacaatattacaccggtcaagtaataagattttgctagcaccatgaaagtttcctctatgtaccttccgaagttatatccctctatttcccctaaagaaaacaattatcttgaatttcatagtaattgctttcttactttcttaaaaaaaaattactgcctctgtgcattcctaagtagtgtaatacacttgtttatgttttctaacttctcatagaaactaaattatatgttatgaatctgcaatcctttttatttctagagacgggtcttggtatatgtcctggaggctggcgagcagtggcgtaatcatagctcactgcagccctgaactgttgggctcaagtggttctctaacctcagtcttccgagtgacatcattttgtgcaacattttatttttgagattcttccatgccgatgtttgtattacttatttattacaaaaaagtgtgctatgtttaattataccacaatatttttacaaatttaactgttaatgggcaattttttttccattttggcttttataaatctggtagtaaaaaagtagcctttcttatatctcttagttgtacatgtgtatacattactattatctatatatctgattttttgtatatgtgtatatgactgatcatagtttaagctaattgttgtaggtagttgacggttgttgataaatggatctccttctgtaggaacataacagaaaatttgcagcacacattggttagaataagctaggttttgctgtggctaaaacaactctaaaatttcagtgactttaaatgcacagattagttttcaactcaagccttgtacctcgtgagtcagctaggactgtgctcctcaccaccactgtccttcttccgggatccaggctgctggtggtattgctattggagataacgttagctgcctcagaagtgaaaataaaaagcacaggctctcatgcctatgtacagaaatggcatatatcccttcttaacttaatttgtccgagacaagtaaaatggacgctcctgctttcactgggtttgttgtatagtgttgccagagggaagggaacatgattatagtgacttgtggtttaacctgtaagcttcatctggtaatgacaggcaatgtaattgtgtcgaacatattttataaactctatgtttttttaaaaaatcattagttatactcyagcatagttattttgtctattttgtttagttttatctttattactt

SEQ ID NO: 78195 - DNA, 1445 bp, Homo sapiens
aaaccattagtcaatatggaggtattaaaccagtgatgtacaaggtttctgatattctatagttttcaattcctgctcctagttaaacaatggacatttattgagcacctactatgtggctggagatgtataaaactctgaggacatagctaaacaattcacaatctccagacttaatgaattcaacttattgcccagcatatgccaatattaactggtgagtcttgaatgtaattaaaatctcacaatttatttgatgctttctctattaaacaggcttggcagggtggcttcttgatgttgaagtgctgaaaatgctgatttttaatggttttcaattgaagatgtggtgatgacaacatcccaaacataactttgttcttccaagaggtaagaaaagcgacattcgtctgtctaattttacattttaccaactaagtcaagcaatcagaaatgggctttacttgtgtggaacaaaaagtatctcagaagaaggaggagaaggaggacagcagcagcagcagcaggaggaggaggagaaggaggaggaactatcctttattattttttaaggatccaccttggttccaggcatcatgctggccacttgacatgttatctttaattcctaaaacatcctgcaaggtatgaattattattccagttttgcagatgaggaaaaccagtattggaaaggatacttgccttgttcttgccacacagctgtaagtggtaggagcagagaactcacaccaaggtctggcttcgaaagctttgtctttcatcaggcagggctgccctaactcttgatcgatcagcatgtgatcaaggacattttacataatctaaactcctttttatttcattcatttctcataagtctcaagactatttattaaattcctaaccttctttgttmgaaagactgtagctagaccgaagaatcagaaaaaaatttagattatatcaaagatgtatctaattttcactacattctgagtagctaaaagtgtagatgttgaattaatattttataatatattaccaagtatataatgcataataaaacacatacatattccaagcagagaatagatgggtacctttccttatattttagctcaccatattcagctcacatatttttaaataatttatctccaacttctaaaaatatggcctttattccttgatcttaatcctgtttttcattcataggaaagtgctatttttatgggccagtgaagcttatataccattgagtgacatttagatactacagttatttctgtgtgaggagaattaatctcttcaagaaggaaactcagagtccttccctctgttgccaggcccatcgcagaatatctccagttatgttttctgttgagagagcacagccttcaatagtgttttaaaatttaaatgtgaaaaagttttaagagcca

SEQ ID NO: 78196 - DNA, 1445 bp, Homo sapiens
aaaccattagtcaatatggaggtattaaaccagtgatgtacaaggtttctgatattctatagttttcaattcctgctcctagttaaacaatggacatttattgagcacctactatgtggctggagatgtataaaactctgaggacatagctaaacaattcacaatctccagacttaatgaattcaacttattgcccagcatatgccaatattaactggtgagtcttgaatgtaattaaaatctcacaatttatttgatgctttctctattaaacaggcttggcagggtggcttcttgatgttgaagtgctgaaaatgctgatttttaatggttttcaattgaagatgtggtgatgacaacatcccaaacataactttgttcttccaagaggtaagaaaagcgacattcgtctgtctaattttacattttaccaactaagtcaagcaatcagaaatgggctttacttgtgtggaacaaaaagtatctcagaagaaggaggagaaggaggacagcagcagcagcagcaggaggaggaggagaaggaggaggaactatcctttattattttttaaggatccaccttggttccaggcatcatgctggccacttgacatgttatctttaattcctaaaacatcctgcaaggtatgaattattattccagttttgcagatgaggaaaaccagtattggaaaggatacttgccttgttcttgccacacagctgtaagtggtaggagcagagaactcacaccaaggtctggcttcgaaagctttgtctttcatcaggcagggctgccctaactcttgatcgatcagcatgtgatcaaggacattttacataatctaaactcctttttatttcattcatttctcataagtctcaagactatttattaaattcctaaccttctttgttagaaagaytgtagctagaccgaagaatcagaaaaaaatttagattatatcaaagatgtatctaattttcactacattctgagtagctaaaagtgtagatgttgaattaatattttataatatattaccaagtatataatgcataataaaacacatacatattccaagcagagaatagatgggtacctttccttatattttagctcaccatattcagctcacatatttttaaataatttatctccaacttctaaaaatatggcctttattccttgatcttaatcctgtttttcattcataggaaagtgctatttttatgggccagtgaagcttatataccattgagtgacatttagatactacagttatttctgtgtgaggagaattaatctcttcaagaaggaaactcagagtccttccctctgttgccaggcccatcgcagaatatctccagttatgttttctgttgagagagcacagccttcaatagtgttttaaaatttaaatgtgaaaaagttttaagagcca

SEQ ID NO: 78197 - DNA, 1218 bp, Homo sapiens
gcataggagagggggctcagctggatggctgactgattggctgactgcttcattcattaattcctgagtgcattcattcattccttccactcaagccctccagaaagggtggtctggactgaactagtttacacgggatgattacaacagaagtcagaggactctcagcttggttaccgaggaaaataagaccacaaaaccaaactgactgaaataggcaggagaatcttctcgatcccattttccaaatgggggaaaatgggaaaagggctccaaggttaaatatttttggaaaacaagttaaacaaataaaaacgggtcacactggyaggacctctcagtgctgcaactatgctaatgagctgctaatattcaaatgagaacaataaacaccaagaggctccaagttgcctgtggcgattcttaagtttatttgactccagaagcctttctcaacaggattatgtggggctgatgttataagaaacacactatgcgatgtcctactctggcccaagagctgtctggaaaagctgttccaaaaacctgggagagagtggaagtgaggctgagaggactcccaggaagacggcagctccaggctgggttttgaaaaatcctgggaagttcagggccaagtggaggagggaaaggaaagagttttccagtagggaatgggatcctgagagaaagacggtgaaggcccaaggcagtggagtcctcaggagtgggcttgcctcgggcgggaagaagggccttgggccatgggaaaaacaatctcaaagatgacagcacagatgggcacaacctctttggaaaacagtttggcatcatcttgtaaagctcaacattcacacatcctgcaacccaaagttccacgcctaggcaggtacctccatgaacacctttccctgctgtgcacagcgagatgcacatccatggccaggagacaaaatagataaactgtatattctaaagatggactattatgcaactgtgagcatgtgagaactacagcaagatccaggaacagtttgaaacttagaaacacaatgcagagagagaatagctcaacatagagggccacatgcagtataacaccatttttataatgctaaaaataggcaaaataaaacatttcatttaggcattattacctgggaaaaccagttttttgtttgttggttttttgtttttttgagacagggtctccaggct

SEQ ID NO: 78198 - DNA, 681 bp, Homo sapiens
tgaattgtctttttttcatttctgtcagtttttgcttcatgtattttggcactatattgataagtttatatatctttatgattgctatgcattcctagttaattgactattttatagttataatttttcctccttatctctagtaacattttttcttactttgaaattgatttttttctgatattgtatagctattccaactttcttacggttgctgtttgtgtaaattctccattctgttagttggatctaattgtgtatttgaaactaaagtgtgcatcatgtaaacagcatatatttgtcttttaaaaattactatgtcatataataatattcatataatgttatgctgccttttgactgtatctttaattcatatccatatttatatttaatgttattattgagagttgaatttatgtctgacattttgctttttgtttcctatgaacatcctgccttgttttgttcatttattttccttacttttccactaagtgaatattttataataaatgttttaatgtaattttttttactatatatttgtattatttccttagtgaytgctctaagagttaacatgtcagaatatatcatagaacttatcataatctacttcagatgcttactaatttaatgtagtcttatacagcactattctctctctccctttgtgga

SEQ ID NO: 78199 - DNA, 1130 bp, Homo sapiens
ctcctgtctcagcatccaaagcatctgaaactatgtgctggagatccttaaataacaggctaaggaatttctaggcaattaagctaggcacatgataccatgcccagctaacgtttttgtttttttgtagagacagagtcttgctttgttgccaaggctggagtgcagtggtgcaatcatagctcactgcagccttgaatcctgggctcaagcaatcctcctccctaattctcctcccacctcagcctccctaatagttatgattacatgtgtgtgccactgcacatagaaagctggattaaaaggccaagcaaaaaaatattctgtaaagttatgtttgcctcttggttcaagccacttatcagaaataaattctctggtcacagaacgcagatttygagcccagaatatatctcatatttccagtacactccccagtgtaaaagaaagaatcaataattacaaggctaaaagtgatgggtgatcataagtccatgtcatggatcttttcctttttctatttctatttctttttttttttaggcagtgtctcaaaatttctcaatttgaggaaatagccctgccactgtcatttctaattaaattaattagactattagactgtcttagagtatttttcagtgcctcagctggcattctttgtagttctctgtgcaacttcaatgcaggttacttctttctagctgagattttttttaaggagtttaatattctggcatggacatggaaaaataaaatacacaacaaatcttccatttttaattacagaaaatattcaaaagtgttcattattgcaaatgtgctcagaggatgttcagaatttttcaaaatggagaaatgaagaaaacgagaagaaaattttgtttaatatataacttgagaatgcagaatgattattaaaaatgtattaactgttgagacaaagtttgcaaaaagctcctgggaattagagagccttattattcctatattaaatgctgaggttgaaagaacatgattcataactagatggggatgaccagatgaatttcagattccataagcacagttaaaaattttccctaaattcccttttgtactatagaattgcaagctatagattttgtatg

SEQ ID NO: 78200 - DNA, 663 bp, Homo sapiens
gcataatattctaccacacaatgcaccatcacttctttaaccatttcccaattgttcatttataacatttgcaattttttattataaataatattgtgatgaatactttcatccataagttttatgcaaggctgattatttcttctaatgtcttctaatgtcaaagaagtggcttackggttcaaacagcgcacatacatggttttaaggcttttagtatactttaccaaataatctccagaatagctcaaacaactcctaccaacagttatgttattgtgcccacagggtggacttcataacaacacagcaaattcaaccacagatctattagattctcacccatctcaaaactatcacatcaaagaagcaaggagacatattactggtgaggaagccaaattcaaattcttttaaaaaatcactcagctttagatcagtaaaattatcaacaaaaatgctccccacaaaaagtctaccgggtttttcaaaaaataaagttaaaaagagagaaagagaaactcaggctgggtgcggtggctcacatctgtaataccagcactttgggaggctgaggtgggccaatcacgaggtcaggagttcgagaccagcctggccaacatagtgaaaccccatctctactaaaaatacaaaaattagctg

SEQ ID NO: 78201 - DNA, 663 bp, Homo sapiens
gcataatattctaccacacaatgcaccatcacttctttaaccatttcccaattgttcatttataacatttgcaattttttattataaataatattgtgatgaatactttcatccataagttttatgcaaggctgattatttcttctaatgtcttctaatgtcaaagaagtggcttacgggttcaaacagcgcacatacatggttttaaggcttttagtatactttaccaaataatctccagaatagctcaaacaactcctaccaacagttatgttattgtgcccacagggtggacttcataacaacacagcaaattcaaccacagatctattagattcycacccatctcaaaactatcacatcaaagaagcaaggagacatattactggtgaggaagccaaattcaaattcttttaaaaaatcactcagctttagatcagtaaaattatcaacaaaaatgctccccacaaaaagtctaccgggtttttcaaaaaataaagttaaaaagagagaaagagaaactcaggctgggtgcggtggctcacatctgtaataccagcactttgggaggctgaggtgggccaatcacgaggtcaggagttcgagaccagcctggccaacatagtgaaaccccatctctactaaaaatacaaaaattagctg

SEQ ID NO: 78202 - DNA, 1480 bp, Homo sapiens
ctgtgatattttgttatggcagctcaagccaatgaatacaccactttatcacaaaccagaatgcaagaagtattttttttttttttgaaacggagtcttgctctgtcacccaggccagagtacagtggtgcgacctcggctcactgaaagctccgcctcccgggttcacgccattctcctgcctcagcctcccgagtagctgggactacaggcgcctgccaccatgcctggctaattttttgtatttttagtagagacggggtttcaccgtgttagccaggatggtctcgatctcctgaccttgtgatccgcccgccttggcctcccaaagtgctgggattacaggcgtgagccaccgcgtccggccagaagtattttttaacactgcgcccggccagaagtattttttaaagtgatgtgtgtctgtgtctagaaatactttttaatagaactaatttatagctccaccaatttaataacatttatgttcagtgtttgtttttaaaaattataaactttagaaaattataaatttgtttctgagtccctatttctctcaagagtcctgcttgaatgacaaaattatgtagtggcctcattcagcatccccctcactttgtcattccaaacttccaattttcttgtccttgtttcttctttttaaatgactagtttgttatttataggatccattggaaaccttttctttgatgatcctcttttccatattggtattaatcgttsatcaaaattataaaatgttacttcagtattcaataatattaacaaagtgtttaatccatccttgaaaatgaagtcaatatttttttgttttgttttgttttttgagaagtagtcttgctctgtcgcccaggctggagtgcagtggtgtgatctcggctcatagcaagctccgcctcccgggttcacgccattctcctgcctcagcctgggcgccaccgcgcccagctaattttttgtatttttagtagagacggggtttcaccatgttagccaggatggtctccatctcctgacctcgtgatctgcccgcctcggcctcccaaagtgctgggattacaggcttgagcctccgcgtctggctatttcatttttttaaatgactgtatacagccattgaactagctccaccattgtgaggcaaacgggagggtctctgtgcttaactattagtctatgtcttctggaataaatgagacctggccagggttctctggtaattggcaatttacataaagatgaaagaaaagtgacattaaaacctgtacaagtggtttgtgtcaacttggtgggggggggggggttatttaaacgttgtcctctcccatgattatggaggaaggtataaacaaatggaatttcagtttgaccctttagtatgattctttgtgtatacacagactttgaagagagaaatcaaagtggccatagagaacatttgcctcatgcaattaacatt

SEQ ID NO: 78203 - DNA, 1452 bp, Homo sapiens
aaggagtaatgtgaatagcattaccatatttcccttatgtcttctttatgctggttttcagaatataatgatacactagagaaatattttaaaatcccctatgtacatgctctggattttattttccatcccttccttcccaatggactctagttaatttggttttatcattgctctggattgccttatcattgcaatgcatatgtgtgtatctatatctataagtagatatagattgatgatagataaataatagatgatagatagataamcagataggtagagatacatgaaccggtagatgatagatcataaaatagatgatagattagatagatgatagatcaacaaatgatagatgatagaatagatgatagattgcatagatagataatagataggtagatagatagataaatagaattgatagacaggtagatggatagatagatataaagatataggttcatttgtaaaacttaagtaaacgtatcatgctgaaggtcattcttcatttatagttaaatttgagatggaatgaattgatacctgtaactatagtttattcatcttgttgattattccaatgtgggcagtttctaacttttcgttattccaagcaagttactgttagcattcttgtccttgacactgcacccatagcttgagcttctctcaagtggaaagctggctggtaggctgagcacatcttcaattctcctgatgtttcaagatagcgtcccaaagtggttctataaatgcacactatctccaacagagcaagggatcccttttgacttcatgtcttccttggtgcttgatactgtcagactttactttttgccatcttagtggagtctcattgctgttttaatttgaatttccctaaccagcagtaaaagaggtcttttcacatgtaattggtcattcaggttttttccttcatttaaatgctcttcttttcctttaatatgtcctacagaggtttttttctctttacttattgatttgttgaagtatgtgtgtgtgtattcataaatagagctatatataatagctatatctctatatatttccatacatacatatatatttacatttttatattcttgatattaattataatccctttgaataaaatatgttccaaatagttttcacaccggtttttctcttttttcagggtatctttaattttcagatatgttgatcatttgtattcaaattaatcgatgttgttttaaaagaatttgttcttcttgtgtcttatatgccaaatctattctatttcaaggaaattaatatttctacctatggttgctttcaaatccttcaagctttggtttttgcatttaggcctttaatctctctagattttaatctatttaatttttcatagggcatgagatagggatctatctttttacccgttatggataaccatttcacaag

SEQ ID NO: 78204 - DNA, 703 bp, Homo sapiens
ttacacatatgtgtttctgtatatgtgtgtacatatttacacatatgtttttgtttatatatttacacatatttttctgtatgtatatatattattttagagagcatgttataatatccactaatactattatcattcttttttaaaaatatatttataatctaactctaaatatgaatatttaaaaacatatttttatgtaatgagatccattgctcaaaatggttttctagtctcaccatcttcctttatctctactcagactttttctgttttgtttttctcgtggcccaggctggaatgcagactgcaatcatagctcaygacagcctcaaactcctgggcttatccttcagcctactgagtagctaggactcggggtgtgtgccaccatcatgctaatttttgaaacaattatttttggtagagatggggtctcaatcttgctgtgttgcccaggctggccttgaactcctggcttcaagtgatcctcctgccttggcctcccaaagtgctgggatttcagatgtgagccactgcactggccagaggttttgtttgtttatattgagtacttttgtgcatattagtctcagtaaggaaagtaaatcttctgagatgctgcatatattaaaaaaaattcttttcttttttctgtttcctttttccttccagtaaaatagttagtgtatataggatgctt

SEQ ID NO: 78205 - DNA, 1208 bp, Homo sapiens
gctgcaacaaaatgcagtgagacaaccctaaagaaaatacctaaaagcctcaacccaaagaccaataggcgacatccgggaagattgtgatcccatagtactcagcctatgaggaactgagggagggacttgcatactaggggataaatggcttgttgtaacagtactgggtgtgtctgcctaccmgacatccaatcttgcaagaccatcattaaaagtctcgcttctgctattctccatgtctctgagttcattccttgggtttggacaggtgagtgcatttttcacaaccatggtcagaaatttttttctaaaaagtccatgtttcggccgggcgtggtggctcacacctgtaatcacaacactttgggaggctgaggtagacagatcacgaggtcaaaagatcgagaccatcctggccaacgtggtgaaaccccatctttactcaaaatacaaaaattagctgggcatggtggcaggcgcctgtaatcccagctacttgggatgctgaggcaggagaactgcttgaacccaggaggcagaggttgcagtgagccgagattgcgccattgcactccagcctaggcaacaaagtgagactccatctcaaaaaaaaaaaacagtccatgtttcatctcagtgccaagaactaggtgtttaggtgcctaggatgcaaaataaacaagcccagtgaatttggccacatgaaaaaagtgtcttaatccatttttgtatgactgcctaaaacatggttatattttataaaatgtaaaaattaaatatggatggtctcgaaagagcatagcttacatctaaatttgtttaaataaacttttaagtgatttacaatgtattttgctatcaaaacactaaaagatttgattaaaattttatctactttgctatctgccgttttgtgcaattactatcccctcctctcttttaattattccttaaaggaaaactgcaaagataatacatggataaagctgaaggattttataaccaggcagttttctcagttttacaacgcttgcactttgacaaaattttgagtcagaaaatcaaaagtttagttttgagagaaaaatgctaaattgaacacttggtgctgattatctctgatcactacttgggaggatatatagaaaaacacattcttttggtaaatggatggtttctgaattgttgaccccatcacagattcc

SEQ ID NO: 78206 - DNA, 1208 bp, Homo sapiens
gctgcaacaaaatgcagtgagacaaccctaaagaaaatacctaaaagcctcaacccaaagaccaataggcgacatccgggaagattgtgatcccatagtactcagcctatgaggaactgagggagggacttgcatactaggggataaatggcttgttgtaacagtactgggtgtgtctgcctacccgacatccaatcttgcaagaccatcattaaaagtctcgcttctgctattctccatgtctctgagttcattccttgggtttggacaggtgagtgcatttttcacaaccatggtcagaaatttttttctaaaaagtccatgtttcggccgggcgtggtggctcacacctgtaatcacaacactttgggaggctgaggtagacagatcacgaggtcaaaagatcgagaccatcctggccaacgtggtgaaaccccatctttactcaaaatacaaaaattagctgggcatggtggcaggcgcctgtaatcccagctacttgggatgctgaggcaggagaactgcttgaacccrggaggcagaggttgcagtgagccgagattgcgccattgcactccagcctaggcaacaaagtgagactccatctcaaaaaaaaaaaacagtccatgtttcatctcagtgccaagaactaggtgtttaggtgcctaggatgcaaaataaacaagcccagtgaatttggccacatgaaaaaagtgtcttaatccatttttgtatgactgcctaaaacatggttatattttataaaatgtaaaaattaaatatggatggtctcgaaagagcatagcttacatctaaatttgtttaaataaacttttaagtgatttacaatgtattttgctatcaaaacactaaaagatttgattaaaattttatctactttgctatctgccgttttgtgcaattactatcccctcctctcttttaattattccttaaaggaaaactgcaaagataatacatggataaagctgaaggattttataaccaggcagttttctcagttttacaacgcttgcactttgacaaaattttgagtcagaaaatcaaaagtttagttttgagagaaaaatgctaaattgaacacttggtgctgattatctctgatcactacttgggaggatatatagaaaaacacattcttttggtaaatggatggtttctgaattgttgaccccatcacagattcc

SEQ ID NO: 78207 - DNA, 1208 bp, Homo sapiens
gctgcaacaaaatgcagtgagacaaccctaaagaaaatacctaaaagcctcaacccaaagaccaataggcgacatccgggaagattgtgatcccatagtactcagcctatgaggaactgagggagggacttgcatactaggggataaatggcttgttgtaacagtactgggtgtgtctgcctacccgacatccaatcttgcaagaccatcattaaaagtctcgcttctgctattctccatgtctctgagttcattccttgggtttggacaggtgagtgcatttttcacaaccatggtcagaaatttttttctaaaaagtccatgtttcggccgggcgtggtggctcacacctgtaatcacaacactttgggaggctgaggtagacagatcacgaggtcaaaagatcgagaccatcctggccaacgtggtgaaaccccatctttactcaaaatacaaaaattagctgggcatggtggcaggcgcctgtaatcccagctacttgggatgctgaggcaggagaactgcttgaacccaggargcagaggttgcagtgagccgagattgcgccattgcactccagcctaggcaacaaagtgagactccatctcaaaaaaaaaaaacagtccatgtttcatctcagtgccaagaactaggtgtttaggtgcctaggatgcaaaataaacaagcccagtgaatttggccacatgaaaaaagtgtcttaatccatttttgtatgactgcctaaaacatggttatattttataaaatgtaaaaattaaatatggatggtctcgaaagagcatagcttacatctaaatttgtttaaataaacttttaagtgatttacaatgtattttgctatcaaaacactaaaagatttgattaaaattttatctactttgctatctgccgttttgtgcaattactatcccctcctctcttttaattattccttaaaggaaaactgcaaagataatacatggataaagctgaaggattttataaccaggcagttttctcagttttacaacgcttgcactttgacaaaattttgagtcagaaaatcaaaagtttagttttgagagaaaaatgctaaattgaacacttggtgctgattatctctgatcactacttgggaggatatatagaaaaacacattcttttggtaaatggatggtttctgaattgttgaccccatcacagattcc

SEQ ID NO: 78208 - DNA, 1047 bp, Homo sapiens
tgatctaatcgaccaatcctcagagtctccagttaagccaaatattgcagtggtgaatggtgtacaaaaataaaaatgtaaggtccttaagcaaatataatatttttctagactgatctataccaaaaagtctttctttaggaacttacttatcargcaagcatgagtgccccaaataatagcatgcaattctatcattctgaatattctactgatggtcaatattctgaagccagtcttttccatacataactcctcccaccttgtcaagaggatgtggaacatctgtatagcattaaagggtagagtaaatgcttcctcttctcttcaaaggcagttttgttctttttgtttgcttgtgttttcagcctagatactatgaaggcagtcatttgaaatgtatacagccgattctttgtttaaatgtggaagttggcacatagcaaattcgctgacttgttagctctctctttttttgccttaatagtttgataatgattttagtgagctcacagaaaaaagtcacttttcttgtatctacgctttagctgctagcaaatagatggtcagtaattcatatctcagtaacctaataggcatatttgattaaagtttatttaagccttttccaataggtgctctgtgaaatgaagcaaataggagagcatccatctgattgggttgacttaccagcctcagcacattgaggtgaaatcaagcatcattagggattatccaatacaattttagtgcctgcttagaattaggtagtagtcactcaggaaaaaaactagaaacattatgacttatgtagctttcaatcctagcaaattacacatttgcttaaccttaccatgcctgcaaaagaaattttttcaaaggtgctaatggtcagacagccatgcggctctagtatagaaatcaaatttgtttgcttcagaatcaagcataaacagtgttacacaaactgctcgaggctatctaatggctcacctttatcccccagctgaaaccccacctggtctatgggagccctgagtcatcatt

SEQ ID NO: 78209 - DNA, 894 bp, Homo sapiens
aaattcttatggtttaatttagatctgccttattaatccatattaatggatagtaatcatttcagttattatctccatgtattaraagaatattttcataaagtgcgtaatgaagttggatctatgtgaggaaataaaatgattcaaaaaaactgctaagcttaaatgatattgccatatgaacttggacacgtctttcacttcttaagttaatcagattattcaatcataccaacatattcaaacatacaagggatacagtacagttatcatttgttcattcagggatacctcattgaagagaaaaccagatacctttttggttctcatcaagccagtaataataatctaccatccgcattaactggttctgaggcaagtatctgacctaagacaggtcgagctagatctgaaagtacaaaagattctttaaaaataaacaacatatggagagtagtaagttgctggtcaggttgtgatatgtgacgcttggaattcagtggttttgtttcctgccagatggactgaaagacagaagccagtgtttgtagcacagaatagagagtgtcctgaaagcattcacagtgttgtgtatccattaactctgagagctcactggacccttgctggtctcagagttacattaggtactccagtgtccttcaaatacctctcttctgtctaatacagctcaagtcatcttcctattccttgtgctcaaaagaattataattaacataccaataaatcagtaaacatttctgatcgtttacttgatgcttaccaattttgaagacatttggaagaatcagtagatttagacatagtacaggaaggtacaattaactcatccaaactattgttatccagcacacgttaactaagtagctacta

SEQ ID NO: 78210 - DNA, 894 bp, Homo sapiens
aaattcttatggtttaatttagatctgccttattaatccatattaatggatagtaatcatttcagttattatctccatgtattagaagaatattttcataaagtgcgtaatgaagttggatctatgtgaggaaataaaatgattcaaaaaaactgctaagcttaaatgatattgccatatgaacttggacacgtctttcacttcttaagttaatcagattattcaatcataccaacatattcaaacatacaagggatacagtacagttatcatttgttcattcagggatacctcattgaagagaaaaccagatacmtttttggttctcatcaagccagtaataataatctaccatccgcattaactggttctgaggcaagtatctgacctaagacaggtcgagctagatctgaaagtacaaaagattctttaaaaataaacaacatatggagagtagtaagttgctggtcaggttgtgatatgtgacgcttggaattcagtggttttgtttcctgccagatggactgaaagacagaagccagtgtttgtagcacagaatagagagtgtcctgaaagcattcacagtgttgtgtatccattaactctgagagctcactggacccttgctggtctcagagttacattaggtactccagtgtccttcaaatacctctcttctgtctaatacagctcaagtcatcttcctattccttgtgctcaaaagaattataattaacataccaataaatcagtaaacatttctgatcgtttacttgatgcttaccaattttgaagacatttggaagaatcagtagatttagacatagtacaggaaggtacaattaactcatccaaactattgttatccagcacacgttaactaagtagctacta

SEQ ID NO: 78211 - DNA, 739 bp, Homo sapiens
cattccaaagtcttcatggcttaatccagttgtaggttatttctcacttacccaacacccaaaagtatgtatctgaccagcaggcagcttctcgccaatcattcaggaaccatcttctagctcagctctcttttactgtggttgccaacaggagagtgtggggaagaacatggagtatatcacaccagagggatttatgggtggggcttgggagtggtgcgtgtcacttccaagcacatgccacgtctctgagtccagacacagaccacacaggacagggcaagggaggctgagaaatgtcatcaagatatgacccagaaggaagagaaaaccaggtttggtgaacatctagacatctctggcaaagaagtttggctgtcaatattcttatctaaaaggcaataattttttttttttttttttttttttggtagggacagagtttcactcttgttgcccaggctggagtacaggtggtgcaactgttggctcaccacaacctccacctcctgggttcaagcaattctcctgtctcagcctccggaatagctgggattacaggcatgtgcaccacagctggctaattttgtatttttagtagagacggkttttctccattttggtcaggctggtctcaaactcctaacttcaggtgatctgcctgccttggcctcccaaagtgctgggattacaggtgtgagccaccgcgcccggctggcaataatttttttaaccacct

SEQ ID NO: 78212 - DNA, 728 bp, Homo sapiens
atccaacaattcttttaacctacatgtggtagaagaagaaagggaccaacttgagaaagaggtaaaattttttaaacatagataaactttcataaagaaggcggatatacagtatgtagaattgaaatgtaacaaagtttctgctacataaaaagacatatgcatgttgatgctgcttttagtgagagaaagtttcttcatggccttggatattcaggtacacaagtgtgtaaggaagcacacatggaatatgctgcttcttacagctttaagatacacaacaattgcatwcccagttcagtaatttgttgtggtgagtaccagctaggaaatgttggaaattaaatgttaaaattcttcagatatgctggatgtaaaggctgagggaattgagagccaaagacagcagcgttgcaaaaacagaagcaaatggaaaaaaaaaccccgcaaattcctgctaatatttttaatggtaaaattagccaggggtgtctattatgagaaatgcaatacttgggacgttgaagagtagatggttagaaatacgagttattctgttaaagaaagagagaaacagaggaagagagaattaatctctgggcagaaacaatacgtattcaatcttggaagtaaaagaaaggtaaaatgaaagtagacatgaaaagggaaattaggcaacttttatatttaggatcacactaagaaaaatgttgcatacattcaggacc

SEQ ID NO: 78213 - DNA, 728 bp, Homo sapiens
atccaacaattcttttaacctacatgtggtagaagaagaaagggaccaacttgagaaagaggtaaaattttttaaacatagataaactttcataaagaaggcggatatacagtatgtagaattgaaatgtaacaaagtttctgctacataaaaagacatatgcatgttgatgctgcttttagtgagagaaagtttcttcatggccttggatattcaggtacacaagtgtgtaaggaagcacacatggaatatgctgcttcttacagctttaagatacacaacaattgcattcccagttcagtaatttgttgtggtgagtaccagctaggaaatgttggaaattaaatgttaraattcttcagatatgctggatgtaaaggctgagggaattgagagccaaagacagcagcgttgcaaaaacagaagcaaatggaaaaaaaaaccccgcaaattcctgctaatatttttaatggtaaaattagccaggggtgtctattatgagaaatgcaatacttgggacgttgaagagtagatggttagaaatacgagttattctgttaaagaaagagagaaacagaggaagagagaattaatctctgggcagaaacaatacgtattcaatcttggaagtaaaagaaaggtaaaatgaaagtagacatgaaaagggaaattaggcaacttttatatttaggatcacactaagaaaaatgttgcatacattcaggacc

SEQ ID NO: 78214 - DNA, 660 bp, Homo sapiens
tcattcaaagccatcctgggctgcatgcagcccacaagccatgggttgaataagcttgatgtctaccatctagtaggtaaattctcttggaatagatttcccttctagtcttagcacatttaggcagtattggacaagtaatttgtactgagattttctttacttatctgtaaattgtaattacatttagttttctgtgtctgtgggttctgcatctgtgaatacagaagccaactgygggacttgagcatctgtggattgtggtagttgtggaggagacggcagtcctggaaccagtccccaccagacaccgagagatgactgtaattatagaacatttgtaagagttaaattgaatactataacttagaaaatataagcactttagaaaggctagatattcttattattatctaagaaattagtaagaaattaaagagcaatgttttgtcagattatgtaagaccttgaatgttagcatttatttatatgacagcaataaaattttcagcagaaacgtggcatagttattgttctgattttatttatttatttttatagccaaatcttattactgcaaagatgatctagaaaaagcttacgagtttattgtgaacattcagttgataagaaattagcattaatgatgattacaagagt

SEQ ID NO: 78215 - DNA, 660 bp, Homo sapiens
tcattcaaagccatcctgggctgcatgcagcccacaagccatgggttgaataagcttgatgtctaccatctagtaggtaaattctcttggaatagatttcccttctagtcttagcacatttaggcagtattggacaagtaatttgtactgagattttctttacttatctgtaaattgtaattacatttagttttctgtgtctgtgggttctgcatctgtgaatacagaagccaactgtgggacttgagcatctgtggattgtggtagttgtggaggagacggcagtcctggaaccagtccccaccagacaccgagagatgactgtaattatagaacatttgtaagagttaaattgaatactataacttagaaaatataagcactttagaaaggctagatattcttattattatctaagaaattagtaagaaattaaagagcaatgttttgtcagattatgtaagaccttgaatgttagcatttatttatatgacagcaataaaattttcagcagaaacgtggcatagttattgttctgattttatttatttatttttatagccaaatcttattactgcaaagatgatctagaaaaagcttacragtttattgtgaacattcagttgataagaaattagcattaatgatgattacaagagt

SEQ ID NO: 78216 - DNA, 350 bp, Homo sapiens
gcattaatttaaactttttaacaaccctgcgagatagaccattttacagataaggaaactgaggctcaaacgattttaatgacttcttcaagcatgtatagctgaagctaagacttaaagtcagaggttcacattttgagcaacataccatttattatgacccgttatcttcaatttaaaatgccaggattagtgtgggagctgtagtgttcctgaactctyggctatcatagaacaggtctgttttctgttggtaaatatagcagatgtggcagatacaaacagcatcgaagggcctctagattattgtaaaatattctcatttccatgagggcagtaattgtggttct

SEQ ID NO: 78217 - DNA, 566 bp, Homo sapiens
tgtaactaacctgaacattgtgcacatgtaccctaaaacttaaaagtataataataataaaaataaattaaaaaactaaaaaataaaaaaaaaaccgctcttaaaaaaaaaaacacagcaacaggagcatagaaaactgcacgtagggaaactgagttaaattcttctaacagatgatgaaagataagtttggaaagactattggggccatattattaggaagattaaataccaaaataaggaattaagacttcaatgaagagacaatagattaggcatttaatgacacaatgagaatastatattaagaggatgagcttaatcttttgttcaagtggtttagaggaaagaaatacaagagacagagaggttagcacagtaaaccaggtgtgaaataataaggaccataactatgggttggggacagtggaaacaaaaacacacagggataacataagagtaattgggaaagaagaatagatggaactttgtgactgactgggtgtacaaaaaactgacaaaaagaagcaaaggtttcaggtttcacagctaggaaaatagtctgc

SEQ ID NO: 78218 - DNA, 816 bp, Homo sapiens
ttcagtgttgagacatatgaagatgtagaaggatagtggttacattcccatcagctgttaatcaagaccctcatcaagttcatttgatatcacttggaataacaattagaaataaggtgatctgctcactagacttgctaatatttagacatcctaaagtggagtaatgtgaaagcagtacagaggaggctggcttccctaatattcagctaagctatggatggtttgagccagtactttttccatgggtaccagaggtgtttccattcaaattttccaggggtgtgtgtgtgtgcatgtgtacttccaagcacataaaagagaggcagagaagtgggcaggcagtaggcagacaaaaaacacaggcagacaaacaacattttctgatgataatggctgagcttaaaatatctttaaaaggttagaaacctaaaacaacttttccaaaaattcatattattagttccattttacaaagaaggtagaggagtctcaaagactaacaaaagcagaaagtcttcagagtgatctttgactcaaaattctatactctctatttgaagccagctttattatccagaaaggaactggtagtgatgcaggacaagaaaggcccaaaattgaggcttagcctgggagggtttttggctctacccaggggttcttgsctttgcccagtgaggaattcaagggtgaactggtggtgttaaacagcaacttttattgaagcagcagtgaacagcagccagcagaggtactgctccttgcagagtaggactaccccataggcagtgtgcccagagtggcagctcaaag

SEQ ID NO: 78219 - DNA, 1163 bp, Homo sapiens
taatatttggagggaaataagtgagctgtaatagagcagaaagctccttgctgtcatgatttgactactgcttttaaccccagaattaaacagagcaggcaaaacacatttcctacagcccacaatgaagtaatattcagtcttgcagcaccgtttttggaggcaagtacactatctttaaatctactcttttttgtcaaaacccttaagcaggagacctcatccagtgtggtcacagcacagtcaatctgttacttaaagaatatttcttttgcattggtggaccccaaatgcctgctctattgaaattatagagtgaaatgttcttaagccttattctatttggcaaatcagtgttttaaaagaaagaatttagagtaatgtttcgaaaggtggaatttagagagttgtagcagaatgccatctacatggaacatacttagccacytgctgttgtaaagagatgtttttcccatccatttgcaagttgtttttttaatttaaagaaattgctgttgaataagacactctcctgtctttcatgccacattctcttaccttttttttccttagtttgcattttaagagacatttgcatgagaacaaatcctcttcatttgaagctttagctgtttgaacttctgacggattgacctccagtcgtaattattgatgcggaagcttcaaaaggctgcaataccccatcctttatcttaggctccattccctttatctgatacattccttgctgttaacctcaatggcagtcctacctttcactgactctaggaaagcctcagctccctttccccttcttttgacctttggtcagtggcctcataatttgcctgaaatggttagcttttcacttggaaatgtttggcaacagtcattttgctggctgctcccagttattgctgccttcagacgtgccttcctataaggccacaggcttcccagtgtggcagcagtttcatgtttccattgtacaatggcacctgctaacttataaccgttgttgaagaattaacttgtttttcttgagatgcttccttgaccctcctgacctgggcaggtgtctttgccttgcactaccacagcatcttgtgcttctaccatcataaggctcatcacattgctgcaactgcttatttaaatttctg

SEQ ID NO: 78220 - DNA, 1163 bp, Homo sapiens
taatatttggagggaaataagtgagctgtaatagagcagaaagctccttgctgtcatgatttgactactgcttttaaccccagaattaaacagagcaggcaaaacacatttcctacagcccacaatgaagtaatattcagtcttgcagcaccgtttttggaggcaagtacactatctttaaatctactcttttttgtcaaaacccttaagcaggagacctcatccagtgtggtcacagcacagtcaatctgttacttaaagaatatttcttttgcattggtggaccccaaatgcctgctctattgaaattatagagtgaaatgttcttaagccttattctatttggcaaatcagtgttttaaaagaaagaatttagagtaatgtttcgaaaggtggaatttagagagttgtagcagaatgccatctacatggaacatacttagccacttgctgttgtaaagagatgtttttcccatccatttgcaagttgtttttttaatttaaagaaattgctgttgaataagacactctcctgtctttcatgccacattctcttaccttttttytccttagtttgcattttaagagacatttgcatgagaacaaatcctcttcatttgaagctttagctgtttgaacttctgacggattgacctccagtcgtaattattgatgcggaagcttcaaaaggctgcaataccccatcctttatcttaggctccattccctttatctgatacattccttgctgttaacctcaatggcagtcctacctttcactgactctaggaaagcctcagctccctttccccttcttttgacctttggtcagtggcctcataatttgcctgaaatggttagcttttcacttggaaatgtttggcaacagtcattttgctggctgctcccagttattgctgccttcagacgtgccttcctataaggccacaggcttcccagtgtggcagcagtttcatgtttccattgtacaatggcacctgctaacttataaccgttgttgaagaattaacttgtttttcttgagatgcttccttgaccctcctgacctgggcaggtgtctttgccttgcactaccacagcatcttgtgcttctaccatcataaggctcatcacattgctgcaactgcttatttaaatttctg

SEQ ID NO: 78221 - DNA, 950 bp, Homo sapiens
aaatactctaaattttttatttaaagacatgaaaagatagcatcttaaacagccacagaactagaaagctaaattccttcactttttatttagaggcagaatttctttgaatacctgatttacctctagagtaggagagaagagtatggattgctcttggtgaattcttcctcctgctataactattgagataaatcactggatgagatgcccctatgtttgcaacaaagcctgcatttctgagctgagagtataacatgaatattttgtcaaaaataatttaaatgwcgtagtctctagttttttaatgcctgatacatttgtccatgttttattaatgtctcccagacctacagatagcagattctcagcagcatacttaacatgattgccttttttgcactttcagagcattgagtttggagagaggagcttcagtgcaaagtaatggagcttaacaccctgatttaaggtgggactccttcgtagcacccttgtgccatttcattactataggtttgctcttctcagctaagttgcagattattcctgggatgagcttgtttttttgtcttttgttttttatctcttccatactttttcatagcactcaggatatctgcacacagtaggcattaaagtatatgcttaataattaagaacatattttcagtgttggtacagtaaatattataatccaatcgttgtggaaggctggaaattcttttgtttgcttggctggctcctgctaaaaaagcttctgggtgcttggggacctcacgttccactaggtcctggaggagacagctctatcctgtggcacttagccgtgagactagctgaactcatttttggactgccaaccccagaattcagcaacccagtcaaaaccaatgaatttggtcttcttaacccttaaaaaaaaaaccaaaaatggtagaaaaatgaca

SEQ ID NO: 78222 - DNA, 950 bp, Homo sapiens
aaatactctaaattttttatttaaagacatgaaaagatagcatcttaaacagccacagaactagaaagctaaattccttcactttttatttagaggcagaatttctttgaatacctgatttacctctagagtaggagagaagagtatggattgctcttggtgaattcttcctcctgctataactattgagataaatcactggatgagatgcccctatgtttgcaacaaagcctgcatttctgagctgagagtataacatgaatattttgtcaaaaataatttaaatgtcgtagtctctagttttttaatgcctgatacatttgtccatgttttattaatgtctcccagacctacagatagcagattctcagcagcatacttaacatgattgccttttttgcactttcagagcattgagtttggagagaggagcttcagtgcaaagtaatggagcttaacaccctgatttarggtgggactccttcgtagcacccttgtgccatttcattactataggtttgctcttctcagctaagttgcagattattcctgggatgagcttgtttttttgtcttttgttttttatctcttccatactttttcatagcactcaggatatctgcacacagtaggcattaaagtatatgcttaataattaagaacatattttcagtgttggtacagtaaatattataatccaatcgttgtggaaggctggaaattcttttgtttgcttggctggctcctgctaaaaaagcttctgggtgcttggggacctcacgttccactaggtcctggaggagacagctctatcctgtggcacttagccgtgagactagctgaactcatttttggactgccaaccccagaattcagcaacccagtcaaaaccaatgaatttggtcttcttaacccttaaaaaaaaaaccaaaaatggtagaaaaatgaca

SEQ ID NO: 78223 - DNA, 678 bp, Homo sapiens
cagactggccaacatggtgaaaccccacctatactaaaaatacaaaattagctgggtgtggtggcgcacgcctgtagtcccagctagttgggaggctgaggcaggagaatcacttgaacccaggaggtggaggttgcagtgagtcgagattgtgccactgcactccagcctccattctcaacaagagcaaaactctatctctaaacaaacaaataaataaaattatatatatatatatatatatatatatatatagagagatagagagagagagagagagacacagagagagagagagagagagagtktctactgggcgctcacgcacatgcacacaaacacgtcacacaaaagtgtcccatggccaggcgctatggctcatggctgtagtccagcacttcgggaggccaaggcaggcggatcacctgaggtcaggagttcgagaccagcctggccaacatggtgaaacccatctctactaaaaatacaaaaattagctgggtcgtggtggcaggcacctgtaatcccagctacttgggaggctgaggcaggagaattgcttgaacctgggaggcggagggtgcagtgagccgagatcacaccattgcactccagcctgggtgacaagagcgagacttcatctcggggaaaaaaaaaaaaagtgtcccaaaataatat

SEQ ID NO: 78224 - DNA, 1048 bp, Homo sapiens
gataaagatacaatttatgtacatatttaattctattagaatttctaacatatttatttactttatttctctggaagagcattgtccctggcagcaagtacaagtggttgatcctgtgccatttgtggtactatcaaaatacaactacctgagaagctaaatactcccctgagttgttttttaaagacattcacataaggtttttcaagcataccattctacttctgcattagtccaaaaagcttgataatactgtgtagatagtgaacaaagtcaggggagtaaggcattgacctcagagagctctaatgttcaaaaagcaagaatactccaaggaaggagagcagaaaagtgctaagggactagagtggccagcactactgtgtttctgcctgagtaatattatcattaacagttatacacactacgaaatcctaggtaaaattttatataaagtaactagacttcagttacaagctgcactactttgaaatcaagatatgtttggcaaggtatattttaacagtttcacttctgtaaatatgaacatctcttatgcaaatattgacttttgctcctttatgtcagacattttgtttctaaataaaagcaaggaaataggggggcatgtgtgttgcgggaagtcagggaccccgaatggagggaccagctgaagccatggaagaacataaattgtgacgatttcatggacatttatcactttcccaatcaatactcttataatttcctatgcctgtctttactttaatctcttartcccatcatctttgtaagctgaggatgtatgtcgcctcaggaccctgtgatgattgcattaactgtacaaattgtaaaatgtgtgtttgaacaatatgaaatctgagcaccctgaaaaagaacaggataacagcaattttcagggaacaagggagataaccataaggtctgactgcctgccggtcagcgaaatagagccatatttttcttcttgcagaaagtgagtaggagaaatatcactgaattcttttcccagcaaggaataaccctg

SEQ ID NO: 78225 - DNA, 1048 bp, Homo sapiens
gataaagatacaatttatgtacatatttaattctattagaatttctaacatatttatttactttatttctctggaagagcattgtccctggcagcaagtacaagtggttgatcctgtgccatttgtggtactatcaaaatacaactacctgagaagctaaatactcccctgagttgttttttaaagacattcacataaggtttttcaagcataccattctacttctgcattagtccaaaaagcttgataatactgtgtagatagtgaacaaagtcaggggagtaaggcattgacctcagagagctctaatgttcaaaaagcaagaatactccaaggaaggagagcagaaaagtgctaagggactagagtggccagcactactgtgtttctgcctgagtaatattatcattaacagttatacacactacgaaatcctaggtaaaattttatataaagtaactagacttcagttacaagctgcactactttgaaatcaagatatgtttggcaaggtatattttaacagtttcacttctgtaaatatgaacatctcttatgcaaatattgacttttgctcctttatgtcagacattttgtttctaaataaaagcaaggaaataggggggcatgtgtgttgcgggaagtcagggaccccgaatggagggaccagctgaagccatggaagaacataaattgtgacgatttcatggacatttatcactttcccaatcaatactcttataatttcctatgcctgtctttactttaatctcttagtcccatcatctttgtaagctgaggatgtatgtcrcctcaggaccctgtgatgattgcattaactgtacaaattgtaaaatgtgtgtttgaacaatatgaaatctgagcaccctgaaaaagaacaggataacagcaattttcagggaacaagggagataaccataaggtctgactgcctgccggtcagcgaaatagagccatatttttcttcttgcagaaagtgagtaggagaaatatcactgaattcttttcccagcaaggaataaccctg

SEQ ID NO: 78226 - DNA, 763 bp, Homo sapiens
atacaaaggagttgaatataaatatttataatcatgtatgattggttgtaattacaatagattttaattttttatatttttaatcttttaaaaaaaattcacagaaaaaattaattgtaaaatttggagatcaagcatagaaattaaattgtgacactgaagatatcattaaaatgttctttatgacttctattttttataaattgatagagagaaaaatcaattttctatgtgctaaatagaaagtgaagaagagttttagaagtagtaataatgagtgtattgtattgagacaagagcagggtgacaggttgaacactaaaaaaaatcatgattaaaaatagtcattatagaattacaagttttcatktattatttaaaaattttctacatgcaagctatttgctctcaaactatcatgcctatcagcaatacttttaaggatttaaaatatatgtatacatgtatatattccactgttttttattttgattctgtaaatatgaacatctctatttattgcaaatacaagaaaaaaaattcatagatgatactaatgtcgaccaaagcttgagaaactttgttccagataataattgtataaaaatatgttaagcgaaaaggtaatagtagagtatttctaaaatacattatagctatatttgcctttatttttatacactgaaggatactctataaacagcaataggatgaaaggactatttataacaaaattaagtagatctaatcagatgaaagtttg

SEQ ID NO: 78227 - DNA, 1444 bp, Homo sapiens
gtcttgaactcctggctcctgggctcaagcgatcctcccacctcagcctcctgagtatctgggactacaggcgagccccaccaatcccagctatttttaaaatttcttgtagagatggggtcttgctatgttgcccaggcttgtcttgaacttctggcctcaagtgatccttctgcctcagccttccaaagcattaggattacaggccggagccagggcgccgggtcggctctagttttggttttccagctcagttctttgcccccctcccccgatttcttgccatcactagacctggctcggacttgaaggcagggctagtgccccccacccgccccccaagccctcggcctcagttctgggttttctcaaaggtttgacagctgtggaggtgagaatccacttccggtatgaagtacagttgtgagtgaggagcctgtgagtgcagatgtgtgccctcccgctccctgggctgggttggagtagggatggggtggggcgtgtgtggctgggtggtgcctggcgtttttgtgtaactaaatatgcgttccagggtctctgatctctgtcattcccctcagtgcacctgttgctcctttcaccccagggtctattatctccactttttttcccagggcttcttggggagtttcttaggcctgaaggacaagaagcaacaactctgttgatcagaacctgtggaaaacctctggcctctgttcagaatgagtcccatgggattccccggctgtgacactctaccctccagaacctgacgactgggccatgtgacccaaggagggatccttaccaagtgggttttcaccatcctcttgctctctgtctgagagatgttttctaaaccccagccttgaacttcactcctccctcagtggtagtgtccagstgccgtggagcagcaggctggctttggtaggggcacccatcacccggcttgcctgtgcagtcagtgagtgcttagggcaaagagagctcccctggttccattccttctgccacccaaaccctgatgagaccttagtgttctccaggctctgtggcccaggctgagagcagcagggtagaaaagaccaagatttggggttttatctctggttcccttattactgctctcaagcagtggcctctctcactttagccatggaatggctccgatctacctcacagcagtgtcagaaggacttcgccagggttttgggagctccagggttcataagaaggtgaaccattagaacagatcccttcttttccttttgcaatcagataaataaatatcactgaatgcagttcatcctcggccccctttccctccgtttgttttcttttcataatccacttactcccttcccttctactctgcgctggcttttgacagaggcagtaaattaggcctaatcctcactcttttcttcctaatcttcat

SEQ ID NO: 78228 - DNA, 1022 bp, Homo sapiens
caagttagcacagcctcagttctcagaaaagaacagaatggggaaaaatagaatcctctttactgagatattgtgaagagtaaagagaacattcatgaaaaaggcttgggttagaagaagtgctccacccactggttagctactgtgatgattctgratttgactggtgaagcgggcaggaccgagggtttggagttagatccgcttggttctgaagcccccagacttactggttatgtgtgtgatctcaggaggcaatcgttaattttggaggatgcttagcatagaagagcagatggacagatagagagcaccccgtgatttgttaaatgcctactgtgtgagatactctgtgcttggtgacttatgtgagttattttatttaaaatcttctgcattgatgatgttctctctgttattgctatcccccatttttatataatgaacattgtagttttcattttgtagatgaggaaactgagcctcagagtgctgacatgactggctggggacacacagccggacagctgcagagctgttggatccgcagttgtctatcccggagacccagctttgctctgccgcatctcagatttgaccctcggcctctgctggccatcatggtcaattccttcacatcttaatggttccctcgtcagagggcctttccctcagcactccacctaattttgagatgttccctgaatcatctttatcattgcacttggtctttccctttcagagaacttacaacaatcagcaactacattcctttgttaccataataaaaatatgaaactagtgtttattaaagatggatatcatcctaatattattctaagcacttttcttgtattatccccttatatttcacatcagtcttatgaggccagctcttagcaactgacatgttagtttatttcattccataacaatgctgtgaagatgacactgatattttaatttcttagataatggacctgggacacaagaggctaagtaactccctcaaggccataaag

SEQ ID NO: 78229 - DNA, 668 bp, Homo sapiens
tattattgatctcttaagaggcatacttgctaatcaatatttgcagaaagccatgcctttttttgtagccaccattgctcaagcgcctgaggtatgcctggcactgtagctaggttcttcacacatttcttcatttaatccatgacttycacgtgaatttagttttgttgttctcattttacaggtaagaagtggaggttagagggatttataacttgttcgaggtcacaaagctaacttatattatagggattagtgtgccctaaagaaaagtatactccaaaaacattaaattgaaagcttttgtcaaataacttgttaggatagtctgacttacggttactggccatggtaatatgtttattttgggggaaaattatactcctcacagttaatttgctttggaatatataaatcaaattcccaaatctgatttgtataagaaagcacacaacagtaacaaaagatttgtcagttggtgtgcaaatttctgcttcctcttgccttctgtttactgacttgagtgggctgagacttgatgagtactagctataaaatgtgggaggaattttggacaaagccaggcttcctgttttagtaacttttagcagggctgaatgctgttaacaagtccccaggacttaaaaaatttatcctttcattttatt

SEQ ID NO: 78230 - DNA, 757 bp, Homo sapiens
cactttgggaggccarggcaggtggattgcctgaggtcaggagttcgagactagcctggccaacatgacgaaaccccatctctactaaaaatacaaaaattagctgggtgtggtagcgggcgcctgtaatctcagctactcaggaggctgaggcaggagaaacggttgaatccaggaggcaaaggttgcagtgagatgagattgcaccactgcactcaagcctgcacgacagagtgagactccatctcaaaacaaacaaacaaacaaacaaaaagagtacagggactcactaatcctctctcccaccccttgcacattgcagattgaggtcatttctcgggatggttaatgaaaaaggaacctctctaaatgttttgcttaggggtccaaaatttagtttgtgctcaactcactttttgctctaaaggtctcatttttctaaaggaagctgaaatcatgttttgctgattaggcctctgtgttactaaacactgaaaaaaaaaagtttagcgaaaggtcaccgaaccggagttccttccgttgttaatttgggtttttccatcatcagtaatgcagatttgggaatctcaggttttatttctcatgaagcattctagtaatttttgatcctcaggaagtaatgagctaaatgaatactgaaatgagatcaaggaagctcttcccagagaaggtagtagatgaataataagatgctagtttcctaaggggaacaaagatttttacatctgtgtgcaag

SEQ ID NO: 78231 - DNA, 757 bp, Homo sapiens
cactttgggaggccaaggcaggtggattgcctgaggtcaggagttcgagactagcctggccaacatgacgaaaccccatctctactaaaaatacaaaaattagctgggtgtggtagcgggcgcctgtaatctcagctactcaggaggctgaggcaggagaaacggttgaatccaggaggcaaaggttgcagtgagatgagattgcaccactgcactcaagcctgcacgacagagtgagactccatctcaaaacaaacaaacaaacaaacaaaaagagtacagggactcactaatcctctctcccaccccttgcacattgcagattgaggtcatttctcgggatggttaatgaaaaaggaacctctctaaatgttttgcttaggggtccaaaatttagtttgtgctcaamtcactttttgctctaaaggtctcatttttctaaaggaagctgaaatcatgttttgctgattaggcctctgtgttactaaacactgaaaaaaaaaagtttagcgaaaggtcaccgaaccggagttccttccgttgttaatttgggtttttccatcatcagtaatgcagatttgggaatctcaggttttatttctcatgaagcattctagtaatttttgatcctcaggaagtaatgagctaaatgaatactgaaatgagatcaaggaagctcttcccagagaaggtagtagatgaataataagatgctagtttcctaaggggaacaaagatttttacatctgtgtgcaag

SEQ ID NO: 78232 - DNA, 640 bp, Homo sapiens
ccttccatctctgagtctcagtttcctcatttacaaaagtaggaatagtaggctgggtgtggtggctcatgcctgtaatcccagcactttgggaggctgaggcaggcagatcacgaggtcaggagatcgagaccatcctggctaacacggtgaaaccccgtctctactaaaaatacaaaaaaaaaaaaaaaaagaaaaattagctgggtgtggtggcgggcacctatagtcccagctactcaggaggctgaggcaggagaatggcgtgaacgctggaggtggggcttgcagtgagctgagatcgcaccactgcactccagcctgkgcaacagagtgagactccatctcaaaaaaaaaaaaaaaagaagtaggaatagttaagattgactgtgttttcctttccccgctccctactctcttttgtttcctcccattctttctttcctttcttaacacaattcaccgtgggaaaaatcacttaattaattaattaattcatagacatctagaagccctgcactgtgcttaacactacagagatttaaaaaaaaagtacaaggtcaatccttgcccccatgcttacagtctccctgggaaaatagggctgaaacacaagacaatcagaagacgtcagttaatt

SEQ ID NO: 78233 - DNA, 676 bp, Homo sapiens
gggtatgttgttggcaatgaaatgccctgggcccccagtaggcctgggagacagggagattggaagaagcctcatttcatcatgccaggcctttcctgttgcattttcatgcagctatctaacctgagtaacaggtcacagatacactgcactggaagaaaccctggactttccatagttgatccctagagcctgcccataacactccaatgcacatggagtagcagaggtctaggatgggtgacttcctccttccagagtcagcccttgtcagctttagggagctccaacaagtggaatgtcctttcttgcaatgaaataacttcttyatatctccagactctatgcagcaaggctgagaatgccaggctggtggtggagattgacaatgccaaattggctgcagatgacttcaggaccaagtgagttgtcctgcttgtcatgtggttgggggctgctagaactggacacaggtgatgcctgagctcagggttttggctgtactctgtcattggggcataaaagcaggactcacagcacctggacagtctgagggcaggcctgacttagatgcaaaaaggaaatgcagactcaggtgccctgttctatgcctgcaggtatgagacggaggtgtccctgcggcagctggtggagtcagacatcaacggcctgcgca

SEQ ID NO: 78234 - DNA, 1387 bp, Homo sapiens
agggatcaaggccaggagggcagccccctcctctactgctgaggctcagcggggcaatgcctaccccagctgcctcctgtggtgtgggcatggcaggcaagcccagcaccccagggtttctagccaggttctgtattttccagcattagttttccctccagggtcaaatgataagttcttctaaggtcagagactatgtcatcatctccctcttcacccccagcccccgagagctgtacacacagcaggtgcgtgatctatggagttggctgagcagtttggcgcgttggtcagcaacttcctgcagcttctcagcccatgcagatccccaggtctgcagtgctgggcttgtgtataatcccgccctgacacctcctggaatggggaacttggtggggggcagtgagccaatgagaaaggggtgtgtgtgcatgcacacacgatgggggcagagagtgaagagttctcagagactctactacgagagtcggtgtgaatcctggcttgggagttagagctggctcgagtctctgctctctcacttttgtgctgcttaacctggataaggctttcgctctctccagttggggtattaatagcctttggtgaccttgaagaccattttcagttctgagggtgatgggtctgtggatggaccagaactccaggcccaacctgacacctgaacactgaggtttttgtccaagattccggggtcccctttgcccctttttggggtaggggtgaggagtgtcaggttccctctcccaggtttgactctgaagggatgtgcatccgttctgctcttacctctgggatgaatgaccaggggagatgtagcagtgacaaaaccctggttctgctgagacaaggaattgcctgccccagtggagctcaggcagaagcaggctgtctctgggctcctcacctcaacagagacactrcagagcaaggccagtggccagcaccgagggatgccccacagcaccctgaggaggccccgtcttggtgcccagacccctccatcctccctccagtcctcggtgctggaccaggctctcaggccaaggccatgcccaccatgggcagacctcctgccagtgatcgtggggaggtgggtgagagttgggtatactggccccgcctgcaggcatggtgggagcctggagagggccagagttctgggttctagttgcagctctgcagcttaaagcagagtgactttgagtgaatctctacgctcacagaactgtatggcacacactgggctctccatgcatgcctgagtgggcccataaccagtgctctcccccagctcagctggatgaatggagctgccaggcctagcctgggatctgtggacacaggagagagaactgctgggaac

SEQ ID NO: 78235 - DNA, 1491 bp, Homo sapiens
  misc_feature (1)...(1491): n = A,T,C or G
tgaagctgcctgcaggctgctctcaggacatgatcctgcaggcatccctggcagacaaggtcattagcctgacagcagggacatgaacatactgcttagcaagctgtggttcctggttgatggatgggtanaatttcaaggagctgaaatgccaagagagaggggttctggctaattgaattttctcataactgcgtgcaaaccagcaatctttaatttcaaccccggtgcaaaacttttctggaatgtgctcagcttgataaacaacacrcagaacagaccaaagctttggttctataatcctagacctgttctgtccaatatggtagttcataacgacatgtggctgcatatactgaaacattcggtatatgaatgtttcatatactgaattgcactgagttgcactcgtcacacgtggctaagtggtagtaaataagacaacacagacatggactatttccaacactgcagaaagttctactggacagagctgtcttagactgtcagaactagaaggagccttccagatgatctggctcagctttcccagttttacagaagagtcatctcagacccagggaggtggacagatgtgctcacagacacaaccaacaggtggaaattgaagccaagggttttgacgccaagcctcttaggtctctccaagcactttatgctttctccaagcaccctaggtttattattatttcaggctaatacatatttcccctctccttttctttcatttcccaaagaagggagacattttctctgagaagctgaaacttcttcctgggaatatagttctcttaaaaagcatcgctagcaactaccagactcagcatctcctctttctttgagcactgggctcagtaagagcaaagaccttgagctgcagcccagagcctcagcaggaatgattgcacaggagttgtgggccagaagtcctggaccctggaccccctggggacttccagagtctccgtttccccagtgcatattgtttcagtccaactcggtccccattcccacacctgtgtgtctctcccacttgccaagacctgtctgactcccaagatgactgttaaagctttttatatgaaaccaagccccacagcccagggccaggagtaccctcctctgctagaagtgaggcccatcatcttctgtgtctggatggtacttcaagccagaggtgtcacgagctaccctcctgcctagcctgtctcttatttgatggatgaagaagccgtgggcatagactttgggagatatttatcccccaccagcaccggaatctcctgggaactggactcagtgtaccactcatggagattctcagaggaactctctcctcatatcaaagcatttgcatctaattaactctttataggggaagagtttatagggaaatgtaggcaggaccctggtcaagtcataaaacctctgtcatatttgatgttttggagaaaccctcacaggtatcag

SEQ ID NO: 78236 - DNA, 2383 bp, Homo sapiens
cctcagcatcactgaatatatccacataataaatctgcacatgtacccccaaatctaaaattttaaaaatgtaatggcttccacatatttaaaaaaatatatataaaataaaatgagggttctcctagtttcttcccaagggtgggtatatttttctacactggcttctacaatcacttatatttgcatgactattaactctacaaatacagctcattcctttctgagaatttcacacttgtattcacttggccatctcttagtcaccagaactcaacatgtcctaaactggtctcattacgcttggccctatgcagactgctttggtatttatgttaacgcatagcacactggggcccagaaggtgttattatccctaatttttccgttttagtcagtatatctttatatcattttatctcataaacagagcataaatctcttcattctcattgccttatttcacctaatagcatgtacaactttctacttagtatttttatccttcaatttgacctcaccaaaccgaatgcattcacggttactgaaatgattcttctaaaatgtgaactcatgttaattttcaaaaaatggatcaattgatttgatgcaagtgtaataaaaattatgactgtttttaaatgaatttgacaaggtgactctgaagtaggtacagaatagcaaagcgctcagaacaaccaaagtatttacaaagaagaagaatagggtcactggctgctatgacagcatacccgagagtgggtaatttataaaggaaagaagtttatttatctcttacttatgcaggctgggaagttcaagaggcatggccccagcatcttcttggcaagcaggaactgatacatttccgagacagctaatctagtcttgagagtgagaactcattactgctagaagacacgaggtcatttatgagggatccacccctatgaccagaacgcttcccattaggctccacctcccaacactgccacactggggatgaacatgagttgatttcaacatgagttttggcggggacaaatcatatccaaaccataacatgtgccctaagtagacttaccttactgattccaagatttatttaaagccataactaaagctctgtatggccccaggcacagtcaaagcaaccaatgatacataatagaaaacccagggatagacccgttcacaaatgaaattatgatctttgacagaagtggtctattttttaggtgcagtgaagaaaccagaaatcactcagtattttaagtaggacggatttaaaacaggaagatatgcacaaattattgaaggtctggaaaggcaaagatgtggtaaaaagaaggtgccattagctgtatgatccactgacacagccatccaaagaggctactcagaggtcagcaaactgtaggacacgcctggtgaagtcacagcatccccaaactgcagctccaagactgtgactaccatacctgtaaaatctcacacctaccgaggtctgtatttcctctgcaattattgctgggagtgaattgtttctgcctccctactatcttccaaatttgcgtaagtgcatttctttgacagcactgtatcttaaaccttaccggcaaagaagtttggaaaattcagcccctgggtttctagctcttgtgatacaaaggagaccaagaaggggaaatcaatgtgtcccaaaggccacagaaaacatgtggcacaggggtgttaaagatcaataaagaaaggaagaattgttaaataaacagtgctgggacaactgggcattcattcaaaaaactgaaattgaattcctgtcttatgctataccctagagtcaacttaaacagataaggacttttgctaaaaggaaaacttcaggaagaaaatatagaaaaatattgttctagttttggaataaggaagattttattaaaacaaggtaacaggagaggggccaagatggctgactagaagcagctggtatgccctgctgtcrtggagagaaggaaaagtggggagttaacactagctcttcaactggatcatccaggtggtcacattgggattcatcaaggaagcaacatgacccacggagaatggagaagagtgaaacaggaaaactgcccacttgggagtggcatggggtcaagggaggcctcctaaggcagggaaatggtgagtgagtgagagtccccgggcacccacatttctgccatggacctttgcaatcctgggctcaggagatcacctgtgctatctctcaccccctcccccgtccaccactggggcctccagtctgacacacaaagctacacagagtctgggcagagctgctgcagaggcacacacagagtcccagggggcttggatcccc

SEQ ID NO: 78237 - DNA, 952 bp, Homo sapiens
cttcctttttctctcctgttaaagagcaaattctggttttgcctgttcagcttctcctgctcctctgcccactaagcagagaagcaaggatagttcctggaattcatgctgcaaaactctgccagtagttaagagacagaactgaaaaatactgggggaaagaggatttgcatttgaaaaggtacattcctaattaaaacaaaaaaatgactgaatgacaacagaacagaaaagggggctgatgtggggagaagaaaggaaaatctagcagctcaggtgtgctgggtgtgttggggacagaatcccactgggcgatgagacttcataaggagaggattggggtgacagcagtctctttagaatacgaagattgggaacagtgttgaatattttgcatgtgaattaacttccctctccctcttgttagaagagtacctaaatttggccttcttccaaatgaatttttctttcagaccatttgtttttaattcaacacctagcaaatacctaggccatgtaagacctttctggtagggttacacaaaatatcaaacataaaagagtgatgggggaggagtaacatttgacttgtataaatgtccaggagtayatcttcaatcaaatttcgaagaagatggcactgtggctgacttttaaattgtagagggccactgttttagaaatagttgctctgtcattgcattgaagtttccaacactgcacagcaagaacatggactcactggagaagggctgacatggtttcacccaaaaccttggggaaaagcaaagtttgagctttcatatgaagcaatggaagcagcaacttaattagcaaatacagctactgtagcttcatgggctagagcccagctgctctctcccttctctgaagtgcaatacaaattaatttgccaaaacatccaagagtcatctttgtactaaatgatgca

SEQ ID NO: 78238 - DNA, 1026 bp, Homo sapiens
gagcctgggttctctcatctgtaagtacagggactaaatcagatcaacctttttcaatctgtctgcctctcagtcctggcgttctgaggtgtttcctgaggacctcaaaggaggaagctcagcaagcctttaaccagaggaatttcactttcctgactttcacaggagattgcattgtggttttttttgttttttttttttttgtttttttttgttttgttttgttttgagatggagtcttgctctgttacccaggctggagtgcagtggctgggtctcagctcactgcaacctccttcttctaggttcaaacgattctctcacctcaacctctcaggtagctgggattacaggcatgcaccaccatgcccagctaatttttgtattttttttagcagagacggggtttcatcatgttggctaggctggtctcgaactcctgaccacagatgatctgcccgccttggcctttcttttttttgtttgcgttttttttgttgttttgttttgttttttgagacagagtctcgctctgtcaccaggctggagtgcagtggcacgatttctgctcactgcaatccctgcctcccaggttcaaasgattctcctgcctcagcctctcgagtagctgggattacaggcacatgccaccaccccggtaatttttttgtacttttagtagacatggggtttcaccatgttggccaggatgggcgccttggcctttgtttttcttcttcctcctcctccttcttctttgataacatattggaagcctcaaaaaatgtaagtggcctggacttctctccatctttgcaaggccctggcatcctggatgtataaagtgctactccctctgggaaggatggctttgaggagggatgtagtggtgagaccagttatgagtctgatgttgaggttcaggtgtggggtgatgggaatggaccatgaggatactgaaggcatgaagagggggcaattctgagagccaccccaaagctagacgggtgggtaggtctgggagga

SEQ ID NO: 78239 - DNA, 573 bp, Homo sapiens
atcctttcattgttgctcaaattagctaacaaaaggacaattacaaacaaagacagagctatcaatgcttatttgctaaacatctatttggtattgagtatacttatttgytatcagagagcataaaaatgcttccataatccccttggaagggcagtgtttttaaatgtttagtaaatgttggcttactatccttccaagggagcttatcagaacattttaatgctgcttcagatcaactgattgaagaagggtagttgtggattccaacagctgaaactatcacctattcaactaaagaacatgttcaagataaattatttttacagccttttctacacaccacactctaattgggaaggtgaatatagagcttgtattaatatatattttctctgtcttgaaaccaaccaaaatcatattgagaaactttgtttttttttataccattccactgtggcctctcaacatggaaccagaaatattaataagatatattttctttcttttcaaacccaaacctaattaaaagttatgccacgctcatcccaatgtcagacctttgctcaccaa

SEQ ID NO: 78240 - DNA, 1046 bp, Homo sapiens
ctcgtttatgatgtagaggtcagagacattttggataacaatcatgtagcagctgcttccaaacaaagcatgtctcacctctagataccaaggtcatgttgagtgccagtcagttatggagctctgtgtattgagtcttttgaaattctggkgtggaaagagtgaggttatttatttggttgtttgcaggcatggttatctcccatattagagcatggaagatagaatttctcttcactctgagtatcccatactgcagctgctccaggcacaaaagtagcctaaatgtgatcaaatgcagctttaagttctggagatttcctactatctcagcttccttttcaaggaagatctgagatctagcaatgaaaggaagaatgcagtaatattttggtgccaacctctacattttcgggaggcacagttactagtgcaccatcaagaccaatgatggacattagaaaggacagaggggaatttaaatagtttaagaaggtagttgagctacatatattgttgcgggaagtcaaggaccccgaatggaaggaccggctggagccgcgatagaggaacgtaaattgcgaagatttcattttaatatggacacatatcagttcccaaaattaatacttttataatttcttatgcctgtctttactgcaatctctgaacgtaaattgtgaagatttcatggacatttatgagctcccaaataatactcttataatttcttatgcctgtctttactttaatctcttaatcctgttatctttgtaaggtgagaatgtatgtcacctcaggaccactattgtacaaattgactgtaaaacgtgtgtttgaacaatatgaaatcagtgcaccttgaaaaagaacagaataacagcgattttcagggaacaagggaagccaaccataaggtctgactgcctgcggggtcaggcagaatagagccatatttttcttcttgcagagagcctataaatggacatggaagtagggaagatatcactgaattcttttcccagcaaggaatattaataattaat

SEQ ID NO: 78241 - DNA, 1556 bp, Homo sapiens
cagaggtagctggcaactaaaccctgctgctgttacgagagaatgagctactctgcagtgtcactgatctgttgctgtctcctgtctgaagaatctgagcattcagtaggcacggcctgctgtgccaaaacacaggccacagttggggctgcttatggcatacctagtggccaccaaggcaccatgatgggtctgctgggcacagtggacttgacagtgccttaaaccgttgcttatgtcccgggggtggttggggytgtgctacccccttcctgaaataactttgtgatcccgaagagatgtccaagcagggagatgatgcccaagtgccagctttatcactatttatggttgttttctttatgcttcaggaagtttaaaatctcctccacctttcagaaggcatgtgaaattgaagagaagcacatgggaccaatgaaatgctcaatgttaagccagttccaactggaagaatagagtatgcagtccaagagcctgcattgtccatatcagagtttaccaacattttttacttctttctgctcagcaatactatgcaaaatggatgcttcccactctgtcctgtccccctcagtctcaggtacttatgtgaagaactgatatagttcaattgtccttgagggcaacttgttttgacaaacactgagggcaatccccaagagtctggagggtctggaagtctccccaactctgtctcggatcctcattcttcctcattgtggggagtgagaagggcggcaataagagaccagtggtcttcaaactggagaaggtgtgccccaagtgaatgtaagacctcctaaatggtgtgtaggcatgtagagtgttcaatttcaagagactcaattccaaaatttatgtgcctttgaaaaagtatggccattctggaccttgcttctctcattcccttctataatcatcttctttccagtttgcaaggacaggcatttatctcagccatctggaaccttaacttggtgcatcatcctggcagaacaagcctgcgggtcaccaaacaaagtgatagttttaatttggtatgctgatgttaataaagtaatagctactaataaaaaggtagctggcttttaatcttttgcttccaaaacaattgaagaagaacctcatcagctagtagtagtagtttaaaaataactttagatgataggtcattatgtatttttgggcacatatctcagcctctttatctacaggtcaaccttctgcacatgttctatctccttccctgctttacttttttctcttttatacttatcactatttactatgctatattgtatattttacttaaaaaattcatttgttatcagactccctcattacaagttaaactttataagggaaaaatttttgtctgctcttatatgttttgctccctgctatagcccccaaacctggaacagtgtctagtacaaagcaggtcttaaaaaatacttggggaaggaaggaattttaaaaaattgagtgacattgttatagcaaatttcttcccattcttgtattttttctgtgaa

SEQ ID NO: 78242 - DNA, 1556 bp, Homo sapiens
cagaggtagctggcaactaaaccctgctgctgttacgagagaatgagctactctgcagtgtcactgatctgttgctgtctcctgtctgaagaatctgagcattcagtaggcacggcctgctgtgccaaaacacaggccacagttggggctgcttatggcatacctagtggccaccaaggcaccatgatgggtctgctgggcacagtggacttgacagtgccttaaaccgttgcttatgtcccgggggtggttggggttgtgctacccccttcctgaaataactttgtgatcccgaagagatgtccaagcagggagatgatgcccaagtgccagctttatcactatttatggttgttttctttatgcttcaggaagtttaaaatctcctccacctttcagaaggcatgtgaaattgaagagaagcacatgggaccaatgaaatgctcaatgttaagccagttccaactggaagaatagagtatgcagtccaagagcctgcattgtccatatcagagtttaccaacattttttacttctttctgctcagcaatactatgcaaaatggatgcttcccactctgtcctgtccccctcagtctcaggtacttatgtgaagaactgatatagttcaattgtccttgagggcaacttgttttgacaaacactgagggcaatccccaagagtctggagggtctggaagtctccccaactctgtctcggatcctcattcttcctcattgtggggagtgagaagggcggcaataagagaccagtggtcttcaaactggagaaggtgtgccccaagtgaatgtaagacctcctaaatggtgtgtaggcatgtagagtgttcaatttcaagagactcaattccaaaatttatgtgcctttgaaaaagtatggccattctggaccttgcttctctcattcccttctataatcatcttctttccagtttgcaaggacaggcatttatctcagccatctggaaccttaacttggtgcatcatcctggcagaacaagcctgcgggtcaccaaacaaagtgatagttttaatttggtatgctgatgttaataaagtaatagctactaataaaaaggtagctggcttttaatcttttgcttccaaaacaattgaagaagaacctcatcagctagtagtagtagtttaaaaataactttagatgataggtcattatgtatttttgggcacatatctcagcctctttatctacaggtcaaccttctgcacatgttctatctccttcyctgctttacttttttctcttttatacttatcactatttactatgctatattgtatattttacttaaaaaattcatttgttatcagactccctcattacaagttaaactttataagggaaaaatttttgtctgctcttatatgttttgctccctgctatagcccccaaacctggaacagtgtctagtacaaagcaggtcttaaaaaatacttggggaaggaaggaattttaaaaaattgagtgacattgttatagcaaatttcttcccattcttgtattttttctgtgaa

SEQ ID NO: 78243 - DNA, 596 bp, Homo sapiens
aaaaatacaaaaaaaagttagctgggcggtagcggcgcatgcttgtaatcccagctactcgggaggctgaggcaggagaatcgcttgagcctgggaggtggaggttgcagtgagccgaaatcacgccactgcactccagtccgggcgacagagtgagactctatctcaaagaaaagaaaacaaaagaaaagaaacatcagtcatatcacaccacatttgtggcttcctttttttttttttgagggtggctgtaagtttcagttttattgaaatcagaggacattttatttgaaagaccaaatgaccttgttgtccacactgagtaagatttgccacatcccctcgtttggctggctctttcctgggtgagatgtgtgcagcaggctgtgtttctagctgctcatccaattaggctgattctctgggtgggataacattgagggagawcaaaaccatttgactgtcttcggtttactctcttctctctctctctctctcctcttttttgttttgagacaaggtcacattctgtcatccaggctggagtgcagtggtgccatcatagctcactgcaccctccaactcctgggctcagt

SEQ ID NO: 78244 - DNA, 562 bp, Homo sapiens
tgaaattgggttgaacctgggagttgcttaattgccagattccgtattcaagggagaagtcagaagaccagaagcacatgggtagtaagtcctctgcaatgcatctggccaagcaggtatgggaggtcggataaagactatgagtcaagaaggaggtcaggccggcacggtggctcacgcctgtaatcccagcaccttgggaggctgacatgggcagatcacgaggtcaggagattgagaccatcctggctaacacagtgaaaccctgtctctactaaaaatacaaaaaattacctaggcgtggtggcgggcacctgtagtccaagctactggggaggctgaggcagaagaattgcttgaacctaggagatggaggttgcrgtgagccgagatcatgccactgcactccagcctgggcaacagagcaagactctgtctcaaaaaaaaaaaaaaaaaaaaagaaccaggtcatacaggagtcctgaagctcaaggtaggggcaggaactagaagaggataatgacagcagacaagggcaccccaacaaggacaccttcaaagt

SEQ ID NO: 78245 - DNA, 738 bp, Homo sapiens
tattctagaaattttatagttttagctcttatatttaattctgtgatatgtttttaggtaaattttgtgcgtgaagtgtgagattagaatccataccagctacagttcttgcaaaatgggtagaaattttattttttttcattaaaataccttgccaactttgttgaaaattaattgaccatatatgtgtgagtccacatctggggtctgtaatctgttgcattgattgatttggtcatctttgcatcaataccacaccgttttaatcagtgtagcttcatgataattttgaaatgaagtagtgcaagctcttcaagtttgttttcagaatcattttggttattttartttctttgtatttgcatataaagttttgaatcagcttgtaaatttttagattcaacattgtattgcatctaaagatcattttgagaagaatcagtgtcttaatatttaatcttccaattcaggaacatgttgtgtcactttatttaaatagtttaaaatttcttagcaatgctttttaattttcagcgtacaagtcttaatgcatcttttgtaaaattcacccataagtagcttgtattttttatgtttttgtaagtgggcttgtttatttagcttaaattctggactgtttgttgctagcatacagaaatacattgaatttagggtcttctggcatgaataaaaagaaagaaaaaaaagaaatatattcgatatttatatattgctctt

SEQ ID NO: 78246 - DNA, 1438 bp, Homo sapiens
agtttaattttttgatcttgtttcaattatctcccttaccttgaaaaagattgggctgcttttctacttgggatggcagagtttccatgaactatccgaaatattacactgtgtctggtaggtagaaaaattattttcatgaactccttcaaaggtattttgaaaggtgtccctctacatttgaagatattaataagagattataacactacttgagagtcagctgatctgagatcagaacctgaggcaggcttcatgctagagagctactgagggatgtggggctgagaagtgttagcaaacatcttaaaccaaactccagtatatttagttaaataaaacttgagttattcctaatcaaagcatctttgttkgcttgttattttacactcaaatgaattttaacattaaagcaaattgaattaggaagcattttaaaatttattgatatctgattacaatgtcatttgaaaagaatatcttattgatttcaaaaaggaacatgcatgtggatagtaactagtgagtttaaaacttgtaacacctaagtggtagatgcaatttggctaaatgctttttttttttttttttttttttttttgagacagagtttctgctcttgttgtccaagttggagtacaatggcacgatctccgctcaccgcaacctccacctcccgggttcaggcaattctcctgcctcagcctcctgagtagctgggattacaggcatgcactaccatgccaggctaattttatattttcagtagagacagagtttctccatattggtcagtctggtctcgaactcctgacctcaggtgatctgcctgccttggcctcccaaagtgccgggataacaggcatgagccaccgcactcagccactttttctattcatgtggagtagaaaccaagactggtttccatgaggaactgtactggtgccaaagccacaacaccaagactcacattaggtttttaattgttgtttttgttttgtaacagcatcattgcctcacttaaggagatatacctctggctttcctagtattctagatgtatcctgcagcatttctggtaatttccagcttagtaatgtctaaaaaggctttagccatttctccaaaactcattatatgtaaatgataatgaactctgcctatggatgatatttgaatacgaagacgcctgaaattataagactacactaaatttttcattttagttttcatattggattacttatgtaattataactgtctgccatatcataatcctacattgagaaaataactccagatgttcctattcagaaattattaggctttcagacaagggaccctgttaccatgctcataatctatttattggagtatctattccctaatcaaagtaaaccactataagagtgattccaagcctgaagtctcaaatgca

SEQ ID NO: 78247 - DNA, 1460 bp, Homo sapiens
  misc_feature (1)...(1460): n = A,T,C or G
agcctggccacaggattggttgaagaacaggcatatgacccaatgggagccaatcagtgggagacttgagatttttgctggagagaggcactgttttttaaccaacaggaaaaagcatgggtggagctcctgagagccttcttgtcaccctggggaggagcgtgtctgtctgagattgaaaccacagaagaaagcagagtcaagacatggcaaggacatgaattggaatctttgaactccttgatccagttgtaaatcagtaaataataataattattatgattctttgctttgtttgcatcagtgagttttctgtcatttacaactaggaatgctgaggaaacttgccaacaatgtgccaatgtgtgtgctctctctctctctctctgtctatatatatgtacatatatatatatatatwttttttttttttgagacggagtcttgctctgttgcccaggccacagttcaacggccgacctcaagtcattgaaacctnnnnnnnnnnnnnnnnnnnnnnnnnnnnnnnnnnnnnnnnnnnnnnnnnnnnnnnnnnnnnnnnnnnnnnnnnnnnnnnnnnnnnnnnnnnnnnnnnnnngagtgggaggagctcttgatctcaggagttcaagaccagcctgggcaacatggcaagatcctatctctaccaaaaaaaaaaaaaaaattaactgggcacagtggcacatgcctgtagtccttgctagtggggaggctgagatgggaggattgcttgaggctagggaattgaggctgcagtgagttatatttccaccactgcactccagcctggacaacggagtgagaccatgtctcaaaatttacaaaataataataataaaataaaatacatccaaaaaaccagagccaatgggcagtgattggtgaggtatcctggatacttgaggcctctctataccattccctctagcaggcctgttaaccttattcacctctgtatccccaggctcagggctcaataatggggaatgtagatattagggaaatgtttgctcaattgattgaatacatgggctaagtcattctctctggactcattttgccatctataaaatgagaaaatgatgaaacactatggcaaacacctcctaatcagcctcagaggtcaccacctgcaggaagtcttcatggattcccttccacccgcagattgatcaagggcctcttctggcctcttacagagccaggttgtgttcccatccctgcactgactatagtgtacaatatttgtctggttctgctctgtggaggcacctgtgcctctgccttggcccgggttcagcaaaaatcaaggctaggcctagaaagtgatgggaaatactccacgtgaatattcaggttctttgcagtagggccaatgtccattttgctcctctctgtaccccaagtacctatcccatagcatgtagaatgtttgagaa

SEQ ID NO: 78248 - DNA, 705 bp, Homo sapiens
tcggcgcaggaaccacacagaagggggaaccgckgctccctgatcttagataccgttgctaggtggcgctttccccccgcggagctgggtaattaaaaaaaaaaaaaaaaaaacttcggacgccgggggtctggtcttctccacaggagcgcaaaatgcatctgcgtcctttctggaagcttctacgccccaagccgccagcagtattcccgggacctgtcaggcgcccttaggaaagcaggatcggggggaaggaaccccctgctcccggctgcgtatcggcccccgcgcccatcctcaccttcttgatatgagccgcaatgtccttctctatgttgtatttctccagcgcctgagtagcgcactccaccgagtcctgttgcatctcttccgacatgtccgcatttttgatcacggcctttcggtcgcacatggttacctagtgggcaaggcctggggtaaggggttgagttgggccgcgccccccaggcactaactgcccccaccccggccggcgccaccacgggacgacgccccccaccccacttctcaggaagcgcgggctacgcggagggctaagtccggagtggggcgaaataaggcagcgaggacaccccctggccccccgagtttctcaccgtggagaagggggctggccgactgcaacggtctcctgggggaggtgctagcacagctcaggcccgg

SEQ ID NO: 78249 - DNA, 705 bp, Homo sapiens
tcggcgcaggaaccacacagaagggggaaccgctgctccctgatcttagataccgttgctaggtggcgctttccccccgcggagctgggtaattaaaaaaaaaaaaaaaaaaacttcggacgccgggggtctggtcttctccacaggagcgcaaaatgcatctgcgtcctttctggaagcttctacgccccaagccgccagcagtattcccgggacctgtcaggcgcccttaggaaagcaggatcgggggraaggaaccccctgctcccggctgcgtatcggcccccgcgcccatcctcaccttcttgatatgagccgcaatgtccttctctatgttgtatttctccagcgcctgagtagcgcactccaccgagtcctgttgcatctcttccgacatgtccgcatttttgatcacggcctttcggtcgcacatggttacctagtgggcaaggcctggggtaaggggttgagttgggccgcgccccccaggcactaactgcccccaccccggccggcgccaccacgggacgacgccccccaccccacttctcaggaagcgcgggctacgcggagggctaagtccggagtggggcgaaataaggcagcgaggacaccccctggccccccgagtttctcaccgtggagaagggggctggccgactgcaacggtctcctgggggaggtgctagcacagctcaggcccgg

SEQ ID NO: 78250 - DNA, 540 bp, Homo sapiens
cctctcatgggtggtgtggacctgctgaagagtgtaaagcaagatcagacaggtgtttggaaaagattattctccaaagtagtaatggaaagcagcaacagtgaaacagtgaatgcttacattggctactccacttgcttggggygaaatgtgctcctatgagcttttctctgatattttctgtgaatatttcatttaatggatttattggtttatccccaatatcttggatgcagctattttggaatgtgttgttcctttgtataacctttgaaaaatgatttactgttgagaaccacaatagtcagtaatttactcaaggagtagaagctattgaccaaatctaaaaaggacttggtattgtttctttttatactaccagacacgtttgatttttggtcattttccataatcaaatttgctaagaacattccatataatattcagaaaacacttttaagcatatacaatgtgccaatcactaggaacagtgatatgaataaagcaagtgtaattcttgaaagaaaacttaaatgaagt

SEQ ID NO: 78251 - DNA, 842 bp, Homo sapiens
agaacagggattcttttttctacttctttgaaacctcagctctgagcaccatgcttaatttaagctgatgcttaatgggcgcagactgaatgaatagcttgcaacaatcaaagcccttgctgatacatatttgaagccagtcgaaagtgacaccagtcatatgagaaggaacactgagcactcccctatttttgagaaagaagctgcttttccatgtcttgaggtggtgtaagttgggcagaggagagaccrttctccaaagagaagaggcttcattaagggcaagaacagttcctgcctagttggcttattttcagaaagcaaagagcagttactgtaaggaagctggctgtctgggccggcagctttatcaatgaataatttcctgaaaggaagagaatctgtggagaccttacattatatttgatctcagtgcacgtacacagtatgcaggactatctttgattcgagggaggtgagataattgtttcccaaacagactctccggctggagagcgtgctccctcccattctgttgacccatacaccagaagccccacgtctgccccagacaattatcctgttttgctagggaacaaattgctcttttggggtaattctgagcaagtttgccaagttcacaaccatcccaggggagcctcagggggaaaagcactctccaaatcccctctctggcccttccaaaggaaagcaggtcattttttaaagaattccaatgaaagcagctcattctgaatgatccatcccaccttcagagaggcctcctgggcaatttgttggttcctcgtgtttgtctgatactagggagccaatttcccatg

SEQ ID NO: 78252 - DNA, 842 bp, Homo sapiens
agaacagggattcttttttctacttctttgaaacctcagctctgagcaccatgcttaatttaagctgatgcttaatgggcgcagactgaatgaatagcttgcaacaatcaaagcccttgctgatacatatttgaagccagtcgaaagtgacaccagtcatatgagaaggaacactgagcactcccctatttttgagaaagaagctgcttttccatgtcttgaggtggtgtaagttgggcagaggagagaccgttctccaaagagaagaggcttcattaagggcaagaacagttcctgcctagttggcttattttcagaaagcaaagagcagttactgtaaggaagctggctgtctgggccggcagctttatcaatgaataatwtcctgaaaggaagagaatctgtggagaccttacattatatttgatctcagtgcacgtacacagtatgcaggactatctttgattcgagggaggtgagataattgtttcccaaacagactctccggctggagagcgtgctccctcccattctgttgacccatacaccagaagccccacgtctgccccagacaattatcctgttttgctagggaacaaattgctcttttggggtaattctgagcaagtttgccaagttcacaaccatcccaggggagcctcagggggaaaagcactctccaaatcccctctctggcccttccaaaggaaagcaggtcattttttaaagaattccaatgaaagcagctcattctgaatgatccatcccaccttcagagaggcctcctgggcaatttgttggttcctcgtgtttgtctgatactagggagccaatttcccatg

SEQ ID NO: 78253 - DNA, 2178 bp, Homo sapiens
tttttgaaacaggaatatagaggaaactcatcattgtagcagaacaagcacttgatttggagtcagaagaaaattgggttagaatcttaattgtccagcttactggtaatttaaatttgtgaaagttactaaaccagttggtttataatctataaaggagccatatggataccaaactcaaagactctgttatgtgtgctgattggtgattggtaagctttgtgactggcacatagctagaggtaattatcagtcacatctgagaataggcatatgagattcaaatattttatctctaacagtgctcaaaaatgtaatagtgaaaataccaactgaaattagatataagcagaaatcaaaagtaatctatttatctcatagcacatggggtatatggattgacaggcatgtgctaaatttaataatgtctttcaattcaattcaattcaagtattgaattaaattaaattaaatgtaatcataggggaaaatggtagcatagaaaatcttcctaaattcctaaaacaactgagtaaccaaaataaacaaatgtggaaaattcctattagtactgattttgttatcagttggattagactgaagtaacaagtaacacccaaatctcaatggcttacaacaggtaagtaagctttcattcatattaaatattggctgcagaccaggcatggtggctcacgcctataatcccaaaacttcgagaggacaaggtaggaggatcacttgaagccagtagtttgagactagtctgggaaacatagcagcaccctatctgtgcaaaattaaaaaaaaaaaaattagccaggcatggtggtgctcacctgtagcctcagctacgtggactgaggcaggaggatcacttgagcccaggagttcaaagttacagtgagccatgtttgcatcaccatactccatcctgggtgacagactgagatcctgtctctaaacacaaaacacaaaacaaagcaaacaagaaccaaatattgtctgcagtttggggtggctctgcttcatttcatttttacttgtagatctggattcacatctgaggagacaagaggaaaaaagtgtgaggaaaaaatatctcattatacctcctaaaacatatgctcagaaatggtcctgagaaacttatcaaactaatattaattttattttcatttcattagccaaatcaactcagatagtcaactagaaaacaggattccattctattagaaaaccacgggcctgaagaatatgagaccatttgggggaatagagaatatacctaatgaatactctaatgcatgcacacatcctcaaaattcaaaaattttattttcccaaatgtgatggaggtgcatgaaaattgaaagaagatcctagaattctttccattgaaattttcttattttaaagaggatcccaagattataagacacaactattaccactgaatgggcaataaacgttaatggcatgtggaaagctgagaactttttactctaattgggaagggcaagtacagaacaagacagggaaattagcatatattaacaacatttcacttggagcaaaagattacatatttaacgaagctatatatatatattttccctaggattctttaatacatggacagaatgtactaaccctaatgaggaatattttctaatctagtggaccaagaacaggcagaacactggagagacaagaatcctgtgctcagagtcatgttcacctctgtcaactgatgataatgaagacaatgatcccatatttacccaacagaaaactagttggctaatgggcttcctaggaaaccaaagaaaaatacagaaacaaagttactttgtaaaacaactcatgatccaacgccattactcattttcttttttttcttatttttttttttttgagacggagtctcgctctttcgcccaggccggactgcagtggcgctatttcagctcactgcaagctccgcctyccaggttcacgccattctcctgcctcagcctcccaagtagctgggagtataggcacctgccaccgcgcccggctaattttttgtatttttagtagaaacgaggtttcaccgtgttagccaagatggtctcgatttcctgacctcgtgatccgcccgcctcggccttccaaagtgctgggattacaggt

SEQ ID NO: 78254 - DNA, 664 bp, Homo sapiens
ttttttcatttatcaaatatgtttaagattcatccatttttaaggatttatttttatcactaaaaatattccaaattatggatgtaccacaatttgtttacccatttatctattgaaggatgtcttaattgcttccaatatctggggattataagtaaagctgctacaaacatttatgtccaggttttttgatgggcatgattccaaatgctggaaggtttactcatcaaaactgccttgatcttcctcctggtctccttttcttcagttccctgcagagccttcagggtgaagtgctgccatggtcccctgcaacctctctgctgatgagggtctgtggcccttgcctggagcactgtccccattcacctcccaggcctcctccacctttcctgcaaatcratgagagtcctgttcagtgtcttgtacaccagtgactcccagccaaatctggcaccagaacagctcctcccaatattggtttgtcagatggagagtggcttccacctaggcttcttataggaaatgcacctcagtctcccagttacagtcagcagcctgctgcctcccggtcacttgctccttcacacactgcctgccttttattcttctttgctttttccagtatcctctatgccttatgctttagccgttgatctatttt

SEQ ID NO: 78255 - DNA, 1148 bp, Homo sapiens
tgcattgattctaaagcactcctgtgacgaaacacttttaacagaggggtaaaaatttatctttcctttgaaatagtgaaagtcmtccccagagggccaaggtagcctgggctttcatctgagtgaggaacaaagaaggaggccagcaatgaagagtcacagctggagccatgatttgggatgctcagggtcactgggtctacacagcatggtggccggggaaggcggtacccctccctcgctcctttctgggcagtcaccccagacacttcaagcccaaatcagctagttggtatttattctcttttagagatgggtaaacattttctgtaaggaccaggtggtaagtatttcaggctttgcaggccatgtaatctcagttgtaactaccaagctcttcattttaatgcaaaagcagcataaacaaatgagcctagatgtgctccaatgaaacttaatagacattaaatttttgtgccatgaaaaattatttttcttttgatatttttggaccatttaaaaatgtaaaacctatgcttagcttgaggaccatacaaaaacaggtggtgacctggatttggtctacccgctgtagtttgctgagccagctctctatataactcacaatctaatcacattaaaaatcttggcagtggaccacccaaaatcagccacactcatgacaggagaggcctctcaatatcaataggcgactccttccttcaattttctcttggtgattccccatcacacttgttgaccatgcttcttcagtggactgtcaccttttggagaaaggggagaggatgatctcattcatatttacacactgtgcttctggcacattgcacgtctcttaaatgtgtttaaaataaatggtggatgggtaaatttatgtttctccctttcagagaggtttcttcttcttggtttttaagaatgccttgccaccaagtcatgccaccgctgaaaagaccctttgggcttgaatttcttcttcagtcattacttatataacagtcaaatggaagaaaccaagacgtggtggcacagctgcttttccaagtgttcatcccagactcagccttggccttgcaaactttcctccttctatttgccaatgtaggatggtcacctttccagttctg

SEQ ID NO: 78256 - DNA, 725 bp, Homo sapiens
agggggcttctggttcaccccgatgctgacttgttccctgggttctcacagcctgagttaccttccggaagagctgggtgccctaaytcacgcacatgggggctgccgggggccttcccagccctttcattcttgtggtttcatgacccagagacatcgggggttccccatgctcactcacatgaaatagctaccattctggggttttgattttttgggggtttttttgtttgctttttgttttttgttttgagacggagtctcgcactgtcgcccgggctggagtgtaagggcgcgatctcggctcactgcaacctccgcctcctggcttcaagcgattctcctgccccagcctcccaagtagctggtactacagatgcccaccaccacgcccagctaatttttgtaattttagtagagacggggtttcaccatattgctcaagctggtctcgaactcctgacctcaggtgatccgcccacctcggcctcccaaagtgctgggattacaggcatgagccactgagcccggcctatacttgggttttagatggattattttgtaggagaaaggtgaaattattcttagtattttatctactatagacaaactattatttttatgtcttttgcagacctaatgactatagtaaactcttttaataagcttcctattatggaacatatatttaacgaacaaatagattatttaaataagtgccaaat

SEQ ID NO: 78257 - DNA, 725 bp, Homo sapiens
agggggcttctggttcaccccgatgctgacttgttccctgggttctcacagcctgagttaccttccggaagagctgggtgccctaactcacgcacatgggggctgccgggggccttcccagccctttcattcttgtggtttcatgacccagagacatcgggggttccccatgctcactcacatgaaatagctaccattctggggttttgattttttgggggtttttttgtttgytttttgttttttgttttgagacggagtctcgcactgtcgcccgggctggagtgtaagggcgcgatctcggctcactgcaacctccgcctcctggcttcaagcgattctcctgccccagcctcccaagtagctggtactacagatgcccaccaccacgcccagctaatttttgtaattttagtagagacggggtttcaccatattgctcaagctggtctcgaactcctgacctcaggtgatccgcccacctcggcctcccaaagtgctgggattacaggcatgagccactgagcccggcctatacttgggttttagatggattattttgtaggagaaaggtgaaattattcttagtattttatctactatagacaaactattatttttatgtcttttgcagacctaatgactatagtaaactcttttaataagcttcctattatggaacatatatttaacgaacaaatagattatttaaataagtgccaaat

SEQ ID NO: 78258 - DNA, 725 bp, Homo sapiens
agggggcttctggttcaccccgatgctgacttgttccctgggttctcacagcctgagttaccttccggaagagctgggtgccctaactcacgcacatgggggctgccgggggccttcccagccctttcattcttgtggtttcatgacccagagacatcgggggttccccatgctcactcacatgaaatagctaccattctggggttttgattttttgggggtttttttgtttgctttttgttttttgttttgagacggagtctcgcactgtcgcccgggctggagtgtaakggcgcgatctcggctcactgcaacctccgcctcctggcttcaagcgattctcctgccccagcctcccaagtagctggtactacagatgcccaccaccacgcccagctaatttttgtaattttagtagagacggggtttcaccatattgctcaagctggtctcgaactcctgacctcaggtgatccgcccacctcggcctcccaaagtgctgggattacaggcatgagccactgagcccggcctatacttgggttttagatggattattttgtaggagaaaggtgaaattattcttagtattttatctactatagacaaactattatttttatgtcttttgcagacctaatgactatagtaaactcttttaataagcttcctattatggaacatatatttaacgaacaaatagattatttaaataagtgccaaat

SEQ ID NO: 78259 - DNA, 725 bp, Homo sapiens
agggggcttctggttcaccccgatgctgacttgttccctgggttctcacagcctgagttaccttccggaagagctgggtgccctaactcacgcacatgggggctgccgggggccttcccagccctttcattcttgtggtttcatgacccagagacatcgggggttccccatgctcactcacatgaaatagctaccattctggggttttgattttttgggggtttttttgtttgctttttgttttttgttttgagacggagtctcgcactgtcgcccgggctggagtgtaagggcgcgatctcggctcactgcaacctccgcctcctggcttcaagcgattctcctgccccagcctcccaagtagctggtactacagatgcccaccaccacgcccagctaatttttgtawttttagtagagacggggtttcaccatattgctcaagctggtctcgaactcctgacctcaggtgatccgcccacctcggcctcccaaagtgctgggattacaggcatgagccactgagcccggcctatacttgggttttagatggattattttgtaggagaaaggtgaaattattcttagtattttatctactatagacaaactattatttttatgtcttttgcagacctaatgactatagtaaactcttttaataagcttcctattatggaacatatatttaacgaacaaatagattatttaaataagtgccaaat

SEQ ID NO: 78260 - DNA, 694 bp, Homo sapiens
tttaaagtgtctttctatttagcctttctattactatagttaaagaaaaaatataaaaacatgaaattctactttggtatctaaacctcttaatcaacttactcaacacacatccacatagcatcaccatgggccaccctgtgcagatgggacgaacccccaaaaattgaacagtagaaacactgaaattgcaacagaaaaaaggaatgattacttcaattgtatcgttgtgaaaaaaacttctgtaacagcaaacgtaaaagtttcctaggccaagataatctgccggaaactaagcagatggtaccgagctgaattaccttgtagttacttcttctgaggcaggttggagctcatcacagttaactgaaagctccccacataaagtcaaaacataaaaatgagatgcacattgtcgrtcagttgtagcggccttgcagcctctgccaacctttgattaagatgctttgaggttaagaacttcctatttcatgaacaatggcatcccgtggctgttacatgatgcagataaaatgtgcagaaagaccatgaggacaatatacaccattaatttgtgtgatgagaacaggaataagaagttcctataatactagaatgtttctgtaaaacacacggtttatgttctgaaaattctgcctttaatctcagtttagtatggtcttctaggaaatag

SEQ ID NO: 78261 - DNA, 537 bp, Homo sapiens
atatatatayatatttttgtatatatatatatatatataaaatccttgttcatttatatttgtacatttagttcccttctttttcattcttctttgccgttctctactgtcatttgggagaatttatcttctgcttcaagaactatctttaatattctgtaagacatcttctagtgacaaattctcaaggttacattttaaaaaatcttattttgctttcattttgagggtttcttttgcgggctatacaattctagattgacaagtgttatttatttatttttgtttttggtggttaaaagcatcagcactttgaatatgttacctcattttccttctatttccctaactgccctttgttcctctcttgctttctctctagaatctagatctctcaacccctcactgccccagttgctctctgacgcttaacagatcaaatataacatcctctagcttttctagttgctctcaaaaggagactataagcaagtctactattttgggaaacataaattttatttataattataaata

SEQ ID NO: 78262 - DNA, 630 bp, Homo sapiens
ggctggtttcgaactcctgacctcagatgatccacctgccttggcctcccaaagtgctgggattacaggcgtgagccaccacacctggccttaatttctaaaaaaaaaaaaaaaaaaaagaaaagaaaaggaaagaataacctagttctgtaaaataaaacaataattcctttcaggagttttcaatcgcctctagtggacaatgtattaatgttggaaatagatgttwtagtaaattttgaaatgtcagggatttattctaactgcattaaacttttacaaagtttcaaaactataatgctgaatttaagttaggccctgtgattaggtagaaagaacactggcctagaactgaggagcaggggctccaggcatttactcgcagtgtgaccttggagtagtcgcttattttccctaggtgtcagtttctacacttgtaagcgagaaattggactatattgttcctaagattctatccagttctaagaatctatggtttcttttctacttctagggttagcataaaggaatcatctgtagcgaaactaggatcagtatgccgtaggatttacagaatattttcacatgcttattttcatcatcggcagatatttgatgaatatgaagtaa

SEQ ID NO: 78263 - DNA, 873 bp, Homo sapiens
gaggtgtttaagttataaaaattgcaatcagtgagttatcaattagtatgcttttaagaagtgaaataacataaaaatggatattttatgaattcagcacataaaaaaaaagtttacccctgacctgaatttcaactagaaagatctgattaatttgtttttatactcttttggtcattagagctgatagcttgcaattttcctgtggtttcaagtactgtagttattggattatggtcttgtgcatcagaaaacctgggctgttatcatgagagcagtgggcaatattctctctacctttcctatcaactgctgtccagggccacccactggcctctcaaatggcaagccgcaaatgccagcactctgttagatggagctaccacatctaagcattgcctttgagtcttttctatatccactaactattcatcagtttgatttcccttgactctttgtcctaggtagagacataaaaatacgtcttaccctgtacctactcttttatgtataatagctacgtctcttggatgcactagagaatatatcagcttcaacagagcttggaggagtcttactctttagtcagaagtatttatgtcactstaaaaaaatgcctatgaccatctattctctaggagactcaaagctctgtccaatttacttttttgactgattggtggacagatatttggtaaactattatctcttccttctttcctagtttacgaacctaaatcacctactgatttttttgtgttgtaactaaagcatatctaggatgttttatatgaaagccatagtgcttttatcaccttatttaaatgcagtgaactggtagagaataaactaacaaactccaaaatctatgca

SEQ ID NO: 78264 - DNA, 832 bp, Homo sapiens
gtgaaaggaggaagaagaggagaagaaaacataccacttaattattactaataaagcaaaagagagtatccagaaacctgtgcctactcataaattataaaggtattggtttaaaaataatctcttgaacaacaatactttttaaaagtaaaagaaacaaaaagaamcaaggaatgttacctggtaaatgaaatataaaagaatatggcagaactggatgaaatgaattggtcttaagaataaatataaatgtgcttaaggcatatattttaaaagtgtaattaaaaggtgagcttatccaatttaatcaaaagctaaaaaaaaaaaacagaaaaggagaagaaacatgaagacagatacatacaataaaatatgagaaatagaaagagaagaataactatcaaattataaaaaatgataatgaaagaaagcaaagattataactttactttgtaggatttaaggcaaataaatttgaaaggccagatgttgtgaataatagtatcaaaaataattcacaaaatatgaccttatgaaggactggaagtctaaataatccagtgacaataaccaatatagaaaaaaaattcaaagcacctccccaaaaatgacccagcttcagaaattgaaaggaacatgttttttagaaatatgtaccaaaatagagatataggtcaatggaacagaacagagccctcagaaataacgccacatatctacaactatctgatctttgacaaacctgagaaaaacaagcaatggggaaaggattccctatttaataaatggtgctgggaaaactggctagccatatgtagaaagctgaaactgg

SEQ ID NO: 78265 - DNA, 762 bp, Homo sapiens
tcagtgttttatccaaacttccagctcttttgtctagagaagtttcacaactcctttctggcaaaaggttgtgagtaagctgtatctgttgtgctctctaaggttaatgtccataggaagattctatcatgcaaaggcacaaaaagatttcacatcaggagaacattatagaacagagagcttagtgagtatcaggtttcgtggcacgtaatttaagaatttatgagaaagatagtgttkcactcagatgggctaagtaacaaataaccccaaagcttagtaattggaaatgacagagtttatatgttgctcttgctattagtccatcaaggactctggaggatgttatgtgtccataatgttcctgttacactcttcatcaagggctcacctcagcactcagggactgcgccagggtaccggagcggcccccgtgtctcatgttatcagttgacatgacagagagaaaactgagagttctacaaggtttaccaccaacaactggagacatgacctagaagggacacacatgactaacactcatgacttatccaaagctagtcacttggccctacacacccacaagagtgctagaagctgtgattctgtaagtgtccagagggcagaccttcagaaatatttctgaagttcactactgcctatcacagagagaaagaaaacgcaaagattgaatatgtaggctgggcattctaagaaaagtacaagcccagtattccacaagggaggtgtagttacagggga

SEQ ID NO: 78266 - DNA, 762 bp, Homo sapiens
tcagtgttttatccaaacttccagctcttttgtctagagaagtttcacaactcctttctggcaaaaggttgtgagtaagctgtatctgttgtgctctctaaggttaatgtccataggaagattctatcatgcaaaggcacaaaaagatttcacatcaggagaacattatagaacagagagcttagtgagtatcaggtttcgtggcacgtaatttaagaatttatgagaaagatagtgttgcactcagatgggctaagtaacaaataaccccaaagcttagtaattggaaatgacagagtttatatgttgctcttgctattagtccatcaaggactctggaggatgttatgtgtccataatgttcctgttacactcttcatcaagggctcacctcagcactcagggactgcgccagggtrccggagcggcccccgtgtctcatgttatcagttgacatgacagagagaaaactgagagttctacaaggtttaccaccaacaactggagacatgacctagaagggacacacatgactaacactcatgacttatccaaagctagtcacttggccctacacacccacaagagtgctagaagctgtgattctgtaagtgtccagagggcagaccttcagaaatatttctgaagttcactactgcctatcacagagagaaagaaaacgcaaagattgaatatgtaggctgggcattctaagaaaagtacaagcccagtattccacaagggaggtgtagttacagggga

SEQ ID NO: 78267 - DNA, 762 bp, Homo sapiens
tcagtgttttatccaaacttccagctcttttgtctagagaagtttcacaactcctttctggcaaaaggttgtgagtaagctgtatctgttgtgctctctaaggttaatgtccataggaagattctatcatgcaaaggcacaaaaagatttcacatcaggagaacattatagaacagagagcttagtgagtatcaggtttcgtggcacgtaatttaagaatttatgagaaagatagtgttgcactcagatgggctaagtaacaaataaccccaaagcttagtaattggaaatgacagagtttatatgttgctcttgctattagtccatcaaggactctggaggatgttatgtgtccataatgttcctgttacactcttcatcaagggctcacctcagcactcagggactgcgccagggtaccgragcggcccccgtgtctcatgttatcagttgacatgacagagagaaaactgagagttctacaaggtttaccaccaacaactggagacatgacctagaagggacacacatgactaacactcatgacttatccaaagctagtcacttggccctacacacccacaagagtgctagaagctgtgattctgtaagtgtccagagggcagaccttcagaaatatttctgaagttcactactgcctatcacagagagaaagaaaacgcaaagattgaatatgtaggctgggcattctaagaaaagtacaagcccagtattccacaagggaggtgtagttacagggga

SEQ ID NO: 78268 - DNA, 762 bp, Homo sapiens
tcagtgttttatccaaacttccagctcttttgtctagagaagtttcacaactcctttctggcaaaaggttgtgagtaagctgtatctgttgtgctctctaaggttaatgtccataggaagattctatcatgcaaaggcacaaaaagatttcacatcaggagaacattatagaacagagagcttagtgagtatcaggtttcgtggcacgtaatttaagaatttatgagaaagatagtgttgcactcagatgggctaagtaacaaataaccccaaagcttagtaattggaaatgacagagtttatatgttgctcttgctattagtccatcaaggactctggaggatgttatgtgtccataatgttcctgttacactcttcatcaagggctcacctcagcactcagggactgcgccagggtaccggagcggcccccgtgtctcatgttatcagttgacatgacagagagaaaactgagagttctacaaggtttaccaccaacaactggagacatgacctagaagggacacacatgactaacactcatgacttatccaaagctagtcacttggccctacacacccacaagagtgctagragctgtgattctgtaagtgtccagagggcagaccttcagaaatatttctgaagttcactactgcctatcacagagagaaagaaaacgcaaagattgaatatgtaggctgggcattctaagaaaagtacaagcccagtattccacaagggaggtgtagttacagggga

SEQ ID NO: 78269 - DNA, 529 bp, Homo sapiens
aaaatagttaagtgtttatttctttatggtgaaactatgggtgattttatttagactcgacttttctctattttccaaatgaatttttattttctaaaatgaatttgagttatcaaaaaacaaaaaagaatgttaagtacattgaagaaatacctctttaagtttgycaaaggaacacagcttagacaaatactgaaattatactttaaaataaattacatagcttacgaacagttaatgttcatctaatcatctaattcagccattatatacatactaatcactgcatttgattggaattgtatgaagtatctgaagacaggaattaaacttaagctgccagtaaaagaggccaatttgaataagcaaggtgtagacttttaaaaaaatctaggacatgcatttattaccaggctttcaagaaatctcttctgaacagttatgatgatgattatgctttgaaatatgctgtgcttcaaattatttttcattcagctttaattatttttattccctttgcagcaagatg

SEQ ID NO: 78270 - DNA, 891 bp, Homo sapiens
attggcattgctaacattattattattaaaatccttcagtgctgggcaccacttatttctacccttataaccccatggacctgtactgtatcttgtaataaaaccctcaataaatatttgatacattgctgaataaaaggtaggttgacttcttaaagtacctgcaaaatacctcatccacaagagaaaaaggcaagagaataaccttgcttcatgaagaaagtatcgatcattcaggcgttaaattttccatttgttcattttttttttttttccagcagaaactcttggagaaattgcatagcattattttaaacaattcccctcagaggcccattarataggcttttctgcagacaggatagatgtcttttacagctggtcagtgtttagttctcccaatacttgactgaagaaagaaaataactgggatgtaagatatctgacctatagattgctcattctctgcatgagtcaatctttgaagtcggaagataaaaatcaccattaatcacaaaactttcttaccatcataaggtcagatatcccagggcccttccaaaattaccacatggactggcatagggcgagattggctcagctgtggtcacttttatgacacagagctccttccctctggttgatgatattgaatgagcaggaaggaagaaaagaaataaaagtcagctaaccatggttgagtcaatccagcccacggcattcaaaggctgaagggccacctgacactccagaggctgctggaaatgcagggctgtttcatcctggggtgagtttccgttagaagaaatactgacttgaatgaaacaaagagtccgtcccttgctttattggacaatgaaagttcccatcatactgatcaaagatcgagga

SEQ ID NO: 78271 - DNA, 891 bp, Homo sapiens
attggcattgctaacattattattattaaaatccttcagtgctgggcaccacttatttctacccttataaccccatggacctgtactgtatcttgtaataaaaccctcaataaatatttgatacattgctgaataaaaggtaggttgacttcttaaagtacctgcaaaatacctcatccacaagagaaaaaggcaagagaataaccttgcttcatgaagaaagtatcgatcattcaggcgttaaattttccatttgttcattttttttttttttccagcagaaactcttggagaaattgcatagcattattttaaacaattcccctcagaggcccattaaataggcttttctgcagacaggatagatgtcttttacagctggtcagtgtttagttctcccaatacttgactgaagaaagaaaataactgggatgtaagatatctgacctatagattgctcattctctgcatgagtcaatctttgaagtcggaagataaaaatcaccattaatcacaaaactttcttaccatcataaggtcagatatcccagggcccttccaaaattaccacrtggactggcatagggcgagattggctcagctgtggtcacttttatgacacagagctccttccctctggttgatgatattgaatgagcaggaaggaagaaaagaaataaaagtcagctaaccatggttgagtcaatccagcccacggcattcaaaggctgaagggccacctgacactccagaggctgctggaaatgcagggctgtttcatcctggggtgagtttccgttagaagaaatactgacttgaatgaaacaaagagtccgtcccttgctttattggacaatgaaagttcccatcatactgatcaaagatcgagga

SEQ ID NO: 78272 - DNA, 1753 bp, Homo sapiens
ataaggccgcatcattggctcagtctcaagagagggtgcgcatgacacttagctgctaacagtagcagccttcaaggcctgtgcccaccaagagcacatagatcaagttggctcttagagtctagtcacacatttatattgaaaggtagacaagccaccttctgggacttttccagagcttcaaatagtctcccttctctcagctcatcaagcttaaaatggttttctttgttagctttcagccacccttgccttccagactaaggagatttgaaactcctctccccaggttatggaagatacaaaggacttttcagttcaccatattttcctgaaagaaaatctctctgtctcataaaagcagccccaaaccacacaaaagcctgggggccgggagaatgagagagcccaagccaattctcccttcaatcactttaactcaactcgctgctgagaactgcgaggtgtcctgtgtctgatgattagcatcaggtgatgccagggtgccagacaattagcaaaataacctgccttattctaagaaggggactcatggcaatgaaattattgtcttaaaaataaatgtgttgattaggtctttgtatttrtgcatgcactctcagaaaaagaaatagaggcatgcttctaaaaagggcattttcgaagaaaataccatcctcctcctcttgcccagccccacccacccaaaaaattaagcattattacattcaaatccactagggaacaacgaccaaaagtatgttaattccacttataatctctgttctatagttgtgcttgtcatcatctttttcttttcctgttctctagaggaaaactagaattgcctgaatttgagctattattttctgacaattttaaatcacagaacatttcttcttctgcaatgtttttatttgttctgtttgcacatcaagtagcctgtttcctctaaataacacagtatttactctaacacaacaagtagcttgggcgagtccagttctgttctcatttgccttacgggtgtctgaggtactggcttcaggttgtctggaagagaccccatgagggttcaggaggtcaacatctgaactacatctggggcctttggattagtatctacacatttgggttaagacaccttcaaaaagggatgcatgggagtcactcacattgtagctagtattatccgcattgagtgaagtagttggagtttaaggagggtcattcacacaggtggtagaagggctaagattcaaattcagatctgattggttctagaacctgcacactcaagtccttcatgatacatctcccctattagtaacatgtaacagacccagaatttctggctcaatgctccagaaagcaaggaaactctaggataaagggcattcccttaacttctctaagtgcaacttgcaactacacccaatttcccccaccctcggctctagtgcattttctagctaagagacatacatgtgtgactcagagacatggtatccaaagaggtctggagcagaggcattgagcaggttctttttttttgagacaaagtctcgctgtcgcccaggttggagtgcagtggcgcgatctcggctcactgcaggctccgccccccggggttcacgccgttctcctgccgcagccttttgagtagctgggactacaggtgcctgctacctcgcccggctaattttttgtatttttagtagagacggggtttcaccgtgttagccaggatggt

SEQ ID NO: 78273 - DNA, 1753 bp, Homo sapiens
ataaggccgcatcattggctcagtctcaagagagggtgcgcatgacacttagctgctaacagtagcagccttcaaggcctgtgcccaccaagagcacatagatcaagttggctcttagagtctagtcacacatttatattgaaaggtagacaagccaccttctgggacttttccagagcttcaaatagtctcccttctctcagctcatcaagcttaaaatggttttctttgttagctttcagccacccttgccttccagactaaggagatttgaaactcctctccccaggttatggaagatacaaaggacttttcagttcaccatattttcctgaaagaaaatctctctgtctcataaaagcagccccaaaccacacaaaagcctgggggccgggagaatgagagagcccaagccaattctcccttcaatcactttaactcaactcgctgctgagaactgcgaggtgtcctgtgtctgatgattagcatcaggtgatgccagggtgccagacaattagcaaaataacctgccttattctaagaaggggactcatggcaatgaaattattgtcttaaaaataaatgtgttgattaggtctttgtatttatgcawgcactctcagaaaaagaaatagaggcatgcttctaaaaagggcattttcgaagaaaataccatcctcctcctcttgcccagccccacccacccaaaaaattaagcattattacattcaaatccactagggaacaacgaccaaaagtatgttaattccacttataatctctgttctatagttgtgcttgtcatcatctttttcttttcctgttctctagaggaaaactagaattgcctgaatttgagctattattttctgacaattttaaatcacagaacatttcttcttctgcaatgtttttatttgttctgtttgcacatcaagtagcctgtttcctctaaataacacagtatttactctaacacaacaagtagcttgggcgagtccagttctgttctcatttgccttacgggtgtctgaggtactggcttcaggttgtctggaagagaccccatgagggttcaggaggtcaacatctgaactacatctggggcctttggattagtatctacacatttgggttaagacaccttcaaaaagggatgcatgggagtcactcacattgtagctagtattatccgcattgagtgaagtagttggagtttaaggagggtcattcacacaggtggtagaagggctaagattcaaattcagatctgattggttctagaacctgcacactcaagtccttcatgatacatctcccctattagtaacatgtaacagacccagaatttctggctcaatgctccagaaagcaaggaaactctaggataaagggcattcccttaacttctctaagtgcaacttgcaactacacccaatttcccccaccctcggctctagtgcattttctagctaagagacatacatgtgtgactcagagacatggtatccaaagaggtctggagcagaggcattgagcaggttctttttttttgagacaaagtctcgctgtcgcccaggttggagtgcagtggcgcgatctcggctcactgcaggctccgccccccggggttcacgccgttctcctgccgcagccttttgagtagctgggactacaggtgcctgctacctcgcccggctaattttttgtatttttagtagagacggggtttcaccgtgttagccaggatggt

SEQ ID NO: 78274 - DNA, 1753 bp, Homo sapiens
ataaggccgcatcattggctcagtctcaagagagggtgcgcatgacacttagctgctaacagtagcagccttcaaggcctgtgcccaccaagagcacatagatcaagttggctcttagagtctagtcacacatttatattgaaaggtagacaagccaccttctgggacttttccagagcttcaaatagtctcccttctctcagctcatcaagcttaaaatggttttctttgttagctttcagccacccttgccttccagactaaggagatttgaaactcctctccccaggttatggaagatacaaaggacttttcagttcaccatattttcctgaaagaaaatctctctgtctcataaaagcagccccaaaccacacaaaagcctgggggccgggagaatgagagagcccaagccaattctcccttcaatcactttaactcaactcgctgctgagaactgcgaggtgtcctgtgtctgatgattagcatcaggtgatgccagggtgccagacaattagcaaaataacctgccttattctaagaaggggactcatggcaatgaaattattgtcttaaaaataaatgtgttgattaggtctttgtatttatgcatgcactctcagaaaaagaaatagaggcatgcttctaaaaagggcattttcgaagaaaataccatcctcctcctcttgcccagccccacccacccaaaaaatwaagcattattacattcaaatccactagggaacaacgaccaaaagtatgttaattccacttataatctctgttctatagttgtgcttgtcatcatctttttcttttcctgttctctagaggaaaactagaattgcctgaatttgagctattattttctgacaattttaaatcacagaacatttcttcttctgcaatgtttttatttgttctgtttgcacatcaagtagcctgtttcctctaaataacacagtatttactctaacacaacaagtagcttgggcgagtccagttctgttctcatttgccttacgggtgtctgaggtactggcttcaggttgtctggaagagaccccatgagggttcaggaggtcaacatctgaactacatctggggcctttggattagtatctacacatttgggttaagacaccttcaaaaagggatgcatgggagtcactcacattgtagctagtattatccgcattgagtgaagtagttggagtttaaggagggtcattcacacaggtggtagaagggctaagattcaaattcagatctgattggttctagaacctgcacactcaagtccttcatgatacatctcccctattagtaacatgtaacagacccagaatttctggctcaatgctccagaaagcaaggaaactctaggataaagggcattcccttaacttctctaagtgcaacttgcaactacacccaatttcccccaccctcggctctagtgcattttctagctaagagacatacatgtgtgactcagagacatggtatccaaagaggtctggagcagaggcattgagcaggttctttttttttgagacaaagtctcgctgtcgcccaggttggagtgcagtggcgcgatctcggctcactgcaggctccgccccccggggttcacgccgttctcctgccgcagccttttgagtagctgggactacaggtgcctgctacctcgcccggctaattttttgtatttttagtagagacggggtttcaccgtgttagccaggatggt

SEQ ID NO: 78275 - DNA, 1753 bp, Homo sapiens
ataaggccgcatcattggctcagtctcaagagagggtgcgcatgacacttagctgctaacagtagcagccttcaaggcctgtgcccaccaagagcacatagatcaagttggctcttagagtctagtcacacatttatattgaaaggtagacaagccaccttctgggacttttccagagcttcaaatagtctcccttctctcagctcatcaagcttaaaatggttttctttgttagctttcagccacccttgccttccagactaaggagatttgaaactcctctccccaggttatggaagatacaaaggacttttcagttcaccatattttcctgaaagaaaatctctctgtctcataaaagcagccccaaaccacacaaaagcctgggggccgggagaatgagagagcccaagccaattctcccttcaatcactttaactcaactcgctgctgagaactgcgaggtgtcctgtgtctgatgattagcatcaggtgatgccagggtgccagacaattagcaaaataacctgccttattctaagaaggggactcatggcaatgaaattattgtcttaaaaataaatgtgttgattaggtctttgtatttatgcatgcactctcagaaaaagaaatagaggcatgcttctaaaaagggcattttcgaagaaaataccatcctcctcctcttgcccagccccacccacccaaaaaattaagcattattacattcaaatccactagggaacaacgaccaaaagtatgttaattccacttataatctctgttctatagttgtgcttgtcatcatctttttcttttcctgttctctagaggaaaactagaattgcctgaatttgagctattattttctgacaattttaaatcacagaacatttcttcttctgcaatgtttttatttgttctgtttgcacatcaagtagcctrtttcctctaaataacacagtatttactctaacacaacaagtagcttgggcgagtccagttctgttctcatttgccttacgggtgtctgaggtactggcttcaggttgtctggaagagaccccatgagggttcaggaggtcaacatctgaactacatctggggcctttggattagtatctacacatttgggttaagacaccttcaaaaagggatgcatgggagtcactcacattgtagctagtattatccgcattgagtgaagtagttggagtttaaggagggtcattcacacaggtggtagaagggctaagattcaaattcagatctgattggttctagaacctgcacactcaagtccttcatgatacatctcccctattagtaacatgtaacagacccagaatttctggctcaatgctccagaaagcaaggaaactctaggataaagggcattcccttaacttctctaagtgcaacttgcaactacacccaatttcccccaccctcggctctagtgcattttctagctaagagacatacatgtgtgactcagagacatggtatccaaagaggtctggagcagaggcattgagcaggttctttttttttgagacaaagtctcgctgtcgcccaggttggagtgcagtggcgcgatctcggctcactgcaggctccgccccccggggttcacgccgttctcctgccgcagccttttgagtagctgggactacaggtgcctgctacctcgcccggctaattttttgtatttttagtagagacggggtttcaccgtgttagccaggatggt

SEQ ID NO: 78276 - DNA, 1753 bp, Homo sapiens
ataaggccgcatcattggctcagtctcaagagagggtgcgcatgacacttagctgctaacagtagcagccttcaaggcctgtgcccaccaagagcacatagatcaagttggctcttagagtctagtcacacatttatattgaaaggtagacaagccaccttctgggacttttccagagcttcaaatagtctcccttctctcagctcatcaagcttaaaatggttttctttgttagctttcagccacccttgccttccagactaaggagatttgaaactcctctccccaggttatggaagatacaaaggacttttcagttcaccatattttcctgaaagaaaatctctctgtctcataaaagcagccccaaaccacacaaaagcctgggggccgggagaatgagagagcccaagccaattctcccttcaatcactttaactcaactcgctgctgagaactgcgaggtgtcctgtgtctgatgattagcatcaggtgatgccagggtgccagacaattagcaaaataacctgccttattctaagaaggggactcatggcaatgaaattattgtcttaaaaataaatgtgttgattaggtctttgtatttatgcatgcactctcagaaaaagaaatagaggcatgcttctaaaaagggcattttcgaagaaaataccatcctcctcctcttgcccagccccacccacccaaaaaattaagcattattacattcaaatccactagggaacaacgaccaaaagtatgttaattccacttataatctctgttctatagttgtgcttgtcatcatctttttcttttcctgttctctagaggaaaactagaattgcctgaatttgagctattattttctgacaattttaaatcacagaacatttcttcttctgcaatgtttttatttgttctgtttgcacatcaagtagcctgtttcctctaaataacacagtatttactctaacacaacaagtagcytgggcgagtccagttctgttctcatttgccttacgggtgtctgaggtactggcttcaggttgtctggaagagaccccatgagggttcaggaggtcaacatctgaactacatctggggcctttggattagtatctacacatttgggttaagacaccttcaaaaagggatgcatgggagtcactcacattgtagctagtattatccgcattgagtgaagtagttggagtttaaggagggtcattcacacaggtggtagaagggctaagattcaaattcagatctgattggttctagaacctgcacactcaagtccttcatgatacatctcccctattagtaacatgtaacagacccagaatttctggctcaatgctccagaaagcaaggaaactctaggataaagggcattcccttaacttctctaagtgcaacttgcaactacacccaatttcccccaccctcggctctagtgcattttctagctaagagacatacatgtgtgactcagagacatggtatccaaagaggtctggagcagaggcattgagcaggttctttttttttgagacaaagtctcgctgtcgcccaggttggagtgcagtggcgcgatctcggctcactgcaggctccgccccccggggttcacgccgttctcctgccgcagccttttgagtagctgggactacaggtgcctgctacctcgcccggctaattttttgtatttttagtagagacggggtttcaccgtgttagccaggatggt

SEQ ID NO: 78277 - DNA, 1753 bp, Homo sapiens
ataaggccgcatcattggctcagtctcaagagagggtgcgcatgacacttagctgctaacagtagcagccttcaaggcctgtgcccaccaagagcacatagatcaagttggctcttagagtctagtcacacatttatattgaaaggtagacaagccaccttctgggacttttccagagcttcaaatagtctcccttctctcagctcatcaagcttaaaatggttttctttgttagctttcagccacccttgccttccagactaaggagatttgaaactcctctccccaggttatggaagatacaaaggacttttcagttcaccatattttcctgaaagaaaatctctctgtctcataaaagcagccccaaaccacacaaaagcctgggggccgggagaatgagagagcccaagccaattctcccttcaatcactttaactcaactcgctgctgagaactgcgaggtgtcctgtgtctgatgattagcatcaggtgatgccagggtgccagacaattagcaaaataacctgccttattctaagaaggggactcatggcaatgaaattattgtcttaaaaataaatgtgttgattaggtctttgtatttatgcatgcactctcagaaaaagaaatagaggcatgcttctaaaaagggcattttcgaagaaaataccatcctcctcctcttgcccagccccacccacccaaaaaattaagcattattacattcaaatccactagggaacaacgaccaaaagtatgttaattccacttataatctctgttctatagttgtgcttgtcatcatctttttcttttcctgttctctagaggaaaactagaattgcctgaatttgagctattattttctgacaattttaaatcacagaacatttcttcttctgcaatgtttttatttgttctgtttgcacatcaagtagcctgtttcctctaaataacacagtatttactctaacacaacaagtagcttgggcgagtccagttctgttctcatttgcyttacgggtgtctgaggtactggcttcaggttgtctggaagagaccccatgagggttcaggaggtcaacatctgaactacatctggggcctttggattagtatctacacatttgggttaagacaccttcaaaaagggatgcatgggagtcactcacattgtagctagtattatccgcattgagtgaagtagttggagtttaaggagggtcattcacacaggtggtagaagggctaagattcaaattcagatctgattggttctagaacctgcacactcaagtccttcatgatacatctcccctattagtaacatgtaacagacccagaatttctggctcaatgctccagaaagcaaggaaactctaggataaagggcattcccttaacttctctaagtgcaacttgcaactacacccaatttcccccaccctcggctctagtgcattttctagctaagagacatacatgtgtgactcagagacatggtatccaaagaggtctggagcagaggcattgagcaggttctttttttttgagacaaagtctcgctgtcgcccaggttggagtgcagtggcgcgatctcggctcactgcaggctccgccccccggggttcacgccgttctcctgccgcagccttttgagtagctgggactacaggtgcctgctacctcgcccggctaattttttgtatttttagtagagacggggtttcaccgtgttagccaggatggt

SEQ ID NO: 78278 - DNA, 1057 bp, Homo sapiens
gcatcacttacttcttctctctaacacccactctgttctatagcaatgctttgtgttctctcttttacaaggtaaatactgagaaaaagaagtgggaggcgattttcagcaaaagacagtattaaagcagttaaagctgcaggcacatgaaaagcattagaatctgtgggctgttttcatacctgactcagtcctaagaagttaattaaagcatggcaatcctaccgacttcacagaatagtggatgtcctaggagcataagttcttctagttgctagttaagatcaaggagaatactagtgtgtgcttttgtggttgcacacttgcgttggtgtttgtatgtgtgttttctttggatggtttactttattttttattgtaatggtgattacattcaaataaaaatttttcaaccctacttccatgataaaaatatatatattttataagcaatagtgagcattgaagtcagtgaagataataatagttgtcattctcagaaaagaaaaaacgagtatttaatctggatgaatctgggaatatgagagcagaggacttaggtgacctctatagattccactgagaagttttacatcccaattcctgtaaaaatataaagaatgattactgtgtgtctcaatactttaccctgtgagatgataaataagccttcaggagttccaggaaagtgatagagggtattaagtcagaggctcactaggagacacactgacacctaagatacaaagcaaatacaataaaacatacaaaaaaagtgctcagaaatgtttccttaatgtatcaattccctctaattcttctgtggctagtaacaattgtctccacaggttgaaaaagagaaaagtgagccaaccctattatgttaaaatatgaaaaataatctactmtaaacttttttaaatgcactttatctgttaaaaataaaaataactggctattcaagtgggtcaacatctgaataaaatataattattttaacaaaaaacatgttcatattcaaaagcaaatttttataaacattccacatgcatgttga

SEQ ID NO: 78279 - DNA, 1534 bp, Homo sapiens
ggggctgatggatctgaagcacggggaatgcaaggcccacgtgtgcacccgtgtgcctgtgggttaccaaagctgaggaaggtgtccaagcccaggacagcattgcagtaaggacagcgcagcctggggaggcctgggccatgagggtggggctgcgcgggaccagcaggtcctcctggtgggagggggagagcccagtcagattccctgcatggacacacgggttgggcctacacaggctccacaacacagaggaatgagccatccccagacccagaggagcaattaaaaaatagagagtgcgggctgggcgcagtggctgacgactgtaatctcagcactttgcggggctgaggcgggcgggtcacaargtcaagagattgagaccatcctggcccacatggtgaaaccccgtctctactaaaaatacaaaaatcagccgggcatggtggcgcatgtctgtagtcccagctactcgggaggctgaggcaggagaatcacttgaacacaggaggcggaggttacagtgagctgagatcgtgccactgtactccagactggttacagagcaagacttggtctcaaaaaagaaagaaaaaacaaaacaaaacaaaacaaaaaaacaagaaaccaaaaaaaaagaaaaacagagtgcggaccctaaaagatgtgaaaactgattcaaacagctatttgtacaccgctgttcacagcaccagccaaagggtggcaacaactgaagtgtccaccaacaggtgaatgaatccatacattgtggctccaccgtgcaatggaacatgacccaaccgtgaaaggagtaaagcgctgacccactgcaacgtaaatgaaccttgaagatgtcacgctgagtgaaagcactgagtgaaggaagccaggcccaagaggcaccaataacatgaccctgttcataggaactacccggaactgaacagaaagcaaacgagtgactttcagagacagggggaaggtggatggggagggactcatgcgtatgaagttgcatttagggtgaggaaaatgttttgaaactacatggagttggtggctataaaacactctcaatgtactaaacaccactgagtcgtttactctaacacagttagcttgaggttacgtgaatttcatctcagtttaattttttaaaaactgtgctgcctgagaaagatgccagctgcctgctggctctctggctggcccctatgagcccagggggagatgtgaccctctgcccaccgtgtgtgggtataattcgttgtcaagggcgtctatagccaggtcacagccacatcctgcaccacccagtcccctccatctcagggtgttcatccccacatatcaggaaggtctgcattggaaacagcctttctgtgcaaccaggagcatctgagatcccattttcattccctgtattgatttccgggcagtctgcccagagtggacgctgctgtgtgtcccccagggaacagcatggagcgtcaccatcagcaaagccatccaacaatggcactgtcgg

SEQ ID NO: 78280 - DNA, 1534 bp, Homo sapiens
ggggctgatggatctgaagcacggggaatgcaaggcccacgtgtgcacccgtgtgcctgtgggttaccaaagctgaggaaggtgtccaagcccaggacagcattgcagtaaggacagcgcagcctggggaggcctgggccatgagggtggggctgcgcgggaccagcaggtcctcctggtgggagggggagagcccagtcagattccctgcatggacacacgggttgggcctacacaggctccacaacacagaggaatgagccatccccagacccagaggagcaattaaaaaatagagagtgcgggctgggcgcagtggctgacgactgtaatctcagcactttgcggggctgaggcgggcgggtcacaaggtcaagagattgagaccatcctggcccacatggtgaaaccccgtctctactaaaaatacaaaaatcagccgggcatggtggcgcatgtctgtagtcccagctactcgggaggctgaggcaggagaatcacttgaacacaggaggcggaggttacagtgagctgagatcgtgccactgtactccagactggttacagagcaagacttggtctcaaaaaagaaagaaaaaacaaaacaaaacaaaacaaaaaaacaagaaaccaaaaaaaaagaaaaacagagtgcggaccctaaaagatgtgaaaactgattcaaacagctatttgtacaccgctgttcacagcaccagccaaagggtggcaacaactgaagtgtccaccaacaggtgaatgaatccatacattgtggctccaccgtgcaatggaacatgacccaaccgtgaaaggagtaaagcgctgacccactgcaacgtaaatgaaccttgaagatgtcacgctgagtgaaagcactgagtgaaggaagccaggcccaagaggcaccaataacatgaccctgttcataggaactacccggaactgaacagaaagcaaacgagtgactttcagagacagggggaaggtggatggggagggactcatgcgtatgaagttgcatttagggtgaggaaaatgttttgaaactacatggagttggtggctataaaacactctcaatgtactaaacaccactgagtcgtttactctaacacagttagcttgaggttacrtgaatttcatctcagtttaattttttaaaaactgtgctgcctgagaaagatgccagctgcctgctggctctctggctggcccctatgagcccagggggagatgtgaccctctgcccaccgtgtgtgggtataattcgttgtcaagggcgtctatagccaggtcacagccacatcctgcaccacccagtcccctccatctcagggtgttcatccccacatatcaggaaggtctgcattggaaacagcctttctgtgcaaccaggagcatctgagatcccattttcattccctgtattgatttccgggcagtctgcccagagtggacgctgctgtgtgtcccccagggaacagcatggagcgtcaccatcagcaaagccatccaacaatggcactgtcgg

SEQ ID NO: 78281 - DNA, 587 bp, Homo sapiens
tagttaatatatctgagctggtactttctttgccaaatctttctctttttccattgtgttgtgaatgcctaccttgcaacatatttgaaatatagaatgaatgaaaacaaacaagaaaaataccccaaacattttaatgaacacaaggattttaaaaaatatatccgtttcaatagataccataatagacccataggtggggcaaagcgaatgttagtcagatacattaatttwaaaaaaatgaattttattgcaatatgtatttaagtattagaagaaagaaatgaatgtacaccacgatacatatagtacttcattttattctcaatcaaccatgtaatgttggtgttatgatgcttctttgcctcatgagtaacttgaggttgcacagatctttataaattctaaaaagctttcattgagaataacaaccatgcctcaaacgtttcagtatagccggtgtttattaggtggttttaagactcaggctatgcaattttcttaatacacattttttttaatccgactttcctttattacttagacaggtgttctgtaggtaacggttttctgtatgctgctgaagc

SEQ ID NO: 78282 - DNA, 672 bp, Homo sapiens
agaggctctgtgatgcagaaatctagctacaagccaccgggcctcccaagcccaagcccatacttggcccatccttcatacagggctcagagaggccaagggaactgcctgaggccacacaggaagcaagaccaggctttgaagccccaagagtaacatgagggcaggaacctgtaaggcagagagtcctggaactgtgagccattggtcactgggtttttttcttttgagacaggatcttgctccattgcccaggctggagtgcagtggtgtgatcatggcttactgcagccacgacctccctggctcaagtgatcctcccaccttagcctcccaagtagcaggtcaytgggcttttctccatggtgatagatgtagttagcatttcaggaccaaaaaccttctgtatgtcagcactgaagacctccaggcctagatcctgcagtctgtagcccactttgcccccatacctccccaccctaaccatagcagcttcacattgccccaccccgatcccctctctgtccagccctgggctggggtgtgtctgggtccaggtcctgcatggattgggggaaggcggatggttcaaatgggagaaaataccttacactttaattaatttaatgaatgtttgtcaaatcgcctgcttcttggaacatgtagaactaa

SEQ ID NO: 78283 - DNA, 567 bp, Homo sapiens
actggttgtttaaatagcttaaaatagcttaaatagcttaaaataatagctatctcatactttctgagaaattaattaggtaattcacataaaatcctcattacagtgtcctgggccatggtaaccacttaataaaagttagctattaacaatactaaggtaggaaatgggagraaggggcataaaaatttagaaaacatgaggacgtgatagaaaacagctgccactgtcatgcaattccgacttacaacaatagctaccactgaggaacacaacttcgcaccagtttctgtgattggcatgtaacacgtgatcatattgaattttcacaaaccaggagacagttaataaaatctctgattcaagatgaggaaaatgagcatcagaaccatgaaataacctgcctgaagctatgagtcaagttagtagccgagtcagagcaagctgaggcctatggcaaaattggcttttcccaccgtgccgaaggttacatcccctagcagagaacagagagaggtaagggtaaaacagcatgaaaggaagaagagaaagagcagtaggcagacg

SEQ ID NO: 78284 - DNA, 567 bp, Homo sapiens
actggttgtttaaatagcttaaaatagcttaaatagcttaaaataatagctatctcatactttctgagaaattaattaggtaattcacataaaatcctcattacagtgtcctgggccatggtaaccacttaataaaagttagctattaacaatactaaggtaggaaatgggaggaaggggsataaaaatttagaaaacatgaggacgtgatagaaaacagctgccactgtcatgcaattccgacttacaacaatagctaccactgaggaacacaacttcgcaccagtttctgtgattggcatgtaacacgtgatcatattgaattttcacaaaccaggagacagttaataaaatctctgattcaagatgaggaaaatgagcatcagaaccatgaaataacctgcctgaagctatgagtcaagttagtagccgagtcagagcaagctgaggcctatggcaaaattggcttttcccaccgtgccgaaggttacatcccctagcagagaacagagagaggtaagggtaaaacagcatgaaaggaagaagagaaagagcagtaggcagacg

SEQ ID NO: 78285 - DNA, 749 bp, Homo sapiens
tcataccagggttgtggggaagacacagagagatttaaaaaacaaamcaaattaaaaaacccaattggcaccactaagagctaccaaatagctctattttaccgaatagaaagcacatgcccctccctaacccattatttttgcttctgcagtttcctaccaccagctgcttttgctgccactgcctccaccacaagactgttggggagccggggcatgacaaaagtgagataaaggaggcacacaaggtaggggatttccccctccctcttagcttcaggacttcccttttctccttgggccacagctagaggtcatctctttctctttccttctgagatccactgctaacatctggatctgggactgcattaaattcacgctggataattggtccagttttgtcatgacccagctccaggggatctatggatagagacagtcagcagttggcactgggaaactgcaggagccaatctgatgaatgaggagaatggctttcctgtttgtcgaagctgtagctttacttttctgagacttcaactagctttaccatatatttcatatttgtgttcagtggaagagaaacgttgaagtgtttttattctaacttattcagaaccggaactcatttaagttttgcaaagcacgctgaccatagtttctccaagtatgtgagtagtacacaaccacgtgcagaaaattataaacatataaacacaaaaagatatgcccagagaaaataagga

SEQ ID NO: 78286 - DNA, 2102 bp, Homo sapiens
atatgcattttccctctccaaaccactaacggcagagcaaggtctttacaggaaatggccccaagccgaggagcctaatggaagcttcatttattatggttttaagccagacatcctccccagctggcctctagcaactggccaagcagaaaaagaaaacaaacctttttaataccagcccccaaatctctgattgagctcatactgcaatgttacctgaataagaaccgcaaggtaggaaagaggttctcagaatggaacagcataattttacagagcattttagagctattcagtaacactgactcggattgtttctcaaacttcttttttaatataaatgggacaaaaaggtctggctttcacaatctagtatcaatccaaataacagactagcaagcagtcactagtcagaatgtgtcattactggatatttttttaattaaccatcaagatttgtttttcttaccagtcraaaggaaatttcatatcacgtcattttaacatgagggaaaaagaataacaaaaatagggtcaataatagtaaaaaatctgatggtgtatgcctaccttatgataaagataaaggcaaatgtaattatatagacagattattctgcactttaatagaactgggaaaagaatttatataccttggtgcatttaattatgcttgcggcaaaaacaaatctctcctcttttctaaaggagattatccttcataaaaagctctctctagatcatttccagaggataaacaaaccatttccctgcttttaagataaatttggctcttttcttccaaaacacagattccctatctaccatttcaactttttactaaatgtgtaatctaattacaggtggagaatcatttcatatactagacatactatttaaaattataccacgtggacagaaaccccttcaaaattaagatcaactaaaagaaccggatgaaattttcagccccaccatccatgttcttggaaggaaacataatgcattaatagagaagtaagatcctatcttctctggttaatgactagaagtgggacagggtatgacccctagaaatctcagtcatttgaaaagaccctagaactgcttacctctttttcagtcattccaaattcatatagtgtgcttggagaagtttggagaaaaggaaagggaggaaggagctagggtttcggaaacattcagacacttacacatccactttaattccaatctctgatgagatatttacagttactatcttgccctgaaatgaccagaatgaattcaataaaatgtgtaagtgacttttaagtgaaccctaacgaagttaatgtaccattcaacaaaaaaaaaataaattgtgaagcaaagcataattagctagtctgaggttgctatgtttttaaaggtctgcctgcaaggttggcccttacctggcatcagtaacttggattttgggagattccccaccacgctaagtgataagagtgggtcactatgcacaaactgtatgcaaacaacttggtttatactaattatctgccttccttctgagagtctagaatttgagcacatgttaggtagaggtgcctttgtgaccagctcccaataaaaagctccctaaggaactttcctggtggaaaacatttcacacatgttgtcaaactcactgatgcaggaattaaacatgtcctgtgtgactccacagagagagaactcttggaagtttatgcctgggttcttccagattttctcatccacttttctctttgccactattattttttccctgctattcctgtggtaaatcatagctgtaggaggaaaggttgagtcctcctagagaattaccaaagctgagagtggtcttagagacctgaaccctgaaatattaatcaaaattttaaaatttcaacaaaaatacaaagtgggcttcaacactatactacctgccttaactgagatcttacctaatctttttaaaaacttttttatcctaaatagttgtaaaggccttttagtgttctaaccctgctatttttcatatacctcagcccataatcattttcagatccctgggccaataagctccaaagatt

SEQ ID NO: 78287 - DNA, 2102 bp, Homo sapiens
atatgcattttccctctccaaaccactaacggcagagcaaggtctttacaggaaatggccccaagccgaggagcctaatggaagcttcatttattatggttttaagccagacatcctccccagctggcctctagcaactggccaagcagaaaaagaaaacaaacctttttaataccagcccccaaatctctgattgagctcatactgcaatgttacctgaataagaaccgcaaggtaggaaagaggttctcagaatggaacagcataattttacagagcattttagagctattcagtaacactgactcggattgtttctcaaacttcttttttaatataaatgggacaaaaaggtctggctttcacaatctagtatcaatccaaataacagactagcaagcagtcactagtcagaatgtgtcattactggatatttttttaattaaccatcaagatttgtttttcttaccagtcgaaaggaaatttcatatcacgtcattttaacatgagggaaaaagaataacaaaaatagggtcaataatagtaaaaaatctgatggtgtatgcctaccttatgataaagataaaggcaaatgtaattatatagacagattattctgcactttaatagaactgggaaaagaatttatataccttggtgcatttaattatgcttgcggcaaaaacaaatctctcctcttttctaaaggagattatccttcataaaaagctctctctagatcatttccagaggataaacaaaccatttccctgcttttaagataaatttggctcttttcttccaaaacacagattccctatctaccatttcaactttttactaaatgtgtaatctaattacaggtggagaatcatttcatatactagacatactatttaaaattataccacgtggacagaaaccccttcaaaattaagatcaactaaaagaaccggatgaaattttcagccccaccatccatgttcttggaaggaaacataatgcattaatagagaagtaagatcctatcttctctggttaatgactagaagtgggacagggtatgacccctagaaatctcagtcatttgaaaagaccctagaactgcttacctctttttcagtcattccaaattcatatagtgtgcttggagaagtttggagaaaaggaaagggaggaaggagctagggtttcggaaacattcagacacttacacatccactttaattccaatctctgatgagatatttacagttactatcttgccctgaaatgaccagaatgaattcaataaaatgtgtaagtgacttttaagtgaaccctaacgaagttaatgtaccattcaacaaaaaaaaaataaattgtgaagcaaagcataattagctagtctgaggttgctatgtttttaaaggtctgcctgcaaggttggcccttacctggcatcagtaacttggattttgggagattccccaccacgctaagtgataagagtgggtcactatgcacaaactgtatgcaaacaacttggtttatactaattatctgccttccttctgagagtctagaatttgagcacatgttaggtagaggtgcctttgtgaccagctcccaataaaaagctccctaaggaactttcctggtggaaaacatttcacacatgttgtcaaactcactgatgcaggaattaaacatgtcctgtgtgactccacagagagagaactcttggaagtttatgcctgggttcttccagattttctcatccacttttctctttgccactattattttttccctgctattcctgtggtaaatcatagctgyaggaggaaaggttgagtcctcctagagaattaccaaagctgagagtggtcttagagacctgaaccctgaaatattaatcaaaattttaaaatttcaacaaaaatacaaagtgggcttcaacactatactacctgccttaactgagatcttacctaatctttttaaaaacttttttatcctaaatagttgtaaaggccttttagtgttctaaccctgctatttttcatatacctcagcccataatcattttcagatccctgggccaataagctccaaagatt

SEQ ID NO: 78288 - DNA, 1030 bp, Homo sapiens
ctggtgtgaaaaagaatatgtttcacaaatggtgcatatttttaagccataaaatccagacaaatttttcagaaacaaagcaaaatattttaaagaaatcatcacatctaccaaagagcaagaaagaaaatttaaattcaaatacctatctttcaaataagtatattayaccatttatctttctcttgcttctaaaacatcaagccagtagtttctttcataacataatcattcaaagcatgtccccagctcctacccatattaacagaaacagcaaacacctattgtctatccaaagagcaattacacctcctccaagcagacaggaaaactcactaattctaacatgctacaagtagttttactgataacctctagagatttgcaaccaatttcaaaacatatacccaaatataatcacatcattatgcccttaaggtagtctcatgtaagaatacaagtatcatgcttccttcaattaaaagagatgagagaataatataattggaagagcagtgagtagagaaatccaatttttggacaacctaatgtgtggtatatcttgcaaagcttatcaaaattgtttagatggggagtttcctgtaaattattaattccatcatctggatttaaaactatgtaactagtagaaaggataacttttttatgcacacacactctcgtctcacatacatacacacaaatagcatatgaagtactgttgtaactgactggtaacactgttgtgattgactggtaatacaaccaagtgttaccagtcaattacaacttctttgccattgctgttttaaaatactaatccagtcatctgatacacatattgacacctaagtaacgatgggatattccagccactagggatatatcagtgaacaaggcagagtacttgcttacatgaaagttatgtactacttggaagagacagacaataatttctgtctgtctgtgatggtaaagggaagagaaacaaccgagtggaaacaaagggtggctgtggacagccaagcat

SEQ ID NO: 78289 - DNA, 1030 bp, Homo sapiens
ctggtgtgaaaaagaatatgtttcacaaatggtgcatatttttaagccataaaatccagacaaatttttcagaaacaaagcaaaatattttaaagaaatcatcacatctaccaaagagcaagaaagaaaatttaaattcaaatacctatctttcaaataagtatattacaccatttatctttctcttgcttctaaaacatcaagccagtagtttctttcataacataatcattcaaagcatgtccccagctcctacccatattaacagaaacagcaaacacctattgtctatccaaagagcaattacacctcctccaagcagacaggaaaactcactaattctaacatgctacaagtagttttactgataacctctagagatttgcaaccaatttcaaaacatatacccaaatataatcacatcattatgcccttaaggtagtctcatgtaagaatacaagtatcatgcttccttcaattaaaagagatgagagaataatataattggaagagcagtgagtagagaaatccaatttttggacaacctaatgtgtggtatatcttgcaaagcttatcaaaattgtttagatggggagtttcctgtaaattattaattccatcatctggatttaaawctatgtaactagtagaaaggataacttttttatgcacacacactctcgtctcacatacatacacacaaatagcatatgaagtactgttgtaactgactggtaacactgttgtgattgactggtaatacaaccaagtgttaccagtcaattacaacttctttgccattgctgttttaaaatactaatccagtcatctgatacacatattgacacctaagtaacgatgggatattccagccactagggatatatcagtgaacaaggcagagtacttgcttacatgaaagttatgtactacttggaagagacagacaataatttctgtctgtctgtgatggtaaagggaagagaaacaaccgagtggaaacaaagggtggctgtggacagccaagcat

SEQ ID NO: 78290 - DNA, 620 bp, Homo sapiens
ctgagtcggggaggaattttygcatacccttattgcccctgaggaacaggagaagtttccgtggccagaatccccaggaaaggcactcaaggttccttgggtagagaaaacagaagtgagaagacaacatgagaggtacaggtggagccttttcatatattccagagataaagcaaatgacctcactggtgaacagccaaaggggaagagaaagtggttgaaggagattaagaacagggcagagatcagaaggttccttacccaatgtatgatctggaaaggacaattacatggtgatgtggagggcattcagtgcacaagggtgagactaagccatctgctattcctgtccaaacaataacaatagtttacaaatgactgaatcaggacaggcgcactcttccctacagtagagacctggggaagcctttacaagcgatcatgtccatcaaaaagcagtatccttcaccaaatgatcatacagcaataacctgaacaaaagggcaacaagcttcaaagtagaaataatcatcacagaggttaaaccaaccttgggccaggtttgtttttggagttcagaaatttaagaatttagagagtgtatcatatattacacaata

SEQ ID NO: 78291 - DNA, 497 bp, Homo sapiens
ctgaggaaggcagccccagtctccggtggagaattaagaggggcccaagcagatggttggtggtggaaacgtcacctcagtatagtactatggagtttcctttcacccccaacagccgacggtttccaggggcgaagagtgaaaattgaagcaaggtgtstactgtccaggtgagagccacatcctatggctgagggcctgggggcattggggaccaccaagaatgaatacttttccaattaagtgaagtcttttgcacaatattcctgaccaatagctaatgttctctgagagagtcagagcttcagcccgtgaaagggcgagggaacttgtaggaagatatatgtgagtacagatgtgaggagaacatgctgaagtagcccaggggctcagttgaagctgaggactggtggttctggtggctgtgctgggggtgggggtggcagtgtgagatggaagtgagtgagcaggttgggtgggaaagaggaagaaaccta

SEQ ID NO: 78292 - DNA, 497 bp, Homo sapiens
ctgaggaaggcagccccagtctccggtggagaattaagaggggcccaagcagatggttggtggtggaaacgtcacctcagtatagtactatggagtttcctttcacccccaacagccgacggtttccaggggcgaagagtgaaaattgaagcaaggtgtctactgtccaggtgagagccacatcctatggctgagggcctgggggcattggggaccaccaagaatgaatacttttccaattaagtgaagtcttttgcacaatattcctgaccaatagctaatgttctctgagagagtcagagcytcagcccgtgaaagggcgagggaacttgtaggaagatatatgtgagtacagatgtgaggagaacatgctgaagtagcccaggggctcagttgaagctgaggactggtggttctggtggctgtgctgggggtgggggtggcagtgtgagatggaagtgagtgagcaggttgggtgggaaagaggaagaaaccta

SEQ ID NO: 78293 - DNA, 497 bp, Homo sapiens
ctgaggaaggcagccccagtctccggtggagaattaagaggggcccaagcagatggttggtggtggaaacgtcacctcagtatagtactatggagtttcctttcacccccaacagccgacggtttccaggggcgaagagtgaaaattgaagcaaggtgtctactgtccaggtgagagccacatcctatggctgagggcctgggggcattggggaccaccaagaatgaatacttttccaattaagtgaagtcttttgcacaatattcctgaccaatagctaatgttctctgagagagtcagagcttcagcccgtgaaagggcgagggaacttgtaggaagatrtatgtgagtacagatgtgaggagaacatgctgaagtagcccaggggctcagttgaagctgaggactggtggttctggtggctgtgctgggggtgggggtggcagtgtgagatggaagtgagtgagcaggttgggtgggaaagaggaagaaaccta

SEQ ID NO: 78294 - DNA, 949 bp, Homo sapiens
gcaacacggaggggtttaaccgataaccaagtgtgtcgtctcatttaaaaggaactctagcggtcaggggcctcagacaaaggactcagatctttccatctttctgcttcatcttttggagcattggtgacatcttaaggctgattcttcttgtggctgcctgccagtaacagtcagggctccattcccccttgctcatgtttgggggaagtagaatgagggagaggaagtctagcttgtcttgtggctctcttttaagagaagaaagttttcttccaaaaaactcccatcaaacatctcaccatgtctcagacggtgtcggcatcttatctctgaagccgtcattggacaaaaggaggggatttctgcatttggcttgaaccaggggctctcaaaatggagtctgtagaccagcagcaacagccccattttgaaatgaaaattctcaggtccccaccccagacctgctgaatcagaaacactaagaatgagaaacttctggtggttctgatgcctgctcaagtttgagactctctggctcagaacccactgctggagctgagtgagtttatatctcttgaatcacaccggctgctaaaggaagagatggacagctaaacacagctgaggttctgcagggaggaggggagaaatgcacactttgttgggaggtaccaacaatgtctgctatgtaggataaatgatccctaagttaaaggccagatgacattttaatcctaatttatgtttctttcaacttttattttagaattgagggtagatgtgcaggtttgttatagtacatagatatattgtgtgatgctgaggtttggagtacaaatgattttgtcacccaggtagtgagcatggtacccaataggtagttttaaaattctcaycctcttcacaccctccaacctcaagtaagcactggggtctggtgttcccc

SEQ ID NO: 78295 - DNA, 813 bp, Homo sapiens
acccaccccatttgcacacagacccacggctcgctgctgcggctgcaccaggtgaccccggccgactcaggcgagtatgtgtgccatgtggtgggcacctccggccccctagaggcctcagtcctggtcaccatcgaagcctctgtcatccctggtgagtgactcccagtgacatggaaagctggaggaggcagagaggcctccggggtggtgagatccaagggacccctcttgctgacagggcagaaggcccacaccggagctggctgcagggccctgcccaggccgactccacctgtcagagtaaccaccgccttcccgtcacactttgctttggccacatgactcctcaggcgtcccctcccacctcctcttcctctctccaactcatctctgccctcatctctctcacttcctcactcccctctgcaaggcrtgcccatgccctggtcctcccatcagggttgctgagctgagggcatcaagtccaggcccccagatgcctgaaaagctggatctggccttgaaaccctgggctgagctagctgcagggtgggcaacccctgccctctcatctcaggagcatctacaactctcactcccatccccactgctgcaggacccatcccacctgtcaggatcgagtcttcatcctccacagtggccgagggccagaccctggatctgagctgcgtggtggcagggcaggcccacgcccaggtcacatggtacaagcgtgggggcagcctccctgcccggcaccaggtacagggcaccaagaatgtgggacggggccatggacagtgggttgca

SEQ ID NO: 78296 - DNA, 443 bp, Homo sapiens
tccaccacctctactggccactccagcatcagcctctgtcccctattgatgccaacagcctttccatccaggaggaataccaagaatatgagaacctaggtcctggccaattctattcttcagccttaacaggcaacaaaaccaaggaaaaatatatagaatcaaaaaaaacaaaaaacaaaaaccccccaatraacaaaaacaaaaccctcaaaacaaaaggaggggcaactacgtaaggatgagccagagttcccaggagggcggcgggtagactcagtgccgccgcatcttcacctttcgggcagggctgcctgctgcctcagagcagtcctctgaggactcgtatgacttgcgccagtagttctcagagctgaagctacccctccgccggtgtgtgggcagcagcaccgagcgccggttctcttccttgtccatctcca

SEQ ID NO: 78297 - DNA, 818 bp, Homo sapiens
tgggctttgtggtgggggctgctgggtcagcagcacgagggtgaggggccctggggatgaggacagggccaggctttgtgctcaccagccacctgctgtcaggtgttcacactgcccaaggtgagcgcgaagaccaagttcaagctgacggcccatgaggctgtcgtgtgcgcaaggtggcactggccacgtttgccagtgtggcctgcgaggactatgctgagacctgcctggcctgcctcaccaacctgggtgacgtccacgtcttctcggtgcctggcctgcggcccaggtgcactattcctgcatccggaagaggacatcagcggcatccttcgtgcgtctttacgcgccatggccagggtgaggcggggcagaggccgaggagctctcctcaggcgagcgaactgagtgggaccagtactgcttgggagcaggaagggcactccaggtgggcacaggcccaggccacggaggagctgtggttggtggtatcttctaactgcactcctcattcttctgcccacccaggcttttacctgatatccccatcagaatttgaacgcttctccctaagtgcccggaacatcacagagccgctctgctctctcggacattaactggccccgcgatgccacccaggccaggtgtgtggaggggcagctcctagcctgggggacctgtgcccagggccaggtctcatcccacccccragatctgccttccctgggctcaggagtgggagggcaaggatctagcgtgccagcctcaagtcatccacctatggtccccatcatggccccatctctgcagttaca

SEQ ID NO: 78298 - DNA, 694 bp, Homo sapiens
caaggtccactctgcctagcccagtgtctacccctccaggcccaactagccccagaccacacttgagactctggcccctctctcttcagaccctcgcactagtttttagaccaagcctgggccagttacttgccccactctggagtctctcttctctggtaaatgtggaggtaagcagyttatccaagtttccacagcaagaatttggccaagcagactagctctgagcactagaacagagtaagagactctagatagaagccctttaccaggcatagggagccaggtctgaagtctggagggactatagccctctggccccagccttacccattgaaaaacatctgcttcatgccagtacctgcactccacactatcatgagcatcttgaaaggagggaccagagttttgctcactattggggtcccagtgtggcttggtatacaataggaactcaagaatttttttttttgtttttttgagacaaggtcttgctctgttgcccaggttggagtgcaatggcacaatctcggcttactgcaacctgtgcctcccaggctcaagcaattcttgtctgtctcagtctcactagtagctgagaccacagctaaacgcacctggctaaatttttgtatttttagtagagatggggttttgccaagttgcccatgctggtcttgaactcctgagctca

SEQ ID NO: 78299 - DNA, 722 bp, Homo sapiens
ctcagttaggatttgtgtctcaaatacctctggcctctgatttgcccatagtcctcatacaggaaataacaagactgtccagaatcttcgtaagcctggattgctcaccagctttcatttcagctcctgtaggcatctcctgaattaagcaacacagaaaagtcctctgaagtcactgaatcccakaaaggctctctacctttagcacaagggaggtctttaccactggacaaagaaggacgataagggtaagtacaagaactctcttcttccacagtcagttatgatttttgctgtaagatcatgtccttatgcttccaccttggtgctacatgcagggggtcacgagcttgtttcaggaaaagacaggagacatgaagcttcctttcagaaactgagtgctgtcaacccaaactgtgtgagctctaaatggtgtccccccttctaatttatctccccatatcacctccttcattccaatcattcaatctgccctcatggagagactgctgcctcttacattcatttaacgagcaaggggacatgcaggcatttcttcccagagttgaactgctatagagccagtttctttgtttcacttacttttcaaatttattcttctttgcctatctggaaaggtctaaggaagatatagatggcccaataattaaggagtgtttcatgaggaaagtatttacaaagatgcacagagttaagggtca

SEQ ID NO: 78300 - DNA, 882 bp, Homo sapiens
aaagggttggcaaaaaagataaactctgaggcagccctgctgggttctaatccacatcgtgtgagactaagaaataattacacatcctttatgtcttcctttgtcatctcctgtaaaatgggaatattactaattcttcttacttcctaggctcttgaaaagattaagagggataatacctaataaatactcaactggttactgttattcacccagatggaagctagtcctctttcttcagttaaaatctgcatgagcatgtctctttacattccaagccctgaaatttttctggttcccctcaggaactcctctgaaacaaaagtttgcattagcaaaagaaattctacccaagatctgggagagagaatgaagtaggtttgtgttatgcacacccagaacaccacttagaagttctccaggtctatttccacatttcaattgcctccttcagtgacamtcagacctcacgctcacttactttttcctcctgtatattgctgagcaattcagctcagacccacaccctacctcaacgctgtataccaaaatgcttctaggtgctcagcaaagccaacaccgagtcctcatttcaaagtcacatcagtgatcagatatttaggctcacataggtaattctttttaacacagacagagctgtccacaaatagaattctgatgaatgaaattttcttcatcttatgcatatatgtgttctgatacctttaattgtgctttcatttttattttctatttaactcaaatctgccactaccattaggctcctcattcatgcattcactcactgaataaatgtttgtggagaatatagtgtgccttacatggagctaggcactgggaatataaaaagcggtgctcctt

SEQ ID NO: 78301 - DNA, 1214 bp, Homo sapiens
ttgggatatatctgggtcaagtgattttcaaactgtgggagaacaactttcgtcattaaatttttactcaataaatcatgcctggtgttggttttgaatccttttacttcaccaatcttaaattccacttaagtaaccatttttgttctaaagcagacagcttggcatgtctaactttttcttccaatttgacatcaggaaactgtaacctcttattattagcaaaactaattcaaaaactctctaaagtgtggtataaaaataatctctttagtgatgcaacaaaaatccctsgagaatttaaaatgcgattcaagcgacattatagcaagacctataaacatttctatgcctgcaagatagaggatccactgcagtaataacttctactacttgcacaggacttcacaatttaaaaaagcacttctaccttttatctctcctgatcattgtaataacattttataagaatattattaaatattaaagtattaaatgtttttaccaagaactaaatattgattattggtgaagatttggagctccttctcatacatggctggtagaactgcaaaattgtacaattacttcttggaaaattgctctgcagtttcttttatttttctagatgaaatgatttttattgtagagataggtgtatacatacacctaatcaaattgtacactttacatatgtgcagtttttatatattaagtatgcctcattaaacttgttttcagattttgcattaaataaacaaattctgcagtttcttaaaatattcaatgtaccttaccataagaccaagtcattctgtttctaggtatctatccaggaaatacgagaacatatgccacgcaatgtcttgaagacaagtgttcttaagagactttctcatgctaccccaaaactggaaacaacccaaaagtccataagcaggcttctgcagaagtatgaactacactctacaaagtagttgttctattgctagacctgtaagtggtaaacacaggactggaaatatgtgtctactccacaacactgccttctttctttctttaagtaggctaccactagtctaacggcaaagactcaaattccttggagtggaattccaggcccttgaaaatttggcccattcttgtctttcctgcctcatcttctaatgtcttctacattcattcatcatttgttttatgcttatttgcttttt

SEQ ID NO: 78302 - DNA, 850 bp, Homo sapiens
gagagtaaaacaatcctccagagcattctgtctcatttgtttgaattccatattcaataagtaaccctatgtttactcattttgtttcttaggcacttagttggtgcttgaaagggctatcttttttacagaaataaatgtcccaatggctagtatggcattataaattagaaaattaaaatttgttcattagtttactactagaatattatacagatttatataaatctgatcatctgtgttgtataattttggaaaaaagaaatctataaagctgaagatcagctcctagaccagagttaatcccccaagacaaaattactagaagaaacagaatttgtagacattaatgtcctctcttgatatttctgagttatattgtttttcttataggatgatttctacctaaatttgaaagttaaaaaagatgagtcctttgtgatgaatcattcttctctacttgtctctatactttacactggtgaatttggaaggaggctttctcttgttagctgttgaaaagttaatgtcaaaatcttaggctatattgttgtcaagtaaacatttttctttcttcttagctcaamcttggtaggttatatgtattgagaaatttacccaattcttaaaccagtaatgagtaaagagatcaaagccataataaaaagggtgggagggaggatgaaggaaaaaaatataaatgtatttactaccactgaactatacacttaaaatagtaaagatgataaattatttatgtgtattttacatcaataaagaaacatttttagatgaaaaatttgatcacaacctttcaaaaagagcacttatgtctttaacttgtctctat

SEQ ID NO: 78303 - DNA, 665 bp, Homo sapiens
tactaggtagtgagaatttgtaggcaccatgggctgtgtcttcatcaggccagtggtacagtttgtatacttgtccctgcccaaatgtcatgttgaattgcaatccccattgctgggggtggggcctggtgggaggtgtttggatcatggaggctgatcgccttatggcttggtgctatcttcatgatagttgagttctcatgaaatctggtcatataaaagtgtggcacctccctccaacacacacacacactctctctctctctccctcctgcttttgtcatatgatgtgcctgcttcccctttgccttccaccrtgattgaaaaagctccctgagaccatccccaaagcccagtgatttgggtgctatgcttcctgtacagcctgcagaatcatgagccaattaaacttcttttctttataaattaccagtctcaggtatttctttatagcaatgcaagaatgggctaaaacagccagtaattcatacctacttgttgaagaatcagtttcactcatatttagagaccctgctccaccttcactgcatatcaacaatgtagcaccccacattcatgaatcccctgtgagcatttcagtgacatttccccaaaccacttctaagagatgttgacagatgagacctctggaggtggggaaaatg

SEQ ID NO: 78304 - DNA, 745 bp, Homo sapiens
gatatttatactccacttcatatagaactacagtgcagattctagtctcagctctgtcactcatagagacaaagaaaactacttaatctctgtctcaatttgcttaactgtaatatgggatcataawaactcccttgctttctccataggcacgtgagattcaaatccagtgggacaaaggatggtaaagtaatttgaaaaggtcaaaatcactttaagaatacaggctataagtaagtaaaaatatataggggattacatctatcatacctgtgttataacagataaagaaagtggcaaaattgttcaccacttttagtctttgaagatcctggcccagcatcccacattctataaactgaacaagggtctcctaagcttcattaattatgtgctaagccatgtgctaagccctgtgctaaaccctgaggatacagagatgagcaaggcctgatcattcaaaaggatgaagaaggagaattatagagggagatggaaggaagagattcaccagaggcagaaagagttggaaaaacaaaaaccacgacagtcgtgaaaatacgtaaacacacggacagaatgaacagaggtaagaatgggagcagtccaaagagccaaaaacactaaacagataggattaggttgacagagttaagtcatcatgaagctgatattaacaaagctgtgggttaagagaaaatattttcctttgttctcctggggtttagtggttctaactaggtaa

SEQ ID NO: 78305 - DNA, 523 bp, Homo sapiens
ttcccttatttacatcatgctatttcaaagcacaccatattaacttttataagatgaagaaaaatataaaaacacaaattatggtactaaaatcattctatttcattggaatatacaggataatgcaaatatgcaattttattctgagtgctatggacaatatattctgattcctataccataaagtaaaataccaatcactgatacaagtatttatttagatttagttcttatctacaagcaacttgtttttctacttgatattttcacaaagttccactgatttttttgtttgtttgttttgagacagggccttactctgtcgtccaggccagagtgctgtggcatgatcttggctcactgcaacctctgcctcctgggttcaaatgattctcctgcctcagacatttgagtagctgggattataggcatgtgtcaccacgcccagctaatttttgtacttttggtggagatggggtttygccatgttcgccatgctggtctcaaactcctggcctcatgt

SEQ ID NO: 78306 - DNA, 457 bp, Homo sapiens
aaaaaaaaagtttcttttgtgtcttaaaagattttcrttcagttccttgttcttcatttttctctctcttatcaatgattttgctcttgaaagttgattcattacagctgcgttctgccctgtctgggttttctagtctgcagtttctcagactggagcactgacactgattgtgccacccttgagtggacttgaactgcacggtcctatccctcattcatctaggagagcagccttgtgttcatggagataatgttccttcgtgttgcaaattatgcctttcggtacacaggaaacatttgccctgtgttagtccctggatgctgcccatgtgtttcactggtgatgtttgaccttcttataagggaatagtggttctcagccatagctacacattacacattggaatcatctggacagttgtatttaacactcatgcctgggtcccaccccacat

SEQ ID NO: 78307 - DNA, 457 bp, Homo sapiens
aaaaaaaaagtttcttttgtgtcttaaaagattttcgttcagttccttgttcttcatttttctctctcttatcaatgattttgctcttgaaagttgattcattacagctgcrttctgccctgtctgggttttctagtctgcagtttctcagactggagcactgacactgattgtgccacccttgagtggacttgaactgcacggtcctatccctcattcatctaggagagcagccttgtgttcatggagataatgttccttcgtgttgcaaattatgcctttcggtacacaggaaacatttgccctgtgttagtccctggatgctgcccatgtgtttcactggtgatgtttgaccttcttataagggaatagtggttctcagccatagctacacattacacattggaatcatctggacagttgtatttaacactcatgcctgggtcccaccccacat

SEQ ID NO: 78308 - DNA, 981 bp, Homo sapiens
tctaaatatgcaaggatgctgatgggcaggcctggcaggagaatcgctaagctacgggagaggagttcctctctcaaatgagtcaccaggactattaaagtggggctgctcaatgtwtttccctaaggaagttcatctttcactgactttctcgactgtaccaaatggcctcctgcagggtctttggtttccttattttaagagaaagatatgataactgaagaaaaatcctcctccaggaatttatatcattacactcttcctaccaatgaacaaatactaaatctcaaaaaaacaaaagttgttatggggtaaaaatattgagtccttatattatttatgtgagtcactatccaataattcataatttaataagcatcattggccagaagatttttactacgtacctgccacagcacatggccaggaagcaatgtgccagaaagtgcaagggaatcaaggaaaggtttctggtctagtggctgttctgtagtgtagctgctgagatgccaatcacaggcatggcaaaatacaaaagacacacactaaaaaggaagagcaccaggtcgaacagcatagagagcgtagagaagatgagagaggacatggtggagtcagaaaggtgtcatggaaaaaacaggtctaatggatgagcaaaatggggctagagagagttaaggagtggcaaaagcagggaggcacagatgaagcatgctgggtttgaagaatggcgagatgacctacgcaggaattctagctttactattactttgcctccctgagaactcttctgcaaatgactttcctgaacacaaacacagattactggttatttctgaaatagtagtagctggacagacctgagcaaactttactctcccacttgcttttttccaagacgaatagcatgtagtctgcaagaacaaagctaagtagtgtgcacgaggacggtccgagcagaataaagtgtggtaacatgca

SEQ ID NO: 78309 - DNA, 1418 bp, Homo sapiens
gagtctgccatcatctctctctactgtgacgattctggattttctctggagctgcatggatcacaatcatatgtgcatttctgaaatactacttgatagtgagaatcgccctctaaagcatgatcatttctaattggatatattttctcaatcaattactgtactaatttaaatgtggaactgtgaataaattttgtccaacactgaataattcagtcactcgagggggagtcattgaaatgcaaagtgttgacagaactcttttgaacgaaagttccaaaaccgatccagaaaacagatggccccaggattagctcactctgccagaatttctgggacacattttaatctggctcgtatataatctgatctgtaaaataaaaacctggtttcaggcacagctatartcaattctatacaattaattaaaatttcttccagcatattcacagaaacaaacctgaatttattttaagctgtcctaatacaccatattcaactctatttagtttatgtgattgaaatgagctggtaaaaaagaaaactgcctgaggaggcaggaaacctagtctgtaattgtggttttgctcctaactccctgtgtgatctcaggcaggtcaggatcctcactgagctaaaggtctattcaaatatcaacattctatgagtgtgctatttctctgataaaaacaaaagtttatcttcctatttttatactgagtgcagaatgctcacagattgcagtagaaatcagccagtcctaaattcctgctgctctgtaacaggtgtgatggataaagagtgacaaaatgtgtacataaacaagtgttaggaaattgtgtttggcttcgtagagacatttttactgtttttataactatatttgtaatacttttacatgaaaatatctttaagtatatgtgtgagtccttaatgtggagaggaaaggctgttgcttctttgattgactgcataaacacacaaaaaagcagtagttacattaaataattttggggggcacaggatacttttttattttttgttactataatagtaatatatcatcaggacagaaaaataagagaatacagaaaacaacagcagtttgttaatgtctttgtatatattaacctagaacctttaagatatgtacatatactgtacatgtttgatcacttctactgtttggatgtatacatgcacctttgcacacgcacacacacacacacatatacgtcgtctttctgtttgtaaaaagggagttgtttctttcactcattcttttacacttggattttttgaaaatatgaagatgccctttcattgaaccaatacatttcatggaagctgagcacgtgttttggccaatgtgtttgagtactatcttctatgagagcagagatcttgtctgccttgtt

SEQ ID NO: 78310 - DNA, 982 bp, Homo sapiens
ctttaaatggagtactgagaacatttaattagaaacgtaggcaatgaattataaaatcaaatacaagaaacccctatatttgtgaagctttaaatttgcatcaaaattctataagatcaaatttaagttaaactcaaacttctgctttaatcatgtatggcccaaataattgttgaatgtactttattatctgtcccatttttttgaactgggaataagggagaaatataagttatgttatagagattgagaggaaaaaaaatcagtaggtgcttttaggtggtgcctccttagaaatatttagtaagtgatgcaaataaagaaatatatttacaatagctgaagaaatctatgtactgtagaacattagagataatatgtatgaagttaaaaaattgmcactaaatattgaataaattatttttaaagcagcaatatgagaacagaaaacaatgtgttacaatcatctccaatgttgctgctataagaaaaatcaaggttgtttctttacgtttctttcaaagatagaagaaccatgattacaatgatccaagtggacaatacttgttagaaattgtgttttggtaaaataaacaaaaacgttagccttgatgtaaaatctgttttcaaacaaaatgtttagtgactggatggttctttcaaaatttgaaaacgttgtcttccaatagttttgggaaaagaaaaaaagtcagagtagtttattatttggataagctgaaataatcttaatggagagtaggtaattttaacctgtggcctgagatgccaggacgttactaaataaaaaaaaaacagatttcacacaatgatctcaaaatacatgttactgttttttttctcattttctggtttaggtgattagataactgaatgaatcaaatgtgaaaaaaaggaagtaaaacctgcactgattataatcacaagtaatgtttatataatgctttggtctgtttaatagaac

SEQ ID NO: 78311 - DNA, 982 bp, Homo sapiens
ctttaaatggagtactgagaacatttaattagaaacgtaggcaatgaattataaaatcaaatacaagaaacccctatatttgtgaagctttaaatttgcatcaaaattctataagatcaaatttaagttaaactcaaacttctgctttaatcatgtatggcccaaataattgttgaatgtactttattatctgtcccatttttttgaactgggaataagggagaaatataagttatgttatagagattgagaggaaaaaaaatcagtaggtgcttttaggtggtgcctccttagaaatatttagtaagtgatgcaaataaagaaatatatttacaatagctgaagaaatctatgtactgtagaacattagagataatatgtatgaagttaaaaaattgccactaaatattgaataaattatttttaaagcagcaatatgagaacagaaaacaatgtgttacaatcatctccaatgttgctgctataagaaaaatcaaggttgtttctttacgtttctttcaaagatagaagaaccatgattacaatgatccaagtggacaatacttgttagaaattgtgttttggtaaaataaacaaaaacgttagccttgatgtaaaatctgttttcaaacaaaatgtttagtgactggatggttctttcaaaatttgaaaacgttgtcttccaatagttttgrgaaaagaaaaaaagtcagagtagtttattatttggataagctgaaataatcttaatggagagtaggtaattttaacctgtggcctgagatgccaggacgttactaaataaaaaaaaaacagatttcacacaatgatctcaaaatacatgttactgttttttttctcattttctggtttaggtgattagataactgaatgaatcaaatgtgaaaaaaaggaagtaaaacctgcactgattataatcacaagtaatgtttatataatgctttggtctgtttaatagaac

SEQ ID NO: 78312 - DNA, 561 bp, Homo sapiens
tgtagtcccagctactcgggaggctgaggcaggagaatggtgtgaacccaggaggcggagcttgcagtaagccgagatcgcgctactgcactccagcctgggcgacagagcgagactccatctcaaaaaaaaaaaaaaagaaaagaaaagataaaacatctaggagaagttagttaccataggtgtgttctaaaaatgtgtattyggtggcatgcttattggcaaccaaaggtaaacatgcagactgtcacaccttttagtccatttattcttttattctttgttctaaggaggtaagtgggcaaagacgtgacacacaaatgcttatcataacatttatcataataaaaaaatggctattacctgaataaacatcagctcttatttattgagagcctacctcatgccaggcactgtgctaattctcattattcaaaggatatgaacaagttaatgtgaagagaaaaatttcccctagctttattatttgaataaaggacagtggatcttctatggcacttatgaaaaagatagagaagtgctttttaaatgctcttggat

SEQ ID NO: 78313 - DNA, 1015 bp, Homo sapiens
ttgcaaacaaggatacttggggttcagagagtgaagccacctccccatggtttgcaagtagtagagcacaggctcaaatctaatcttctaaacaaagtactgacatgtggctgagggccagtcctgaagccaggcaaagatacagaaagtgacactttgcatcctggcatcctgagaggtgtccaggccgtttttcttctcaccccccatgtgacctaaatccttggggatactggcaggctgactgactatattaaggacttgaaatggcacaaccattgtgtgagtgtgaggatcccttcagagaaaactggccaagctgccaaggagcctatcagtagaggttcaggagcaccagggcagcaacaccactctcaccttcctctttctaatgtccctggaaaatgataaaaatggcgatagaaaacatttatataggctggacacggtggctcacacctgtaatcccagcattttgggagactgaggcaagtggattgcttgaggccaggagtttgagaccagccaacatggcaaaaccccgtcactactaaaaatacaaaaaattagccgggcatggtggcacacgcctgtgatcccagctactcgggaggctaaggtgggagactcacttgaacctgggagacggaggttgcagtgagctgagatcacgccactgcactccagtgtgagtggcagagtgagactccgtctcaaaaaaaaaaaaaaaaaaaaagccagcgcggtggctcacrcctgtaatcccagcactttgggaggccaaggcgggcggatcatgaggtcaggagatcgagaccatcctggctaacacggtgaaaacctgtctctacaaaaaaaaatacaaaaaattagccaggtgtggtggcgggcgcctgtagtcccaactactcaggaggctgaggcaggagaatggcgtgaacccaggaggcggaggttgcagtgagccgagattgcgccactgcactccagcctgggtgcgagagggaaactctgt

SEQ ID NO: 78314 - DNA, 658 bp, Homo sapiens
tgatgagagcagaacagacactcatgagagacatgacttctgcttcccccataactaagaagagagattaccatactgatgatctccctggaggtttcatagcaaggtttgacttgatgaattaattaataaagctaaatatcctgaagatttggtggaaatatgctttgacatttacatctaagtgttcatccgtgaaaatcaataaaatattttttcatgcagaccctataggcattttcttactaaaaacttcatgtggtttatgtggcaatttccaaaaatgcctaaataaactctgttatagtttactgtgaatattaatatattacaaaaagaaaaaagaccttcctctagtgacaaactaatatttgcatatttgtgaggattatgaaggttttttcatatatggcaatgttattttcattctcctaacaatcctctgaggaagatagaagttattatctgtttatgaggaaagcgaagcccaaagatgttaarcgaatatcactgttcagcaaataagaggttatacattcaaactcagttcttttgattaccagttcagtactcttaacatccattactgtgcagtgatactgagatgattaatttttacacttctccactaatatttcaccagatttctgttacagaa

SEQ ID NO: 78315 - DNA, 782 bp, Homo sapiens
ggatccctcatgagggaggctgggtactctcctcaaaatagcaagtgaattcttgtgagatctggttgtttaaaagtgtgtggtgcctctcccctacctctcttgctctttctctcactttgtgacatgcctgctcccgcctcaccttctgccttgagtaaaagttccatgaggcctccctagaagccaagcagatgcagtgccatgcttatacagcctgtagaactgtaagccaattaaacctctttctttataaattacctagcctccagtattcctttatcacaatgcaagaatggcctaatatacccactgacccatctggtttctacacacatgaatctgtttcagtcattagtcaattagatagagtatgcagaggcctgcataaaaacacagtcyaatagctatcactttgtcaggcattatgatttggcccgggtgttggtactttctatcttaactctccaagtgtcatctttaaaagtagcagtctttctggatattagagtatgcacacgttttccccagttctgtaactcttacccttggagcttaaaacacacacatacatacacacacacacacacacacacacacacacacacacaaacttatatcaaaacactttcccaatgttcattttgtaaatcaacgcatgccacccctacaagagggggaaaagagaaggtaacaagaaatattattggtcaatttaaagaaggctctttaatttttttaaaaaatcagccagtaaaaaagtatctcagaggacaacagga

SEQ ID NO: 78316 - DNA, 829 bp, Homo sapiens
attaattgaaataccttggctcacttctgcattttcacagggtgttttatttgtgcagagaccactgacatttggcaggctcttgactgcttcaaacagcctgaggtgctatttggcagaaaagcagctgtgcagttttaaggagagaatgcagtggaaagttaagctaatggtgtaggttgatatgaatttattaaaaggccaaggggcattttttggtccttgaacattttctaattaaagccataaaaaactaccatgtattaatagagacctttttttaagtttgaaaaggaattattataaggctcttcatcttcttkttttgctgttggagcaattccaaatgaggctattcatggttaagatctttctagaatggggaccaagctcatcggctaagtccagagacttgaagatctggctttaaccccatgccagcacttaactggttttatgagataggtgttagctttctggttcttcattccctcatgtataagctagggataattatgctgattttacagcagttatgaaggattaaatatatgtgacacatctgcccatagtgcatactcagccaaagtaattccttaagtgtttctgtgtcttttcatgtcaaagttgagaaaaaacaaaacaaaacagcagttctaatatttggggatgagtttgtaccacggagctcatttctatagatacttttagggctttcaagggttttagtaaaactcactgaatattttcttttagattttagtataacatggtgctgtatctctacttttcttccagttaaagatttagaaaaaagaaaggatccaaa

SEQ ID NO: 78317 - DNA, 745 bp, Homo sapiens
tgcattatcacaatcttttcaaacacaaaatatattacaggcctctcaattggggatggggtttctgtttttgtttttaaatccttaatagaaaaatattaaaatttaaaattctaaagtgccatattccttatgtttattctttttctactttttttttttttttaggatttaagatgatggaaatgtttggtttggttgaaaaagatttttcatcagtggaaggggtttctatggagcctggtaccttcaatgtgtttccatgttaccaactccataaagatgccctggtttcccagccaaccaggtatgtttctgttgaaagattttaaagtcatcrtatgtttattatatctcactgtgaaaatgatgtcaacttgaaatatggtgtaatagtcccaggtaggattttccacgacatttagagtagaagatatttacatttctttgtttaaaaacaccagactcacacataatgcgggttgaactttaacatctgctgatctgagacaacatataaaaatgattgctggatgctgtggctcattcctgtaatcgtaacactttgggaggccaaggtgggaggatcacttgaggccaaaagtttgagagcagcctgggcaacaaaataagagtctctacaaaaacataaaaataaaaaaattagctgggcattgtagtgtgcacctgtagtcccagctactctggagactgaggtgggaggattgcttgagctcaggaggtt

SEQ ID NO: 78318 - DNA, 1120 bp, Homo sapiens
tatataagcactgaaattttatggcagaacttggacatagagtagttatccagttcatctagaatatacctaactttgactatcacctaaataagacagattttacgagtccttacaaagaatgtgtcaactcctgaaaatatcacggacctccagattcttgagattctagtttgagaaaaatgtaccatacactaagctaaacagctttattttatttgaacctgggttcaccagaaagcattccttcttccccctcagattctagatcccctttcctcatcctaaattaaataaatatttttgaagtgtggtttgccaaccactcgtggtgctttggatgattgttggtgatayatcaacaaagatttttaattttaatatttttgtgttaattttaatgtgcattcagaaaaggcatggctagtacagcagtcctgtaatttcaaagatgcgattgctctcgagttaggccggactttaaaaagtgaatcctttcaaagccattttagaaagaagtgttaaatagataaaaatagagatggtacttgaatatgggaaaatcatggagatgataaaagtagaaattttctcttttggcaaaatacatggtgacagaattctttctcttctctttcatactttgtaatgatgaatcatacaattatacaaatttggttgatatttccttctgtttcttacctcctaaaacatcttacttttacctagctacacattgttgtcagtgagactttggtcaaagtggttattgactgcaagcaagtgggtgagaaggcaatgaacgcatcagctaatatcacgtcagatggtgtagaagtgctagggaaaatggttcgatcaagaggaccaggtggaaactctgcaccggtaagtgaataaacccgtgaagctgtgttattgttaagggagagaaattattttaaagtacattagctattttccaggggaaaggtttaacaaaaagatgaatggataaatggatggatgaatgaatggatggatggatggatggatagatggatggataaataaataatggcctctttaaatgaattaagacatgtacattcaaagcttgtggtagtatgcttccactgta

SEQ ID NO: 78319 - DNA, 591 bp, Homo sapiens
tcagtagaatacagtacatagagtggcgtttagggtggaaagatgcaaaggacctacacagtgaaaatatgtgttacaaagcaatattattgctgcacgattccaattttgtggccaaaatataccatgtctctgcataaaaaagctgaaagggtagaatgcttaacagagctttttatgtttggtgtgcgtactggttgctrtttattttctgttgttgtgtaatgatttttgctgcagaattactggtgctaagaaaaatgtcttaataaaataagaaaagatgcatgattatcactcttagctaagtgcaatatcataagtaacttgacaattttccatttatacagggtgtccctggagcaaagggggaacgaggagagcgggtaagtatcctgtggctctgctttctggccccagcttgttgcaccccttccattgcataagcctgataaaggatcatcatttaataccattaatattcattgcaattgtaccagtctctgtttctccctttccccaattcattagactgtggccatattttccagacataaaatccctgtgggctgggagtcaggagagctagtt

SEQ ID NO: 78320 - DNA, 591 bp, Homo sapiens
tcagtagaatacagtacatagagtggcgtttagggtggaaagatgcaaaggacctacacagtgaaaatatgtgttacaaagcaatattattgctgcacgattccaattttgtggccaaaatataccatgtctctgcataaaaaagctgaaagggtagaatgcttaacagagctttttatgtttggtgtgcgtactggttgctgtttattttctgttgttgtgtaatgatttttgctgcagaattactggtgctaagaaaaatgtcttaataaaataagaaaagatgcatgattatcactcttagctaagtgcaatatcataagtaacttgacaattttccatttatacagggtgtccctggagcaaagggggaacgaggagagcgggtaagtatcctgtggctctgctttctggccccagcttgttgcaccccttccrttgcataagcctgataaaggatcatcatttaataccattaatattcattgcaattgtaccagtctctgtttctccctttccccaattcattagactgtggccatattttccagacataaaatccctgtgggctgggagtcaggagagctagtt

SEQ ID NO: 78321 - DNA, 591 bp, Homo sapiens
tcagtagaatacagtacatagagtggcgtttagggtggaaagatgcaaaggacctacacagtgaaaatatgtgttacaaagcaatattattgctgcacgattccaattttgtggccaaaatataccatgtctctgcataaaaaagctgaaagggtagaatgcttaacagagctttttatgtttggtgtgcgtactggttgctgtttattttctgttgttgtgtaatgatttttgctgcagaattactggtgctaagaaaaatgtcttaataaaataagaaaagatgcatgattatcactcttagctaagtgcaatatcataagtaacttgacaattttccatttatacagggtgtccctggagcaaagggggaacgaggagagcgggtaagtatcctgtggctctgctttctggccccagcttgttgcaccccttccattgcataagcctgataaaggatcatcatttaataccattawtattcattgcaattgtaccagtctctgtttctccctttccccaattcattagactgtggccatattttccagacataaaatccctgtgggctgggagtcaggagagctagtt

SEQ ID NO: 78322 - DNA, 661 bp, Homo sapiens
cctacttacagtgacaatccaatgcttaaggaaagaatgcactgaatgtattttagagtgaattccttgaagaaattgttactatttttatttagttttaaatgtttcaaaatggataaataayagtaaactagaaaattcacttatgttgggaaaactcctctcctaatgatgttggaaaaatgagacatcatggtatcaagtactttatacttctgattagtaacatatatctgtatatatattttccatacataactgagttaagggattgtgggagagagtgccagattttttaaaaatataaagctagtgggagtttctgcagctgagacccaagtaaaggttcctaaaaaaaggcttgatgaccaagagatgagttgagacagagcacttgtctggggatttgtgagcaagagggtggggaggctttgtgcgttttagaaaagaaaaataacttggggagtaattgctagagaaatggcagctgggtgagggtctaggggtcagataaatgttgagggtaaagatgaaatttacaacttctgctcagtgatgtttattgagatgctgacatgagctgcagaattccaaacacatgagatgccatttgacaacagtccagcccttaatatcatccagagtaaaacgtaaaaaaatg

SEQ ID NO: 78323 - DNA, 661 bp, Homo sapiens
cctacttacagtgacaatccaatgcttaaggaaagaatgcactgaatgtattttagagtgaattccttgaagaaattgttactatttttatttagttttaaatgtttcaaaatggataaataacagtaaactagaaaattcacttatgttgggaaaactcmtctcctaatgatgttggaaaaatgagacatcatggtatcaagtactttatacttctgattagtaacatatatctgtatatatattttccatacataactgagttaagggattgtgggagagagtgccagattttttaaaaatataaagctagtgggagtttctgcagctgagacccaagtaaaggttcctaaaaaaaggcttgatgaccaagagatgagttgagacagagcacttgtctggggatttgtgagcaagagggtggggaggctttgtgcgttttagaaaagaaaaataacttggggagtaattgctagagaaatggcagctgggtgagggtctaggggtcagataaatgttgagggtaaagatgaaatttacaacttctgctcagtgatgtttattgagatgctgacatgagctgcagaattccaaacacatgagatgccatttgacaacagtccagcccttaatatcatccagagtaaaacgtaaaaaaatg

SEQ ID NO: 78324 - DNA, 661 bp, Homo sapiens
cctacttacagtgacaatccaatgcttaaggaaagaatgcactgaatgtattttagagtgaattccttgaagaaattgttactatttttatttagttttaaatgtttcaaaatggataaataacagtaaactagaaaattcacttatgttgggaaaactcctctcctaatgatgttggaaaaatgagacatcatggtatcaagtactttatacttctgattagtaacatatatctgtatatatattttccatacataactgagttaagggattgtgggagagagtgccagattttttaaaaatataaagctagtgggagtttctgcagctgagacccaagtaaaggttcctaaaaaaaggcttgatgaccaagagatgagttgagacagagcacttgtctggggatttgtgagcaagagggtggggaggctttgtgcgttttagaaaagamaaataacttggggagtaattgctagagaaatggcagctgggtgagggtctaggggtcagataaatgttgagggtaaagatgaaatttacaacttctgctcagtgatgtttattgagatgctgacatgagctgcagaattccaaacacatgagatgccatttgacaacagtccagcccttaatatcatccagagtaaaacgtaaaaaaatg

SEQ ID NO: 78325 - DNA, 650 bp, Homo sapiens
ttctgaaagtttttccctgtgtcagggcacaaaatcagcagatatagaaaatggcatcattccctcacaacacaccaaagatctggcagcctggaatgtggccccctctgtcagcagggcatcctctgctgctgtcaataatggagaaactgtgactcagtgagcacagagccagcacctgagtcattcccagcaagtcataagttgtctttgttctttttggaagtcttagccccgttcttgccagaccgagtctctcctgctctgcaagtacacttgaatgattagaccacagaaaaatcacccaaggattctcaaagggcagcccagacgacctttggaaatatgaatttccatgatgtaattttcttacatacatattgatatatattctaaagagtacagtagacaagcagaatcctatatttcacaaatgcataaaagatgacagtaagacagaaagtgagaaatgccctttgagcatggggaaaggtgattttagttgatgaccacttgaagggtgtgattttgcgatgactrttataggtcagggcttataggccagcatccaaggggctcctcattcccggcaaagttatttcagctgcagcttggatttgctgctgcaaggtaggcagtgatgtttggga

SEQ ID NO: 78326 - DNA, 650 bp, Homo sapiens
ttctgaaagtttttccctgtgtcagggcacaaaatcagcagatatagaaaatggcatcattccctcacaacacaccaaagatctggcagcctggaatgtggccccctctgtcagcagggcatcctctgctgctgtcaataatggagaaactgtgactcagtgagcacagagccagcacctgagtcattcccagcaagtcataagttgtctttgttctttttggaagtcttagccccgttcttgccagaccgagtctctcctgctctgcaagtacacttgaatgattagaccacagaaaaatcacccaaggattctcaaagggcagcccagacgacctttggaaatatgaatttccatgatgtaattttcttacatacatattgatatatattctaaagagtacagtagacaagcagaatcctatatttcacaaatgcataaaagatgacagtaagacagaaagtgagaaatgccctttgagcatggggaaaggtgattttagttgatgaccacttgaagggtgtgattttgcgatgactgttataggtcagggcttataggccagcatccaaggggctcytcattcccggcaaagttatttcagctgcagcttggatttgctgctgcaaggtaggcagtgatgtttggga

SEQ ID NO: 78327 - DNA, 650 bp, Homo sapiens
ttctgaaagtttttccctgtgtcagggcacaaaatcagcagatatagaaaatggcatcattccctcacaacacaccaaagatctggcagcctggaatgtggccccctctgtcagcagggcatcctctgctgctgtcaataatggagaaactgtgactcagtgagcacagagccagcacctgagtcattcccagcaagtcataagttgtctttgttctttttggaagtcttagccccgttcttgccagaccgagtctctcctgctctgcaagtacacttgaatgattagaccacagaaaaatcacccaaggattctcaaagggcagcccagacgacctttggaaatatgaatttccatgatgtaattttcttacatacatattgatatatattctaaagagtacagtagacaagcagaatcctatatttcacaaatgcataaaagatgacagtaagacagaaagtgagaaatgccctttgagcatggggaaaggtgattttagttgatgaccacttgaagggtgtgattttgcgatgactgttataggtcagggcttataggccagcatccaaggggctcctcattcccggcaaagttatttcasctgcagcttggatttgctgctgcaaggtaggcagtgatgtttggga

SEQ ID NO: 78328 - DNA, 1207 bp, Homo sapiens
gcatacagtacttattgaattaactccaattaatctgccttcttgtaactaggtgctaggtccagtaccttgctcttagtaggcattcacacaaacattgagtgaagaacagactgtacttgcaatccatcaccagtatatcccaggcaacaggcaatataataacacagaaagccttgatctataatctctgtgactttttggtacaattacaatggaagcwttccccaggccttgcatagcttcgtgggcataaatcctgggagttcctcagaatgtctggggatgaggaaggagtgactgtgctccacaaacagcagagactccaggctggagtgcgtggtgtggtcgggggggccataaaaatgaataaaatctcccaactcagaggccaacaggccaaagaaaataggaaacagacaaccaagggccagcccctggacatgttagtgtgagcaggataaatcctcttaaaatgaattccaaatcttgctcagggcacacagcaagtatacaaattgaggaaagcatctgaggaaatgtggtgataaacacagggctgactgctgagtgtgaggccagagagagtgtgcagacacatttggcaggaggtttgggaagccataactatagcaagcaagacaagaaagagccttcgggtccagcttaggatggagaggcagggagtgcagtggttgagcacagaggcttctgtgccaatctgcctgggttgagattttggctctgttgtttcctagctaaggacaagtgagttaccctctcaggattcagctctctttcagggttaatagcagtgcctgccctcttggctcatgtgaaaacaacatgagtttgttcatgtgaagcagctggcatccgaaacctagtgagataatttataggcagtgctgatacactctcaggcacatttttggtttgtcaaagtctgcaatcaaattttgtattccattcattcatccattgctttaacagatatttcttgagtgcttaatgtgtgactggcacttggaatagaatgaagatctaaaacaagcaagtccctgattttgtgggccagaaaacaaaaatattgacgagtcagtgttaggttagtggtgagggagaatcaggcaacctgaagtggtttctaatgagactctgaagaatgaatgaatatgacaaatgtaccactctgatggaggatgtt

SEQ ID NO: 78329 - DNA, 2315 bp, Homo sapiens
ggatccaaatgataaacactggctacctacttttctattgtcttgtagaaacaatatcttattgcctccccaaacaacaatttttgcatatcacaatgtctaagattaataggaacctatgtattttaaaaataatttgtgttatctctgtaaaatcttttatttttaaattttcaaaagtgtttattcaatcgtgttttgaagaccagtccttgtgaaactgctcctgtttgcagaacccttccattttgactattttactcttctctttttaagccatggctatcccattggttgataaatacatactgtatttacttttttattatacaagtattacatatttattgtgtaatatttagaaaacacaagtatataaagggggtaagatttaaaattacccaacatttcatcatcctttgcatctggtcttttttctatcaatatgcacttcctcttctatttaaaatgcatacagggccaggtatagtggctcacacctgtaatcccagcactttgggaggctgaggcaggcaggtggcttgagctcaggagtttgagaccagcctgagcaacatggcgaaacactgcctctacaaaaaaaaaaaaaaaaaaaaattagctgcatgtggtggcacatgcctgtgatcccaactacttggaaggctgaggtgggaggattgctggagcccaggaggttgaggttacagtgagatgagatcatgccactgcactccagcctgggctacagagcaagaccccatctcaaaacaaacaaacaacaaacaaataagaaaaatagcagacagaccacatcatgcataatgttttgcaatctgttctctcaagtcataaaacatttatcttttgtatactaactcattgtaaattgatggatttcccagctctgactatgcagctttgaatgaaaatttttccagaagttaatttcagattcagggatgcttgtgtgttgtctgcggtgtgatacagttatgtttctatttcattccagtgttcttgggtgttaccaatctccaagccaaacatgttgaaatgaccagcttgtgtgcccactggcaggtacatcgccatgccacagcctatagggttgttatagaatccctccagggtgagtacaatccatcacttacgtttttgtcaagcatttgtgtatttgattctttgcacaccactgtgtacaacacacaagtagcattagacaacagccctcttgtcaaggaagcaatttgtattggtcagtcatgctgcatatggggtctgactggttgggtaagtgaattactaaccctctggaaacctccctttttcttatctggtaatgagtatagccatagtgctgattttttagagttctgtgaagataaagctgagatattccacataaagcacttgcagtagtgctttgtgcactggaaggaccccaaaaatgttagcagccagatagccaagactagcatacattaaaattatattgtactctaatttgggtattcactctctagggatcaagtttaaatttaatgtttttcttagtgtttttttttttcttttggggataattggtgaacaacaaccctcattccagagatttaatgtatctacagcatcatgaacaagttcttcagcattacagttctcatgtacatccacaatttgggacttgttccaaggctgaaacagtaaaaatgtctcactgtcttcattaaaaatatcgagaacaacaacaaatggctgattccccaaaaatcagtatctagagccggttaatcctcttttcccaayatcagcatggacactatgcagaagatgaaatcaaataataaaaattacttaatcagatttatagaaacaatagaaaagctatatcttattattttatgggattataggagatgctaaagaatcccaaatgattttttaaaatcttccaaacttgggagtaaaattgttaaaaatgtagcctgttctttctgggcaaatgatcttggtttccccatttcagaaaagcaaaatgacctaattatttctagtccagataagactgggtttagtagcccatattcctgactatagctatattcaaaatccataaatcccatttttgatccaatccataaagtggaaagcatagtttaggagagcactgagagcatttggaaatatgtcccttgtagaataagaactgagatacgtggaacatacgagaagaaattcctgccaatcccagccaagatatcatcatgatagacatgtggcaccactgcttccttgagtccctctctatgatgtaa

SEQ ID NO: 78330 - DNA, 882 bp, Homo sapiens
tgcatagctaatgcaatgaggagtgaatagatctgttaagccacataaattttagcaatcaacagtatcttctgtgcatggaacttaaaaatatagcttttagctgggcgcggtggctcatgcccgtaatcccagcactttgggaggctgaggcaggcggatcacttgaggtcaggagtttgagaccagtctggccaacatggtgaaaccctgcctctactaagaatacaaaaattagcctggcatgatggtgggcccctgtaatcccagctactcgggaggctaaggcaggagaatcacttgaatctgggaaycagaggttgcagtgagctgagattgtgccaccgcactccagcctgggtgacagagagagactctgtctcaaaaaaaaaaaacctcttgacatttcatattttatgaatgccaattgcaaaagtgtatttaggtaataattaactgctttaaaactagactctacaacattggatatgatttatgatgatgccttgggtgcaggaaatatatattaaatactcgatcggtctttattctgatgactacatgaaaaatatcccactatcttgtaggttgtactttttaatgcagatttctggcggaagtttagttagctctgtgaatgtttttgatgaatagatgggaatcgtggtggcctggttaagaatgggatggagtatttgggttttccctttttaggaggtaatagtcctttggtaccatctagatggtctatgggctagtgttctgtagaattcatgcaaatatgggagcaacgtacatttaaataagttaatgagttctagaaactgatgctttttaatgttccactggcgtgtcctcagaaaggtttcattcgctgttgta

SEQ ID NO: 78331 - DNA, 848 bp, Homo sapiens
caaaaagagtaactaaatagcaaagaccacaactcttggaaatatatatgataaagctaggtgacagagtatctccataaacttcagaacactagcaacaggggatggccacaagacctgcatgctgttaacacctgtgcaggaagaagcagagggtaagaatagtgtatctaaaagatctgggagcaggtaagctatgaatatgataggtattcattggaaggcacagtgggccggtgtgataacagyggctgaatctggaggaatttcacccttttcaatagtggatgagtgcatggagtccacagtgagaagaactgaaggtggttgaagcaatgtaacccctatgaactctcaagactgaaaagtcagagcatctttccaaggtagggcccccacactgaggagaaacttttgagagtagaaccaaaattgtggttctactacttttggagtcgaaccaaaaattggattaggataatagagacaaaggaagataaatttctgatttaaaaaggggagaagaacacagccagacatctcagaaagctggccactgtgtttttgaacacctcacaaaggttacaaaacagggacctctgtgaagttagcttttctaactctgagccatgacttttttttttttaagagatgggatctcactatgttgcccaggctggtcttgaacttctggattcaagtgatttgattttcctgccttggactcccaaagtgctgggattacaggtaagccactgcacccatcctgatccatgtcttttaactaaacatgcccccagataaaaatttaggaacactaattttacatagaaatgaacaacagaaaa

SEQ ID NO: 78332 - DNA, 668 bp, Homo sapiens
tgtgtgctacttcaccctgggaaggtgacacaattgcagatgtttttgtgagacttgggagcagaaaagacatgttctttgcatcctcagtgaagccccagaggagaaatgggtgcataatgggtccccactgaagagaacgtaggcagatgtgcaaagtttyccatgccccagtgagaaagaagcatgtctcttcatgcccaagagcacatcagagaaatggagagtgctcctgaatccgaaagggtcacacagacaagagtgaagaatgtctcaataaataccagtgtggaagaatgatcttgaggaccacatccttcactctctctccttcccccctccctttctgcacatcttgcatctcagaagccccctcccggaaactagatacaactccaggggaaggtgaggttgaaatccacaagttcactgagataaagtttctgacaatgcaaagaaagggaggcttgaaatcaaaattagtttctatttcttacataaatgtctggactagaattgtgtccactgctcagatcttacttatattcagggatgacgtatctcatggaagaacagggctcaacgagccacttaaatgtcttcctatcaaatgttaaggttctagaaaccaaatggtgggtatattatccaacatatgccgtgaaagc

SEQ ID NO: 78333 - DNA, 731 bp, Homo sapiens
atggggattgggctttatgttagtcagggttctccagaggaatgttttcttgcttagttttctagtgctcttttctttctgccacactgaatttctgaagggacgcacccagcttccacgagtggataagagacatggaaccacagttagacacagggccactgtcacttcttactgagatgttaaaacaagtcctgtccatgtactggtgtgtgaagtgtctaattttctctatcagaattattacaaattccacatgacaacaacttycactgattcaaaatgatgtatggggggacagtgtggggaggtggggaatgacctgaggaaacgtgatctagtattgtggttccatagtctagcatacatagattagcaatctgcaaagaattagactgtacccgaattgtagtgagcataacgtaaacttcctttagtcactcaaaaaaatatatctttggttttttaaagtctagtttcttgaacaataattcctgttgcataaatacatgaaaaggtgcttcggataacagcttttcttccagttaagaaatcaccaggccacagaagatttagctattaggattttccatagattcttggagtgaagaatggcagaagcttaagagtatttagtacattcttctaaaagcaaaacaaaatgccaaattaaaactaaacagtgaaattagagtgttcgttcactttaaagagatatgaatacaaacact

SEQ ID NO: 78334 - DNA, 731 bp, Homo sapiens
atggggattgggctttatgttagtcagggttctccagaggaatgttttcttgcttagttttctagtgctcttttctttctgccacactgaatttctgaagggacgcacccagcttccacgagtggataagagacatggaaccacagttagacacagggccactgtcacttcttactgagatgttaaaacaagtcctgtccatgtactggtgtgtgaagtgtctaattttctctatcagaattattacaaattccacatgacaacaacttccactgattcaaaatgatgtatgggggracagtgtggggaggtggggaatgacctgaggaaacgtgatctagtattgtggttccatagtctagcatacatagattagcaatctgcaaagaattagactgtacccgaattgtagtgagcataacgtaaacttcctttagtcactcaaaaaaatatatctttggttttttaaagtctagtttcttgaacaataattcctgttgcataaatacatgaaaaggtgcttcggataacagcttttcttccagttaagaaatcaccaggccacagaagatttagctattaggattttccatagattcttggagtgaagaatggcagaagcttaagagtatttagtacattcttctaaaagcaaaacaaaatgccaaattaaaactaaacagtgaaattagagtgttcgttcactttaaagagatatgaatacaaacact

SEQ ID NO: 78335 - DNA, 731 bp, Homo sapiens
atggggattgggctttatgttagtcagggttctccagaggaatgttttcttgcttagttttctagtgctcttttctttctgccacactgaatttctgaagggacgcacccagcttccacgagtggataagagacatggaaccacagttagacacagggccactgtcacttcttactgagatgttaaaacaagtcctgtccatgtactggtgtgtgaagtgtctaattttctctatcagaattattacaaattccacatgacaacaacttccactgattcaaaatgatgtatggggggacagtgtggggaggtggggaatgacctgaggaaacgtgatctagtattgtggttccatagtctagcatacatagattagcaatctgcaaagaattagactgtacccgaattgtagtgagcataacgtaaacttcctttagtcactcaaaaaaatatatctttggttttttaaagtctagtttcttgaacaataattcctgttgcataaatacatgaaaaggtgcttcggataayagcttttcttccagttaagaaatcaccaggccacagaagatttagctattaggattttccatagattcttggagtgaagaatggcagaagcttaagagtatttagtacattcttctaaaagcaaaacaaaatgccaaattaaaactaaacagtgaaattagagtgttcgttcactttaaagagatatgaatacaaacact

SEQ ID NO: 78336 - DNA, 1629 bp, Homo sapiens
taaaaaatttgctatgtggaatagccagaggactttcgccgctcaattttaatttgtccactgtagaacaatatgacctccttattgctccaaatcttgatacatttgtatagcttttgtggtggtggcatgtgttgggggggaaggtgaaagagcagggccatatatagaagtgtggcttgctccactcacctctgctgagacctacgtgtagctagcagcattgtaacttggttctaggttgcactttgctagttctaggtggtgaacctggaggagtgagcagtggctggaaatggggctggaagaggaagcaaggagagcttaatgcaactggcagctggcagatgggtgacttgaatagatgcatgaaacatacacctagtttgctctagtatgtttgccaaacatactagaggcttcaaaggcaactcttagatgacagtactggataattctggaatttattgtcagcacactctagccatttgagagaactagcctgatgtgagacatagattttctttctttctttctttcttttttttttttgagacggagtctccctttgtcgcccaggcaggagtgcagtggcacagtctcggctcactgcaacctccgcctcccaggtccaagcgattctcctgcttcagcctcccgaatagctgggattaccggcacccactaccatgcccaggtaatttttatatttttagtagagacggggtttcaccatgttggccaggctggtctcaaactcctgacctcaagtgatccacctgcctcagcctcccaaagtgctgggattacaggcatgagccaccgcacccaaccggtagattctctttcatttagatccaattaacttggaatctgtgcttccttggtcagaagtttgggggaaataatcttttgtcttgtctatgaagaaacaaatcagaagtagaaacaaagtgagagggagaaggtttagattttgtaaaggaacaggtcagtacttttcccatactaacaaagtgtttattgccctagaaaaataatttgcaataaatccatcaatagtttacaggaatgtatgggtttttaaaatgtgaaaccctcaatccttttttgaaatttggtttgaggacagttctaaatttcttcctaacccctttctctcccataactttcatccctttatttctcccagccaggccttccatggtgtggaaatgatatggaaagtcaggttgccattttttgtaaggctccccacagtatcctggacgaattttctttctcctttccaaataagcgtcgatcattggactgaagtggatggttgagatgttgcagtgggaataaaaggaggtggcgagaacgttcttgcctaaaycattccccttcctttgttcccagcccaagggctgctggacagtgtctctcagagtacaccttggtccttttcctgagaaagacaaacttggaagtgactagcaggtctaattatgcctctatggaatccaaatgctggaaggagacaaagagaagtctggaggcctccgactggagagagagcctgatggattaaatccaagcttcgcacagtcccaaaaagctgtcagggtgcctgggcagcgtggagcc

SEQ ID NO: 78337 - DNA, 1217 bp, Homo sapiens
gtcttgcgtatgatgtaagctaaatatttattgaatgagtcaatgaaagtgattttcagtgttgagagctgaattcagaaccccacaatctgatctccatgtttcttctaccaagtcattctgaaagcaatgcagtttctactatgatttgcctctttgtaagccaatcacggttgaaaataggctgtttcatatggtgcagtctaacccaatgcatatggaactgtttggacagaataaaatagtttaaatggctgagcttgaaaactgaacttcctgtgctgttgctggctagcattaaatgcgtatcccctcccaagaaggcctccttctttcataaacttgtattagttctcaccaggagtagtgtgagaataaagtatagtggtcgttggggtgtatccatggaccaaatgaagaggagaatgagggagtgacctggtgttgtgtcttccgtcagtcatccattcactatttccataagcattgactaagcgtgttctgtcactggcctagatgatgtgaatacagaaataacacaaatctctatagagtcccaatctactgatcatctgtggccacggcaaagaatttaagtaaaattctcaaatttactggataatcgttcttactcttctttttgcttcagctgaagaactgaattaagggtggaactccaggcaccattctgtaaatgaaacatatactgaaaatggaaacagtatactgaatcaatctgtatactgatatgtaataaaacagataatatgcttactaggagcctctcaggaagctgtttggggtagcaatggaacgctgagacttccaagggcctgctcaagtaaccacagaccttcccttcacctacctgccttcaaagagggctgggggtgttggttactgctattgtcacattctgctgagcagagggtacaagtttgagtcagagctgaattgttgaagccagtggagaagaggcccatcctatcctctttcctctgtgcttatcaggctgtctttaaataaatcataagcrtatatttaaagaatatgggctgaagcaatactaaattggcctacacagacagctgtctgtcttcgtctagccttgattatctgtatccatttacttcaaagggaatgaaacattccctgggcagtagcagaagccacagagaaactcaggtgtcttaaccaagtctggcatcctatgcatt

SEQ ID NO: 78338 - DNA, 1217 bp, Homo sapiens
gtcttgcgtatgatgtaagctaaatatttattgaatgagtcaatgaaagtgattttcagtgttgagagctgaattcagaaccccacaatctgatctccatgtttcttctaccaagtcattctgaaagcaatgcagtttctactatgatttgcctctttgtaagccaatcacggttgaaaataggctgtttcatatggtgcagtctaacccaatgcatatggaactgtttggacagaataaaatagtttaaatggctgagcttgaaaactgaacttcctgtgctgttgctggctagcattaaatgcgtatcccctcccaagaaggcctccttctttcataaacttgtattagttctcaccaggagtagtgtgagaataaagtatagtggtcgttggggtgtatccatggaccaaatgaagaggagaatgagggagtgacctggtgttgtgtcttccgtcagtcatccattcactatttccataagcattgactaagcgtgttctgtcactggcctagatgatgtgaatacagaaataacacaaatctctatagagtcccaatctactgatcatctgtggccacggcaaagaatttaagtaaaattctcaaatttactggataatcgttcttactcttctttttgcttcagctgaagaactgaattaagggtggaactccaggcaccattctgtaaatgaaacatatactgaaaatggaaacagtatactgaatcaatctgtatactgatatgtaataaaacagataatatgcttactaggagcctctcaggaagctgtttggggtagcaatggaacgctgagacttccaagggcctgctcaagtaaccacagaccttcccttcacctacctgccttcaaagagggctgggggtgttggttactgctattgtcacattctgctgagcagagggtacaagtttgagtcagagctgaattgttgaagccagtggagaagaggcccatcctatcctctttcctctgtgcttatcaggctgtctttaaataaatcataagcgtatatttaaagaatatgggctgaagcaatactaaattggcctacacagacagctgtctgtcttcgtctagccttgattatctgtatccatttacttcaaagggaatgaaacattccctgggcagtagcagaagccacagagaaactcaggygtcttaaccaagtctggcatcctatgcatt

SEQ ID NO: 78339 - DNA, 699 bp, Homo sapiens
ttttatacaatacagtagcttccagtagaagctaaaaggctttttaaaaatgaggctaattttgcatatactggtaatcctgaaagtacctttttatgaagaatttatgagaagactttataaaaaaataaggctatttctttctcaaatactctcattttccaagacaaactttatcatttggacctaccttgcttttactccaactgtgatggttttctgtacagtgctgttgagatgaccaaggtatactagtgtgagaaaattactggctgggaagtttgaattttgtttgttttatagagaacaagactgccaaacttaagtccaaaatatagtaaaacacattttgtgcttaattaactccatgtagaatttacttattcccccaaacttctactgcctaatatgaagagatgactttaatgtattttatctactattggcccttgacttttgatttctatagtcaagtatgtgctaatatctgcattcaagaaatagttaatctattatgttgtcatttaattaactatggtaatttgttatgttaattcatggtgttctagaaattaaccattaattatttcctgattgcatcaaattggtaattgtattgtatatttacattttaaaaattttrtatgaatgttgctgttcttgcaaatgaaaccttcacacaactagaaacaggtttaa

SEQ ID NO: 78340 - DNA, 633 bp, Homo sapiens
ctagagaattgtccattatggtagaagtaagaataagaagtggggctgaaagtcaggacatttcttgaacatctctgtgtaagcctgaggcaggagaacagggcctggaggcagggaacctaaggaattcctagaaccaaatcaaacggaaacacttcagctatgacaggaaatatcctcttcatttacatagrgcctaaaccaagtcaatgactttgtaactttacttcatcctctttcttcatttacgtagggtgtacaccaagaaaataaccttgtaacttcactttagcctcttcatttacataccgtgtacaccaagtaaccaatggaaccccctaaagggtatttaaaccccagaaatttttgtaaccagcccgtgagccgcttgctcaggtccactcccaccctgtgaagtgtgcttgcattttcaataaatctgtgcttttgttgcttcattctttccttgctttatttgtgcattttgtccaatcctatattcaaaacgccaagaacttggacaccctcaaccagtaacaagagtctaatccacttcatgtgcctcccccagcccaggtaaaaaattcctggtggaaaaatcgcaccatctgggcaagtgcagccttggtgaag

SEQ ID NO: 78341 - DNA, 633 bp, Homo sapiens
ctagagaattgtccattatggtagaagtaagaataagaagtggggctgaaagtcaggacatttcttgaacatctctgtgtaagcctgaggcaggagaacagggcctggaggcagggaacctaaggaattcctagaaccaaatcaaacggaaacacttcagctatgacaggaaatatcctcttcatttacatagagcctaaaccaagtmaatgactttgtaactttacttcatcctctttcttcatttacgtagggtgtacaccaagaaaataaccttgtaacttcactttagcctcttcatttacataccgtgtacaccaagtaaccaatggaaccccctaaagggtatttaaaccccagaaatttttgtaaccagcccgtgagccgcttgctcaggtccactcccaccctgtgaagtgtgcttgcattttcaataaatctgtgcttttgttgcttcattctttccttgctttatttgtgcattttgtccaatcctatattcaaaacgccaagaacttggacaccctcaaccagtaacaagagtctaatccacttcatgtgcctcccccagcccaggtaaaaaattcctggtggaaaaatcgcaccatctgggcaagtgcagccttggtgaag

SEQ ID NO: 78342 - DNA, 633 bp, Homo sapiens
ctagagaattgtccattatggtagaagtaagaataagaagtggggctgaaagtcaggacatttcttgaacatctctgtgtaagcctgaggcaggagaacagggcctggaggcagggaacctaaggaattcctagaaccaaatcaaacggaaacacttcagctatgacaggaaatatcctcttcatttacatagagcctaaaccaagtcaatgactttgtaactttacttcatcctctttcttcatttacgtagggtgtacaccaagaaaataaccttgtaacttcactttagcctcttcatttacataccgtgtacaccaagtaaccaatggaaccccctaaagggtatttaaaccccagaaatttttgtaaccagcccgtgagccgcttgctcaggtccactcccaccctgtgaagtgtgcttgcattttcaataaatctgtgcttttgttgcttcattctttccttgcyttatttgtgcattttgtccaatcctatattcaaaacgccaagaacttggacaccctcaaccagtaacaagagtctaatccacttcatgtgcctcccccagcccaggtaaaaaattcctggtggaaaaatcgcaccatctgggcaagtgcagccttggtgaag

SEQ ID NO: 78343 - DNA, 688 bp, Homo sapiens
attcaaaacatagttgcaacacaagcaacctaaaaataattaatatccagttacaacaaaaataacataaaagctattattaataatacttaatagtagtacctaagraaaagatacacttgaagaatggaccaaggttagaaacaatggcctaggaatatataaaagaatgaatctcacagtaatcaggtaaatgcaaaggaaggtagccatgtgatataccatctcacatccaatgacattgcgaaaaattaaaatctgtttacaccaaaagctggcaagatggaacactcatatactgaaatgggcatgtaagttgttcatcaactttgtaaggcaatttagaagaatcttgttaaattgaagacactcatatctaagactcaagcaattccacttctaagtgtatagcctagggaaacattctcaagtgttctcaagaagatatgtacaatagtgtttataatagtgtaagtgatagaaacaatctaatgtctatcatgggacaatagtgtttataatcgcataaacactggaaacatctaatgtccatcaatgggagatgcaatataaaaataatttttaaaatttataccacaaacactacgcagcttaaactataaaaagttaaatcggaggctgggtgcagtggctcacatctgtaatcctagcactttgggaggctgag

SEQ ID NO: 78344 - DNA, 688 bp, Homo sapiens
attcaaaacatagttgcaacacaagcaacctaaaaataattaatatccagttacaacaaaaataacataaaagctattattaataatacttaatagtagtacctaaggaaaagatacacttgaagaatggrccaaggttagaaacaatggcctaggaatatataaaagaatgaatctcacagtaatcaggtaaatgcaaaggaaggtagccatgtgatataccatctcacatccaatgacattgcgaaaaattaaaatctgtttacaccaaaagctggcaagatggaacactcatatactgaaatgggcatgtaagttgttcatcaactttgtaaggcaatttagaagaatcttgttaaattgaagacactcatatctaagactcaagcaattccacttctaagtgtatagcctagggaaacattctcaagtgttctcaagaagatatgtacaatagtgtttataatagtgtaagtgatagaaacaatctaatgtctatcatgggacaatagtgtttataatcgcataaacactggaaacatctaatgtccatcaatgggagatgcaatataaaaataatttttaaaatttataccacaaacactacgcagcttaaactataaaaagttaaatcggaggctgggtgcagtggctcacatctgtaatcctagcactttgggaggctgag

SEQ ID NO: 78345 - DNA, 571 bp, Homo sapiens
atcaacccctttataacgaggtcataagaaacacaagtaaattatgacaaaatgaaaaaaaaaaaaaaactcttaactttaagatgctaaagagcttaaagaaaatgaggagaaactgttgctaaaatatgctgtatgcaagctcaatcagtttctttcatctagtcatattctaagttatttcagggtagaccaggctgctaattatatatcaaaaacatacctaaaacggttatcaatattaacaaatttgtaattaaattcacaattttgcaggcaaattccaaatttaaggcaaatctaccctaatctaaatgataacttatttttgtctctcaaaagaaatgagtttatgaaaaaggaaaaagcacatctgggtaagacggaagattgaaaaaaaaaagcatctaactttggtccccaccaaaaccacactaaaaatattgtaaagataatttttaaatcataacccgcaaggaccagagtgaaggacaaaaaaaaaaaaaaaggagcrtggagaacagcaatgaatttttgaagctggaaaagcaaacaaacataaattgacaga

SEQ ID NO: 78346 - DNA, 535 bp, Homo sapiens
cctgggttcaaattcaggccattccacttagtaattaggtgactttagacaattaactgaacttctgtgtgcctcaattctcacatctataaaatggagatgacaacagtgcgtactttataggatgatgaagaatacatgagtttatccatgcagagtaattagaacagcgmctgttcattgcaagcactcaatgaatattggcttttgttgcagctattattatttcaacagtatgacatccctgggatgatcttaggaataaattctgatcctacagattaatggatagagaggagtaaaaccaggataacctcttttcttcctgctccttcatgaagaaccaacacaaaggcaattataactgactcatcatacagtaaagtgctttactattttaatgttataaaccagctatgcagcaactggactaccacacccaaagaaactatcagagctcaaagggcttacaatgtatagagtaagttggaaatacatggctgcagcaagaggtagctattggggggtaatgaaa

SEQ ID NO: 78347 - DNA, 1141 bp, Homo sapiens
attgctgacaatttgaggcctgataacattaaagggctacccaggttctcctatcagggtatagcagggtggtatagtggataatctcctgaaattaagagtcttggacaggttccaccaattacccttattatcaacttttttgaagagccctgaaaattacactttatggactgccagtttaattcatgaacaaagctcttaaatgctgctaaaaatacatggccaagtgcagtggcttatgcctgtaatcccagcactgtgggaggccaacgcaggtgtattgcttgagcccaggagttcaaaaccagcctgcgcaacatggaaagacaccatctccacaaaaatagaaataaaaaattagccaagcatggtggtgcatacctgtagccctagctcttcaggaagctgaagcagaaggatcacttgagcccaggaggttgaggctgtagtgagctatgaacacaccactacactccagcctgaatgacagagctagaccctatctatctatctatctatctaaattaattaattaatgaaaatagaatacaaactggagaaccctattataatcagcactgttgtcattattatcatatactgctctgtgaattaacatagaccatatgtcacatcatccttctggccaagtgggtgtgtacatgtgtgtgatacacttatacatgtaaataacctcccacacacactcacagtcacacacacacacatacatgcacatacacacacacttatacacattcaagtacacattcattcacacacacacaagcacacacacattgttagccaaagcttgataacccacacttagttttgatgaaattaaatcctgccttcaacacttacaacgtaaccagtcacattatcctcactgcttttgggctcagcagtctgcaaaacagagtcttggagttatcacttattattcacaccaaggcaccttttttaagctgataaaaacttttcaatcaacaatgactttcatgactttgctgagttgatattttatgtaaataatcagcagatataaatgacttcaagtaaacataaactcctaaaacatcttagggacactgwaacaaaggattgagagtaaataaaagatttaaaggtttaa

SEQ ID NO: 78348 - DNA, 967 bp, Homo sapiens
cctccccctttgctctctttctcctgctctggccatgtaagatgttgagagcttccccttcgccttctgccatgattgtaagtttcctgaggcctccccagaacttgtacagcctgcaaaactggtcaattaaacctcttttctttataaattactcagtttcaggtagttcttgatagcaatgcaagaactaatacaagagtccattgtgctactcttgcaactttactgtagattggaaaatgttcaaaataaaaaagttggaggaaaaagaaaaaaggttctactgggaatgcaatacctgagaataataattttcaaagacaaccttcccaaaattgtggactgagggaatatgggctcacagccaacatcaagtccaacctactaggtatgtattctgtactttaaaatgacgtggctttgtcagagcaggaaaaaaatagaatacctggagagatggagcagaatgggttgggagcagaattactatttcctctttcatcttctgttgtgtgtttcattggagtttgtgcagaatgccagatcaacttcaaaaccagcaactgaacattctggacaagatgtcatacttttcattaaaacagacttcctagtctggtctgatttcttcctctcctacaatctcctgggcaccctctccttttttttttttggtgtgtttgcaaataagtcatttaatcatccatttcttggacagtgaacaccagggatacagagccaaggagtggtgagtactaattgggttgtctgcctctgacagagggtgagtgacggcccagctgttcagactgatggcatccaaatgacctgaaatcactgctgtggatttaccgagccatcaataaagactgccttttcttccgttaacataattaagacagtgaactatttggggggaaggaaaaaaagagaggatctgcactagggactcasagaacaatta

SEQ ID NO: 78349 - DNA, 1545 bp, Homo sapiens
  misc_feature (1)...(1545): n = A,T,C or G
aaaatattctcaagaaggctaagaggaagaatacatgtaaaatttctaacataaggtgttagagaaaacaccaggaaaggtgtttcctcagcacataaatataggacaaagcaccctctatgaaacaagaacagaaaaccagaagaagaaaacaggctgaggtgaaaagagagatggatgcatcaaggaattattatgaggaaactaaaccaacattagtagaattaaaattaaactgagaacagggaaatagtggaatcaacaccacagaaagtcaaataaataatgtattgagataaggcggctctaccaatctgcagttgcaaaagacacagatgacaatcatgaggcagaagacaatagagaaaagctgggtgcagtggctcattcctgtaatcccagcactttgggaggccgaagcaggcagatcacctgaggtcaggagttcgagaccagcctagctaacatgaggaaaccccgactctactaaaaatacaaaaagtagccaggcatggtggcacgcacctgtaatcccagctactcgggaggctgaggcacgasaatcacttgaacccgggaggcagaggttgcagtgagccgagatcatgccactgcactccagccctccagcctgggtgacacagcaagactctgtctcaaaaaaaaaaaaaagaaagacaatacagaagatgcacaacagagatccaagagataaaggatccatgttcctgaaggagagagaccaaatcaatggatagacaaaaatgtaaatataaatacatgtcctgggctgaacagagaactggggggcgcttaaaggagccaccacatcncagcaaaattgatnnnnnnnnnnnnnnnnnnnnnnnnnnnnnnnnnnnnnnnnnnnnnnnnnnnnnnnnnnnnnnnnnnnnnnnnnnnnnnnnnnnnnnnnnnnnnnnnnnnngctgtagtagttatcatcctgtgtcactgtggctagaaaaatggacacacataatgcaaattaaagagaatagaaaatgcctgctgtttggaccaaaaggtattgagtgggatttagagattgcagctttataatggggcattattggtgcctcctcattgtggaattaagggctgtggtagtttcgctcttggtttatttcttttttttctacaaaatgctagagcctgttttctgccagatgctttcttcttggtttgttaatatttacagaaatcaggacggaataggcgtataccagagttgtctttaagaaaaataaaaagaataagacctgagctttgggttgtttctgatattcctagctcttgatctgcttgtggtaccaaatcactggtttgagagtcagaagataatgatccagaaactacctcttgaagcaaaatggggtggacttgcttgattttatcccttaaagactgggctgctaccctgtatgtattgacatgtgcctggcacatggaaagtcctcaataaatgtaccttctgcgtggcctggagagaacattataacattatctgccgaagagttcttaatg

SEQ ID NO: 78350 - DNA, 1545 bp, Homo sapiens
  misc_feature (1)...(1545): n = A,T,C or G
aaaatattctcaagaaggctaagaggaagaatacatgtaaaatttctaacataaggtgttagagaaaacaccaggaaaggtgtttcctcagcacataaatataggacaaagcaccctctatgaaacaagaacagaaaaccagaagaagaaaacaggctgaggtgaaaagagagatggatgcatcaaggaattattatgaggaaactaaaccaacattagtagaattaaaattaaactgagaacagggaaatagtggaatcaacaccacagaaagtcaaataaataatgtattgagataaggcggctctaccaatctgcagttgcaaaagacacagatgacaatcatgaggcagaagacaatagagaaaagctgggtgcagtggctcattcctgtaatcccagcactttgggaggccgaagcaggcagatcacctgaggtcaggagttcgagaccagcctagctaacatgaggaaaccccgactctactaaaaatacaaaaagtagccaggcatggtggcacgcacctgtaatcccagctactcgggaggctgaggcacgagaatcacttgaacccgggaggcagaggttgcagtgakccgagatcatgccactgcactccagccctccagcctgggtgacacagcaagactctgtctcaaaaaaaaaaaaaagaaagacaatacagaagatgcacaacagagatccaagagataaaggatccatgttcctgaaggagagagaccaaatcaatggatagacaaaaatgtaaatataaatacatgtcctgggctgaacagagaactggggggcgcttaaaggagccaccacatcncagcaaaattgatnnnnnnnnnnnnnnnnnnnnnnnnnnnnnnnnnnnnnnnnnnnnnnnnnnnnnnnnnnnnnnnnnnnnnnnnnnnnnnnnnnnnnnnnnnnnnnnnnnnngctgtagtagttatcatcctgtgtcactgtggctagaaaaatggacacacataatgcaaattaaagagaatagaaaatgcctgctgtttggaccaaaaggtattgagtgggatttagagattgcagctttataatggggcattattggtgcctcctcattgtggaattaagggctgtggtagtttcgctcttggtttatttcttttttttctacaaaatgctagagcctgttttctgccagatgctttcttcttggtttgttaatatttacagaaatcaggacggaataggcgtataccagagttgtctttaagaaaaataaaaagaataagacctgagctttgggttgtttctgatattcctagctcttgatctgcttgtggtaccaaatcactggtttgagagtcagaagataatgatccagaaactacctcttgaagcaaaatggggtggacttgcttgattttatcccttaaagactgggctgctaccctgtatgtattgacatgtgcctggcacatggaaagtcctcaataaatgtaccttctgcgtggcctggagagaacattataacattatctgccgaagagttcttaatg

SEQ ID NO: 78351 - DNA, 686 bp, Homo sapiens
cattgtaccaaggccatcataggagtctcgcttggtatccgagtcccgggaagtgtccacgagcagagtctacataggttctatttgaatgtcagggggaatgaaaccagaaatgaaagcaaattaatagccatagagatttgtttgatcacaagaaattacacggaggaaaagtctcctatctccatggaaaaatttacacccttctccagccagctgtgtgagtcgaggagagatggggaaatttgtaatcatttgcaagtttgcccagaggatgagttatgtcatttttcctgcaacaatctgtgctgctggctgacagcgtggaatttcctcctggattgtgttggcgactactcatgaaaatggccaattaggctgtgcaaagccagaaacagtggcttgccggaaactgttaaagagagggatgaggcagaggataaactgagttcccacatcgtggctgtttgagcattctgacctcttgcagtgtttggtttactcaggtttcatccagcctcttggtttcactggccactggcgagcaggactgacctcttgacaaacagttcttagtcgcttccagagcccagggctgcagcccttctctccccaacccccmcagaacatttcccttgcaggcacctgggagacagatggcgcaatagcctggggaaacacttctt

SEQ ID NO: 78352 - DNA, 652 bp, Homo sapiens
gccctcctgagtacctgagactacaggtatgcaccaccacacccagcctcaccaaactcctttggttccggtttctttcattcaacataatgtttttgaaaatcattcatgtttctatatgagtagttgatttttgttttgattgctgagtaaaatttcattgtatgaaacaccgcaccacaacttgttaacccacaaatagtgccttgcatgtattgaaacttcactattgccagacactgtgttaagcacttcccaatgtctcataaccaccagaggaaaggtgttgtgatggccctttgtggaggttttgccttcttctgttcagtatcagatctcagtcttattagcagctggatctgtcttcctgtgtggttttggtgcaaagtaaaatgcaagaaattagatcctccttcttgatgggrgtgaccttggcctggccagtctgatgctgtcttcaggaactctggaagctaagtgagtgacataaggacccaatgcagggggaactgcagggcacaaagaagattctttctgccacgtgacctctgccgtgactcctgcctggccttctgagcagcctagcttcctgccagttttctactcctccaggcttccctcagttccaataatttctttttttttttttttt

SEQ ID NO: 78353 - DNA, 1128 bp, Homo sapiens
ggggaacaaggagtgtaccattccatctagaccatcatctacaaatagaaacagacacccaaacattatcagatacttgaggaaaatcaatagcatggaagagagtcatctaaattaatacaagaaagaagaaagccttaaattatgtatcgtgagtctcctcagagaaagtcaaagttagaagacccataatagacctggagaacacattcataagttatataaagaaaggactattatccacaatatacaaagagagcctacaagtcaataaatgaaaaacaaacatcctgatagaaaactgagcaaaactgagttttctatcagtttcctgatagatacctgggcaacatagcaagaccccatctccactagaaacaacaacaaaaaaagccaggcgtggtggcatatgcttgtagtcctaattacttgggaggctgaggtgggaggatcccttgatcccagaaggttgacagtatagtgagctataatcatgtcactgcactccagcctgggcaacagagtgagaccctgtctctcaaaagacaaaacaaaacaaaaataacaacaaaaactgagcaaagggtaagaatagggaattaatgggaaaaagaaatgcaggcaacctgtaaaaggaaacacttagttttattggcaattagggaggtacaaattaaatgagataattttgctaatcaaattggtaagtttaaaaggttaataaaatacagtattggtgaagatgtatgtaagcaggaactctcatatgctcttgatgttataaggtagcaaagctgttttgggaaggcaatttggcaatgcctatcaaaattttaaatgttcatagtctctgacctagcarttctacttcaagtaatctaatttacagaaataattgcacacatgcacaaagatacaagtaagaggaaatttattgcctcagtttttttcaacagtaaaaaacaaaatgtaaacaacccaaacgttcaataattcaggcatgattaactacatgtagtaatacacgtgcagtgtctgcagcaatgcagttgctttttaaaagtgacagaactatatattctgacatagaaagacctctaactgtatttagtagaaaacaaaaaagtc

SEQ ID NO: 78354 - DNA, 694 bp, Homo sapiens
agaaaatgttctctacctcttttgatgtcatccaactgaggttcaggtgasgggttatctttcaagggagaagttttgggtccaactggaggcttcgttggagctctgaatggcataggtggtggaggtggtggtggctgtgacgtctgtggaggacgagtgggctgctgttccattcgggcctggattttactgctgccctcagctctgaaaggagatacagacattaaattagcagggcaaaaatagtggttctcaaatttgtccaggtgactgaaaactcagaagtctctgtagaaccccatgttctttccagaccacttcaaaatactgatacttgtaattttgtcatgtgagctattcattcaacatttgagtgtctactgtaatccagtactatattatgtatcagggatacagacatgaatagaatatttactgccctcgatgagctcaaatgtatagcaaacaaatgtaggatataatgaaactatgaaaatccattttactagtagaaaatacattcatgcatcccttaacaatgagggtaagtcctgagaactgcatcatgaggtgatttcatcatgcaaacagcagaatgtacttatgcaaaccaatatagcatataattttttcacatgaaaacccaaatgtcccaccaccataattgaatatcagtcattccccctacttg

SEQ ID NO: 78355 - DNA, 715 bp, Homo sapiens
tttaaaaaaaaaaaaatactgtattatatggtaacaaatagaaccactaggttatttctatttatagaatgaatttttattttcaaataaactctaactggcttcattttagacatgtagcaactgttgaattaaagagttcactatattaaaaaataggcaaagttttattttggtattatagtaatctcaaatgtatcttgtaaaaaaattaatgttttcactccagttaagtatagtatatattgctccttcataattataagtctataagttatcttatcccttaggtggtactgtagcaatcatgagattaacaaaataggcttaattataaagtatatccccctttccctaatggttcccatgttttaggtcttaaaaaacattatttctttttattgcatttgaggaagacatattttactctgagcacatatttacatattttgtctgagcacaggtagtgttaagattattgatagaacactatgagcaagcagatgttcacaaccttataaaaactgaatagataacagaggtttggaaayatgatataaacctgcatctggctattcacataccttgttttcttcacctgaatgctgctactgagtttttccagcacatattcaccagtgtcatgattaataataagcacacagtctttctggtaaggccgtttgttccccttgaacacagtcatgggtggtgt

SEQ ID NO: 78356 - DNA, 760 bp, Homo sapiens
tagcccattttgaatattacttttattcaacaaataaatatcaggtgctaatgcacaagccttcatcatgtcaaaaacacatccaagtgaatgattttttaatgaagacattatggaatttggagaaattactctttcaggtaattagaatggtctatgttagcccttttccccaccacctaaacccatatccatctcagtttccataactcagatcaaaatgaatcatttgtaagattttggaaataaattcactctacatagtttgctactttgttctgtggtaatagtctgtgttaccctgatgatataacaactcatgggacattcagattggtgcgagacaataggggttcaatcttggttctaccacttactggccatatggcttgactagttgctttcagaaaatgaaaaaaatagtacaatttttatgagtatttcatgatgtagagcacttggtactgaatatagcacattatagtgggtcagtaagtattgatttattattgatattggtctttaaaaaattttcctgtgtatagtatttgataagtaacaaagaattataacaaataaatctgatcttgtttttctatttttaaaaataattattttcaagccaatttattttacgtgcttcagtctttttttttttttaatttaamttaatttcaagttctgggatacatgtgtggaacgtgcaggtttgttacataggtaaacatgggccgtggtggtttgctgaacctgtcaaccc

SEQ ID NO: 78357 - DNA, 850 bp, Homo sapiens
tgcaaaggccccaaggcagataatagcttactgtcttagaggaactaaaccaagaccagagtaactgtggctcagtgaaatagatgaagtagggtagaaagagtggcactagggtagggctagagaggcaggtagtgtccagagcacagaaacttaaggagcttaacagctcgctgaagttttcacagttaataaggcacctctttaaacttgtgctctttatattacatcatatattcttcccagagttagaggcataattatagcatctagttatatgggatgatagaattaaaaaaattttttttaagtataatttccttcaattattaaaacaagtctctgatatcactaaggcaaacagtaatccatagaaacagatgagagatgtatgtacagggggctgactgaactagccaagatcacacagtaagtgctgcaacaggggtgtaaaataagtaaaactccacctgctttgaggtaggataagggtaagaagttgcacatggaccatgtatctactatgtgccagatcttggatattttagaaatgttactcagaargatctttgacaatcacatctgctgcaatttgaaataaattagtttctttttgcttttttctatcatgaaatgtaagtcatgatattctagtattctaactcaatattaatgagggggcagcaattgcttctattttcaagagcagacctgccagaagaagagaaaggtgttaacatatgaaatatatccttaaaaagtaataatatccatgatgagaattatacagttagtacacattacccttatgctttgatgattataatatatcagtcaaaggcaagtgaaa

SEQ ID NO: 78358 - DNA, 850 bp, Homo sapiens
tgcaaaggccccaaggcagataatagcttactgtcttagaggaactaaaccaagaccagagtaactgtggctcagtgaaatagatgaagtagggtagaaagagtggcactagggtagggctagagaggcaggtagtgtccagagcacagaaacttaaggagcttaacagctcgctgaagttttcacagttaataaggcacctctttaaacttgtgctctttatattacatcatatattcttcccagagttagaggcataattatagcatctagttatatgggatgatagaattaaaaaaattttttttaagtataatttccttcaattattaaaacaagtctctgatatcactaaggcaaacagtaatccatagaaacagatgagagatgtatgtacagggggctgactgaactagccaagatcacacagtaagtgctgcaacaggggtgtaaaataagtaaaactccacctgctttgaggtaggataagggtaagaagttgcacatggaccatgtatctactatgtgccagatcttggatattttagaaatgttactcagaaagatctttgacaatcacatctgctgcaatttgaaataaattagtttctttttkcttttttctatcatgaaatgtaagtcatgatattctagtattctaactcaatattaatgagggggcagcaattgcttctattttcaagagcagacctgccagaagaagagaaaggtgttaacatatgaaatatatccttaaaaagtaataatatccatgatgagaattatacagttagtacacattacccttatgctttgatgattataatatatcagtcaaaggcaagtgaaa

SEQ ID NO: 78359 - DNA, 850 bp, Homo sapiens
tgcaaaggccccaaggcagataatagcttactgtcttagaggaactaaaccaagaccagagtaactgtggctcagtgaaatagatgaagtagggtagaaagagtggcactagggtagggctagagaggcaggtagtgtccagagcacagaaacttaaggagcttaacagctcgctgaagttttcacagttaataaggcacctctttaaacttgtgctctttatattacatcatatattcttcccagagttagaggcataattatagcatctagttatatgggatgatagaattaaaaaaattttttttaagtataatttccttcaattattaaaacaagtctctgatatcactaaggcaaacagtaatccatagaaacagatgagagatgtatgtacagggggctgactgaactagccaagatcacacagtaagtgctgcaacaggggtgtaaaataagtaaaactccacctgctttgaggtaggataagggtaagaagttgcacatggaccatgtatctactatgtgccagatcttggatattttagaaatgttactcagaaagatctttgacaatcacatctgctgcaatttgaaataaattagtttctttttgcttttttctatcatgaaatgtaagtcatgatattctagtattctaactcaatattaatgagggggcagcaattgcttctattttcaagagcagayctgccagaagaagagaaaggtgttaacatatgaaatatatccttaaaaagtaataatatccatgatgagaattatacagttagtacacattacccttatgctttgatgattataatatatcagtcaaaggcaagtgaaa

SEQ ID NO: 78360 - DNA, 547 bp, Homo sapiens
cccagggcagctgaagcccaacctcaaggcacaggttgacctgtagccacagggctgcagtgaacagcttgagaatgccaagtggagggctgtggctgtcactggagtaaggaaggagcccccactctcagagcactgagaagggtgaaacacacagatttgtgaaccagcatggaagtggggcattcctccaacccctagaaatacctaagaatacagctaaccaagaaggtaaacaatctccacaagcataactacaaaacactgctgaacaaaatcagagacaacacaagtaatggaaaaacattcaatgytcatggattagaagaatcaatatcatttaaatggccatacttcccaaagcaatttacagaggcaatgctattccttgcaaactaccaatgttattcttcacagaattacaaaaaactattgtaaaacttatatagaaccataaaagaggctgaatacctaaggcaatggtaagcaaaaagaacaaagccagaggcaacacactaccctacttcaaactgtattgtaagtctac

SEQ ID NO: 78361 - DNA, 560 bp, Homo sapiens
tatgaaccctgatttttaatttctaaagcattttgcattaaaactttctaaaagcttcatggttttttgcattctgtatctatttcttaaagttactaaaaatgatctaatgtagccctggttatttgattttcaaaattcagtctaacaaggcaattttcatttttattaaaaaaaaaaagctgaaatttgcccaacttcttctaccaacagaagyactcaaagcttgatcttcttataaccctgtgtagagtttagacacataagtagtacttcacacagaatacaaagagagggagaaccagcacttgataaaaaaaaattgattttctttttcaaacctctttcaataaaattcacaacttgtttctctcttgtcctacaataacactgttggcttaaaggactttatggattttttttcccatataacaacagccacgtcttttgtagtcaaaatgccattacacctcatctttgaggataaacagttcctgctttgattctgtatcttttatcttgcttgccttttatcaaactgcactgccatcggccatcca

SEQ ID NO: 78362 - DNA, 906 bp, Homo sapiens
tcaagcaaatcactaaagtcagcccagattcgtggagcagttggactccatctctcaactggaagagtgacaaagagtttgcagctatccttaaccaactgcaaatatgaaaaaaaaaaaaacctctagaaatgaaaatcattataatcaaaattaggcactcagtacaggagtttcacagaatttttgacaaagttgaaggctgagctcccagaatataacatcccaaagattaaaaaaacaaaaaaaatttttggctgggtgcagtagctcacgcctgtaatctcagcacattggcaggcagatcacttgaggtcaggagttcgagaccagcctggccaacatggtcaaattgccgtctctactaaaaatacaaaacattagccaggtatggtggcgggcgcctgtagtcccagctactggggaggctgaggctggagaattgcttgaacctgggaggcagaggttgcagtgagccgagatcatgtcactgaattctagcctgggcaacagagccrgaccctatctcaaaaaaaaaaaaaaaaaaattaaaaagatgatggaaaccagaaaagaatgaaataattttttcagtgagctaataataataataataatagtaataattgtcaacaacattttatgatgagagaaaatattcttcaagaatgttttacacaaacaaaaattaacatagtctatcaccggcagacccaaattaaaggaaatactaaagggtattctgtaggcaaaaaacaaaatgatcatagatacaaagttcccaggtgcaagaaggaatgaagagcacaaaagtggtagatatatgggtagatctaaataaacatggactacataaaacaatgataaaaatttctttcctcctttattggacttacaagaaacaat

SEQ ID NO: 78363 - DNA, 906 bp, Homo sapiens
tcaagcaaatcactaaagtcagcccagattcgtggagcagttggactccatctctcaactggaagagtgacaaagagtttgcagctatccttaaccaactgcaaatatgaaaaaaaaaaaaacctctagaaatgaaaatcattataatcaaaattaggcactcagtacaggagtttcacagaatttttgacaaagttgaaggctgagctcccagaatataacatcccaaagattaaaaaaacaaaaaaaatttttggctgggtgcagtagctcacgcctgtaatctcagcacattggcaggcagatcacttgaggtcaggagttcgagaccagcctggccaacatggtcaaattgccgtctctactaaaaatacaaaacattagccaggtatggtggcgggcgcctgtagtcccagctactggggaggctgaggctggagaattgcttgaacctgggaggcagaggttgcagtgagccgagatcatgtcactgaattctagcctgggcaacagagccggaccctatctcaaaaaaaaaaaaaaaaaaattaaaaagatgatggaaaccagaaaagaatgaaataattttttcagtgagctaataataataataataatagtaataattgtcaacaacattttatgatgagagaaaatattcttcaagaatgttttacacaaacaaaaattaacatagtctatcaccggcagacccaaattaaaggaaatactaargggtattctgtaggcaaaaaacaaaatgatcatagatacaaagttcccaggtgcaagaaggaatgaagagcacaaaagtggtagatatatgggtagatctaaataaacatggactacataaaacaatgataaaaatttctttcctcctttattggacttacaagaaacaat

SEQ ID NO: 78364 - DNA, 1266 bp, Homo sapiens
tgcatttttccattttattcttctctataagtaatgaaatatacccaaatctttctgyctaacctgtattttgggtgttacatctcaactaccatgaataaaacatcctggctatttgttttgaaaataagtaggtgcaaagaaaaataggcaccttgcatctaattatctaatgagtaaattatgtcatgtaatgagtaaattatggaaagttcaattgtagctgatgtatagttcaactgagttaaatcttaccatattgttcctttttctaatgagctaaaagcatatacttttttcctggcaaaaagttcaaatacaatcagcctttctctttttatttctattttctttctttttggacccataataggcatcattcttcaaaatgatttccatgattgggccagaaggcctgtggttacttttctctttcactcggagattgcacctcatttactaaacagatattgtgtaattaaagatgggctgtttctttgagttctctagaaatttttcaattctaaagtccccagtggtctttcaaaaagtttgtttaattgaagcaaaagaaatagtggggccattgttcaggattatcagtgagaggtcatttacatgaggggactatggcatggtgggagaagaaaatgtggctaagtataattcattctgggtcccttgagcccacacaaaagatttaactttaagaggctaagttcccaagcccctagtttttagagagtaaatccaaactatagaacctctaaatcttttatcaattcataaaataatactatgtttgaagctaaaattagatagacttccataagctttaagattctgtaattatttggggtcagtgcaacaaaaaaaatgctggaaaataaactcttagcacaaatggagggggatttgggtttttaaacacatacatggccacattgaatgccatttagggaaaaataatttgaaattgaaaaaaacttatttgacagcagaccatgtcaagttttctgccctttaaaaaattcaaactaaagaccataatttattgtctcaaatagcatagcataaagttaagctacctctcatatcctctgatttctattttaaatcctaagtcaatttcattcaaacatctttttgggaaagatatactaagttccacacttaactttagccataattgtttcataattaaaaaattataccttgctttttttctcaagggtggggtttactttagcattctgtgccaaatgc

SEQ ID NO: 78365 - DNA, 700 bp, Homo sapiens
actctccaaacagattagaggcttgcagtggtattacttgaattccctacagtgtgtcttgcacgtagcaggagctctacagaactttctcagtttattaattaccggccctcccagctattgatggcttgtagtgtctttttacagtatctaaatgctgcagaagcattggctcttggttcacagacatcacrggttcacctaggctgccaactcagtatcaaatagcctgatgttgaacactgacatacctgtaaaatgcaactcatgatatcagatgcgatttttgcatgaggagtgtcttcgtctttcccaaagggtctcaggttatgttccaagcaggagtcccagagccccacaagggcctttgcatgcttttcaatggactcggtctctctgatggctgttgtgattcttgtgatacagatttcaactactgcctggtcattgttattggtttggtaatcctgtttggaaagaaaatcttcatgttaaataatactctagaaagttatccttcaaaggacaaaatactaactcagtcatttagaaaatgggtgcaccaggctgtgtgctaaggggtgagggtgtaaagcctaatacaataaaggcttccttccttggagatcctaatcttgtggaagaggcagatacacaaacatgctaaaatggagcaggttctactatcacccttagacag

SEQ ID NO: 78366 - DNA, 700 bp, Homo sapiens
actctccaaacagattagaggcttgcagtggtattacttgaattccctacagtgtgtcttgcacgtagcaggagctctacagaactttctcagtttattaattaccggccctcccagctattgatggcttgtagtgtctttttacagtatctaaatgctgcagaagcattggctcttggttcacagacatcacaggttcacctaggctgccaactcagtatcaaatagcctgatgttgaacactgacatacctgtaaaatgcaactcatgatatcagatgcgatttttgcatgaggagtgtcttcgtctttcccaaagggtctcaggttatgttccaagcaggagtcccagagccccacaagggcctttgcatgcttttcaatggactcggtctctctgatggctgttgtgattcttgtgatacagatttcaactactgcctggtcattgttattggtttggtaatcctgtttggaaagaaaatcttcatgttaaataatactctagaaagttatccttcaaaggacaaaatactaactcagtcatttagaaaatgggtgcaccaggctgtgtgctaaggggtgagggtgtaaagcctaatacaataaaggcttycttccttggagatcctaatcttgtggaagaggcagatacacaaacatgctaaaatggagcaggttctactatcacccttagacag

SEQ ID NO: 78367 - DNA, 777 bp, Homo sapiens
tgtgtgatctgtgcagctgcacagggctccacactgagtttaatactctgttgtttctgtcttaaaattctcagtactttttgtacaaggggtcccatattttcattttgcatagggtcccacaaatcatgttgccggtttagcatgcttatccacacatctcccgctggcttccatcgctcctgagagccactgccagcactagawccaggctgcacatctcagacctttcctcagcgtcagctctcacctgggcacctgactgctctctggcttctacccttgggcctgtactctcttttcaacaaagcaaccagaggatccttaaaaatgtgagtcagaatcacatcacccctctgcttaaaccctgcaatagctcccttctcactcaagggagaagaaaggcccaagtccagctggtggtgggcaaggcccttcgcggtctacctccctcccttacctcgctgacctcatctcctggggcccccctgttgtccctctgctccagccatactggccttcttgttcttctgaataggcggcaggcacattcccaccccagggcctttgatctggctgttgcttctgcatgggacactcttaagccagatatccatccccaagcaaaggaccagatatccttttaatgccagaaaagtcctctaacatcatctcatctataaaggacaacacttcatccagccttttaaaaaagtatgaagtgttggtgagaatggagaaatcagaacctccaggcattgctggtgggaataaaaa

SEQ ID NO: 78368 - DNA, 715 bp, Homo sapiens
tccaagaggcgatgggaagacaataaaatatactgaagaatgtactacatacttcagaaaatgatatgccttttctttttcttttcctttttttttttggcaggtaaagaaaatgatatgttaatgttagcagaaattgagtcactctggttgtagagaaacaattttgaatatggaaatktaatgagtatataacaaattactgtaaagctcaaatgtgataatgtatgtgaaaccgtctgttatatgttaagtcctttgcatctggcaggcagcatggttatggaggatgacaccaagtccatgtacctataatccacagagacatttaatagctttgcaagccaaccagtttcaatgatctacacaggaaatcctggcaaatgttgctaacagcaacttgactaatagaattgcctgatttgagttgtaaagcatttttgacgtacctgtctacctgctttggcagatgtgctcatagctgaggagtggtcactaagtggaagggaggaagcagagcccatgaagaatctatcaactggtggattagcacctggacaattaatatttgactatattggcaaagtgattggatatttcatagtgaacaatactttgacttcatgtacctagcacttaattactgaaagtacattaattatctatttaagaatgtaaatgagttactactaggaagaagttttaggtcattgga

SEQ ID NO: 78369 - DNA, 715 bp, Homo sapiens
tccaagaggcgatgggaagacaataaaatatactgaagaatgtactacatacttcagaaaatgatatgccttttctttttcttttcctttttttttttggcaggtaaagaaaatgatatgttaatgttagcagaaattgagtcactctggttgtagagaaacaattttgaatatggaaatgkaatgagtatataacaaattactgtaaagctcaaatgtgataatgtatgtgaaaccgtctgttatatgttaagtcctttgcatctggcaggcagcatggttatggaggatgacaccaagtccatgtacctataatccacagagacatttaatagctttgcaagccaaccagtttcaatgatctacacaggaaatcctggcaaatgttgctaacagcaacttgactaatagaattgcctgatttgagttgtaaagcatttttgacgtacctgtctacctgctttggcagatgtgctcatagctgaggagtggtcactaagtggaagggaggaagcagagcccatgaagaatctatcaactggtggattagcacctggacaattaatatttgactatattggcaaagtgattggatatttcatagtgaacaatactttgacttcatgtacctagcacttaattactgaaagtacattaattatctatttaagaatgtaaatgagttactactaggaagaagttttaggtcattgga

SEQ ID NO: 78370 - DNA, 791 bp, Homo sapiens
agtgggggttttggaatgtattccccttggataagagggaactactgtataggtttaaaatgatgacttgggtcaggtgtggtggctcatgcctgaaatcctagaatttggggagagtgaggcaggcagattgcttgagctcaggagttcgagagcggcctgggcaacatgatacgaacaagatatcagaaaaatataactgagttgcagaccacatccacaccatctgaacctccatgagaactcagattacaggactttaccatttaatcagtcttctttttaacaacactgcatatctgggatatgtttcccactattaacccagttcctacagtgaatgtgagctttatctcagctatattgacatgacctggaactctgacctggaactctttagccataacaaacatgtgaatcagaaaagttgactagtgtttgttagtgttgacattattttrgtctatataaacacttacctctttgacgctatgtgttactgcccatattagaaaaactcttgacatcacctggaaagaagtcaggacaacagaagatggaacaattcctgaaagaaattttgggatggataaataaatgtactgtactaagtttcgatatataatatattttctaaaacattccaacttaaatgtttagagtcaaaacggtcttgagcaactgaaaggtgtctatattgttacacagactaagttttcaatgtagtccacattaaaacaaagttttctccctaaaaacaataatatttttaatggtattataaaaccatg

SEQ ID NO: 78371 - DNA, 337 bp, Homo sapiens
aggctgcagtgagctgtgatcgcgccactgcactccagcgtgggcacggagcaagaccctgtctaaataaaaaaataaataaaaataagtaaaaaaataggaaacactggttttcatctcctctccctttctrggatccgccactgtgctgtcaggccatgttgggaggggctgtgttgcaccatttttctctccctccacccggttccttctccagtctttcttctggtgtcttttcctgcctgctgcctcctccccacttctctctttgcagctgttaagagatgcgggaggacctcaaagacttgacaagaggcaagttcctgggcatattgaa

SEQ ID NO: 78372 - DNA, 577 bp, Homo sapiens
gttctgtgttgttgaactgccactgaatttctttccacttggactattacatgccagttgagggactaatggaaaaacktatggggagattttagccaatttaggtgtgtaaatggggagactggggcaggcgggagagatttgcagggtggaaatgggagggctggtttgttagatgaacagggacataggaggtaggcaccaggatgctaaatcagaggaggtggtgagaagtgatggttgcagggagctgggtgggactttgagcctttggataagaagtgggaggcaggtgggggtgttgggttttccttctcctcctcccttctttttaggcttctcatttgctcctttttttctttttctgttttcctacttgagtatttctttcagtcctctttctgaatgtatctcccctctccttaactaggctataaacatggaactgaataatatataacatatgtgcttgaatatacagcaagactttatcagaaaattatccctcagaacaaagatgtgggtatgtgttccagtccttccattgtgtcacgttaaggagagctctctcaatgct

SEQ ID NO: 78373 - DNA, 577 bp, Homo sapiens
gttctgtgttgttgaactgccactgaatttctttccacttggactattacatgccagttgagggactaatggaaaaacttatggggagattttagccaatttaggtgtgtaaatggggagactggggcaggcgggagagatttgcagggtggaaatgggagggctggtttgttagatgaacagggacataggaggtaggcaccaggatgctaaatcagaggaggtggtgagaagtgatggttgcagggagctgggtgggactttgagcctttggataagaagtgggaggcaggtgggggtrttgggttttccttctcctcctcccttctttttaggcttctcatttgctcctttttttctttttctgttttcctacttgagtatttctttcagtcctctttctgaatgtatctcccctctccttaactaggctataaacatggaactgaataatatataacatatgtgcttgaatatacagcaagactttatcagaaaattatccctcagaacaaagatgtgggtatgtgttccagtccttccattgtgtcacgttaaggagagctctctcaatgct

SEQ ID NO: 78374 - DNA, 1238 bp, Homo sapiens
atgcatgtcagccttcactgttggggccacttgaccttgcctgcagctgacccctccctccaggtcctgggacacacccctccctccaggtcctgttctaggtgctcaatcgtcacggaaccagtcctggtatcactctcaggatggcctcaggagcacatttctctggtaactgagctcttgcagaacctcttatgagtgactaacttaaaaagtatgccttcaagcaacttcttgggacccaggctggtccctgtcacagctgacaggaatcttcttcctggcctctgcccacagcacctctgcctgctttcctccgtgaagttgcgcccacggtggaggcagtggagggacctaggacttcccagcttcttctgaaagaggttcagggaccgtcccatcactgagaagcaaagtggacaccacagatgtgagaaagttctaaagatttatttcctactgcctttggagctgccaatcagaagttcttcaaatgtgtgcttttggtttttattctcgtaagacgttaagaactgttgcctactctgccccatttcctttttatgcctgtttttagacaaaggacttaatgaaccacttccttcaataaagctcctctttctatctagtgacttgggtgacattaagatgggataacaggcaccccctgggggttcaagcctctttccaaggagctccaaacgacgagatgctcatctctgtgggctcagtccctcacagcctttagggcttttccaccttgtgggagatacattgggtagccaacacataacccatgaccaggcccctttgcctttgccctgttccatgatggggtccactgtagaggcttccgtygcagctaagggtagcccagtgacacatttgggctgaagtcagatagggagcttctggaaaagcccttgcttttctgattaaaggaagataaaaagacatcactggtgctctcatatttcacccttccgttgcttcctgccttgaatacaggtgtaatgcctggtgcttgggcagccagattaaaaccatgaggcaacaagcctgcacgctaaggattgtttgggggcagggggacagcagtggagagagtgaaaagaaccagcagctaagagacacaaatcctaaagctcaaagcctgtcccagatacaatctttgcagtgattcacacaggaaatgttaccgaaagtattcctaactgataaatagctcgcgagatgca

SEQ ID NO: 78375 - DNA, 1238 bp, Homo sapiens
atgcatgtcagccttcactgttggggccacttgaccttgcctgcagctgacccctccctccaggtcctgggacacacccctccctccaggtcctgttctaggtgctcaatcgtcacggaaccagtcctggtatcactctcaggatggcctcaggagcacatttctctggtaactgagctcttgcagaacctcttatgagtgactaacttaaaaagtatgccttcaagcaacttcttgggacccaggctggtccctgtcacagctgacaggaatcttcttcctggcctctgcccacagcacctctgcctgctttcctccgtgaagttgcgcccacggtggaggcagtggagggacctaggacttcccagcttcttctgaaagaggttcagggaccgtcccatcactgagaagcaaagtggacaccacagatgtgagaaagttctaaagatttatttcctactgcctttggagctgccaatcagaagttcttcaaatgtgtgcttttggtttttattctcgtaagacgttaagaactgttgcctactctgccccatttcctttttatgcctgtttttagacaaaggacttaatgaaccacttccttcaataaagctcctctttctatctagtgacttgggtgacattaagatgggataacaggcaccccctgggggttcaagcctctttccaaggagctccaaacgacgagatgctcatctctgtgggctcagtccctcacagcctttagggcttttccaccttgtgggagatacattgggtagccaacacataacccatgaccaggcccctttgcctttgccctgttccatgatggggtccactgtagaggcttccgttgcagctaagggtagcccagtgacacatttgggctgaagtcagatagggagcttctggaaaagcccttgcttttctgattaaaggaagataaaaagacatcactggtgctctcatatttcacccttccgttgcttcctgccttgaatacaggtgtaatgcctggtgcttgggcagccagattaaaaccatgaggcaacaagcctgcacgctaaggattgtttgggggcagggggacagcagtggagagagtgaaaagaaccagcagctaagagacacaaatcctaaagctcaaagcctgtcccagatacaatctttgcagtgattcacmcaggaaatgttaccgaaagtattcctaactgataaatagctcgcgagatgca

SEQ ID NO: 78376 - DNA, 786 bp, Homo sapiens
catataaagtgattaacacatcgtaagcttagagtaagtgctcaatacatgttagccatggtgaattataacaataaacctctagctggctcttgaatttgtgttcagttaccccagccaggaactgtaagtcatcttagaatcttccagttctcttcctcaactcactatgcaaaaagtcatcaagtatggtcacttctacctcctgaggcttgaagttcgtgccctttccatccctcccctggactgtcatcccagaggcccatctgatatggctgactgcagtctcatctcctctgacccacccaccactccagtgcttctcaaatgttcgtgtgcatctgaatccccaaggagtggatcattttcagtcaaggcccagaagggcctgggggagtctgcttgctaagaagctcccaggatgccaaggctgctggtccacaactgcactgtgaatagcaaatccctgctttttccctagttctctgaaaaccagctctaatcgtctcgatcccctgcctgagaatctttgatgaacttcacaactttacctaaaatgcccttttagtcttacttcctcctgttctgtctcacacaacatatgccttggccacacaygagcatctgaaaatgtcacacactgccatggctttgtaacctttgctcatgctgtttcctcttgtagagtgcctttccttatcttccctgccttttagaatcctatccctttttccaagactcagactaagtgtcaccttctccagaaagccttccttggtctccatg

SEQ ID NO: 78377 - DNA, 510 bp, Homo sapiens
tctgtcacccaggctggagtgtggtagcgcaatcttggctcactgcaaccactacctctgggttcgagcagttctcctgcctcagcctcccgagtagctgggactacaggcgcccgccaccatgcccggctaatttttgtagttttagtaaagataggttttcaccatattggccaggctggtctcgaactcctgaccttatgatccacctgccttggcctcccaaagtgctgggattacaggcgtgagccactgtgcccggccagcaggcagtttttcatggtgcagggtcatgcgggaccctgtaccacatggtggacccaagttgccttgtataatcctcacatgcccctgttaargtagtgccagccccactttgacaggggaggagacagagcctcagggaggtcccaccactggtaagcagtgtgtcctgatgttcccaccacctgcccagtccagggctgcaggctgggcttcctgcataccacagtgcccctacagggagga

SEQ ID NO: 78378 - DNA, 2111 bp, Homo sapiens
agggctgttgttggcccggcacggtggctaacaccagtaatcccagcactttgggaggccaaaccaggtggatcacctgaggtcaggagttcgagaccagcctgaccaacatggagaaaccttgtctctactgaaaaatacaaaattagctgggtgtggtggtgcgcctgtaatcccagctactcgggaggccgaggcagcagaatcgctcaaacctgggagcggaggttccagtgagccgagatcgcgccattgcactctagcctgggcaacaagagcgaaactccatctcaaaaaaaaaaaaaaaaaaaaaaaagctgctgtgaagattaaatgaagtacttcacaacaagcctgtgcaggggtgaagctcaggaaaagctggttgctattgttgatactgtgagcagcagcagcagcagcaagtcacatccccgccatgtgcacccctgctgcctggtgacatgggtgctcccagccaggccagggacccaaggtggctgggggagattatctgggtagatggctgagtccagcaggtgacagtgaggggcagatgggagatggggccccagggtggactgggggcagggactacaggaggacctgctagataaggtgttcctggcaagcttttgggatggaagagtatcccaatggctccttgcatttctggatccactctggacttacattaggattcaaggttactgccagaggccccaagcttgagcttaggaggaaaaaggaccccctcctctgcctctgccctgactgaggaggccttatctcctggggatgaaggggaaatgctgacagctgtatctcttctcagcctggcatgccccctgtctgctactcccttctccccrcccctccaaccctctctcccttgaggagttcctgtcttcttggctcagcgccagggtgcagaggactcaggcttgcgtccccttagatccagcggatctgcagatcttgggtctcaggggtgaggactgagggactggggctgggctgtggccaggggtcacttagtccatacccaccacttacaggccacccagccctgcaccagctgtcccatatccccccaacactcctcctatggtcctgattagggctgacttgactcccccaacccagccatcatggtgcttggcttcaataccctccactgtagcacatcctccccatggtcagcaaggagctttaaaacccatgcctcctgcaccttctaccacatccccattttacagacagggacactgaggccaagagtcacagaaagaggagggccagggatggagctaagatctgcttgacactgaagcagcagccttggaagaagggaaagagaggaggaagtgcccagccacacgggtaccctggcaccagccacggtatcatctttccataatcctggattttagctgctacattaagcaagtctccctttgcagatcccctaaggcagcctccccgaagccgatttaggagcagaggtgtgtagacataaaggtgccggtgatgccagtgatggcggcttgtccccagctgtaactgggtagaggacagttgggctctggtgttgggaaccaggccgttgatgcctccagcacagccagaaggagaaaaccctggctaacaggagaccccttcatgacctcctggccttcctacagccctcctccaggttctactactgggacccatgctggcacccctggatgtctcccgtgccagctggctgggactgctcccccacccctgctgccctctctctgtccggctggcctgagcaggctcctcgtcctgccccgccaccgctgacaagtgctgacttttcctccccttcgccaggctttcctgaacaggctgcctgtgtttggggctgggaggggctgggggggaagaggcactgtgacgcctctcatcctggccagccagcgtggccgccttcggggcaggcagtgggatgcagcctgggatagcggagttggctgctacgacctggtggatcttcataagcaggccctacttgggttgaggaatcaaggcccagaagaacagtatggcctaatctaagccatcgcctgctcagcagaatg

SEQ ID NO: 78379 - DNA, 1194 bp, Homo sapiens
agagtcacccacttctccccaaagctgatgagcagttacctggactaagcagaggtttctggagtataagggaagcaaaacaagcacaggggagcacgagagcatatccaaaagaaccagtgaaatatcctttcaccgcacacagtaactctcaactggaaactccttctgattttttctaagcatttaacaaacttcacagatgccctccaccccacacaatatgcttatgtcctttgaaaaatacgtaaatataaaaaaatacaaaatgcatgcatgtcctgtcaattacctctctgtcctttaccacaaaggaaaggcttcctattttacttaatgtttcggtcaggaagcatttaacatgagaaaaaaaaatctacctaaaccatcctaaacaaagagagagagaatgagaattagagatccagtgcaaagatacagcagcatctcccgtggcactaggatactagggcagtaagcacattcagacctcacgaaggggtggatccgggagttggaaagtcagtagaaacaaacttcccttccctcccattcctcgcttcaccattgtgttggcatggcatgcatgcgggtgtgaatgtatgagtgtgtgtgtgtgtctgtgtgtgtgtgtgtgtctggctggcatgcatgcgggtgtgaatgtatgaatgtgtgtgtgtgtgtgtgtctgtgtgtgtgtgtgtgtctaagaccacatagttctggcccctgttttactttgtgcctctgaacaattcrcttctctctctgcctaccagatttctgtgcgttttcaaagcatgaggggaaaaaaactctcttcagcttgaggcctacattaatgccctagattcagcaccagcttccaatccttcaatctctgttgcccatttccaaattccaggtagggaaggagaatcagaatggtcctgcccagttctgaatcagttctccttgatcaggtgcccacccttgctccacacaactgaagtgagggagggatgagtcatggctgcagggcctgggtgcacagtacgtgtgtgcgtgcacatgcaggggtgtgtgtgtgtgtgtgcacgtgtgtgcctgtgtgcacgtgtgtgtgttaggggggtctcccagaagaggatgtgagcttggcagataccccaaaactgtccatcatgattggtaaaataaaaatgtgattct

SEQ ID NO: 78380 - DNA, 830 bp, Homo sapiens
ggatccatgcatctcatttttgaggtcctggtgagataagcaatcctaggtatggaatgtgcatgggacaaatgagaccacaaggtgaataatgcacttcagaagtatacattctgctgcttccaacttcacccagacccctgtatgtgctggtgaagcaactatgtgagagcccagtaatatcaaacagtgagtcagcagggttttgtagataactacatgaagtgaaacccctaaagacactatagattgctgaggttacatgcttatcggaagaagagtcaaaaactattgaccaccaatcttgctgtctctttccccaggaaatccctacctgttcaggaattctttctcaatagacaataaacatcaggatttgagaggtcaacctaaatataaaagcaccaagtaaacatgcctgtggttgtgagaggcaccatccatactaatataattcatatttcacttttagggttwttttttctcactttaacaatcccattcaggaacaatgtaaagagcttacagaggaggagggaattaacttctgagaattttatatgctatttaaggaagatgaaaactgataattcattgttttcttctttaataatgatttaaatagggtatctgtcattttacagtcctactagaacatcataacacttagtttatgcaggtcttataaaaagagagagatggagaggtacacacagactcataaaactattttagaaaccttaagacaggaacaattgccaaatttcttttttcattttcaattttggtatccgtatgtcgtctaagagaaaactatctcacaatttatg

SEQ ID NO: 78381 - DNA, 609 bp, Homo sapiens
ccaatagagccttggggaaaggtttggcttctattagtttctccaatggctttaattatatataattacacagaagggataatgaatacttagttcatttccattagggtctcaacagagcttggtagttaagaccatgacctttggtgcaaaacagatttgggtgtgagcctggctctgtcactagttctatgattttgggtgagttactgaacctctctagcctcaatttactagtctataaaatgggaagactaataggattcatatcactgtgttcattggaggtaaagtatctggcataatgtttgctccatggagaatgccccaccaccaccacctcattatgttcatagatccttgtcaacggaggaatctctgtatttcctatactttacaaaaagacaattctgttgggtttgtcttttttcccacttaaaatggctgtgcaaagtattgtgaatatgttgtaaaacttcttactctgtacactaattacatcaccaaagaagggctctactcagctagaaaggagaagcttggattaraagaatggaagaaggggattttaatgcctttctaaggttactgaaggctatgaatattcta

SEQ ID NO: 78382 - DNA, 856 bp, Homo sapiens
ttgctctcccttcaccttccatcatgaatgtaagtttcctgaggcctccccagccaggcaaaactgtgagtcaattaaacgtcctctctttataaattacacagtgtcaggtagttctttacagcagtgtgaaaaaggactaatacagaaggtaagattaatatcattactatcaggctgaactaactaagcagaaacctgaagaggtcctttgctttaataacttttagtaactgacttttctatgaagtaatcaaatcttgacagcaatataaacttacaactaaataaagtgcattaaaaacaaaagtaacaatttttattacttatttttaaataaaatttcaagactttttactaacttttcttaacrtctgtgatatcaaggttgtttctatttggtctgcatctattgtgtatgaagggtggtgatcttatacaatgctgggctgctgcgcatctcttcccaactcaatgctcagcactgtcatggcagttgtctgaaattggccagcgtgaaagtatttacaccaaagaaaatggcaaactgtaaaccagaggtttttctcactggagagccaattattaaacacttgtcagcataccccagctgaagtgtcattcagacctacagtacaggcaaacaatttcgattttgaggctctcatttaaaagcagacatgaatataaggtttccctttgattagaaatatattttctgccttttaagcaaaatgtccacttaagaggcaagctaaaacagaatttctggcagtgcatactgagaaaattcccctaatggatttgccctagaagcctcacgtggatttttagaatgcaaaatccttttatttta

SEQ ID NO: 78383 - DNA, 764 bp, Homo sapiens
acagggagtataagacctactctggctttgagttgatagtgcagtaaggagaaacatctgtcttttttttttttccaaaaaggaatttgttaattataacaggagccaccaaactgtccatatatttgatttcataattctatttgggagaatttatgtcaagggaacaacctgaaagaaaaaaaaatccaaagatattttcataataatgtaattggtcatcatgataaattcttagtatcccaaatacttccaatggagaactataatgtgatctgtattaaacatcctaaaggtattaaaaatgtaaaggatgtatacaatggtatttcatggaaatatctatatttaaaacagaacataagatggaattcacacatggattacaattacatgaaacatctgtaggtatgttaagaataattggaagagaatttagaatattgtcaatgggcttagagtttattagcttttttcccctaaaaattcttttttttttttttttttttttttttttttggagacagagtctccctytgtcagccagtctggagtgcagcagcacgatctcggctcactgcaacctccacctcctgcattcaagcgagtctcatgcctcagcctcctaagtagctaggattacaggtgcacaccaccacacctggctaatttttctatttttagtagagatgaaatttcagcaagttggccaggttggtctggaactcctcacctcaagtgatccgcctgcctcggcctcccaa

SEQ ID NO: 78384 - DNA, 764 bp, Homo sapiens
acagggagtataagacctactctggctttgagttgatagtgcagtaaggagaaacatctgtcttttttttttttccaaaaaggaatttgttaattataacaggagccaccaaactgtccatatatttgatttcataattctatttgggagaatttatgtcaagggaacaacctgaaagaaaaaaaaatccaaagatattttcataataatgtaattggtcatcatgataaattcttagtatcccaaatacttccaatggagaactataatgtgatctgtattaaacatcctaaaggtattaaaaatgtaaaggatgtatacaatggtatttcatggaaatatctatatttaaaacagaacataagatggaattcacacatggattacaattacatgaaacatctgtaggtatgttaagaataattggaagagaatttagaatattgtcaatgggcttagagtttattagcttttttcccctaaaaattcttttttttttttttttttttttttttttttggagacagagtctccctttgtcasccagtctggagtgcagcagcacgatctcggctcactgcaacctccacctcctgcattcaagcgagtctcatgcctcagcctcctaagtagctaggattacaggtgcacaccaccacacctggctaatttttctatttttagtagagatgaaatttcagcaagttggccaggttggtctggaactcctcacctcaagtgatccgcctgcctcggcctcccaa

SEQ ID NO: 78385 - DNA, 764 bp, Homo sapiens
acagggagtataagacctactctggctttgagttgatagtgcagtaaggagaaacatctgtcttttttttttttccaaaaaggaatttgttaattataacaggagccaccaaactgtccatatatttgatttcataattctatttgggagaatttatgtcaagggaacaacctgaaagaaaaaaaaatccaaagatattttcataataatgtaattggtcatcatgataaattcttagtatcccaaatacttccaatggagaactataatgtgatctgtattaaacatcctaaaggtattaaaaatgtaaaggatgtatacaatggtatttcatggaaatatctatatttaaaacagaacataagatggaattcacacatggattacaattacatgaaacatctgtaggtatgttaagaataattggaagagaatttagaatattgtcaatgggcttagagtttattagcttttttcccctaaaaattcttttttttttttttttttttttttttttttggagacagagtctccctttgtcagccagtctggagtgcagcagcacgatctcrgctcactgcaacctccacctcctgcattcaagcgagtctcatgcctcagcctcctaagtagctaggattacaggtgcacaccaccacacctggctaatttttctatttttagtagagatgaaatttcagcaagttggccaggttggtctggaactcctcacctcaagtgatccgcctgcctcggcctcccaa

SEQ ID NO: 78386 - DNA, 768 bp, Homo sapiens
tgaggattaaatgaagaaatgcatgtaaagcatttagaacagtgtctggcacatagcaagcactcagtctgggcttattattaaatttcctgacaaaatgtttttattcttgctataaatgagggctcctctggccgggcacggtggctcatgcctgtaatcccagcattttgggaggccgaggcaggtggatcatctgacgtcaggagtttgagactagcctagccaacatggtggaaccccatctcttccaaaaatacaaacaattaccagagcgtggtggcttaagcctgtgatcccagccactcagcaggctgaggcaggagaattgcttgaacccgggtggcggaggctgcagtgagacgagattgtgccactgcactccagcctgggagacagagtgagaccccatctcaaaaaaaaaaaaaaaaaaggctcctcacaaagtgtccaaatacttgctcagcagttcagaaggagaactacaaaattaattcaagtaaaatgtctgaggaaacagagggatgagtattgaaagtgggagccatggtcragccagtccatcattagcttctgttctttctggcgcttccccattcactcggcagagcatcagctctgaccctggggatataaaggtgaacttacaagccctctgcaggagcccagaatgggagtccactggggggaataggtgggtaactaaatgacaaaagtgtataagacaaaatagaatcccctgaaaagagcagcaggggctacagaatg

SEQ ID NO: 78387 - DNA, 1171 bp, Homo sapiens
tgggctttactacatggttccttgccctgccccactttttgatgccttaattttctgttcatgccagttttgaactggtcatgagttaagttgggttcccccttgcaacaacaatttgcaggtagtttatttgggagataatctcagaaaaaaatgagcaatggagtgaagacgtatgagcaggcatacagggaaacctataaagggtgtgttgtgtaccactaatgcttagacccaatggaaattgctggaactctgtaagaaaaccagtgtcagaatcttcctacctaaaagtgaggaagtgagggagcagggcctttgtctccaacttctgtctgtcattggatgggagctattccctagggcatttactgctcmgcacttttaacatgctacatgaaggccaaaagaaaagaaaaccctcaggtggagaatcacaggagcttgcagttgggcatggccagcaatttctgaaatggcatgtcccaaatgaatgtcagtagtttatcaatagcatctgcaacaaccaggtcaccagtaaggaaactttgactacgtggtagcccgctgtatttatttactatctcttttttgaattccaaactctttataactagatattatttaaaattgtcagaataacctatgattctgacataggctagaggtacatatggccactttattgataacatttcagcttaaattttcttctagtatcacaataatttatttcctttctgattttaatgtggatatattagatgaatagcatcatacatctgatttgtttactgaaagtacttgacatcagttagccagtcctcaacagggtgccctgtatgtgtaagacacagttaaggtcttgtttacctctcacagtgaattgcacataccctgtaatatgcagtacctcacagccgtattcatatggcattttgtatagtctcttcctaaaaagcatcctgtgactttttctttggtaccatgctgctccgttataattatatgtggtaactttccactaaatttctttgtcctctaccctctaagtacatatcatttgtgtatgagaaaaccatcttttcttatacgcaggcagcagatgtgattagagggaaatctaatttatctggggtactctagaaatggaaggaaattacttcacagc

SEQ ID NO: 78388 - DNA, 583 bp, Homo sapiens
agggtgggaaagtgagaagggaaggatcagaagatactgctttgaccaccataaacacctttttgtgaaattaggctcagtgttgcttagctgtatttcctaacgacaatagggaaatgttcaaaaaaagatgtgaggagaggtagtaacagaataccatagaccgatggtttaaacaacaaacatagttctcacagttctggaggctggggagtacaagagcaagrtaccagatgatttgatgtcttatgagagcctgtctcctagttcataaccagcctcttttttgcagtgtccttatatagcaaaaatagggtcaaagagctttctggggtcctttgtataagggcactaatcccattcatgagggctccatcctcatgatcttatttctcaaaggccctacctcttaataccatcactgtgggggttaggattttaacataggaatttcagagaggcacagatatttgctccatttaagtgaggataatttaggggcatagcctctagaacccccaaaacatacttgtccttgtcatcttagcagaagatctggcacagtggataacacgtggttcct

SEQ ID NO: 78389 - DNA, 597 bp, Homo sapiens
aatttcacaagtgaagttgstgtcaggtaacttgccaggtaataaatagtaataagaataaaatttcaaacatcttcagagttgataggtgaaatttaaaaattggtcatcagggaatctatctcattgacaaggtaaaggaaaagacatagttagttgaattttaaaaagtcaaacagcaactgttgactcattgggaattatctagagaaagtaaagaaacaatcttaaagctaaatagaagggccattattctattttaacagcctctcaggccactgggcatgacttatattctcagcccttctgttttaaagacccacatgctcaaacacaaagagatatataaatctactcttgaacatatttaagtaccaagaatttagcctcattcccatgtttaccctaacagagtccatcaaagatggggcagaccagcaaaaacaaaagtaaaattttagagaatgtgggaaggtgttgctactctggatgatttggggtaaaaacatgggtctggagtaaagtttcagacaggctcagaatcctccctctgctacttggcttaaatgtgaataggtttttcattctgaattttat

SEQ ID NO: 78390 - DNA, 591 bp, Homo sapiens
aaggagaacactctaaaataatgataaaaatatgttctggtaaatatataaaccagtaacatagttgttatcattatcaagtattatgtattgtacataattgtgtgtgctatagtttcgtatgactggagtacagtgggtttgcttacacctgcatcaccacaaacacatgaataatgcattgcaatatagtgttaggatggcaatgatgtcagcagtcaataggaattttccagctccattataattttatggcaccaccatggtatatgtgattcattgttgatggaaaagtcgttgtgtggcacatgattgtatatgatacrtgggtaggctgctagactactctttgctctaggatggtaactcctatctggacacttttcatttgttactgtttgacctctttgcttgtattacaggctatatttaaagaaatagataacattctctctgaggttgatttaaaccaacatcctgtacgttgctgctatagcttcccaacattttgtgtagaggggatgctattgaagttgtgttttaatatggagccacactgttttctttctctgacccagtctacagtcagcc

SEQ ID NO: 78391 - DNA, 893 bp, Homo sapiens
tgcatgtaagacaaataatattagtgaattagtttatttaaaaccatcagtttttccaatgtgaatggactggttcatatcacaccatatttagagatacaaggtgattataactaacgtgtctacaagacatactgggtcaaacaatgtgatcaatccaaagggtatctttttaaaaagaatttaagtactcagctgcaaagataagttcactaatgagattttctttttttttttttttwaaaaaaaaaggtttttaatgagtcaaatttattacaaaaacttagtgtgtaatcaaagccaaatacattcctcaggcatgccagcggcaagcaaaataatgttaatagaatgttattaaaaaataaaactttttctgaatgatatatataaaacatcatggcacattatcatcatttgacaacagaaaacaggaagatatgtttcaatactgacttttgttgtttcaataaaggtaaaaaaacaaaaatttcaacagaacacataaattagaaattctagagggtaagccataaagaggtgttctcttccatgcaactgccagccgggcatggtggctcactcctgtaatcccagcattttgggagactaaggcaggcagatggcatgagctcaggagttcaagaccagcctgggcaaggtggcaagatcctgcctgtacaaaaaataaaaaattagccaggcgaggagtgcacacctgtagttccagttactcagaaggctcaggtaggaggatcacttgagcccaagtcaaggctgaagtgagccaagatcatgccactgtactccagcctgggcgccagagcaagaccctgtctcgggagaaaaaaaaaaaaaagcatgcaattccctacaaataatgtataatttca

SEQ ID NO: 78392 - DNA, 1008 bp, Homo sapiens
agttctgtccctctggagaaccctgactgataaaccaactacatcaaatgtatcagtgtaatcaatctacataaatgcaaaatatatatacagcaaacatttagtaatggtttactaggtgtcaaaaactatttttttttttaaagttttgcagatgatgaaactgaggcccaggaccacttgcccaaagtcacacaacttacaagttgcagagatggaactcaaataaagattagcttaatccttacgtatgtttcatactagtttttaactctgatttgggaaactgattgcctgacacggaaagatatttatttctaccgtaagtagattatatcctccaccttgccaacagagcaaggacacaggcactgaataaactgtctgaaccaaaaagctgtctgaatatccacttctaagttttaattggtgagagtatcagtatttcattgagctgtcgggaatctggcagttattccataggattttgagactgtcagaaagataacagtaaaggctattccacaacaaggagaaaaatgtgagtacattatgtaggttctcaatacaataataagtgaatacacaagagaaggtaaaaaaacaggcaccaagaatacatacatggattctgattctagtgatgaccatgtagctcctaacaggcaatgcccttacgtaaatagaaatataaaaacaagtatctagaggcactggaaagtgatgaargtgatactggaggagaattatcccttgcaagaagggaagggtactggatgaatttcctgatcttttacaaccttcagcctgatgctaagttttggtctgttccttgctggctaaattcagacagaacacctgtagtcttattggcttgaggtaccagaggacaaagtttagagaaacgagagatgtgggaaaacaatggagaaaattccaaaaagaagagattcagaaaatggaagcacccatttctgcgtatacattctgcccaataaggcaggaacc

SEQ ID NO: 78393 - DNA, 889 bp, Homo sapiens
atgcacaaaacaagccctatttaaaataaatacacaatcacacatccaccttggagcaagaatcagcaaacagataaacaaaacaacaaaaataagactgtaggattagaaccataaggacttctgataaacctatgactgagacagtaaattgaatatatttaaaattattaaagggataaaaggagtagaaaacaaaaggagagaacacaatgcacaaatcaacatctagcatatgtgaaaaataatccggtagaaagacaggttcccagcaatgtgaagagaataggggggtgaaaagagaggaaaaagccatctggacttataaaaatgtgtctgtttctcagcggctgtgttttagtttcatggcattaagaaacacaatatacttcttggtaaatggcattgtacttaaatacttatgctcttattctaaataactccaacagctgtatttcttcaacctttggcaatgagttctataattagagtatggtaatagatcccggatcagaagccagaaaagcgtaaccaggtgtcctcgccacttagtccctcatgctttggggaccacatgtctctgatgatgccgcttcatttcttataatggtccactttatcttagctctgaatactatcagctgaattcaacttattccttcctttctattttctataacaaccaaaaataaataaataaggcatagatgctgctctgttcttaaatgttttcctctttcagaagctggcacccattttcccaactgagaaatgtattactcagctttctatttcagaaattttcayattttgcaatcgatggattcttcagtgacagtgatctgtgtatagtaatttatagacctttctggctattcaggtctttgtc

SEQ ID NO: 78394 - DNA, 771 bp, Homo sapiens
gcctgcctcagcctcccaaagtgctgggattacaggcrtgagccaccgcgcttggccgaatgtattctctgttttaaaggcacataaccctttaatcaagctattgcaattagaaaatctgtcttacactctgactctagtaggtaaagatgtgtgttcagagctgtttgctgcagtgttgtttaaaaatctgaaaagctggaaacaacccatattcaggaggagtccagctagatcgttttagcacagaatacactgcggctcgatgaggggatctccgtaggttaacgtggaagcatgtaatatacaaagtgaaaaaagtgaagttgaaaaaaaacctatagaggatgaccctattttttttttaagtcaacacacagaactgttcattatgatcacctgtgacaagtgggaccggggtgtgaggaagtgggataaacttaaaaatacgtcactcctacttcaccaagcccttgtgccacaggccctgctcataaagattctgcccccctcagccctgctgagctagaggtggagtcctcagagggctgagtagggagagggctgggcgggggcagtggaggagcctgaggtccattcacatgtggagaccccaggggtcctgaggctccagctgctgtaagtcacaagtgggccaagtccccactaatcagcctctcctttggccatcctcagaccgcatggtgccgagcgcccacaacaggctcatggaacagctggccctcctgtgcaccacgcagtccaaggcct

SEQ ID NO: 78395 - DNA, 771 bp, Homo sapiens
gcctgcctcagcctcccaaagtgctgggattacaggcgtgagccaccgcgctyggccgaatgtattctctgttttaaaggcacataaccctttaatcaagctattgcaattagaaaatctgtcttacactctgactctagtaggtaaagatgtgtgttcagagctgtttgctgcagtgttgtttaaaaatctgaaaagctggaaacaacccatattcaggaggagtccagctagatcgttttagcacagaatacactgcggctcgatgaggggatctccgtaggttaacgtggaagcatgtaatatacaaagtgaaaaaagtgaagttgaaaaaaaacctatagaggatgaccctattttttttttaagtcaacacacagaactgttcattatgatcacctgtgacaagtgggaccggggtgtgaggaagtgggataaacttaaaaatacgtcactcctacttcaccaagcccttgtgccacaggccctgctcataaagattctgcccccctcagccctgctgagctagaggtggagtcctcagagggctgagtagggagagggctgggcgggggcagtggaggagcctgaggtccattcacatgtggagaccccaggggtcctgaggctccagctgctgtaagtcacaagtgggccaagtccccactaatcagcctctcctttggccatcctcagaccgcatggtgccgagcgcccacaacaggctcatggaacagctggccctcctgtgcaccacgcagtccaaggcct

SEQ ID NO: 78396 - DNA, 651 bp, Homo sapiens
caagactctgtctcaaaaaaaaaaaaaaaaagaaaaagaaaaagaaatggagagaactgcagtgttaaccatggcagccattagccgtgtgtggctactaaacacctaacgtggtgaatgtgactgaggaactgaatgttttatkcattggatttaaactggcttaaatgtaaacttagccacttgtgccaagtggctacacttaccacagatagagagcatgtccatcatgagggacgttctgttggccagtggtggcctaaatctcgcatgctgttctgaagagtaaaagagcaaatgtgtttaatgtgcccgtctgtagagagtgggcactcactgggtggcagccacgagcactgtgactggacaaacccagcgcaggtcacagagttatcacagagaactgactccacaacacctgcttttctcatttcagatgtgcctcaaggaagcagggctcccaggctgggccaggcccgcagctggcccagggcatgaggcttaacgcagagtcccccaccatctttattgacctgcggcagatggagctaccagaccacctgtccccagaaaggtccggagggcagtgactaccccataccagcctctactttgcagagttgcctgttgaccgcacagagcctctggtgg

SEQ ID NO: 78397 - DNA, 651 bp, Homo sapiens
caagactctgtctcaaaaaaaaaaaaaaaaagaaaaagaaaaagaaatggagagaactgcagtgttaaccatggcagccattagccgtgtgtggctactaaacacctaacgtggtgaatgtgactgaggaactgaatgttttatgcattggatttaaactggcttaaatgtaaacttagccacttgtgccaagtggctacacttaccacagatagagagcatgtccatcatgagggacgttctgttggccagyggtggcctaaatctcgcatgctgttctgaagagtaaaagagcaaatgtgtttaatgtgcccgtctgtagagagtgggcactcactgggtggcagccacgagcactgtgactggacaaacccagcgcaggtcacagagttatcacagagaactgactccacaacacctgcttttctcatttcagatgtgcctcaaggaagcagggctcccaggctgggccaggcccgcagctggcccagggcatgaggcttaacgcagagtcccccaccatctttattgacctgcggcagatggagctaccagaccacctgtccccagaaaggtccggagggcagtgactaccccataccagcctctactttgcagagttgcctgttgaccgcacagagcctctggtgg

SEQ ID NO: 78398 - DNA, 651 bp, Homo sapiens
caagactctgtctcaaaaaaaaaaaaaaaaagaaaaagaaaaagaaatggagagaactgcagtgttaaccatggcagccattagccgtgtgtggctactaaacacctaacgtggtgaatgtgactgaggaactgaatgttttatgcattggatttaaactggcttaaatgtaaacttagccacttgtgccaagtggctacacttaccacagatagagagcatgtccatcatgagggacgttctgttggccagtggtggcctaaatctcgcatgctgttctgaagagtaaaagagcaaatgtgtttaatgtgcccgtctgtagagagtgggcactcactgggtggcagccacgagcactgtgactggacaaacccagcgcaggtcacagagttatcacagagaactgactccacaacacctgcttttctcatttcagatgtgcctcaaggaagcrgggctcccaggctgggccaggcccgcagctggcccagggcatgaggcttaacgcagagtcccccaccatctttattgacctgcggcagatggagctaccagaccacctgtccccagaaaggtccggagggcagtgactaccccataccagcctctactttgcagagttgcctgttgaccgcacagagcctctggtgg

SEQ ID NO: 78399 - DNA, 647 bp, Homo sapiens
gaccatcctggctaacatggtgaaaccccgtctctactaaaaatacaaaaaattagccgggagtggtggcgggcgcctgtagtcccagctactcgggaggctgaggcaggagaatggcgtgaacccgggaggtggagcttgcagtgagccgagatcacgccactgcactccagtgtgggcgacagagtgagactccgtctcaaaaaaaaaaaaaaaawttttttctgtgtcacccaataaatgaatcagattattcaattatttgatccaagggtggaacattttcaaggtgcattaatttttgctttacctaggatgttctgacatgccacatagcagtagacacctaaaaacaatgtgtcaagccccaatcttttatggggtttatctttcaccttctggagtacatacatctttccatccctttaacatacttgccacttcttgctcatcaagtctcattaacatgatgttagtgttaatatatgatgttccatgtgatagtctttggaatgtccagatgggctaggccccttcagaatttattgtgacagcttcattaacataactttggggcaaaaccatggatatatattgttggccaccacatgtgaatgctaactgcttcctatcctcctttttattag

SEQ ID NO: 78400 - DNA, 1021 bp, Homo sapiens
gatgtgtccctgtcattaagtgaggcattgaccgtatatcttggtggctccagtaagtgctgtgaaagggtactacaatacaatacagggcaatacagagtactatgggrgcaggtcatgaaggggcctaactaagtctgaaaggccaaaggcaaaggccctgaggtgtttcaaagcctggcacatctagaagctgaaaggcagtggggcaagaggatggtcggcaggcccgagaggtgtggggaaaccagattacacagggccttatgaccagactttatactatcctaagagcatgggacccatcaatagtgaagaatcatccaacttgcattttataagcctattgtggctgcagtgtgggggctggaacactaatattctctgtgaccctgggccagcttctcaaattctctgagtttcagttccctcttttgtaaaataaggataagcataatggtacctactatacaggttgttgtgggagataaataagtcaatatatgtgaagaccttagcaatgttagcctttttttgtatgtgaaactattatacacaaacacaagtttgacaaaataaaactcaaacttaaactacatgtaatttactctaatgtctcccattctactatttttttattttgttaaatgatgggggggaacccctaaattaatttcagaatgaggtaacataggtcatgacctgcagctggagatgggttagacttgggtgatagcaatggaagagagggcaatagaggtgccaggacttggtggatgatcagatagaggtgatgagggagacggaggtatcaaagatgctctcaagcctctggattgatgacagtgccaattttgagatggagggcccaggaggaagagcaggtttgtctgtgagaggaaggaagactggactcctcagtggaagaggatttgggtggaggtgacaaaaggaatcttcacttatacactttcccaaccaagatactatatagagagatttcacatcagaatcgtagtta

SEQ ID NO: 78401 - DNA, 916 bp, Homo sapiens
gcatctttttttgttgcgtttgtttgtttgttttgttttttgagacaggctctgtcactctcacccagggtagagtgcagtgctgccatcctagctcaccacagcctccaactccagggctcaagctatcctcccacctgagcctcccgaatagcctccactacaggcatgtaccactacgcctggctgacatttttamcttttttttgttttttttttttttgcagggacaaggatctctctatgtttacccaggctggtctcaaagtcttgggctcaagccattctcccacctcggcctcccaaggcatgagctaccacagcagcttaatatcttgataacatggatttcagtctttcgtctctgcgctgtttggtttcataattgggatcacactatacatgcaactttgtgtgctgccctctttatttacctgctctatattttcagcatttcccatgccatgatagtccttggaaacataattctaacagttggctaatgttctgtcactggatgtactgtaaagtatttaacagttcttctaagtttgtacattgtaaatggatacttccgttaaaaaaaattttatgtatatatttacatagtgggcattgtgttctttatggcttcttatgagggtggcaatcccttccctcttccttttgatcctttgaggcaaccactttttagccgatgattatgaatcatgtcttttaataacatgcttatattgctgtatctgaaagcttcagttttagatactattggcatcctctacggaaggtaagcatttagctctttaactgccccacccccacccccccagccttcaacacccacacactcttcccatcctgctttctccccagttcagctgtctagtaactttgatgcaaccagcattcagcattt

SEQ ID NO: 78402 - DNA, 1119 bp, Homo sapiens
  misc_feature (1)...(1119): n = A,T,C or G
cacacatacaccccccaacacacccaccctctgaggaaaccatcaatgcgacaaaaagaaaacacgtgagtcctatgggactgtctgtgtgagatggagaagacacacagagggtctgggcacaggacacacacacgctggaatgtgaggcccacccatcaaggccgcgatgccttcctgcgaggcctcccacaccggagctcaagctctgtgkagctccaagttccatggaggggcctcacccctgccttgagcaactgggaatgtcttcggagtgagctcaggttcccataacgcctttgaggagaacacgctgattcaggagggtgttccttttagagagtgaatttagacgaaagtcattatgttttggtcacagtcatgtagacgggccttggggcgcacggcaggcggggctggcatcctcctatcaaagctgagcacaatgaaccgaagcatccagatttgcctctgctttgccaggggcctctgcctgcacatcatcctgagaccaggaaagagctgccaggcaggctgtcccattgtggggggggggaggggagggtctcctgcaggcatgtggggcacagctctgccatccatcacgtattacttagaacattctgggaagaacctcccatcaatcaggagtgtaggagaagaggcagtgaagcgagcacgtgggtgaggacaggggatactgaaagatgatcccctatcacctccagaccacatctatcacccccactggcaggtggcagtgacagatttcacaagtgcttctgagccagacatacctgggttccagccttggcacggaccagctatgtgaccttgggagcttcgcgtgtcttccaacctgagctgctttatttgtanaatgggaacagccttgtggagttgagggaaggatttggataatgatgggactacccaggtgccttgggcctggaggagccgtgggcttgtggtttagcttggatgcgtgtggttagcttagagaggactatccaaatgccttggggctggaaggagccgcgggcttgtgggttagtttggatatatggggttagcttagagaagactatccaggtgccttgggcctggaggagccgcagg

SEQ ID NO: 78403 - DNA, 860 bp, Homo sapiens
agcytcccaggcaggcttatctatggccaaggtgcccctcatgtgagctagccctgtggagagccgtgtgcctttgggaagcaccaaagctggggtgctgctgcacatcccgggccagccccaagggtaactagtagagcaggtgagattcatctctccctggtgacatggcttcctcgggccatcccccggtaccactgagaccccttccaatcagcaatcccagggtcccaggagcaggctgggctctggcctccaggagaaagaagcaaagctgatgtaggacagacactggaaatctggcccagtgcctgccacaaagcaggtggccataggccagggcacagtgtgcctttcccagggagatgggggtcaggcccaagtcatggtttattcataataaacacagccggccacactgaccagtccataggtcccagcccacttgggggtggccctcaggaagttatgcccttggaattgggccacaggagcagatggggtgactgaggcactgggtgtttccccacctcactccagctactctttagaaattgttctaaacagttgagcagaaaagcctatttgtctgactatacccaaatggtcaaataataataataaaaaagcctatgaattaccaacaacgcgtgtgtctgggaagatgtaacgggtggtagtgtcccattctggtagcttctccttgtggagagttcgccatcaagcaaatacgaaacacatttgggttaagtcattggactcagtagcatcttagagcaaacagttaaaggtagatatgagccagttcagatctagcaagctcaggagcactggagatgtcttctggaagtcagaaaagc

SEQ ID NO: 78404 - DNA, 860 bp, Homo sapiens
agcctcccaggcaggcttatctatggccaaggtgcccctcatgtgagctagccctgtggagagcygtgtgcctttgggaagcaccaaagctggggtgctgctgcacatcccgggccagccccaagggtaactagtagagcaggtgagattcatctctccctggtgacatggcttcctcgggccatcccccggtaccactgagaccccttccaatcagcaatcccagggtcccaggagcaggctgggctctggcctccaggagaaagaagcaaagctgatgtaggacagacactggaaatctggcccagtgcctgccacaaagcaggtggccataggccagggcacagtgtgcctttcccagggagatgggggtcaggcccaagtcatggtttattcataataaacacagccggccacactgaccagtccataggtcccagcccacttgggggtggccctcaggaagttatgcccttggaattgggccacaggagcagatggggtgactgaggcactgggtgtttccccacctcactccagctactctttagaaattgttctaaacagttgagcagaaaagcctatttgtctgactatacccaaatggtcaaataataataataaaaaagcctatgaattaccaacaacgcgtgtgtctgggaagatgtaacgggtggtagtgtcccattctggtagcttctccttgtggagagttcgccatcaagcaaatacgaaacacatttgggttaagtcattggactcagtagcatcttagagcaaacagttaaaggtagatatgagccagttcagatctagcaagctcaggagcactggagatgtcttctggaagtcagaaaagc

SEQ ID NO: 78405 - DNA, 814 bp, Homo sapiens
  misc_feature (1)...(814): n = A,T,C or G
aagggtactgagatcagccttagaggtttgggtatctgagggaccccagtggacaggtcagtacacctgcagagatggttctgaactcaggagagaggcaaggacagcacacttctctttggaagtgatcagcacagggctgttctcaaaaccatggcgggggccctggcagaggagttgggaaaaagggagcrgggaatgctcctccatggaaantgacatttttgaggaagaggagccaatggcaaagggaaggaggacggaggagaaccaggagggtggccacagaggcggaagaccagcgagagggtggcaagaaggaggaagggagtgattcgcagagggggagaggtcaagccaagaaggcagacagatgctcgctgaatggagaagcagcagaggccctgagggcagcagtggcgtccccaccccagatgctgcagggcaggcacagggaggggcagtgtgggcaggtggataagggcaatggcggggctcactttgctggagagtttgcaggtggatgagggcagtggtggggctcaccttgctggaaggcttgcttgtgatgatgtttacaatggaaaggaacccagcatttaaatgctaatggcaaggaaagacagggtgttgacactggagagaggacagtgacagacaagggagaggaaagacccaggccccgccaggagaaaagaggtggggggtgcagggagctgacagtggaacaggaggggaggtcaccggcagaaagtcaggtagggggagaacagagaaggtgtggatgggacgatccccagggagacggggagga

SEQ ID NO: 78406 - DNA, 697 bp, Homo sapiens
atcctggcctcttccagctcctgggaccccgggcattacttggcggggacagcatcactgcaatctctgcctcagccctcccatgccttcttcctggcgtgtgcctgcacgtctctatcttttgtgtccgcatctccccttctcagaaggaccccagtgattggatgtaaagcccaccccagtccagtctgacctgatcttagctaactgcaaagatcctatttccaaatgaggtcacattctgaggctttaggtagacatgaatttggggggacaccccagtacaacagctaagctggacaaggaggcgtgtgaagacaagrgggtgagagggagacgtttcagggagcaatggctgagctgtcctaattaggcccaggaccaatgtcctctgtgggaggaaggaacaggaatgagagaaagaggaaagagggtggcaggcagcgggcagcacaggttgggatgaggtccgggggctactggagagggacagatggggagcggagtgaaggtgtgggaagtcagggagcgggagggatgccagagccatgggtcatcacacgggggctggagtcagccagggcatgagtgtggcttttcctgggggaagggagtccaggaggatgtgcaggccaggggcttggggtcacaaaggagaagatcagcttccttttcccatgaagatggcagaggactg

SEQ ID NO: 78407 - DNA, 697 bp, Homo sapiens
atcctggcctcttccagctcctgggaccccgggcattacttggcggggacagcatcactgcaatctctgcctcagccctcccatgccttcttcctggcgtgtgcctgcacgtctctatcttttgtgtccgcatctccccttctcagaaggaccccagtgattggatgtaaagcccaccccagtccagtctgacctgatcttagctaactgcaaagatcctatttccaaatgaggtcacattctgaggctttaggtagacatgaatttggggggacaccccagtacaacagctaagctggacaaggaggcgtgtgaagacaagggggtgagagggagacgtttcagggmgcaatggctgagctgtcctaattaggcccaggaccaatgtcctctgtgggaggaaggaacaggaatgagagaaagaggaaagagggtggcaggcagcgggcagcacaggttgggatgaggtccgggggctactggagagggacagatggggagcggagtgaaggtgtgggaagtcagggagcgggagggatgccagagccatgggtcatcacacgggggctggagtcagccagggcatgagtgtggcttttcctgggggaagggagtccaggaggatgtgcaggccaggggcttggggtcacaaaggagaagatcagcttccttttcccatgaagatggcagaggactg

SEQ ID NO: 78408 - DNA, 697 bp, Homo sapiens
atcctggcctcttccagctcctgggaccccgggcattacttggcggggacagcatcactgcaatctctgcctcagccctcccatgccttcttcctggcgtgtgcctgcacgtctctatcttttgtgtccgcatctccccttctcagaaggaccccagtgattggatgtaaagcccaccccagtccagtctgacctgatcttagctaactgcaaagatcctatttccaaatgaggtcacattctgaggctttaggtagacatgaatttggggggacaccccagtacaacagctaagctggacaaggaggcgtgtgaagacaagggggtgagagggagacgtttcagggagcaatggctgagctgtcctaattaggcccaggaccaatgtcctctgtgggaggaaggaacaggaatgagagaaagaggaaagagggtggcaggsagcgggcagcacaggttgggatgaggtccgggggctactggagagggacagatggggagcggagtgaaggtgtgggaagtcagggagcgggagggatgccagagccatgggtcatcacacgggggctggagtcagccagggcatgagtgtggcttttcctgggggaagggagtccaggaggatgtgcaggccaggggcttggggtcacaaaggagaagatcagcttccttttcccatgaagatggcagaggactg

SEQ ID NO: 78409 - DNA, 724 bp, Homo sapiens
acgtatgtgttagtgtatgtgaccgtgcatttcagggtgtatgagagatgtgtacatgtgtgtgcctgtgtgagtgagcacacatatgtatgtatgttagtgtatgtgactgtgcatgtcagggtgtatgagagacgtgtacgtgtgtgtgcctgtgtgagtgagcacacatgtatgtatgttagtgtatgtgtgcatttcagggtgtaccagagacgtgtacgtgtgtgtgcctgtgtgagtgagcacgtgtgtgagtgtatgttagtatgtgactgtgcacatcagggtgtgtgcatgtgtrtgtgagcatgtgagcatggtcggatgtgtccaccttggccacagcattgaggtggcagcaagtgcattctgcaagtgtcaagtgaggccctgggtggggctcaggcactgggtggggctctggccctgctgggaatgggagggctgcacacgtggcaacccgggcagagtggtgtctccagctttgcttccttggggaatctatctggaagattttctgacgtccaagtgctgtcagtgacttctttcctcttggctctgtgagcgttggctcctggtgagagaggtgctctggtgatgatggggttggcaccaagacctggtcaccacagagcagggagcatcaggaagggctggaagccagcgaggccccaggtgtgaactcccttgctggccaagagccttctctttggtgggatcc

SEQ ID NO: 78410 - DNA, 1279 bp, Homo sapiens
taaaggaagattggatgggcatcaaagtaaattccactgatttgaccttgtctataagtaattaacaaatattttgattgtctcctgtgtttccggcatatttcaagctgatgagcaagagatactaaatcctgctttcatagacctaatatttgctcttgatagaaggggggaaagactgaaaaaaaataaaaagagagagaaggagagactatcaagtagtgactcaaacagggtggtaagtcaaacggtggatggggtagtcagcaacgacttcctaagtgaacttgggactgmtggttgaatgatcataaagggcaggctaagctcagagacaagactcttgcctcacttcatctaggctgcttatatctggtttatacagtggagtaaaatcttagaaactactagagtagataatattgagagacccccaagtcttgtaaaagtctaacatgcaggcagccttagctttttttggatggtagagtgaagatgctaaaatttttgtgacaaaaataattgtatctttactgaacactcactatatcctgggtgttatctactatttaattcaattctcacaacaatctaataggttaatgcccattggttggtgatccagcccccgttatttttccatctactaatttttgggacatagcatttctacagcagaaatgcatttacatggcctctacctgtgtggttgcatctatctatctatctatctatccatccatccattctcccatccatccatccacccactcacccactcatctgactatctgtcttctgaaataaaagtttaataaaatgacattttctttttttgtaatatatttgtataatttcaattatatcctggtcgatttcttttttaaaaaaatgctggtaattagtaactaaatttattttacaacttatttttgtaaatcagtggcataaatagtagcagttatgtgtctgcattttgctttagactgatctgtgtttgaattctgggcaggtatttactagctatctaaattaggaaacgttaatttgccttttactataatctgaatgtttcctctaaaattcatgttgatattgttgggctgtgtccccacccaaatctcctcttgaattgtagctcccatagttcccatgtgttgtgggagggacctgatgggagataattgaatcatgggggcagtttccctcatactgttctcttagtagtaaataagtctcacaagatctgatggttttatgaggggaaacccctttctct

SEQ ID NO: 78411 - DNA, 1279 bp, Homo sapiens
taaaggaagattggatgggcatcaaagtaaattccactgatttgaccttgtctataagtaattaacaaatattttgattgtctcctgtgtttccggcatatttcaagctgatgagcaagagatactaaatcctgctttcatagacctaatatttgctcttgatagaaggggggaaagactgaaaaaaaataaaaagagagagaaggagagactatcaagtagtgactcaaacagggtggtaagtcaaacggtggatggggtagtcagcaacgacttcctaagtgaacttgggactgatggttgaatgatcataaagggcaggctaagctcagagacaagactcttgcctcacttcatctaggctgcttatatctggtttatacagtggagtaaaatcttagaaactactagagtagataatattgagakacccccaagtcttgtaaaagtctaacatgcaggcagccttagctttttttggatggtagagtgaagatgctaaaatttttgtgacaaaaataattgtatctttactgaacactcactatatcctgggtgttatctactatttaattcaattctcacaacaatctaataggttaatgcccattggttggtgatccagcccccgttatttttccatctactaatttttgggacatagcatttctacagcagaaatgcatttacatggcctctacctgtgtggttgcatctatctatctatctatctatccatccatccattctcccatccatccatccacccactcacccactcatctgactatctgtcttctgaaataaaagtttaataaaatgacattttctttttttgtaatatatttgtataatttcaattatatcctggtcgatttcttttttaaaaaaatgctggtaattagtaactaaatttattttacaacttatttttgtaaatcagtggcataaatagtagcagttatgtgtctgcattttgctttagactgatctgtgtttgaattctgggcaggtatttactagctatctaaattaggaaacgttaatttgccttttactataatctgaatgtttcctctaaaattcatgttgatattgttgggctgtgtccccacccaaatctcctcttgaattgtagctcccatagttcccatgtgttgtgggagggacctgatgggagataattgaatcatgggggcagtttccctcatactgttctcttagtagtaaataagtctcacaagatctgatggttttatgaggggaaacccctttctct

SEQ ID NO: 78412 - DNA, 1279 bp, Homo sapiens
taaaggaagattggatgggcatcaaagtaaattccactgatttgaccttgtctataagtaattaacaaatattttgattgtctcctgtgtttccggcatatttcaagctgatgagcaagagatactaaatcctgctttcatagacctaatatttgctcttgatagaaggggggaaagactgaaaaaaaataaaaagagagagaaggagagactatcaagtagtgactcaaacagggtggtaagtcaaacggtggatggggtagtcagcaacgacttcctaagtgaacttgggactgatggttgaatgatcataaagggcaggctaagctcagagacaagactcttgcctcacttcatctaggctgcttatatctggtttatacagtggagtaaaatcttagaaactactagagtagataatattgagagacccccaagkcttgtaaaagtctaacatgcaggcagccttagctttttttggatggtagagtgaagatgctaaaatttttgtgacaaaaataattgtatctttactgaacactcactatatcctgggtgttatctactatttaattcaattctcacaacaatctaataggttaatgcccattggttggtgatccagcccccgttatttttccatctactaatttttgggacatagcatttctacagcagaaatgcatttacatggcctctacctgtgtggttgcatctatctatctatctatctatccatccatccattctcccatccatccatccacccactcacccactcatctgactatctgtcttctgaaataaaagtttaataaaatgacattttctttttttgtaatatatttgtataatttcaattatatcctggtcgatttcttttttaaaaaaatgctggtaattagtaactaaatttattttacaacttatttttgtaaatcagtggcataaatagtagcagttatgtgtctgcattttgctttagactgatctgtgtttgaattctgggcaggtatttactagctatctaaattaggaaacgttaatttgccttttactataatctgaatgtttcctctaaaattcatgttgatattgttgggctgtgtccccacccaaatctcctcttgaattgtagctcccatagttcccatgtgttgtgggagggacctgatgggagataattgaatcatgggggcagtttccctcatactgttctcttagtagtaaataagtctcacaagatctgatggttttatgaggggaaacccctttctct

SEQ ID NO: 78413 - DNA, 718 bp, Homo sapiens
cttccagcgtcttcgctgactgctcaggaggctttggggtctggggagtcaaacgaggaaacgttgtgaggcaccatctcggcagctgtagggagagctgagattcggcctgacgtggctctccaccaccctagcattctcaacaactttgcaaataaaacctacacttctatttgctttattttacatataaatgtgtgtgtgtgtttgcatgtgtgtattttcccccaaaatatatgtgaaaaatatatttgcaaaaattctgtggtaggctatcatacgaaaatatggattctaaagaatctttgctatgctctgatttttgtaaaatccattttattgagttaaatttatatataatttacccattttaagtgtacagttgatgggttttgacaagtatatatactccagtaaccataagcacaatgaaattatagcagttttccagctcccatcaaatcamtcccctttgaagtcaatccccttctctagcctcagctcctggcaaccactgatctactttctgtccttaaagtcttgcctttcctgcagtgtcacatagatggacccacttctgcagggtgtttgtttctggcgtctatcacttaccatcttgcttccaggttcacctgtgccgttttgctgtcagctgttctttctcatttgctgagtgaatttctcatgcaggtgtcccacgatacattcgtccattccc

SEQ ID NO: 78414 - DNA, 1488 bp, Homo sapiens
ggtttatcaatcacttaaaatctaaaaaatatttatgtgtttttaaaattgagttctaataataaccgtaatgataatacaattctgaagaacttcttaaatatttacgtgacttatggtcacatgaaatactaagtataacaaatttaaatttatatctagaatattgcttgcagaatatgattgggttatcaataaaagacttttaagcacaagtatgttacataaaaaaaattctgtgrggatgaaaatggatttaaggagaaaaaagcaatgtaaaatttctggctgtgagaaaagcttatttataaaggcttagttttatatagtacgtaaatatcactggatatacttaagctaataatgtaatcaattatttaaatttttcagtattaaaataggctggaaattaaatcctttacaactgcctgaatttaggataattttttaaaataaccaactcatcttcagtgttaccaggtcaatgcttgggtcccaatctcagtgtactttcgcctatgttgacttcttcataggactcataatcttatttatataagatatagccaccctgagactacttagttcagagttgctctttgaccatctattcctctcacagtcttaaccctttccactccagtaaacattcttcttgatggcttatattataaattgcaatgtgactagggctgcatgtttgcatgaggcatggagcaagatatcatgcagtggttgtaactctgcttctagattctagattgggatccagattctacatcttcagagctggtttttggacagttttagtttttaacttttttgtgcctcattttttacattttgaaatgggtataatcatagcagctacttcattgggttgttgtgaggagtgaataagttaacacatgtaaagtgtatagaggtgtgattaatacatagggtgatattgttattaatttttatatggagcttgtagagttgctcattactttatagacacctgtgtaagtcagtatctatgcatgctgtaagactcactaaaacttagtgaatgcacgttatcacattttttagaattgctaatttggcctttgatatatatccatgcaaaatacctttaaattccatacagcgtaagcatttcgtgtagtgtttcaatttcacttgagtacaaagtttatctaccttatttttcaaactattttttttgtaaccaaagacatattgtccataagcaatgtgaagcctttttatgattgtgaaagaatgacttagggcttgtctatttagggtggaatttaaaaagttatcagattacttagtgagtgatcagcatccccttttcttttgaatagctgtttctaatcttgtggtaaaaaaaagaactgattaatttcctccctcgttgtatacaggagtgaacaaagcaatcagtaatcagaagctcagatttaaatcttctgttgggtgtgaatggcaactttg

SEQ ID NO: 78415 - DNA, 1488 bp, Homo sapiens
ggtttatcaatcacttaaaatctaaaaaatatttatgtgtttttaaaattgagttctaataataaccgtaatgataatacaattctgaagaacttcttaaatatttacgtgacttatggtcacatgaaatactaagtataacaaatttaaatttatatctagaatattgcttgcagaatatgattgggttatcaataaaagacttttaagcacaagtatgttacataaaaaaaattctgtgaggatgaaaatggatttaaggagaaaaaagcaatgtaaaatttctggctgtgagaaaagcttatttataaaggcttagttttatatagtacgtaaatatcactggatatacttaagctaataatgtaatcaattatttaaatttttcagtattaamataggctggaaattaaatcctttacaactgcctgaatttaggataattttttaaaataaccaactcatcttcagtgttaccaggtcaatgcttgggtcccaatctcagtgtactttcgcctatgttgacttcttcataggactcataatcttatttatataagatatagccaccctgagactacttagttcagagttgctctttgaccatctattcctctcacagtcttaaccctttccactccagtaaacattcttcttgatggcttatattataaattgcaatgtgactagggctgcatgtttgcatgaggcatggagcaagatatcatgcagtggttgtaactctgcttctagattctagattgggatccagattctacatcttcagagctggtttttggacagttttagtttttaacttttttgtgcctcattttttacattttgaaatgggtataatcatagcagctacttcattgggttgttgtgaggagtgaataagttaacacatgtaaagtgtatagaggtgtgattaatacatagggtgatattgttattaatttttatatggagcttgtagagttgctcattactttatagacacctgtgtaagtcagtatctatgcatgctgtaagactcactaaaacttagtgaatgcacgttatcacattttttagaattgctaatttggcctttgatatatatccatgcaaaatacctttaaattccatacagcgtaagcatttcgtgtagtgtttcaatttcacttgagtacaaagtttatctaccttatttttcaaactattttttttgtaaccaaagacatattgtccataagcaatgtgaagcctttttatgattgtgaaagaatgacttagggcttgtctatttagggtggaatttaaaaagttatcagattacttagtgagtgatcagcatccccttttcttttgaatagctgtttctaatcttgtggtaaaaaaaagaactgattaatttcctccctcgttgtatacaggagtgaacaaagcaatcagtaatcagaagctcagatttaaatcttctgttgggtgtgaatggcaactttg

SEQ ID NO: 78416 - DNA, 1488 bp, Homo sapiens
ggtttatcaatcacttaaaatctaaaaaatatttatgtgtttttaaaattgagttctaataataaccgtaatgataatacaattctgaagaacttcttaaatatttacgtgacttatggtcacatgaaatactaagtataacaaatttaaatttatatctagaatattgcttgcagaatatgattgggttatcaataaaagacttttaagcacaagtatgttacataaaaaaaattctgtgaggatgaaaatggatttaaggagaaaaaagcaatgtaaaatttctggctgtgagaaaagcttatttataaaggcttagttttatatagtacgtaaatatcactggatatacttaagctaataatgtaatcaattatttaaatttttcagtattaaaataggctggaaattaaatcctttacaactgyctgaatttaggataattttttaaaataaccaactcatcttcagtgttaccaggtcaatgcttgggtcccaatctcagtgtactttcgcctatgttgacttcttcataggactcataatcttatttatataagatatagccaccctgagactacttagttcagagttgctctttgaccatctattcctctcacagtcttaaccctttccactccagtaaacattcttcttgatggcttatattataaattgcaatgtgactagggctgcatgtttgcatgaggcatggagcaagatatcatgcagtggttgtaactctgcttctagattctagattgggatccagattctacatcttcagagctggtttttggacagttttagtttttaacttttttgtgcctcattttttacattttgaaatgggtataatcatagcagctacttcattgggttgttgtgaggagtgaataagttaacacatgtaaagtgtatagaggtgtgattaatacatagggtgatattgttattaatttttatatggagcttgtagagttgctcattactttatagacacctgtgtaagtcagtatctatgcatgctgtaagactcactaaaacttagtgaatgcacgttatcacattttttagaattgctaatttggcctttgatatatatccatgcaaaatacctttaaattccatacagcgtaagcatttcgtgtagtgtttcaatttcacttgagtacaaagtttatctaccttatttttcaaactattttttttgtaaccaaagacatattgtccataagcaatgtgaagcctttttatgattgtgaaagaatgacttagggcttgtctatttagggtggaatttaaaaagttatcagattacttagtgagtgatcagcatccccttttcttttgaatagctgtttctaatcttgtggtaaaaaaaagaactgattaatttcctccctcgttgtatacaggagtgaacaaagcaatcagtaatcagaagctcagatttaaatcttctgttgggtgtgaatggcaactttg

SEQ ID NO: 78417 - DNA, 745 bp, Homo sapiens
tgttgactctcacaccatgactcagcaaacctgtaaggctgtgactttactaagaagacaaagtttgcaggaagaatagaggctttgatgcagtctactgttgagattgtgactcatgtacttagactcaacattcaggaggtgttgaccctcatacctagaactgggacatgtgtggaattattattatcattattttctttctttttttgagatggactgttgctctgtcacccacgttggagtgcagtggcatgatctcrgctcactgcaacctccacctcctaggttcaagcgtttcttctttctcagcctcctgagcagctgggattacaggcatgtgccacaatgcccggctaatttttgtgtttttagtagagacagggttttgccatgttggccaggctggtctcaaactcctgacctcaggtgatccgtctacctcagcctcccaaattgctgggattacaggtgtgagccgctgtgtggagttactaattattagatgctggccaccgctgggcaggggttgggctcagctgacaccctacatccaccaccagattccagcctctgactttggggaatctggccgggacctggggtctggggccagaactgtggacaccctgccatgtgtggaattattaatcttacccccgaatcttcctgcatctcccagcacctgagtgacttgacttttttgtgaggtcttagctgacaaattggattgcggcatatcaca

SEQ ID NO: 78418 - DNA, 933 bp, Homo sapiens
caattgaaaaagtaaagctttgtattcattttaaaggtccatggctatcctcttcccactcttttatgccgaaattttgactctagccattataaatataccttcctggtgactccatactttgtgaatatgtctttagccttagagttaggtctcttggcatttattccttagagtagargttttctctcattttagtaaaatgattttaaattaaatttaagaagtacttactatgtgccaggtgttatgttaaatacctttctctctgagagttcatagtttatgtaggaaaagactgataataaactaactattaaaacacagcagaggtgttctagaggcatgtatgtgatatcctgagaggatggggagggctccatcctgaagtcggtagtagaagacaacttctctatcgaatgaatgtgatttgaaataagacttctcttgaattgatgagttatattgctttgtataagaactgcagaatcaagccacaaggtaccctattatttcaccctgcaagacaggttctaaagttggtttctgttggttcttgctttatatggtgtcagactcattgccgagaggggaatggcagggaggggaaaagggaggtattgaaaatgaagttgttcgaggatgataacattgagtcttgatcccatgttttctgatcatccattattctcttggtttccttttgcctctttcttttatacgtttaggatgacttttaagcaccatatataaaaaggttaggtaataatgattcttattgataagatggcatgttttcttcgaatgtggtttctagttaagtgctaggttccaagtttctcataaaaaacagatttttgaaggagtgtgctgcatatttcgtgtgtagataagaaagagctggaataggctagtatctaaggaatacatgca

SEQ ID NO: 78419 - DNA, 933 bp, Homo sapiens
caattgaaaaagtaaagctttgtattcattttaaaggtccatggctatcctcttcccactcttttatgccgaaattttgactctagccattataaatataccttcctggtgactccatactttgtgaatatgtctttagccttagagttaggtctcttggcatttattccttagagtagaagttttctctcattttagtaaaatgattttaaattaaatttaagaagtacttactatgtgccaggtgttatgttaaatacctttctctctgagagttcatagtttatgtaggaaaagactgataataaactaactattaaaacacagcagaggtgttctagaggcatgtatgtgatatcctgagaggatggggagggctccatcctgaagtcggtagtagaagacaactyctctatcgaatgaatgtgatttgaaataagacttctcttgaattgatgagttatattgctttgtataagaactgcagaatcaagccacaaggtaccctattatttcaccctgcaagacaggttctaaagttggtttctgttggttcttgctttatatggtgtcagactcattgccgagaggggaatggcagggaggggaaaagggaggtattgaaaatgaagttgttcgaggatgataacattgagtcttgatcccatgttttctgatcatccattattctcttggtttccttttgcctctttcttttatacgtttaggatgacttttaagcaccatatataaaaaggttaggtaataatgattcttattgataagatggcatgttttcttcgaatgtggtttctagttaagtgctaggttccaagtttctcataaaaaacagatttttgaaggagtgtgctgcatatttcgtgtgtagataagaaagagctggaataggctagtatctaaggaatacatgca

SEQ ID NO: 78420 - DNA, 2130 bp, Homo sapiens
tcaaaaccacagtgagataccatctcatgccagttagaatggcgataattaaaaagtcaggaaacagatgctggagaggatgtggagaaataggaacgctttcacactgttggtgggagtgtaaattagttcaactattgtggaagacaatgtggcrattcctcaaagatctagaacctgaaataccatttgacccagcaatcccattactgtgtatatacgtatatacccaaaggattataaatcattctactataaagacacatgcacatgtatgtttatggcagcactgttcacaatagcaaagacttggaaccagtccaaatgcctatcaatgatagactggataaagaaaatagaatttttaacaagctgaccagctgattgctatgatcaggtaagtcttggaaccactcactgagtgtaatcagacgggcattgaaaaagggttgggttttgtgagtatgggtgtcaagggtggctatggatgctaaataacatagtcaaagggatatttccaactctgtgtttgttgaagaacactgactttatgttcttcaatgccccatctgtaatgccccacccattatatttctttcaaaattgattcaagaaagacctttgtctttcccaagaagatggtttgtgtcatttatgagatgaaatgttgccacttcctgagctcccattgcctcagtttccaggaaatgtgatgccaggttttatgctctatcactattaccacatctactactatgattggcctgttagattttcttttcccaccatttttaccttcttttaaaaccctattttgattaatttttatttgttttgtaagtgatttccaatttctttttttccctgaaaagtggcagagtataaatgtattaaattgaacccataattaatagttgctaatggaaggaaaataagatagtgattaaatgatgacaaatttaaataactttcatttctgaatgcagttgtacctgtaccaaacatacgtgcattttatccttcctcctgccaatgacctaatgtgggttagggagagagtccgagaggctaggtcaattatggatacttgggaaaatgcatattttaaagctaactgatgtaatttgcatctgcaaataataatcacagttctatataataacaatagattataataatataatagttctaataataataatagttctatataggtagggtgactttttcccttttattcataattcacaattatgggtgtaattagagatatggtaggcagcatttttacttcttttgttttcacattaaaataaagatccacccagggaatgcacaaaagcaagaaacacaaagcagacaaaggaatttctaatgaaaatcaagcccctcacccatcccgtccaacaacagtccttctcagaggttgtcactttgaactgcttcagttttcaattatgtcagtggccacttaataatttcaggtagtatggatacaccattggttttgaattcatctttttttgttctttgctgttttgaaatttcaattctgtgtccaagtggttccctttatatgcagcgtactccatgagcccatacaaataaaagactcactttctccaggtctgagaatatttgattattatttccctaataatctctcactcttcattttctctattctcccttttaggaaatcctactggatcattcctcctcatgtctcccctccctccatcctgctccctttctttccgttggttagagaagattttgtttttgttcctggaaggtaaacactggcttacctacctctctgtgaacagggtaactggtccaacttttctattgccaggtattcaactaattccttgttttcagttctgtgcctcacacctgtcctcctccttgatggtatttgtaggtttcttctgcaaaggctgtttcccacctccactgtagacttaacctgcacatactggaactgtagctgtctctcctctgtttgtcatcaattgcccccctgggccttctctctttcaaaatgtatttatgaatttatctcctgtggatttctttactttcagtaagtttttagtctattagtcagagtcggtcacattatga

SEQ ID NO: 78421 - DNA, 467 bp, Homo sapiens
ttttaggactgagagacaatggtggaatgggggcaaggagagtagctggcagagaagaaaaggtgaatctttttagatatttggaaatgaaatggctgggtgtyagagtggagacggaggggtgtgatggggtcaaatctcgagattgggaaattgttaaatgagactataacatataaaatagttaaatgacaatgagactatattgcagagaaatgtctgccacaatcagagcttcagctaaaaccacataggggacttaatgattgttaaaagcattaaggaaaggtgaaacctaatcagttttttacacttcactcttaatgtgttaatgacttgttctgattctttcctgagaatgccctttggtaggaggagggagcaaacctgcagcactggggtacgacttggagataacaatgagaaggaaaaggcagagagagagaggtggaggatccaaaggcaca

SEQ ID NO: 78422 - DNA, 472 bp, Homo sapiens
gcttaccccaagggaacctggttcaagggagattaggaacagggtccctgggagaaagttaccctcagtgaacaaggagttggaaaggatggggaagaccaagcctgcgacccaatgtcaggatggcacacgggatctaagatggacaaccatgccctcctgcccacaaccatgtgttctgtgtaagaggattgtgtatgaggaagatgcaaaataataatgccacaagagcccccaaccccgttgttgtgagtgcccttgactcttctgaacaaraaggacattaagaaagaagctgctgccctgagatgttagcaggagagcggcaatagtggccaccacaagatggaggccaatgcctgaggctggcagtgcagagagggctgaggcctggggttccttgtagccaagagcaggtgagcacaggatgtagtggcctcagtaatcccacagcagtggcactggaacccag

SEQ ID NO: 78423 - DNA, 565 bp, Homo sapiens
tttctcttcccatgtggtttccatctgttgcttgtgaataatttcactgaggtccagttcacagtagggctaactgagccctttagaagagcctgaccctcagctgagagtttgggtctaaggtgtaaattgtggatctgattacgtcttccatcctggcccagttcaggaaattagaacctggccagctgtgtttcccagtttgtaggttgcaggcmgttacctggctctctctcagacagcctgctgtcctttacttgagagtagacacagatgtatccactaagccagttttacccaatgttcaatcatgattttgatctatcagtaccacctaccttcttatttacttaacagtttgcatgaatgtaagatatagagtcattttttacagtatttaaatgtatttttaaaagtttgcgtggtaagtgaaatggaaaacaactactaccatttgaaataaaaactagatagctatgaaaatgctgtgaaatcaaagcaaagtttctaaatgtgaactatatgttatggcatgcctgaggctctgagcctgtctccatttgtt

SEQ ID NO: 78424 - DNA, 565 bp, Homo sapiens
tttctcttcccatgtggtttccatctgttgcttgtgaataatttcactgaggtccagttcacagtagggctaactgagccctttagaagagcctgaccctcagctgagagtttgggtctaaggtgtaaattgtggatctgattacgtcttccatcctggcccagttcaggaaattagaacctggccagctgtgtttcccagtttgtaggttgcaggcagttacctggctctctctcagacagcctgctgtcctttacttgagagtagacacagatgtatccactaagccagttttayccaatgttcaatcatgattttgatctatcagtaccacctaccttcttatttacttaacagtttgcatgaatgtaagatatagagtcattttttacagtatttaaatgtatttttaaaagtttgcgtggtaagtgaaatggaaaacaactactaccatttgaaataaaaactagatagctatgaaaatgctgtgaaatcaaagcaaagtttctaaatgtgaactatatgttatggcatgcctgaggctctgagcctgtctccatttgtt

SEQ ID NO: 78425 - DNA, 760 bp, Homo sapiens
gtcagccttaggtctttgaagagcttttggagaggttggtgtgtgtatacatgtgtgtgtgtacacatgtgcctggtttgtcatcctgtgaaatgaccagtttgagatctctccctaaaaaggactgtagtctcatccttcaggaggaacctggcccaaatggcagcagctgccagcaggtgcaggccccggggccaggtctgttcagcctcacatacagtcagtcccttactgttactcagaggctctaccccgcctggagaggagataagtgtggactctgcatgccactaaagccaggcagggcagggccacacctaaggggctgtcctggggtgtagccarttgcagtttagggggacctcaggaggcagctcctgggggcaggccatggggcagggtgcttgtacagatcctgaggctcaggcacacgccatctgccttcacgtgtctcccctttccactcactgttagcaggcttgcactgttttccttctcacacatccaccaggctcttcaaatgaggcttgggtctgtgggtttcttattatagtttagtttcttgtgaggtctttttcccaaaggtcacaatcactgagcgctgccttgacccagtatggggaagaggtggagaagccaatgggggtagttttcccaactcaagcttagggatgaggggagaggacagcttagtcatggccaaggggtcaggaaggtgtgggggcagtggaagacaggttggcctctctaaggtggtctc

SEQ ID NO: 78426 - DNA, 1408 bp, Homo sapiens
  misc_feature (1)...(1408): n = A,T,C or G
ccgtttgcacctgtactgggaatcagaaggcttgagttggctgggtgcggtggctcatgcctgtaatcccagcactttgggaggccaaggcgggtggatcacctgaggtcaggaaggagtttgagaccagcctggccaacatggcaaaaccttgtttctagagagtacaaaaattggccaggcgcattggtaggtgcctataatcccagctacttgggaggctgaggcagaagaatcacttgaacccgggaggtggaggttgcagtgagccgggatcacaccactgttctccagcctgggctacagagcaagactcaatctcaaaaaaaaaaaaaaaaaaaaaaatyaactgacaataggtgtatgggtttatttctggaatctcagttctattccattgatctattgatctatatgtctatgtttatgccagtcctacactattttagtgactgtagctttgtagtaagttttgatgtcaagaaatatgaggatatcccttttacagatgaggacatggggctcagacaggtgacagcaagttggccagtgatcctccttcacagaaggtgggtcctcaggagtgagcagccacgctttccatactccccacccnnnnnnnnnnnnnnnnnnnnnnnnnnnnnnnnnnnnnnnnnnnnnnnnnnnnnnnnnnnnnnnnnnnnnnnnnnnnnnnnnnnnnnnnnnnnnnnnnnnngaattcttatacccaatgagataaatgtttctgaacactacagaaatctgaattaaaggctcatcttcccaagtacaactcttattctgttaaataatatttagtaaaattatttagatatatatattacagtttgataagagcactagaatacaataaaaagaggggaattggttgggcacagtgctcatgcctgtaatcccagcactttgggaggctgaggcgggcagatcacttgaagtcaggtttaagaccagcctggccaacatggtgaaaccccgtctctactaaaaatataaaaattagccaggcggtgtgctgggcacctgtaatcccagctacttgggagactgaggtgagagaatcgcttgaacccaggaggcagaggttgcagtgagccaagatcatgccattgcactccagcctgggcaataagagtgaaacgctgtcttaaaaaaaaaaaacagaaagggcttgaataaagaaagaaaggagtgcccaaaataagtgactgtgggagaggaggaacaggtttttcaaagggtgggtgtggtggggtagggagaggatccgagaagatattgagtcaggttggagatagctgtggaatatttctggttggaaggattgggaaggtgcaggtgtgagtttgaaatagtggtctgagctcaggaggaagctgagaactagaga

SEQ ID NO: 78427 - DNA, 1358 bp, Homo sapiens
ggtccacctggcgcggctcctgcagacccagcagggtccggtgccattgctcttctccattgcaggtgtttgggaatattgccctggatgatgacaccagcatcaaccgccacaacaacttccggacgtttttgcaagccctgatgctgctgttcaggtgtgttgttcggtcagcccaggccaatgtctgctcttccgtcgggggctgctttactcaggatgaagaaggctgggtgtcaaccgtggagaccacccacttctaattccccgaccccactggcttcccctcagcaggcctttctggttcttcccctctctctgctcctcttttccaaaggctcttgatatctgccccagtctcagaacaggctgaagggaagccctgagggagatcatcctgggagccctgggccaggccggcctctgctgcctcgtctgtgctccctggcgacagcttgggagcctccggtgaggctccaggcagaggtctgggaggacagaggtgcctagcaggggctctcttgaagtgcgggcctccagctttccacctgcgcccttgttgattacagggattggtgggatcgagggcagtagggcaacagggggaactgaccagcagagtttgtagctactcagtggcccaaggaacccaactgaccagaactgccgatctgaacacacctttattttccaccatctctcatgggagctgccgttccctgggctcctggatccagccaagccaagtaacaggcagaacctggaggggccaagaggccatggcacaagcttcggggccttctgagatctcctggtggagatgtgccaggagaggcctcagcatcagctgctgttcctgggcgcggaacaggagctatgggccatcctggtttgagagtgaacttgggagcagaagggaggtgggtgaacatgttttcctgcctcctgagtctcccacagtttatcactcacgagcctaggacagaaggaaggagctcttttagggatttgccatttcagtccatgtgtgcaaatgcactgggctgctgtacagcccaccctgcctgcagatgcgcgctggggcgagctcagacccagacctgctttgcygagctgcctggagagacctcttagactcttgtttctttgcataacataagcaagcacccttaggctgacactgtccccagatgatgttgtttggctgggctttagctgctgcgttaattttatctcatcatttattactattctgcctcatgccgcggaagacttaaggcaaacctatgaagtcagccttagttttgaggcctttggtctcacagctttctgtttctccctgaacttcgtgttccctg

SEQ ID NO: 78428 - DNA, 710 bp, Homo sapiens
gtggcctgacagggtggctgctctgcagcggttggtcacctgcagggggaaggggcccagcctgcccgtggggtcccctggcctccctccagcccctcactcccctaagccccagcctcctggccagggggaaggcagcctcctctttctcacaccctgggtgcctcaagggggcagtgctcaccccaagctagggcttgtggcccccggccctgggggctgatttggaggtgagagcgcctcagtgcctctcagatcccaagaaggagggccagtggcctccaccatcccggcctgcagccccagggccacctatggctgctgcctgcctgggcatcgtacggaggccaagggttcaggggcctttgcctcttcccctgcmagaacgtgagcgagccattccctgatgtggggcaggggcggcgaggggaggggaggtggagccaggctgggccaggcaggcaggcaccaggggtcagtgggagggtgggccggcccggggggatgctgtcgcccgtctgcagtgccagctcttctcctgcacgctccctcccgggacgggccatggccttgctgggccatacgtctctgtcaaaatctctatgaataaattaacctttttaaagattagtgctctctaatacctcagggttttttaaacacagcaaatgctacaaatattttgccgagcatggctggcgtgcagggct

SEQ ID NO: 78429 - DNA, 796 bp, Homo sapiens
cagggcccaaggcccctccagccttcagacacattctgtgtcctgggaccgggattctcaatggctggcatccggggttctagctggcaaagggcactcccagctgtgccagccacagtgtgtgcacaggtgtgagaaattgtagctgtgtgcacacacgtgagcatggcctgtgaccaggggccaccccagcatgcctgtgtgcctgcttctgcatgtacacatggctgtgtcctcaggcacccgtgtctgcacatgctcacatatgtctttgtctgtgcttttgctcaggtgctggaacgtggggccgaggcggggcagcttgtgggggctcctgggcctgtgtctgctccacyaccaccgtcagagctcttctgagtcgccgtggggattttgtggtgcctcctcctctgggctctgatccggctgccccagaacccaagctcagaggcctcgtccccaggcgggtcctgacctcggcaggccagcctcgcgttccctcagccccatcacaccagctgacaggctggcatttccctcccgcctggcgtttccccccgccggtcatgtcgacaagcaccatgggtttcctgacagacggaaatatcaatccttaggtacagggacaaagcaggttttaaactttaacgagaggctttaatggaaataaaacgtaaaattcctcttcaaatggaggtgcttctgttttatcagagaaaaagtaccctaaataataaatcgacgtcgtgtgtcgtggttctcgtacctgcgtgaatatttaaaacatgcaaacatg

SEQ ID NO: 78430 - DNA, 796 bp, Homo sapiens
cagggcccaaggcccctccagccttcagacacattctgtgtcctgggaccgggattctcaatggctggcatccggggttctagctggcaaagggcactcccagctgtgccagccacagtgtgtgcacaggtgtgagaaattgtagctgtgtgcacacacgtgagcatggcctgtgaccaggggccaccccagcatgcctgtgtgcctgcttctgcatgtacacatggctgtgtcctcaggcacccgtgtctgcacatgctcacatatgtctttgtctgtgcttttgctcaggtgctggaacgtggggccgaggcggggcagcttgtgggggctcctgggcctgtgtctgctccaccaccaccgtcagagctcttctgagtcgccgtggggattttgtggtgcctcctcctctgggctctgatccggctgccccagaacccaagctcagaggcctcgtccccaggcgggtcctgacctcggcaggccagcctcgcgttccctcagccccatcacaccrgctgacaggctggcatttccctcccgcctggcgtttccccccgccggtcatgtcgacaagcaccatgggtttcctgacagacggaaatatcaatccttaggtacagggacaaagcaggttttaaactttaacgagaggctttaatggaaataaaacgtaaaattcctcttcaaatggaggtgcttctgttttatcagagaaaaagtaccctaaataataaatcgacgtcgtgtgtcgtggttctcgtacctgcgtgaatatttaaaacatgcaaacatg

SEQ ID NO: 78431 - DNA, 796 bp, Homo sapiens
cagggcccaaggcccctccagccttcagacacattctgtgtcctgggaccgggattctcaatggctggcatccggggttctagctggcaaagggcactcccagctgtgccagccacagtgtgtgcacaggtgtgagaaattgtagctgtgtgcacacacgtgagcatggcctgtgaccaggggccaccccagcatgcctgtgtgcctgcttctgcatgtacacatggctgtgtcctcaggcacccgtgtctgcacatgctcacatatgtctttgtctgtgcttttgctcaggtgctggaacgtggggccgaggcggggcagcttgtgggggctcctgggcctgtgtctgctccaccaccaccgtcagagctcttctgagtcgccgtggggattttgtggtgcctcctcctctgggctctgatccggctgccccagaacccaagctcagaggcctcgtccccaggcgggtcctgacctcggcaggccagcctcgcgttccctcagccccatcacaccagctgacaggctggcatttccctcccgcctggcgtttccccccgccggtcatgtcgacaagcaccatgggtttcctgacagacggaaatatcaatccttaggtacagggacaaagcaggttttaaactttaaygagaggctttaatggaaataaaacgtaaaattcctcttcaaatggaggtgcttctgttttatcagagaaaaagtaccctaaataataaatcgacgtcgtgtgtcgtggttctcgtacctgcgtgaatatttaaaacatgcaaacatg

SEQ ID NO: 78432 - DNA, 1309 bp, Homo sapiens
cttctcaggacaaagtcaccctctgacccactccaaggtggtcagctccccgagggctgggcttggccacggctggtccccagctcccagagcctggcctggcacgggcaggagctgaagagctcacacctggggggatgtgggtccacatgtgccctggagccccggcctccctctggcctaaatcrgctcactttcctgggagcgggggtgactccccgcagcgtcccaagttcccagggctccccacaggccccaaggacgcagtgttatcttcactgctcaggggacccaggagggagctaccagccgggacctcacctgccacgagcctcccctcatcggtgtcggttcagaactgtccagctctccctgcaggagcaggcagcctgcgacccccgccccaaggcccttgcaccaggcgagggtcctctgtcaggtgggggctccaaggagctgtggcgggtgtggggtcttctcctcgctcccaagttttgtatccagccctggcccatgaggggcagctggggtccctcccttgtgcctgctgtgtgcccggcaccgggaggagagctggcccctgccctgccagtgtgcagaccccagagggaagaggaggatgaagggccttgggaacaggactgggcagacggggatcctaagccttccttagagtgtgcgaagcctcaggctctctgttgaggagcgtttgctgcttcatttcaacaaataccctttgtgcatccactgtgcaccaggctccagctctgtcccctcctgggacatcctcgctgtggcccccgtagaaggggaagccaggctcctgccctcacttgctgggaggcagcagggcctggctcaactcctggcatctccacccagtgcagcccccggggccagccctccctgggtatttgggtcttccagatgctgactgtcctcttccctacctccccactcttttgcctccacttaaatgcctcttcctccaggaagcctgccctgatccccatggctgagtttgaccccccaccccaccatcattcctggtcaaggcacctggccctgcgtggtcactggatgatttcacatgtcacattctcccctgagagctgtgggtgctgagagttccaggccaccagtcacgaggatggagacggacgggggagttacacagggtgggaggggagctgggctctcccttgaccaggcaaggtggggcatgtggaggagaggacagccccttgcctggaagtagacaggctccctggggtgtgtgtccggctagggtgagtgagaggagccggcc

SEQ ID NO: 78433 - DNA, 1309 bp, Homo sapiens
cttctcaggacaaagtcaccctctgacccactccaaggtggtcagctccccgagggctgggcttggccacggctggtccccagctcccagagcctggcctggcacgggcaggagctgaagagctcacacctggggggatgtgggtccacatgtgccctggagccccggcctccctctggcctaaatcggctcactttcctgggagcgggggtgactccccgcagcgtcccaagttcccagggctccccacaggccccaaggacgcagtgttatcttcactgctcaggggacccaggagggagctaccagccgggacctcacctgccacgagcctcccctcatcggtgtcggttcagaactgtccagctctccctgcaggagcaggcagcctgcgacccccgccccaaggcccttgcaccaggcgagggtcctctgtcaggtgggggctccaaggagctgtggcgggtgtggggtcttctcctcgctcccaagttttgtatccagccctggcccatgaggggcagctggggtccctcccttgtgcctgctgtgtgcccggcaccgggaggagagctggcccctgccctgccagtgtgcagaccccagagggaagaggaggatgaagggccttgggaacaggactgggcagacggggatcctaagccttccttagagtgtgcgaagcctcaggctctctgttgaggagcgtttgctgcttcatttcaacaaataccctytgtgcatccactgtgcaccaggctccagctctgtcccctcctgggacatcctcgctgtggcccccgtagaaggggaagccaggctcctgccctcacttgctgggaggcagcagggcctggctcaactcctggcatctccacccagtgcagcccccggggccagccctccctgggtatttgggtcttccagatgctgactgtcctcttccctacctccccactcttttgcctccacttaaatgcctcttcctccaggaagcctgccctgatccccatggctgagtttgaccccccaccccaccatcattcctggtcaaggcacctggccctgcgtggtcactggatgatttcacatgtcacattctcccctgagagctgtgggtgctgagagttccaggccaccagtcacgaggatggagacggacgggggagttacacagggtgggaggggagctgggctctcccttgaccaggcaaggtggggcatgtggaggagaggacagccccttgcctggaagtagacaggctccctggggtgtgtgtccggctagggtgagtgagaggagccggcc

SEQ ID NO: 78434 - DNA, 1309 bp, Homo sapiens
cttctcaggacaaagtcaccctctgacccactccaaggtggtcagctccccgagggctgggcttggccacggctggtccccagctcccagagcctggcctggcacgggcaggagctgaagagctcacacctggggggatgtgggtccacatgtgccctggagccccggcctccctctggcctaaatcggctcactttcctgggagcgggggtgactccccgcagcgtcccaagttcccagggctccccacaggccccaaggacgcagtgttatcttcactgctcaggggacccaggagggagctaccagccgggacctcacctgccacgagcctcccctcatcggtgtcggttcagaactgtccagctctccctgcaggagcaggcagcctgcgacccccgccccaaggcccttgcaccaggcgagggtcctctgtcaggtgggggctccaaggagctgtggcgggtgtggggtcttctcctcgctcccaagttttgtatccagccctggcccatgaggggcagctggggtccctcccttgtgcctgctgtgtgcccggcaccgggaggagagctggcccctgccctgccagtgtgcagaccccagagggaagaggaggatgaagggccttgggaacaggactgggcagacggggatcctaagccttccttagagtgtgcgaagcctcaggctctctgttgaggagcgtttgctgcttcatttcaacaaataccctttgtgcatccactgtgcaccaggctccagctctgtcccctcctgggacatcctcgctgtggcccccgtagaaggggaagccaggctcctgccctcacttgctgggaggcagcagggcctggctcaactcctggcatctccacccagtgcagcccccggggccagccctccctgggtatttgggtcttccagatgctgactgtcctcttccctacctccccactcttttgcctccacttaaatgcctcttcctccaggaagcctgccctgatccccatggctgagtttgaccccccaccccaccatcattcctggtcaaggcacctggccctgcgtggtcactggatgatttcacatgtcacattctcccctgagagctgtgggtgctgagagttccaggccaccagtcacgaggatggagacggacgggggagttacacagggtgggaggggagctgggstctcccttgaccaggcaaggtggggcatgtggaggagaggacagccccttgcctggaagtagacaggctccctggggtgtgtgtccggctagggtgagtgagaggagccggcc

SEQ ID NO: 78435 - DNA, 1297 bp, Homo sapiens
gcatggctacagcacagtgccggggtgcacrgtggaggggaatagggctctccctctttccgggggggtctttagctgaaggggcttcagccaaaacatggaccctgtttccttccccactggaggcagaggggccatacctggtcccccggaggcagcagcaccctgcctgccatctgagagacacctgtgttgcttgtctgacatccgctgtgaagagtcaggggagcctcggtgctgcctggggaggatggcacaggaagccccagtggggcagcttcccgccttcgactctgcccccaccctctgcatcgcagcactcccagcacctggccaggatgggaaaacattgcagacagtcaccagggaccatcctctgcacgcgctccctcccggcctcgagtgactctattagagagagtatgttttattaatatcagatattaaagtttaatactgtgattgcaggggaaaaatgggacttcaccttcaaggagtattagcggattccaaagagagtctgtgagcgggaggcacatttgtcacagctttgcaggatgggcgcccccatccatcacacccttggtgagctctccacgctgctggcggtggccacggggtgagtgtcgcgaccccgtctggtgctcccaccgggtcagctcccaccccaggggtctggggccaccaggagaggaagtgtaggtgaggcaggggcaccaagaccccagagagggggctacagactctgcatcctgcacctctgggtatatggctgggacagaggccgacccccttcactggcccctgattttatgcagggagctctgtggggccccctggggccttgcctgagcccccagcctggagcgtacatccgtggcccccagttcacccttgtgagcccctcggaccgttctcacccctgcatgcctgcaatggacaagggccaccctctccgctcagaagcccgggaccagcagggtggggcgggtgaggagccatggtggagcctccagaaagggggcggggctcactgcaggttcctgccttgcactccttagaactcctgagcctggcagttggggtgggagccccagacccaggctggaggcccagcagcggctcagacccagcccttaggctcctcccccattcacaccatagatacctccagccgccccacatgcaaatgcacaggccacgtccgcctccgctggctgctctcactcctcccactggctgcactgggcctggcttctcctgaactttgggcctccccccatacacctttcttctg

SEQ ID NO: 78436 - DNA, 660 bp, Homo sapiens
cctgggcccagcctgcctccatgggctctggggccagggcagggagtggggatccggagccaagccgacccaggactcagccctgtgttacccttcgttgccttggaaggacatacaggcgcctccccttccacactggggcatgaggtaggtgggaaaggacccacagggcagccgagagctccaggtgtcccaggcgccctccggccagtcccactgccggggccctctggccatgagaagggagggtggccgagagagcatggagtcctccccrgcacggagctgcagaccccaggactgggcatgggtgaagcactcgcagctcactcccctctgtgagctccaggaggcctctgtaccccagagctgcgtgcaggccctgcagggaggaggcatcaggaggcgactgcattgctgctggtcctgggtggcctcagtcagcgcggcttggagagcaccccccaggcttttttgccgtcacggtggtgtagaccagcaggtagcacacaggccgtgatcccgcacctggggatgggctagcccctcttggaggactgctggctgcacaaccgtcgctgtgtagacagggatggcccctcggcccctctgggagcttcacctgcctaggccatagctgtcttcctgagcctggcccac

SEQ ID NO: 78437 - DNA, 660 bp, Homo sapiens
cctgggcccagcctgcctccatgggctctggggccagggcagggagtggggatccggagccaagccgacccaggactcagccctgtgttacccttcgttgccttggaaggacatacaggcgcctccccttccacactggggcatgaggtaggtgggaaaggacccacagggcagccgagagctccaggtgtcccaggcgccctccggccagtcccactgccggggccctctggccatgagaagggagggtggccgagagagcatggagtcctccccggcacggagctgcagaccccaggactgggcatgggtgaagcactcgcagctcactcccckctgtgagctccaggaggcctctgtaccccagagctgcgtgcaggccctgcagggaggaggcatcaggaggcgactgcattgctgctggtcctgggtggcctcagtcagcgcggcttggagagcaccccccaggcttttttgccgtcacggtggtgtagaccagcaggtagcacacaggccgtgatcccgcacctggggatgggctagcccctcttggaggactgctggctgcacaaccgtcgctgtgtagacagggatggcccctcggcccctctgggagcttcacctgcctaggccatagctgtcttcctgagcctggcccac

SEQ ID NO: 78438 - DNA, 660 bp, Homo sapiens
cctgggcccagcctgcctccatgggctctggggccagggcagggagtggggatccggagccaagccgacccaggactcagccctgtgttacccttcgttgccttggaaggacatacaggcgcctccccttccacactggggcatgaggtaggtgggaaaggacccacagggcagccgagagctccaggtgtcccaggcgccctccggccagtcccactgccggggccctctggccatgagaagggagggtggccgagagagcatggagtcctccccggcacggagctgcagaccccaggactgggcatgggtgaagcactcgcagctcactcccctctgtgagctccaggaggcctctgtaccccagagctgcgtgcaggccctgcagggaggaggcatcaggaggcgactgcattgctgctggtcctgggtggcctcagtcagcgcggcttggagarcaccccccaggcttttttgccgtcacggtggtgtagaccagcaggtagcacacaggccgtgatcccgcacctggggatgggctagcccctcttggaggactgctggctgcacaaccgtcgctgtgtagacagggatggcccctcggcccctctgggagcttcacctgcctaggccatagctgtcttcctgagcctggcccac

SEQ ID NO: 78439 - DNA, 476 bp, Homo sapiens
tcagacctcagctgtgagagctgcagcctccagtcccagctgctcggggacagagctgtgtccagccaggccttgtccccagtcccccagggccgcctgtgtgcagttcccgccagcatccctcaggggcctctggacagcagggggatcaggagcagggtttccgttcctgtcgcaccagggccctggtgtgtgaccttcgctgagctgcttttcctgccggtctgtaaaatggacacagtaaaaagacctgcctcgaaactaaaatgcatattcctcagtgaaaggagccagtctgaaaacgccgctcaccgtgagattccagctcaagggcattctggagaaggtggaactctggaggcagccaaaagatgagagggtgccagggactcaggggagggagggaggaaggcacaggtggagcagggagatctccagggcgtgggctcctccgcaggamcccgcagtggtggatc

SEQ ID NO: 78440 - DNA, 675 bp, Homo sapiens
gcatttgcctgccccagccctttgtacacagtggcctggcttgcaggagcttccagagagctctagagggaggcagaaagctgtttctccagaaaggcctcctgagaaagatccaggcacaggccccaggtccttatccccaccaggaaggacccatggctggcttagctccggggggagggaatgkccagcccctgagccctgcaggggtgggtgagggtgtgggagtctgccccgcggcagatccacgaagggatggatgtccatagggctgaagccgtggctcaaacatgagataaatttgtccccacttagattgactttgttgcccaaacgcctgaattgccaacttgaaccctgagggcaggacataaaccccaccctgtgcatttctgctgagtctgtcttaagagtccaaggaggggcagtgggggaggacagagccttttcgagttcctggcttgacagtgcaggaactgtgccagggtgccggaaggtgatcacctcccacgccaggtacatgaaatttacttggccccaaaccctctggcctgaggggcctgtaggacaacccgagcttgggctgccactgcctgaagctctccgcaactctggaaaccttccggtgtggggccaccccctcccaccatgctgacaattcctgagggacaaaag

SEQ ID NO: 78441 - DNA, 1395 bp, Homo sapiens
  misc_feature (1)...(1395): n = A,T,C or G
tatcatatgctaagtgctattccttagtctagtctcattcctgctgttctgtaaccaaaaggcaaaaaaaaaaaaaaaaaaatccttgctgaaagaagtgagaattctcattttaaagtgtcttactgatttaaaaaagaaaaaggggggcactcaatgtgagatacagcaaagatccaagatgtgtgtatgtgttttttaacaaatggcagtatgcatttggatgcttattgtgtgccaggcagtgtgctaagcaccttatgcacattttttttttttgagacaagtcttgttctgttgcccaggctggagtgcagtggcacgantcttggctcactgcaatttctgccttctgggttccagcgattcttctgcttcagcttctcaagtagctgggattacaggcacccaccacaacgctcggctaatttttgtattttaatagaaacggggtttcaccatgttggccaggctggctcgaactcctgacctcaagttatctgcccacctcagcctcccaaagtgctgggattacaggcgtgcagctgcacccagccacattttttcattaatctttccaacctctgtgctaggtaccattattctaaattaaaaaaaaaaaaacaaaaaaccaaaaactcatactaaggctttcagagtttatggaatctgctcaaggtcacacagctggtaaatgcaggagctggactgagtccagaggccactcttaccatcccccactcccacccacagaccaggcagtggccttcttggagcacccagtgaggctttccttggagttacccctgcatatgaaagtcatattagtaggtcagcattttaactgggttaactatcactcttctaccatgacccacccagcataggactccctctacccagcagctggatggatcccaggtggtcccagtgtctgtrttcattgaacaccgccatttcagtattaaattagtcattttattaatagtattaatatcctttttatttatttatttatttattttttgagatagagtctcactttgtcacccaggctagagtgcagtggctcgatcttggctcatggcaacctccgcctcccgggttcaaacgattcctgtgcctcagtcgggtgccaccacacctggctaatttttgtatttttagtagagacagggtttcaccatgttggccaggctggtcttaaactccggacctcaggtgatccacttgcctcgacctcccaaagtgctggaattacaggcatgagccaccgtgcccagcctaatatccattttggacataaatgaaatatgcttggttattttatttcctggttcacagcaattctaaggtaataaaaacttagaagtgactgtgagatgggggctgtcc

SEQ ID NO: 78442 - DNA, 821 bp, Homo sapiens
agtcagcagtttgcaacctcaaacgaatccctcaacagaacccaattatgcagacaccctgatcttggacttctggcctccagaactgtgagaaataaatttctgttgtttataaccacccagtttatggtattttgtgatggtagcccaagtagactaagtatattatctcaatggattttatacagcagcaaagtgaataaactacaaccacacaaagcaacatagataattttcaaaacaataatgatgatgacagttaaagataggcccataagactctattagtgtgatgtcatttctataaatcttgaatataaacatatatcaagaacactttgtttaggaacatatgtgtataaaaatatttcataacactcaaggtaatgatgaagacataatttaggctggcatgacctctgatgagggaaaggcaagaggtagatggtaaagacacatacctaggtggacacgagttgatggcagggttccagtccttgtatgtgatgatgatgtcacatgtttattacagtattgagctttagacktgcataaatattatgtgttaatttttatttatcaattataataataggataaatatatataaatatctgaaaaaataagtatgaaaagtgttaacattaaaacatttgtttaacaagaatgcggatatttcttaaatttatcttttattccaagtcattctcattttctttctataacaggttcttcaaaaatgcctctggaaaacacccactgcccagttccaaagccaaccttatatttttatgtatttgttaagaaagtaccctgcttct

SEQ ID NO: 78443 - DNA, 821 bp, Homo sapiens
agtcagcagtttgcaacctcaaacgaatccctcaacagaacccaattatgcagacaccctgatcttggacttctggcctccagaactgtgagaaataaatttctgttgtttataaccacccagtttatggtattttgtgatggtagcccaagtagactaagtatattatctcaatggattttatacagcagcaaagtgaataaactacaaccacacaaagcaacatagataattttcaaaacaataatgatgatgacagttaaagataggcccataagactctattagtgtgatgtcatttctataaatcttgaatataaacatatatcaagaacactttgtttaggaacatatgtgtataaaaatatttcataacactcaaggtaatgatgaagacataatttaggctggcatgacctctgatgagggaaaggcaagaggtagatggtaaagacacatacctaggtggacacgagttgatggcagggttccagtccttgtatgtgatgatgatgtcacatgtttattacagtattgagctttagacgtgcataaatattatgtgttaatttttatttatcaattataataataggataaatatatataaatatctgaaaaaataagtatgaaaagtgttaacattaaaacatttgtttaacaagaatgcggatatttcttaaatttrtcttttattccaagtcattctcattttctttctataacaggttcttcaaaaatgcctctggaaaacacccactgcccagttccaaagccaaccttatatttttatgtatttgttaagaaagtaccctgcttct

SEQ ID NO: 78444 - DNA, 708 bp, Homo sapiens
cttccttacaacatggaatgctacacagccatataaaggatgagttyatgtcattttcagggacatggatgagctggaaaccatcattctcagcaaactatcacaagagcaaaaaaacaaacaccgcatgttctcacttataagtgggaggtgaccaatgagaacacatggacacagggaggggaacatcacacattggggcctgttgcagggtggggagctaggggagggataacattaggagaaatacctaatgtaggtgatgggttgatgggtgcagtaaaccatcatggcacatgtgaacctacgtaacaaaactgcttgttctgcacatgtaccctagaacttaaagtataataagaaaaaaaaaaagtgctggaaaactaaatgtttttggcttgaattagacacatatccttttaatgaacagtaactacagtcaaggaattgctagctctgtttgaccgaacttaagtcctttgatctgggtaaccacatcccaaacatataaactggcagggcagtaatgggcaagtccccagaagaatttatttatttatgtgatacatttattaagtgccctctatgttccaaacaagttttgtgtgggaaagataactctgaaaaataaaagtgataacaagtgtctgcatttatagaacatacattctatttaaaaagtgagtaaattagataagcaagtaaact

SEQ ID NO: 78445 - DNA, 708 bp, Homo sapiens
cttccttacaacatggaatgctacacagccatataaaggatgagttcatgtcattttcagggacatggatgagctggaaaccatcattctcagcaaactatcacaagarcaaaaaaacaaacaccgcatgttctcacttataagtgggaggtgaccaatgagaacacatggacacagggaggggaacatcacacattggggcctgttgcagggtggggagctaggggagggataacattaggagaaatacctaatgtaggtgatgggttgatgggtgcagtaaaccatcatggcacatgtgaacctacgtaacaaaactgcttgttctgcacatgtaccctagaacttaaagtataataagaaaaaaaaaaagtgctggaaaactaaatgtttttggcttgaattagacacatatccttttaatgaacagtaactacagtcaaggaattgctagctctgtttgaccgaacttaagtcctttgatctgggtaaccacatcccaaacatataaactggcagggcagtaatgggcaagtccccagaagaatttatttatttatgtgatacatttattaagtgccctctatgttccaaacaagttttgtgtgggaaagataactctgaaaaataaaagtgataacaagtgtctgcatttatagaacatacattctatttaaaaagtgagtaaattagataagcaagtaaact

SEQ ID NO: 78446 - DNA, 660 bp, Homo sapiens
cataggcacaacatgaggaaagattactggggcaagactggtgagtacataaggttttgggtttctacttgtatgacttatacatgaccagttgttctggtgtgttttgatctggtgcacttcctgagacatagaacaattagtgatacaactgggacagtcccagacaaagcaatacattgcaacataacaaattatctcaaaaatagcagcataaaaygaacaaaagaaaacatttattttcttacacagtttctgagagtcatgaatcaggaagtagattagctggttagttctgactcagggtcacacatgaggttgcaataaagctgtcatctggggctatagtttctggagacttgattagggatgaaagatccactgcaatctcactcacccagctgttggcaggaagcttcagttactcaccatgtaagcttatctataggattgatctcaacatagcacctaacttccccagagacagtgatgagagagaaggagaatgaaagaatgtaacagaaacaaatgccgcagtgtcttttataaccctatcttgaaagtggtattccattacttctgccagattttactggtcacatatgcccagcctaaaacaatgcaggatgggattatacaagagtgggaatacaagaggca

SEQ ID NO: 78447 - DNA, 660 bp, Homo sapiens
cataggcacaacatgaggaaagattactggggcaagactggtgagtacataaggttttgggtttctacttgtatgacttatacatgaccagttgttctggtgtgttttgatctggtgcacttcctgagacatagaacaattagtgatacaactgggacagtcccagacaaagcaatacattgcaacataacaaattatctcaaaaatagcagcataaaacgaacaaaagaaaacatttattttcttacacagtttctgagagtcatgaatcargaagtagattagctggttagttctgactcagggtcacacatgaggttgcaataaagctgtcatctggggctatagtttctggagacttgattagggatgaaagatccactgcaatctcactcacccagctgttggcaggaagcttcagttactcaccatgtaagcttatctataggattgatctcaacatagcacctaacttccccagagacagtgatgagagagaaggagaatgaaagaatgtaacagaaacaaatgccgcagtgtcttttataaccctatcttgaaagtggtattccattacttctgccagattttactggtcacatatgcccagcctaaaacaatgcaggatgggattatacaagagtgggaatacaagaggca

SEQ ID NO: 78448 - DNA, 660 bp, Homo sapiens
cataggcacaacatgaggaaagattactggggcaagactggtgagtacataaggttttgggtttctacttgtatgacttatacatgaccagttgttctggtgtgttttgatctggtgcacttcctgagacatagaacaattagtgatacaactgggacagtcccagacaaagcaatacattgcaacataacaaattatctcaaaaatagcagcataaaacgaacaaaagaaaacatttattttcttacacagtttctgagagtcatgaatcaggaagtagattagctggttagttctgactcagggtcacacatgaggttgcaataaagctgtcatctggggctatagtttctggagacttgattagggatgaaagatccactgcaatctcactcaccyagctgttggcaggaagcttcagttactcaccatgtaagcttatctataggattgatctcaacatagcacctaacttccccagagacagtgatgagagagaaggagaatgaaagaatgtaacagaaacaaatgccgcagtgtcttttataaccctatcttgaaagtggtattccattacttctgccagattttactggtcacatatgcccagcctaaaacaatgcaggatgggattatacaagagtgggaatacaagaggca

SEQ ID NO: 78449 - DNA, 678 bp, Homo sapiens
attagcattcgaatctagactgtgtaaagcagactgtcctccccaatgcaggtgggcctcatccaatcctttgaggacctgaacagaacaaaaatgtggaggatgagaaaatttgctgttgttgcctgactgcatgagctgagacatcagttttctgccattagactggggcttacaccatcagcactactggttctcaaaccgtttaactcagactataattacattaccagctttcctgattctccagcttgcagatggcagaccgtgggacttctcaggttccataatcatttgctgattcctcataatctctctctctctctatacacacacacacacacacacacacacacacacacacacacacacacacacacaattctattggctctatttatctggagaacrctgactaacacacatggctaaatccttatcatttaagtcttcaaatagtatttcctcagagaagcctttcctattactgcctatcctgggaattgcaaatacctcaaggtcccagagaatagtcagtagcaaaggtaccgtggtaagtaccattacccagattcaacaattatcaacattgtgtcatttttgtttcacctatctcttccactggctttttacttgatcattttaaacaaatcccaaacactgtgtcacttcaaacca

SEQ ID NO: 78450 - DNA, 678 bp, Homo sapiens
attagcattcgaatctagactgtgtaaagcagactgtcctccccaatgcaggtgggcctcatccaatcctttgaggacctgaacagaacaaaaatgtggaggatgagaaaatttgctgttgttgcctgactgcatgagctgagacatcagttttctgccattagactggggcttacaccatcagcactactggttctcaaaccgtttaactcagactataattacattaccagctttcctgattctccagcttgcagatggcagaccgtgggacttctcaggttccataatcatttgctgattcctcataatctctctctctctctatacacacacacacacacacacacacacacacacacacacacacacacacacacaattctattggctctatttatctggagaacgctgactaayacacatggctaaatccttatcatttaagtcttcaaatagtatttcctcagagaagcctttcctattactgcctatcctgggaattgcaaatacctcaaggtcccagagaatagtcagtagcaaaggtaccgtggtaagtaccattacccagattcaacaattatcaacattgtgtcatttttgtttcacctatctcttccactggctttttacttgatcattttaaacaaatcccaaacactgtgtcacttcaaacca

SEQ ID NO: 78451 - DNA, 711 bp, Homo sapiens
gtttctacttttttggctatgtacattgtgtgtatgtcttttgtgtgaacatatttttcttttcttttttttcttttgagatggagtcttgctctgttgcctaggctggagtacagtggcacaatctcagctcactgcaacctccacctccctggttcaagcaattcccctggctcagcctcccgagtagctgggattacaggcacacaccatcacgccrggctaatgtttttgtatttttagtggaaatggggtttcaccatgttggccagactggtattgaactcctgacctcaggcaatccacacgcctcagcctcccaaagtgctgggattacagatgtgagccactgcacctggccagtatcccttttctacagccatattaaaacagctacaaacacttattttcctatttagttttactttctgtgcatatcaaagttgtactcttcagaccaacaaaccaacatgaggcaaattacatagcttcccatatacccttgtttcctcatgtgctaatcaaaggctctgaaaatggatactgctttaatattgtctgctttattcttaaagtgctcattcttttactagatgtaaagatttggtgttaacaaaaggggttttaatatgtaaatatgaatgaatgcctttagtttacccctgtttgtctattattattagtctgttttcatttatacttcatagaggc

SEQ ID NO: 78452 - DNA, 711 bp, Homo sapiens
gtttctacttttttggctatgtacattgtgtgtatgtcttttgtgtgaacatatttttcttttcttttttttcttttgagatggagtcttgctctgttgcctaggctggagtacagtggcacaatctcagctcactgcaacctccacctccctggttcaagcaattcccctggctcagcctcccgagtagctgggattacaggcacacaccatcacgccaggctaatgtttttgtatttttagtggaaatggggtttcaccatgttggccagactggtattgaactcctgacctcaggcaatccacacgcctcagcctcccaaagtgctgggattacagatgtgagccactgcacctggccagtatcccttttctacagccatattaaaacagctacaaacacttattttcctatttagttttactttctgtgcatatcaaagttgtactcttcagaccaacaaaccaacatgaggcaaattacatagcttcccatatacccttktttcctcatgtgctaatcaaaggctctgaaaatggatactgctttaatattgtctgctttattcttaaagtgctcattcttttactagatgtaaagatttggtgttaacaaaaggggttttaatatgtaaatatgaatgaatgcctttagtttacccctgtttgtctattattattagtctgttttcatttatacttcatagaggc

SEQ ID NO: 78453 - DNA, 691 bp, Homo sapiens
tcgatttaagaattacatttctagttatccattttaccaaaaatacccctcagtacatctaaaatatacaacaaagatgtttattacattttagttagaagtaacctattatcagaatgaaagagttaaattattatgaagctgaagtactatgaaatcctctgcaaaagttaaaaatgagataatccatagttattgacatagaaatgtctctaagacatatatttctaagtcataaaagaatttgaagaataatatatgttatawgcctatttatatgtttttaaaactacatgatgtccgtatactacataaaaattcataaaatgcttagaaatgagttaagaaagatacacagcaaatatttaaaagttattacctctggagaggagagttagattgacaaaagatgatgattgattgaaggggaactttttatacctttgagtaattaacaacaacaacaaaaacatgttttcaggtattacttaaatttttaagtttattttttgaattgacaaatacaaattgtatatatttggctgggtgcggtggctcacgcctgtaatcccagcactttgggaggccaaggcgagtggatcacgaggtcaggagttggagaccagccaatatgttgaaacgccatctctaccaaaactacaaaaattagcctgtagtcccagctacccag

SEQ ID NO: 78454 - DNA, 691 bp, Homo sapiens
tcgatttaagaattacatttctagttatccattttaccaaaaatacccctcagtacatctaaaatatacaacaaagatgtttattacattttagttagaagtaacctattatcagaatgaaagagttaaattattatgaagctgaagtactatgaaatcctctgcaaaagttaaaaatgagataatccatagttattgacatagaaatgtctctaagacatatatttctaagtcataaaagaatttgaagaataatatatgttataagcctatttatatgtttttaaaactacatgatgtccrtatactacataaaaattcataaaatgcttagaaatgagttaagaaagatacacagcaaatatttaaaagttattacctctggagaggagagttagattgacaaaagatgatgattgattgaaggggaactttttatacctttgagtaattaacaacaacaacaaaaacatgttttcaggtattacttaaatttttaagtttattttttgaattgacaaatacaaattgtatatatttggctgggtgcggtggctcacgcctgtaatcccagcactttgggaggccaaggcgagtggatcacgaggtcaggagttggagaccagccaatatgttgaaacgccatctctaccaaaactacaaaaattagcctgtagtcccagctacccag

SEQ ID NO: 78455 - DNA, 2392 bp, Homo sapiens
agatgaacaaaacaagaaccctatctcgtttgtcaatctcattaggaagacagacaggcatataagcaaaaccctccctgaacaaccaccttctcccccgctaaggtgtataaagggcagtggtacactgcaatgcaaggtgtgcaacaattacaagcaatggctttggaatcagagagagtacagtctaaatattggctctaccatgtgattctcagcatgtttttagccactctaagtctccctttcctcacagtgaatcaggaattgtaattcctacctcacaggattaagtggaataatgtatgtaaatttcagtacaatgcctggcatgtgctaagtcttcaaaaatggtatatgttttcacagtggagcactaaggaaatgtggagcagggcattgagaactgacatctaccaatcaacacgtgatgaacagaggcaggaagattgtcactgcaccaagggccatctactttagtgttgcacaacattagagttttagggtgaggttttgtgtgtgtgtgcgtgtgtgtgtgtgtgtgtgtgtgctcaagaagcataaccacttaatggcacagagtctattttgaagctcgaaaaccagtaagaccatagaactctctcaggaggaatgaggagttggctgagttctgcccaaggaagttctcacaagagggcattgtaaaatgtccttattcctcagaacttaactttaaaatgttcccactgaagtccaatgggagttttatgggagtaaaggatagaattaggtcttgtgtatttttaaagggtcattcaaaaaggcaaagtctaaattttttacagatggcagagtaggagtaatgcagttggccaaaactgaccttttatgttttccaaaagcaaatgtttactgaaagaggactctgctatactaccaatggagaaagaaatcttgatgcttacattggatagctcggtacacattcactgccaaatacatttataaaaatcaataataatattttccatggtacctgttttcaaccttcctccaaaattttgccctgtagttgctttttctcaaacacaaatatttctgaggaaaaataatattttaggtgagaataggcttgcgaaatcgtatgcattttaggagcctcactgtgccttcacagttctagctccaccacagtgatgcacaggcaggggagaggatgacaatgtcaccaggtcttctgggtagtgaatttaaactggtgttaagttcttccagatgaaactccttttaaactttgttcaaagagggaaagggatgttagaaattcctgtgctcttttggacattaaataattcttaaaaaacaaaatttcgagtgtgttcagtaagttttaaaaagtaagaaatattgaaatccatcaaacatagatgggaaaacttaaagtggcttgtgacgatacatattgggttttgtaaactttaaaagctcagggagaaaaaatggaaatgtgagctcaaattatcagtaaaatttaatcaacccacaacagccataatttagaactttcttattttcacacttactaagtgggttgcaagtaccattttaacatgtaggtttaaaaaaaaattgttccatagccggtccccagaaaatcagaaccatcccacttttctcattcaggagaaagcatgcacagtagatattgagacaatactttataaagtacctggcayatacggaacgattttggcagctagaccccagatggccatgttctgttaaggattgtagaagtctattccttttaaaaaaacacacacacacaataaaaataaatagatagcttaagtgtaaaatagtatattcactttggaaaaagttgtgacagttcttataaagttaaatatatactcactttttggaaattgtaattctactccttgatatttaccaaaaaataaaaacatatcaaaaaataaaacctacacacatgcacaagaatgtccatagcagctttattcataagtagcataaactggacactcaaatttcattaagaagagaatggataaacaaattttagtatattctcacaaaggaatactactcaggactaaaaaatattaatacacacaacatgaacaagtctaatagatgttaccttgagctaaagaagctgaacacagaggagcatgatttcattcatatgaaggtcagtattagacaaaactaatcaacagttttaaaaatcagaaaagtggttgcctcactgtgatggggaggaataactgggaaagactatgagagtacttactgggatgtgatggcagtggcagtgtctaattttttcaggggtgtaagttacatggggctggctacgtgcatttatcaaaactcattaaattgt

SEQ ID NO: 78456 - DNA, 2392 bp, Homo sapiens
agatgaacaaaacaagaaccctatctcgtttgtcaatctcattaggaagacagacaggcatataagcaaaaccctccctgaacaaccaccttctcccccgctaaggtgtataaagggcagtggtacactgcaatgcaaggtgtgcaacaattacaagcaatggctttggaatcagagagagtacagtctaaatattggctctaccatgtgattctcagcatgtttttagccactctaagtctccctttcctcacagtgaatcaggaattgtaattcctacctcacaggattaagtggaataatgtatgtaaatttcagtacaatgcctggcatgtgctaagtcttcaaaaatggtatatgttttcacagtggagcactaaggaaatgtggagcagggcattgagaactgacatctaccaatcaacacgtgatgaacagaggcaggaagattgtcactgcaccaagggccatctactttagtgttgcacaacattagagttttagggtgaggttttgtgtgtgtgtgcgtgtgtgtgtgtgtgtgtgtgtgctcaagaagcataaccacttaatggcacagagtctattttgaagctcgaaaaccagtaagaccatagaactctctcaggaggaatgaggagttggctgagttctgcccaaggaagttctcacaagagggcattgtaaaatgtccttattcctcagaacttaactttaaaatgttcccactgaagtccaatgggagttttatgggagtaaaggatagaattaggtcttgtgtatttttaaagggtcattcaaaaaggcaaagtctaaattttttacagatggcagagtaggagtaatgcagttggccaaaactgaccttttatgttttccaaaagcaaatgtttactgaaagaggactctgctatactaccaatggagaaagaaatcttgatgcttacattggatagctcggtacacattcactgccaaatacatttataaaaatcaataataatattttccatggtacctgttttcaaccttcctccaaaattttgccctgtagttgctttttctcaaacacaaatatttctgaggaaaaataatattttaggtgagaataggcttgcgaaatcgtatgcattttaggagcctcactgtgccttcacagttctagctccaccacagtgatgcacaggcaggggagaggatgacaatgtcaccaggtcttctgggtagtgaatttaaactggtgttaagttcttccagatgaaactccttttaaactttgttcaaagagggaaagggatgttagaaattcctgtgctcttttggacattaaataattcttaaaaaacaaaatttcgagtgtgttcagtaagttttaaaaagtaagaaatattgaaatccatcaaacatagatgggaaaacttaaagtggcttgtgacgatacatattgggttttgtaaactttaaaagctcagggagaaaaaatggaaatgtgagctcaaattatcagtaaaatttaatcaacccacaacagccataatttagaactttcttattttcacacttactaagtgggttgcaagtaccattttaacatgtaggtttaaaaaaaaattgttccatagccggtccccagaaaatcagaaccatcccacttttctcattcaggagaaagcatgcacagtagatattgagacaatactttataaagtacctggcatatayggaacgattttggcagctagaccccagatggccatgttctgttaaggattgtagaagtctattccttttaaaaaaacacacacacacaataaaaataaatagatagcttaagtgtaaaatagtatattcactttggaaaaagttgtgacagttcttataaagttaaatatatactcactttttggaaattgtaattctactccttgatatttaccaaaaaataaaaacatatcaaaaaataaaacctacacacatgcacaagaatgtccatagcagctttattcataagtagcataaactggacactcaaatttcattaagaagagaatggataaacaaattttagtatattctcacaaaggaatactactcaggactaaaaaatattaatacacacaacatgaacaagtctaatagatgttaccttgagctaaagaagctgaacacagaggagcatgatttcattcatatgaaggtcagtattagacaaaactaatcaacagttttaaaaatcagaaaagtggttgcctcactgtgatggggaggaataactgggaaagactatgagagtacttactgggatgtgatggcagtggcagtgtctaattttttcaggggtgtaagttacatggggctggctacgtgcatttatcaaaactcattaaattgt

SEQ ID NO: 78457 - DNA, 2392 bp, Homo sapiens
agatgaacaaaacaagaaccctatctcgtttgtcaatctcattaggaagacagacaggcatataagcaaaaccctccctgaacaaccaccttctcccccgctaaggtgtataaagggcagtggtacactgcaatgcaaggtgtgcaacaattacaagcaatggctttggaatcagagagagtacagtctaaatattggctctaccatgtgattctcagcatgtttttagccactctaagtctccctttcctcacagtgaatcaggaattgtaattcctacctcacaggattaagtggaataatgtatgtaaatttcagtacaatgcctggcatgtgctaagtcttcaaaaatggtatatgttttcacagtggagcactaaggaaatgtggagcagggcattgagaactgacatctaccaatcaacacgtgatgaacagaggcaggaagattgtcactgcaccaagggccatctactttagtgttgcacaacattagagttttagggtgaggttttgtgtgtgtgtgcgtgtgtgtgtgtgtgtgtgtgtgctcaagaagcataaccacttaatggcacagagtctattttgaagctcgaaaaccagtaagaccatagaactctctcaggaggaatgaggagttggctgagttctgcccaaggaagttctcacaagagggcattgtaaaatgtccttattcctcagaacttaactttaaaatgttcccactgaagtccaatgggagttttatgggagtaaaggatagaattaggtcttgtgtatttttaaagggtcattcaaaaaggcaaagtctaaattttttacagatggcagagtaggagtaatgcagttggccaaaactgaccttttatgttttccaaaagcaaatgtttactgaaagaggactctgctatactaccaatggagaaagaaatcttgatgcttacattggatagctcggtacacattcactgccaaatacatttataaaaatcaataataatattttccatggtacctgttttcaaccttcctccaaaattttgccctgtagttgctttttctcaaacacaaatatttctgaggaaaaataatattttaggtgagaataggcttgcgaaatcgtatgcattttaggagcctcactgtgccttcacagttctagctccaccacagtgatgcacaggcaggggagaggatgacaatgtcaccaggtcttctgggtagtgaatttaaactggtgttaagttcttccagatgaaactccttttaaactttgttcaaagagggaaagggatgttagaaattcctgtgctcttttggacattaaataattcttaaaaaacaaaatttcgagtgtgttcagtaagttttaaaaagtaagaaatattgaaatccatcaaacatagatgggaaaacttaaagtggcttgtgacgatacatattgggttttgtaaactttaaaagctcagggagaaaaaatggaaatgtgagctcaaattatcagtaaaatttaatcaacccacaacagccataatttagaactttcttattttcacacttactaagtgggttgcaagtaccattttaacatgtaggtttaaaaaaaaattgttccatagccggtccccagaaaatcagaaccatcccacttttctcattcaggagaaagcatgcacagtagatattgagacaatactttataaagtacctggcatatacggaacgattttggcagctagaccccagatggccatgttctgttaaggattgtagaagtctattccttttaaaaaaamacacacacacaataaaaataaatagatagcttaagtgtaaaatagtatattcactttggaaaaagttgtgacagttcttataaagttaaatatatactcactttttggaaattgtaattctactccttgatatttaccaaaaaataaaaacatatcaaaaaataaaacctacacacatgcacaagaatgtccatagcagctttattcataagtagcataaactggacactcaaatttcattaagaagagaatggataaacaaattttagtatattctcacaaaggaatactactcaggactaaaaaatattaatacacacaacatgaacaagtctaatagatgttaccttgagctaaagaagctgaacacagaggagcatgatttcattcatatgaaggtcagtattagacaaaactaatcaacagttttaaaaatcagaaaagtggttgcctcactgtgatggggaggaataactgggaaagactatgagagtacttactgggatgtgatggcagtggcagtgtctaattttttcaggggtgtaagttacatggggctggctacgtgcatttatcaaaactcattaaattgt

SEQ ID NO: 78458 - DNA, 2392 bp, Homo sapiens
agatgaacaaaacaagaaccctatctcgtttgtcaatctcattaggaagacagacaggcatataagcaaaaccctccctgaacaaccaccttctcccccgctaaggtgtataaagggcagtggtacactgcaatgcaaggtgtgcaacaattacaagcaatggctttggaatcagagagagtacagtctaaatattggctctaccatgtgattctcagcatgtttttagccactctaagtctccctttcctcacagtgaatcaggaattgtaattcctacctcacaggattaagtggaataatgtatgtaaatttcagtacaatgcctggcatgtgctaagtcttcaaaaatggtatatgttttcacagtggagcactaaggaaatgtggagcagggcattgagaactgacatctaccaatcaacacgtgatgaacagaggcaggaagattgtcactgcaccaagggccatctactttagtgttgcacaacattagagttttagggtgaggttttgtgtgtgtgtgcgtgtgtgtgtgtgtgtgtgtgtgctcaagaagcataaccacttaatggcacagagtctattttgaagctcgaaaaccagtaagaccatagaactctctcaggaggaatgaggagttggctgagttctgcccaaggaagttctcacaagagggcattgtaaaatgtccttattcctcagaacttaactttaaaatgttcccactgaagtccaatgggagttttatgggagtaaaggatagaattaggtcttgtgtatttttaaagggtcattcaaaaaggcaaagtctaaattttttacagatggcagagtaggagtaatgcagttggccaaaactgaccttttatgttttccaaaagcaaatgtttactgaaagaggactctgctatactaccaatggagaaagaaatcttgatgcttacattggatagctcggtacacattcactgccaaatacatttataaaaatcaataataatattttccatggtacctgttttcaaccttcctccaaaattttgccctgtagttgctttttctcaaacacaaatatttctgaggaaaaataatattttaggtgagaataggcttgcgaaatcgtatgcattttaggagcctcactgtgccttcacagttctagctccaccacagtgatgcacaggcaggggagaggatgacaatgtcaccaggtcttctgggtagtgaatttaaactggtgttaagttcttccagatgaaactccttttaaactttgttcaaagagggaaagggatgttagaaattcctgtgctcttttggacattaaataattcttaaaaaacaaaatttcgagtgtgttcagtaagttttaaaaagtaagaaatattgaaatccatcaaacatagatgggaaaacttaaagtggcttgtgacgatacatattgggttttgtaaactttaaaagctcagggagaaaaaatggaaatgtgagctcaaattatcagtaaaatttaatcaacccacaacagccataatttagaactttcttattttcacacttactaagtgggttgcaagtaccattttaacatgtaggtttaaaaaaaaattgttccatagccggtccccagaaaatcagaaccatcccacttttctcattcaggagaaagcatgcacagtagatattgagacaatactttataaagtacctggcatatacggaacgattttggcagctagaccccagatggccatgttctgttaaggattgtagaagtctattccttttaaaaaaacacacacacacaataaaaataaatagatagcttaagtgtaaaatagtatattcactttggaaaaagttgtgacagttcttataaagttaaatatatactcactttttggaaattgtaattctactccttgatatttaccaaaaaataaaaacatatcaaaaaataaaacctacacacatgcacaagaatgtccatagcagctttattcataagtagcataaactggacactcaaatttcattaagaagagaatggataaacaaattttagtatattctcacaaaggaatactactcaggactaaaaaatattaatacacacaacatgaacaagtctaatagatgttaccttgagctaaagaagctgaacacagaggagcatgatttcattcatatgaaggtcagtattagacaaaactaatcaacagttttaaaaatcagaaaagtggttgcctcactgtgatggggaggaataactgggaaagactatgagagtacttactgggatgtgatggcagtggcagtgtctaattttttcaggggtgtaagttacatgggrctggctacgtgcatttatcaaaactcattaaattgt

SEQ ID NO: 78459 - DNA, 671 bp, Homo sapiens
gatcctggatgactggttggacatttcaagtcttatctattacatattacaaagagtggtttttttttttaaaaaaaccctccattacagggttttaattgtartcaactcaatgttctcccagcgttagcctaaatttccctaaaagcaaggccagagacaaagaatttcaggcaatttgtttatttagaaagagatcccagagactagaaatacagattgaggagtaaattagagaaaaagggaaagcacatacaaaaaaatcatgttttggctactgatacatataactttgtgcttgtttttgagggatcatataaaaacttctaagaaatgcatttcaaaggaagaaaagaagcacttattcttcaacttccatcccctttcagtcaggggtgacttcattggcattaattttactacatttctaggttttatacatgtgactccaagctggtctctgtgagtttttcatgccaccatgtcagtgaactctgagacagggagtgatatgtatgcagcatagggctgaggtaaagtggaccagattgcacctgtgaaaaactagtcaaaagctgtgcagaacggtttgctgtagctggagttgttgtaagagatggtgccgagaacaatgcaccccttgcatcacatggatacacttgtgttctcta

SEQ ID NO: 78460 - DNA, 671 bp, Homo sapiens
gatcctggatgactggttggacatttcaagtcttatctattacatattacaaagagtggtttttttttttaaaaaaaccctccattacagggttttaattgtaatcaactcaatgttctcccagcgttagcctaaatttccctaaaagcaaggccagagacaaagaatttcaggcaatttgtttatttagaaagagatcccagagactagaaatacagattgaggagtaaattagagaaaaagggaaagcacatacaaaaaaatcatgttttggctactgatacatataactttgtgcttgtttttgagggatcatataaraacttctaagaaatgcatttcaaaggaagaaaagaagcacttattcttcaacttccatcccctttcagtcaggggtgacttcattggcattaattttactacatttctaggttttatacatgtgactccaagctggtctctgtgagtttttcatgccaccatgtcagtgaactctgagacagggagtgatatgtatgcagcatagggctgaggtaaagtggaccagattgcacctgtgaaaaactagtcaaaagctgtgcagaacggtttgctgtagctggagttgttgtaagagatggtgccgagaacaatgcaccccttgcatcacatggatacacttgtgttctcta

SEQ ID NO: 78461 - DNA, 1167 bp, Homo sapiens
cctttccaggaaaatggatggagctggaagccattatccttagcaaattaacacaggaacagaaaactactgcatgttctcacttatgagtgggagctaaatggtgagaataaatcgacacatagaggggaacaacacacactggggcctattagagggtggagaatgggaggcgttagaggttcaggaaaaataactcatgagtaccaggcttaatacctcggtgatgaaataatctgtacaacaaaccctcatgacacgggtatacatatgtaacaagcctgcacatgtacccctgaacttcaaataaaagttgaaaaaatgtagaaataaataaataaatggtttgatagaactggaaaaaatatagcrccaaatattatcattagttcagtgcatataatatatcctagaagataatgtgccaaacttgactggttttcctctgaataggttcttagatgagcttataatactcctttaatatgccattttattaggctaaccacttatcaataataaagtatataaaactagtggatccttggtcatgtgctctttaacatatttctgttgtcataagatgggtctcttgatcaaaaccaatattgttcaggatatcatgcctatggatcagatattctgctatcttttttttttcaatgaataaaaacttttattattttttctgcttacaaaagtaatgtttgtttcttatacaaactataaatccatcagtgatatagaagaaagttcaagctcatagtaataatcattgcaaatattttatcatatattctttcagatttatttttctgcaaatactatgttatatatcttatgaaaaaatggtgctggaaaaggaattgtgagcaaggaaggagaggtaggtttaattgtggtaagatgaaattgctgttgcttccagagtataaaggatctgatgtaattcacctgacatcaagtgggtagctggtatttttcaagaatatagccatatgcaagggtgaccattggtctttactgatggcaggttagactttcatcagtggcagtaggtagataagcctgggtgaaaggcggcccatcttgttgggtttatgtatattctctaaccctgatgccatagttactccattatgagcccatgttccttcactgaagggg

SEQ ID NO: 78462 - DNA, 1167 bp, Homo sapiens
cctttccaggaaaatggatggagctggaagccattatccttagcaaattaacacaggaacagaaaactactgcatgttctcacttatgagtgggagctaaatggtgagaataaatcgacacatagaggggaacaacacacactggggcctattagagggtggagaatgggaggcgttagaggttcaggaaaaataactcatgagtaccaggcttaatacctcggtgatgaaataatctgtacaacaaaccctcatgacacgggtatacatatgtaacaagcctgcacatgtacccctgaacttcaaataaaagttgaaaaaatgtagaaataaataaataaatggtttgatagaactggaaaaaatatagcaccaaatattatcattagttcagtgcatataatatatcctagaagataatgtgccaaacttgactggttttcctctgaataggttcttagatgagcttataatactcctttaatatgccattttattaggctaaccacttatcaataataaagtatataaaactagtggatccttggtcatgtgctctttaacatatttctgttgtcataagatgggtctcttgatcaaaaccaatattgttcaggatatcatgcctatggatcagatattctgctatcttttttttttcaatgaataaaaacttttattattttttctgcttacaaaagtaatgtttgtttcttatacaaactataaatccatcagtgatatagaagaaagttcaagctcatagtaataatcattgcaaatattttatcatatattctttcagatttatttttctgcaaatactatgttatatatcttatgaaaaaatggtgctggaaaaggaattgtgagcaaggaaggagaggtaggtttaattgtggtaagatgaaattgctgttgcttccagagtataaaggatctgatgtaattcacctgacatcaagtgggtagctggtatttttcaagartatagccatatgcaagggtgaccattggtctttactgatggcaggttagactttcatcagtggcagtaggtagataagcctgggtgaaaggcggcccatcttgttgggtttatgtatattctctaaccctgatgccatagttactccattatgagcccatgttccttcactgaagggg

SEQ ID NO: 78463 - DNA, 635 bp, Homo sapiens
tggtatcccagccaggtacagaaactttagcacttccttggactttactgctaatgcttcgcactgatgatgattcagttcctaatacttttagtccccacattcttaattcaaattcttgatagatttttattggccacaagtcagccagtttagccttttttctttgtttgatactcctcatagtctaattagctatgaccagaggtttagatcatgtagtatggatatggctgtaagagtttacttccctgagtaagaagacagtttcagacaggggactgtggctgggcaggcacccccaaaagtgtcagcttctcaaatgtaagttgagtagttatcctacattgcatgaagtcatgagcatattatcagagctctctctttaggacagagggtatgatggttaactttaggcactgtcaactaatggccatgaataaaagaaagtactaagtatatgtgtgtagctggtgagagggttactgagtgaggccgtacaggctgtgtwcagcacaactgcagacaccaccattgtgcagcaatgtgaatcatgctccgctagaattttgctgtctcatccttgttctcaactttgctgaagccttattctaccatgaaatcacttatttagc

SEQ ID NO: 78464 - DNA, 635 bp, Homo sapiens
tggtatcccagccaggtacagaaactttagcacttccttggactttactgctaatgcttcgcactgatgatgattcagttcctaatacttttagtccccacattcttaattcaaattcttgatagatttttattggccacaagtcagccagtttagccttttttctttgtttgatactcctcatagtctaattagctatgaccagaggtttagatcatgtagtatggatatggctgtaagagtttacttccctgagtaagaagacagtttcagacaggggactgtggctgggcaggcacccccaaaagtgtcagcttctcaaatgtaagttgagtagttatcctacattgcatgaagtcatgagcatattatcagagctctctctttaggacagagggtatgatggttaactttaggcactgtcaactaatggccatgaataaaagaaagtactaagtatatgtgtgtagctggtgagagggttactgagtgaggccgtacaggctgtgttcagcacaactscagacaccaccattgtgcagcaatgtgaatcatgctccgctagaattttgctgtctcatccttgttctcaactttgctgaagccttattctaccatgaaatcacttatttagc

SEQ ID NO: 78465 - DNA, 941 bp, Homo sapiens
tggttcacaatagggttcccactcctacgagaatctcatgcctctgctgatctgacaagagacagaggtcaggcagtaatgctcactcatcccttgctcaccttctgctgtgtggcccagttcctaacaggccacagactggtaccagtccacggctgtggggtttgtggacccctggcttatagaatcactcagacgcttgggcaagtatagtatgtaccagaatcactagaacttttctacaaatgttcgttgagaaatactgtctgcaaatctctgtgctacaggtattagaggagagtcaacatcctacaatcttcaagatatatgactggggtagaggatgaatatagaaaggcaaccaccagtacctacttcattcacccaagttgcttatactgcaacatacagcataaacagaggtgtgctggagctggctaatatgagcttgcaagattcaattgttaaattttcagaagttttgcaagtcagttgttaaatacagctgtaattaaaaattaaactttataaatttaaaataaaatgatattacaaataatgatgatgaatactgaaaactcaccacttcctaataactatactacattttactattgtctatactcttggggtgatttatatccattatatctgtatggtggaaatacagcaaaataatatacatctctttccagcctcaaattcagtgacatcatgttggtagcttgaaatcagccatgatggtcaggtttacaccatagaaaacagcaaatgctacaaaccagggcttgaattactgttctgttgattgtctaaattgggggttgaccaacatctttgatagaagttcagagagcaaatatkttaggctttacaggccatacagtctctgtcataactactcaatgttactgtcatagtgaaaaagcagccatggacaa

SEQ ID NO: 78466 - DNA, 841 bp, Homo sapiens
tcctgcctcagccccgagtagctgggactaaaggcacccaccaccacacccagctaatttttgtttttttggtttatttgtagagatggggtcttgccatgttagccaggctggtctcaaactcctgggctacagtgattccccacctaagccccccaaagtgttgggattacgggcacgagccactgcacccggccaccctgccccttttaaaaatctcctttctattctctctctgctggcccaccttacccagagaagttttctttagttccatctcctgttctatttcattttttcttagatcccagaggaattaakaagatggggtggctgggaagggaaatggggagaatctcagagaatggaaggatcagagagctggaagccaaatctagactctaagctcctggggcacagaacatccccaccagacttagcacagtgccttgcacaaaacaggtgtacaataaatatccatttgtatggatgattacttgtgttaattagcaatgtgctcatacaaataatgaaaagtcatacagtaattttaaacaatgtcctatatacaactatttcaaggactcatgcaagtgacaacatccattaacactgtagctaattacctttgtgcctctcctctcctcccagtagcttcaagtgctcaactcttaaaaatcctgaaagtcaaagggcaagcagattccaggctccccttgaactttccctgaggcccagacaacattaaggccatgggcactgccaaactcttttttactggcattggtaaagcattgactgtgggtgaggtccaggacccagggctgtatttttcacagat

SEQ ID NO: 78467 - DNA, 816 bp, Homo sapiens
tccctcacctccatgttctggtggtatggtctgtaacttagagaatgtgataattctatgtgcagacctggccttcaaagtcattacataagtgccccatttgttgaggtagagaacagaacagattttattcaacaatgtggttgcttgagttataactttgaaatattctgactcggagcacatgggcctccatctgtactcttgccctgggctctgcagctgtcaggggagcaccaactactggctccagcgactgcacgagtctttgtcgctcccccacactcgcacagtgtgaacagcccctgctgtgcaaactctctcggaatcatctcagtttgagggtaccctctgttttctattggtgccgttgattgatagatatcaccaaatcctaacggtacctggcatamaggttctctattttaaagaaagtattattgactggaataaatggaaaagggggagagaaggaaaccttcatataaaactaactcaaactaaacaccgaggggcaatcaaattacctgcagcaatggggctagatccatgtagtgctcttagggacatgtgttcctgtaagatacaggccttccaaggtcatggaggagagatgtccagccccttgggtgggatgcctggaaaagccacactgggccaatgcactggaaggggcatgggccacagggggctacattttgttcttttccaaagattattaaaattcagtattgaactgtttatgtaataacatgccaaagatgccatgacacttccagtgaagctgctacttttcaagtgggatgaccttgactg

SEQ ID NO: 78468 - DNA, 816 bp, Homo sapiens
tccctcacctccatgttctggtggtatggtctgtaacttagagaatgtgataattctatgtgcagacctggccttcaaagtcattacataagtgccccatttgttgaggtagagaacagaacagattttattcaacaatgtggttgcttgagttataactttgaaatattctgactcggagcacatgggcctccatctgtactcttgccctgggctctgcagctgtcaggggagcaccaactactggctccagcgactgcacgagtctttgtcgctcccccacactcgcacagtgtgaacagcccctgctgtgcaaactctctcggaatcatctcagtttgagggtaccctctgttttctattggtgccgttgattgatagatatcaccaaatcctaacggtacctggcatacaggttctctattttaaagaaagtattattgactggaataaatggaaaagggggagagaaggaaaccttcatataaaactaactcaaactaaacamcgaggggcaatcaaattacctgcagcaatggggctagatccatgtagtgctcttagggacatgtgttcctgtaagatacaggccttccaaggtcatggaggagagatgtccagccccttgggtgggatgcctggaaaagccacactgggccaatgcactggaaggggcatgggccacagggggctacattttgttcttttccaaagattattaaaattcagtattgaactgtttatgtaataacatgccaaagatgccatgacacttccagtgaagctgctacttttcaagtgggatgaccttgactg

SEQ ID NO: 78469 - DNA, 816 bp, Homo sapiens
tccctcacctccatgttctggtggtatggtctgtaacttagagaatgtgataattctatgtgcagacctggccttcaaagtcattacataagtgccccatttgttgaggtagagaacagaacagattttattcaacaatgtggttgcttgagttataactttgaaatattctgactcggagcacatgggcctccatctgtactcttgccctgggctctgcagctgtcaggggagcaccaactactggctccagcgactgcacgagtctttgtcgctcccccacactcgcacagtgtgaacagcccctgctgtgcaaactctctcggaatcatctcagtttgagggtaccctctgttttctattggtgccgttgattgatagatatcaccaaatcctaacggtacctggcatacaggttctctattttaaagaaagtattattgactggaataaatggaaaagggggagagaaggaaaccttcatataaaactaactcaaactaaacaccgaggggcaatcaaattacctgcagcaatggggctagatccatgtagtgctcttagggacatgtgttcctgtaagatacaggccttccaaggtcatggaggagagatgtccagccccttgggtgggatgcctggaaaagccacactgggccaatgcactggaaggggcatgggccacagggggctacatttwgttcttttccaaagattattaaaattcagtattgaactgtttatgtaataacatgccaaagatgccatgacacttccagtgaagctgctacttttcaagtgggatgaccttgactg

SEQ ID NO: 78470 - DNA, 638 bp, Homo sapiens
cgggttcacgccattctcctgcctcagcctcccgagtagctgggactacaggcgcccgccaccgcgcccggctaatttttttttgtatttttagtagagacggggtttcrccttgttagccaggatggtctcgatctcctgacctcatgatccacccgcctcggcctcccaaagtgctgggattacaggcgtgagccaccgcgcccggccgggaattatttttgctattcacattatttctgtaagtttgaaattactttagaatctaactagaaagtactaatatcaataagacacatgtgacttagcctttcatttagaagtaagccaaatgaggaaaagatcagaaaagtgttgtaattaaggttatgaagggcatcagtgatagagtcaggaatggaacttagatattctgatttagagttagggctcttccatggccctaagttacatctacccaacaactgtgaaagtaacatagggaaggcattatttttccctcttacagataggaaatacaggctgaattggttcaatcactcccttaggttttattattagtggtaaagcaaaaattctcacccaggattttgattccaaatacagtatcctttccattatgtaatgaatcagcatat

SEQ ID NO: 78471 - DNA, 640 bp, Homo sapiens
agacattgaagtggtaaaatgtgtgtagcaagggatgagagcctaggatgtatttggcttaagtatgaatgatcagaatgaagtagaaaatgaagaattgttaagaagcatagggtagcaattttggttgcttccagtgtaccagtcaatgtggtaaattctgcacataaacgtcttttttttttttttttttttttttggtgagayggagtctagctctgttgcccaactggaatgcagtgacgtgatcttggctcactgcaacctctgcctcccggtttcaagcgattctcctgcctcagcctcctgagtagatgggattacaggagcccaccacaatgcccaactaaattttttgtattttcagtagagacaggggttctttatgttggccaggctggtctcgaactcctgacctcgtgaaccacccaccttggcctaaacatcttatataatcctcaaaatcatcctatgaggacttatgttacatacaatgacatggaactataggttcagtacacattagcacattttattatttatttatttatttatttatttatttatttatttattttgagatggagtcttgctctgtcccccaggctggagtgtaatggcgtgatctcggctcactgca

SEQ ID NO: 78472 - DNA, 806 bp, Homo sapiens
tgtatttttaggtggaagtacaaaaaaatgaagtgtattgaggtattttggaaaatgctatgaatagcttccttgcatcgggaggaagagggccctttgttcctctgatgataatagattatcttttgaggtgtagtttgtgtccttacatctctgggtggtctgctagtatgtgctactgagagatgtagttgccaaactcagcattctttgctaaaacatatcccctcaattcttgttggccttgcagatactggtgaatcagtggcttaatttttatatttgtttccagatagcattgccctctgtttccctgggcagacttaatgcaagcccattgtctctcagttcaacatcagtgccacatgggaagatgcattaaccttgtaaacacaaacttacctccccttttatgccaggccrtgctgttccatcatcttgaactattctggggctgcttcattttagggtatagctgcctgctgtggaggtttcctcccagagttctagatggggagccagtcaagaactcccttgacatttctgctatctagcaatgcccttttctgcctaggctctgaatcactttggtgaggagattaggactcacatctaattgacttctttcttttttctctccacaaaatagcagactgaaagagtaagttttctttttcttgatgtgtgactcttcttactctagtgctccagaacttctggactagctttcatgatggaaaaagtgttctcttcatactaccaagaaacatgatgagctgagattccagccatagttctttaggatc

SEQ ID NO: 78473 - DNA, 1112 bp, Homo sapiens
aataaatagaaacatcctaacaaaggagaaagcaagtacatggcaaggaacctcttctayagcatgggctttcagaattaacagaaaactgatggtagctctctgatactgagaaaaacagtcattaaatccactcatgctgttaagtccaaaccatttttagaggaatttgaactggattaatgcccaggtaaaaatagtatttacttcgatttctcctgttttagacaagatgccttgatttcaataaaatttgaagatataaaagaaatcaggttaaatcaagtcattatcaagagaccaaacaatcaacagaaccagagtcagaggttactcaggtgttggaatcataacacagggattttaaaattgcgatgattgatttgttaaagaatccagttgaaaaagaggctaacacgtataaacagaggagaaattttggccaaaaactggaaattacacaaatacacaacgagaaaaaaaaaacagcaaaattaaaataaaatgatggagcagagcatctgcataatggaactcatttgtcagtggtcagacatctgtccactctacgtgagctctggaaattttttagctatgactcactggttcttttctatctaggtgtttagagtttcattttatatatggtaccatgacaccgagcaacacacccctgcatagatccttggagttcttctgttttgtacatttccctccttttcaaaattctgtcctgtaacttccaaaactctcagtctccttgatcttggttctctatctgcttaactcggtaagccaacagggccttgttttggtttccttcatggtcaggaaaataggactttgttcctcttttcctgaggtgtaccatcctgcaatctagtctctacaaacaatttttttacgtattttatctggttttctgtttgtttatggtgggaggttaagtccagtttttgttattccaagatttctagaaatagaagaccatattgtattatcttatctgaagttatgtcattcaattcttaaatttccaattggatcaaaaattatactggagataaaaagtgatagaaaaaagtcaggagtcctgagatacagtcacgact

SEQ ID NO: 78474 - DNA, 1112 bp, Homo sapiens
aataaatagaaacatcctaacaaaggagaaagcaagtacatggcaaggaacctcttctatagcatgggctttcagaattaacagaaaactgatggtagctctctgatactgagaaaaacagtcattaaatccactcatgctgttaagtccaaaccatttttagaggaatttgaactggattaatgcccaggtaaaaatagtatttacttcgatttctcctgttttagacaagatgccttgatttcaataaaatttgaagatataaaagaaatcaggtwaaatcaagtcattatcaagagaccaaacaatcaacagaaccagagtcagaggttactcaggtgttggaatcataacacagggattttaaaattgcgatgattgatttgttaaagaatccagttgaaaaagaggctaacacgtataaacagaggagaaattttggccaaaaactggaaattacacaaatacacaacgagaaaaaaaaaacagcaaaattaaaataaaatgatggagcagagcatctgcataatggaactcatttgtcagtggtcagacatctgtccactctacgtgagctctggaaattttttagctatgactcactggttcttttctatctaggtgtttagagtttcattttatatatggtaccatgacaccgagcaacacacccctgcatagatccttggagttcttctgttttgtacatttccctccttttcaaaattctgtcctgtaacttccaaaactctcagtctccttgatcttggttctctatctgcttaactcggtaagccaacagggccttgttttggtttccttcatggtcaggaaaataggactttgttcctcttttcctgaggtgtaccatcctgcaatctagtctctacaaacaatttttttacgtattttatctggttttctgtttgtttatggtgggaggttaagtccagtttttgttattccaagatttctagaaatagaagaccatattgtattatcttatctgaagttatgtcattcaattcttaaatttccaattggatcaaaaattatactggagataaaaagtgatagaaaaaagtcaggagtcctgagatacagtcacgact

SEQ ID NO: 78475 - DNA, 1112 bp, Homo sapiens
aataaatagaaacatcctaacaaaggagaaagcaagtacatggcaaggaacctcttctatagcatgggctttcagaattaacagaaaactgatggtagctctctgatactgagaaaaacagtcattaaatccactcatgctgttaagtccaaaccatttttagaggaatttgaactggattaatgcccaggtaaaaatagtatttacttcgatttctcctgttttagacaagatgccttgatttcaataaaatttgaagatataaaagaaatcaggttaaatcaagtcattatcaagagaccaaacaatcaacagaaccagagtcagaggttactcaggtgttggaatcataacacagggattttaaaattgcgatgattgatttgttaaagaatccagttgaaaaagaggctaacacgtataaacagaggagaaattttggccaaaaaytggaaattacacaaatacacaacgagaaaaaaaaaacagcaaaattaaaataaaatgatggagcagagcatctgcataatggaactcatttgtcagtggtcagacatctgtccactctacgtgagctctggaaattttttagctatgactcactggttcttttctatctaggtgtttagagtttcattttatatatggtaccatgacaccgagcaacacacccctgcatagatccttggagttcttctgttttgtacatttccctccttttcaaaattctgtcctgtaacttccaaaactctcagtctccttgatcttggttctctatctgcttaactcggtaagccaacagggccttgttttggtttccttcatggtcaggaaaataggactttgttcctcttttcctgaggtgtaccatcctgcaatctagtctctacaaacaatttttttacgtattttatctggttttctgtttgtttatggtgggaggttaagtccagtttttgttattccaagatttctagaaatagaagaccatattgtattatcttatctgaagttatgtcattcaattcttaaatttccaattggatcaaaaattatactggagataaaaagtgatagaaaaaagtcaggagtcctgagatacagtcacgact

SEQ ID NO: 78476 - DNA, 1112 bp, Homo sapiens
aataaatagaaacatcctaacaaaggagaaagcaagtacatggcaaggaacctcttctatagcatgggctttcagaattaacagaaaactgatggtagctctctgatactgagaaaaacagtcattaaatccactcatgctgttaagtccaaaccatttttagaggaatttgaactggattaatgcccaggtaaaaatagtatttacttcgatttctcctgttttagacaagatgccttgatttcaataaaatttgaagatataaaagaaatcaggttaaatcaagtcattatcaagagaccaaacaatcaacagaaccagagtcagaggttactcaggtgttggaatcataacacagggattttaaaattgcgatgattgatttgttaaagaatccagttgaaaaagaggctaacacgtataaacagaggagaaattttggccaaaaactggaaattacacaaatacacaacgagaaaaaaaaaacagcaaaattaaaataaaatgatggagcagagcatctgcataatggaactcatttgtcagtggtcagacatctgtccactctacgtgagctctggaaattttttagctatgactcactggttcttttctatctaggtgtttagagtttcattttatatatggtaccatgacaccgagcaacacacccctgcatagatccttggagttcttctgttttgtacatttccctccttttcaaaattctgtcctgtaacttccaaaactctcagtctccttgatcytggttctctatctgcttaactcggtaagccaacagggccttgttttggtttccttcatggtcaggaaaataggactttgttcctcttttcctgaggtgtaccatcctgcaatctagtctctacaaacaatttttttacgtattttatctggttttctgtttgtttatggtgggaggttaagtccagtttttgttattccaagatttctagaaatagaagaccatattgtattatcttatctgaagttatgtcattcaattcttaaatttccaattggatcaaaaattatactggagataaaaagtgatagaaaaaagtcaggagtcctgagatacagtcacgact

SEQ ID NO: 78477 - DNA, 1112 bp, Homo sapiens
aataaatagaaacatcctaacaaaggagaaagcaagtacatggcaaggaacctcttctatagcatgggctttcagaattaacagaaaactgatggtagctctctgatactgagaaaaacagtcattaaatccactcatgctgttaagtccaaaccatttttagaggaatttgaactggattaatgcccaggtaaaaatagtatttacttcgatttctcctgttttagacaagatgccttgatttcaataaaatttgaagatataaaagaaatcaggttaaatcaagtcattatcaagagaccaaacaatcaacagaaccagagtcagaggttactcaggtgttggaatcataacacagggattttaaaattgcgatgattgatttgttaaagaatccagttgaaaaagaggctaacacgtataaacagaggagaaattttggccaaaaactggaaattacacaaatacacaacgagaaaaaaaaaacagcaaaattaaaataaaatgatggagcagagcatctgcataatggaactcatttgtcagtggtcagacatctgtccactctacgtgagctctggaaattttttagctatgactcactggttcttttctatctaggtgtttagagtttcattttatatatggtaccatgacaccgagcaacacacccctgcatagatccttggagttcttctgttttgtacatttccctccttttcaaaattctgtcctgtaacttccaaaactctcagtctccttgatcttggttctctatctgcttaactcggtaagccaacagggccttgttttggtttccttcatggtcaggaaaataggactttgttcctcttttcctgaggtgtaccatcctgcaatctagtctctacaaacaatttttttacgtattttatctggttttctgtttgtttatggtgggaggttaagtccagtttttgttattccaagatttctagaaatagaagaccatattgtattatcttatctgaagttatgtcattcaattcttaaatttcyaattggatcaaaaattatactggagataaaaagtgatagaaaaaagtcaggagtcctgagatacagtcacgact

SEQ ID NO: 78478 - DNA, 655 bp, Homo sapiens
atagagtttaccttcattttacagataagaaaaccaacgctaacatctttgaagtaacttagataagtcatacaacttaggagtggcaaagctatcaattaaacccaagtctttgtattatagagcctcctttgagcatctttaagtgatttgagatagattaggcagaagtgtccaaaattttgccttctctgggccatattggtaaaagaattgtcttgggccacacataaaatacactaacaatagttgatgagattttaagtaatacaaaaaaatcttataatgtttgaagaaagtttacaaatttgtgttgggccacattcaaagccaccctgggccgtgggttgaacaagcttggattagagcctcatttgagcatctaagagattaaaataatgatgagagatggtacaaatccaccacttttcacccacctacacaatacataatgtagtcaaggattttacaaccctcacgagaatattcacacaactttaatactcttcagtgtacaaargtctatttagagccatttcaccatacaaatatggagaaggataatttgtgtcctcataactggaaagattatccagccgcacttcagagtttgcttgatcctcattatttaaactgtccacaaagcttctgctgc

SEQ ID NO: 78479 - DNA, 880 bp, Homo sapiens
gggatccaaattggcctgattcccaaatatataaaacgtatacatacaggtaataggctgagggtccaggcaaaaggacgaagagtgcattatctgtgatgctgaaatgcagagytccagctcagcccaggattccaggaatggttaagagtatgatcggttctagatttttgtgcagagcccagcttgccaatggagttaaagtggcttaactgtggatattggaaaaccttcaggaaaggaagccagaccactgaatttaaagctagtcagaccccacttttcctttccatcctttcttcttccttctctttcttttcaaatcttattcctttgcttatggtctaggattcaaactaagtggccaagaatatattaagaaaaagtgttgtgtatcctggccatccatccagagacatcctcctcacaaattatcttggtgccacaaacccaccataaaatattcattgcctttgatcccaaagtatttttactctgcacactgtcttctattaaaatgaaaatgtcccttaggggagagaaaatctttcaagctattattagttaaaatcttggtgggtagttgttttatgaaaattgaggttaaaattcttcaagaactgaaggacacagaatgtggttcaggaaaaacaaagaaacccacaggggaaagagtgacatagatggggtcattggaggctgtcacatctatttcccccagttttaaggtttgttgctgcttctgttcacatatccttctctttttttctcttcactccattccactactctccttcatacaacctatgctctttctagagcataaaaaaatgagggtgctgaataagactgagaagacaaaatgggagaaatcaaattt

SEQ ID NO: 78480 - DNA, 880 bp, Homo sapiens
gggatccaaattggcctgattcccaaatatataaaacgtatacatacaggtaataggctgagggtccaggcaaaaggacgaagagtgcattatctgtgatgctgaaatgcagagttccagctcagcccaggattccaggaatggttaagagtatgatcggttctagatttttgtgcagagcccagcttgccaatggagttaaagtggcttaactgtggatattggaaaaccttcaggaaaggaagccagaccactgaatttaaagctagtcagaccccacttttcctttccatcctttcttcttccttctctttcttttcaaatcttattcctttgcttatggtctaggattcaaactaagtggccaagaatatattaagaaaaagtgttgtgtatcctggccatccatccagagacatcctcctcacaaattatcttggtgccacaaacccaccataaaatattcattgcctttgatcccaaagtatttttactctgcacactgtcttctattaaaatgaaaatgtcccttaggggagagaaaatctttyaagctattattagttaaaatcttggtgggtagttgttttatgaaaattgaggttaaaattcttcaagaactgaaggacacagaatgtggttcaggaaaaacaaagaaacccacaggggaaagagtgacatagatggggtcattggaggctgtcacatctatttcccccagttttaaggtttgttgctgcttctgttcacatatccttctctttttttctcttcactccattccactactctccttcatacaacctatgctctttctagagcataaaaaaatgagggtgctgaataagactgagaagacaaaatgggagaaatcaaattt

SEQ ID NO: 78481 - DNA, 1351 bp, Homo sapiens
gggtagttaaaaggatattgacacacttagcactgtgcctggggggtactatgtggtcatgatggggcagctaataataatgaaatgttagtacaaaaacaataacaccaagactgcattcaactccatgttggactttactttagatgttgggtattcactcttcctgactaccattagactcactctgtgttctttagattacgatagacagccagggccacagtaaactagagcaaaggaaaacactattcagatatgaggaggactgcattaggaagcacatctgataaaactgtataacatggtgactatagttaaaatactgtattatgtattattgcatactagaaacttgctaaaggattagctcttaaagcattcttatcaaaataaaaataaagagtaacatgcggtggtagatgtgttaattcacttgactgtggtaatcatttcacaatgtatatgtatatcaaaacatcacattctacactttaaatatatacaattttatttgtaaattttgcttaagaaaaaaaaagccaggtgcagtagctcacatccataatcctagcattttgggaggctgaggcaggtggattgattgagcccaggagtttaagaccagcctgagcaacactgtgaaacctcatctttattttaacaaaatgcaaaaattatctgtgcatagtggtgcatgcctgtagtcccagctactcgggatgctgaggtgggaggatcctgagcctaggaggtctacagtgagctgtgrtaacaccactgaactccaacctgggtgacagagcaaaactctccctcaaaaaataatataaaataaaccccttcatctgtaaaatgggactacagaaacccacctgtgtaaagtagattgtataccctccaaaagagaattgcctaagtctgctcctcagagagtgagacgagaagaacttgtaaataaattttattatagcaggtgctgttcacaaatagatgaaaattaactatcacgtggaaatagctattacctcatttaattaatcagaaatctgcctctaaactatttagattattcctaaatactaagaaataatttgtaaaataaaattcaaaaacagctataagcagcttgataaatgtttagattccataaaatgaaactcacacattcatctcacaatgacacaggcttttgatcaaccttgatagcagtactttccaggttttaagttccttttcctccttctcatagttactcaggggtgagcccctactgctaaagatggtttgctccagctgccatagaacatagcctgcttcttttgaatgtatacagtaggaaaatggtaat

SEQ ID NO: 78482 - DNA, 683 bp, Homo sapiens
ctgccctgctgcctgcccgtgtgtctgccaggtgtcagacctatctgccctaggtattgtcagtctgcttggggctcgctgactctcccgctgtctctctttgctgcctacctctgtctgtggttgggttccaatctctgtctccacttgataagtgcctgacttcaccttttgggtacatgtcacwtgttaggtgcctgttgttcatgtccccttctgtctctgcctgttgggtttatgtcttcatctgtctctgcctgttggatacctgtccccttctgtctttgcctgttgggtttgtgtcaccatctgtctctgccttttggatacatgtccccttctgtcattgcctgttggttttttttttgaaacggagtctcactttgtcgcccaggctggagtgcggtggtgcgatcttggctcactgcagcctccccctcccaggttcaagccattctcctgcctcagcttcccaagtatctgggattacaggtgcccaccaccacgcccagctaattttttgtatttttagtagagacggggtttcaccgtgttagccaggatggtctcgatctcctaacctcgtgatccacctgcctcggcctcccaaagtgctgggattacaggcgtgagccaccacgcccagcctgcctgttgggtttatgtccccttctgtcattgcc

SEQ ID NO: 78483 - DNA, 1300 bp, Homo sapiens
  misc_feature (1)...(1300): n = A,T,C or G
gnnnnnnnnnnnnnnnnnnnnnnnnnnnnnnnnnnnnnnnnnnnnnnnnnnnnnnnnnnnnnnnnnnnnnnnnnnnnnnnnnnnnnnnnnnnnnnnnnnnntttttactttttttgtagaggtgaggtttcaccatgttgcccaggctggtcttgaactcctgggctcaagcaatccacctgtctcagcctcccaaagtgctgggagtacaggcgtgacatggcaactggcctcactaatgtttttaaattctctacagacaaagcatgccttatttcttgcacatggcagactcactaccacccttacctgattcacctctgcctcaggctaccagtttcccatctttggccaagacaaaggccccttccaaagctgacaacattccactatttttttttttttttgagatggagtctcgccctgtcacctaggctggagtgcaatggcgcaatctcagctcactgcaacctctacctcctgggttcaagccattttcctgccccagcctcccgagtagctgggattgcaggcgcgtgccaccacgccccgcaaattttttgtatctttagtagagacagggtttcaccatgttggccaggctggtctcgaactcctgaccttgtgatccgcccacctcggcctcccaaagtgctgggattacaggcgtgagccactgcgcccagcccttcttcttctttttttttttgagatggagtgttgctctgtcactcaggctggagtgcagtggcgtgaatttttgtctcccggtttcaagcgattctcctgcctcagcctcctgagtagctgggattataggcatgcaccatgacgcccagctaatttttggtgggagttttagtggagacagggtttcaccatgttggccaggctggtctcaaactcctgacctcaagtgatccatctgcctcggtcttccaaagtgctgggattacaggcatgagccactgcgcctggccaactttcttttattaattctttcttttttwaaaaagagacaaagactgcctctaaatccactctttctaattttggctccacaagctatttccagccaatgaccctgggtaagtcagttcatctttttaagtctgttttctcatctggaaatggaagtaacaatccctacccataccttacccctgtgagggttccatgaagcagtgggggagaagagtgtttagaaagaggagggcaccacccaggtggcaggtgtacacagatggcaggccttgacaacaaaggtgattatgttcttctgagctcacaagctgttcct

SEQ ID NO: 78484 - DNA, 1213 bp, Homo sapiens
ttcaaattgtctcctcttctattccttcataataggtttacatggtccgaaagtacatccctccttctctagtacatttcattcaaacagatggctgctacttctctattgtcattaatcttttcatcatcttcttattcttcttagcacagttggggcataacatattatcttctgtgcctggggatgggaaaatgcaggcaggtaacaagaagagagaaatcatcctcctgtgagtggtaggcactcaagcctgacctgcatgaaactgcaggcgtactcaaccctttgtgtctgccgagagaagtctgccatggaccacacaccacctgacaccagcggcttgcatcaaaaaggcctcaagagaaacaggaatggaacttgaattcacagcctcaggctcaacagctcttgcagcaattcttgcccttgatgccaacatggctccctgcgctgaagttatcacttcgactgtattcgtctcttctgctctctcattcatctcataagttttctgaagccttgctctcttggtcactgccttgtgtttccttgaacaccgctgtaatctggtctcttgtgacatttcaggcatatcttgctgttgttcagggtaagcaggcctatggaccctcagataaacttcgattttcttgccattagtactcaaactgagttgttggcaccagtcccgcaaagtgtcccaacacaccttattaatgggaggcaaaatggtcggcaagggaagagctggtattttgcatctagctttttgtggagctgtaaattgttaatttgtttgaagtagatgaccttgattgtatttcataggtttctccagtttgacatcagaagttgaagaaacacttggttctgtttgttccatatttgggtcatctttaactggcagcaatgtcaaaatcacactttcctcatcagctacttccccctcaaagaaattcttcttgctgctatccaaatttgagtctgacattttcagcaacacccctgtcttgtccattcggtgatacattttttttaaaattaggcctggcaygatggctcatgcctgtaatcccagcgctctgggaggctcaggcaggcagatcacttgagtccaggagttcgagatcagcctgggaaacatggtgagaccccagtctctgggactacaggcgtgcaccaccacacctggctaattttgtatttttag

SEQ ID NO: 78485 - DNA, 2053 bp, Homo sapiens
atgtgctgctcatttgcatatcgtttgcatggaattcttagtgctcctccactccccaccccctccctgccgccttctctgggactcagctcacagtggggcttgtctcagccccatcagacaccagagcaggcacaggcagcaccatgaacacagatgggtccccagtgactgtggccctgaagagaggaagggcctcctggggctggaccaccccctggtgggctcaagaagacagagggggccttggactggggacagccagcaagcctggtatgcccctgctgggactgccctgctgagtctattgttagggtgccctttgtttgcctgaccacgggaggcctgcaggacaggatggtctggggacaacctcagaacaggaggtctgggctccttctctgcttccttccttggagtttcttgtgtgagagaggaaagggctgcccaggccgcaccacaggaatcgtgagaccataactggggctgttttaagcctgcaggggtgtggaagttgtggtgcagggacagaacccagaccagcctctgggagagaggatggggagctccctgggccctctcctgtccctacagttcacagcccatgcaccagaactggtcacagggcacaggcacaaccccctgcagggatcaggggccccggggagtgcacaggcccttggggaggaccaaggcctcctctgctgccattgggatggcacaggttctgaagggcaggtgtagcccctgcagggtacaagcagagggtgacatcctctgacacaggctggggagggaccccaggcagttgtgtggggagtgcagggcctggatgcaggcagcagcctggggtgtgtcctgcaagaccacaaggagaggccatgggtgcggaagaggatcccagggtgaatctcaggaaagcagcactgggacacgtctgccgctaaggttattctaaaggcagaagcacagggacttcctgaaaggctgcgtagaagcgagaggcttgggctcggctgcctggaagaagggaggcgccctgttcttggaggccagaggatgagagcgaggcaggctaaggaagaaatcatggcccagcctgggcctggggcaggggcctggctggggaaactcctggctcaggagcagagcacgggaggagaagcacagctggcccctgctctccaggcctctgggaggttgggaagtgcatgaaagcacctctgagtcttgggttctccatctgcacagtgggcaggatgatgacgggcccttcttccctagaaggaactttttaggcacaaatgaggaaataacatggaaagacttggaggcttcgcccacataaggcaggagatcactccaaggtaggatgactgctattttgattggctgtaatcaaatgtaatgtcttgttttcatgatttggattggaggtggaaatattaattcgaatcatctatcctgcagkaaatggacctccctgatggtggcttcccccgttccctgtaactgcctgtgactgatgagccatcagcagggatgggagggatggagcctcggacatcatttactcacttctgcttgttaaataactcaggacctggggccgcttctcagggctggggctgagtctccgtgcccaccgtggtgctgggcatatttgctgtctctggggagacagacgcgaagcagaaaggcagaaggaaaagctgtcagcccaggcgtcctgccaacccatgccggcctgcagccaccgccctctgcccatcccggaaggacgtgttttcctcttaaatacctgagtcaaggggctggggtgcatctttccctccgccctcttgctgagctgcgtggctgcattgaggggatttttctgtctctgccattaaacaaatcctggcaggctaattagctgtgggaggtttcaggtgctttcattttcaaaagaagtcaagcacatattatgcttggaacaagcctagctttctaatgaaaagagactgcaactgaatcatcaaacaaatataaacaaatagatcaataaatgtgc

SEQ ID NO: 78486 - DNA, 2053 bp, Homo sapiens
atgtgctgctcatttgcatatcgtttgcatggaattcttagtgctcctccactccccaccccctccctgccgccttctctgggactcagctcacagtggggcttgtctcagccccatcagacaccagagcaggcacaggcagcaccatgaacacagatgggtccccagtgactgtggccctgaagagaggaagggcctcctggggctggaccaccccctggtgggctcaagaagacagagggggccttggactggggacagccagcaagcctggtatgcccctgctgggactgccctgctgagtctattgttagggtgccctttgtttgcctgaccacgggaggcctgcaggacaggatggtctggggacaacctcagaacaggaggtctgggctccttctctgcttccttccttggagtttcttgtgtgagagaggaaagggctgcccaggccgcaccacaggaatcgtgagaccataactggggctgttttaagcctgcaggggtgtggaagttgtggtgcagggacagaacccagaccagcctctgggagagaggatggggagctccctgggccctctcctgtccctacagttcacagcccatgcaccagaactggtcacagggcacaggcacaaccccctgcagggatcaggggccccggggagtgcacaggcccttggggaggaccaaggcctcctctgctgccattgggatggcacaggttctgaagggcaggtgtagcccctgcagggtacaagcagagggtgacatcctctgacacaggctggggagggaccccaggcagttgtgtggggagtgcagggcctggatgcaggcagcagcctggggtgtgtcctgcaagaccacaaggagaggccatgggtgcggaagaggatcccagggtgaatctcaggaaagcagcactgggacacgtctgccgctaaggttattctaaaggcagaagcacagggacttcctgaaaggctgcgtagaagcgagaggcttgggctcggctgcctggaagaagggaggcgccctgttcttggaggccagaggatgagagcgaggcaggctaaggaagaaatcatggcccagcctgggcctggggcaggggcctggctggggaaactcctggctcaggagcagagcacgggaggagaagcacagctggcccctgctctccaggcctctgggaggttgggaagtgcatgaaagcacctctgagtcttgggttctccatctgcacagtgggcaggatgatgacgggcccttcttccctagaaggaactttttaggcacaaatgaggaaataacatggaaagacttggaggcttcgcccacataaggcaggagatcactccaaggtaggatgactgctattttgattggctgtaatcaaatgtaatgtcttgttttcatgatttggattggaggtggaaatattaattcgaatcatctatcctgcaggaaayggacctccctgatggtggcttcccccgttccctgtaactgcctgtgactgatgagccatcagcagggatgggagggatggagcctcggacatcatttactcacttctgcttgttaaataactcaggacctggggccgcttctcagggctggggctgagtctccgtgcccaccgtggtgctgggcatatttgctgtctctggggagacagacgcgaagcagaaaggcagaaggaaaagctgtcagcccaggcgtcctgccaacccatgccggcctgcagccaccgccctctgcccatcccggaaggacgtgttttcctcttaaatacctgagtcaaggggctggggtgcatctttccctccgccctcttgctgagctgcgtggctgcattgaggggatttttctgtctctgccattaaacaaatcctggcaggctaattagctgtgggaggtttcaggtgctttcattttcaaaagaagtcaagcacatattatgcttggaacaagcctagctttctaatgaaaagagactgcaactgaatcatcaaacaaatataaacaaatagatcaataaatgtgc

SEQ ID NO: 78487 - DNA, 2053 bp, Homo sapiens
atgtgctgctcatttgcatatcgtttgcatggaattcttagtgctcctccactccccaccccctccctgccgccttctctgggactcagctcacagtggggcttgtctcagccccatcagacaccagagcaggcacaggcagcaccatgaacacagatgggtccccagtgactgtggccctgaagagaggaagggcctcctggggctggaccaccccctggtgggctcaagaagacagagggggccttggactggggacagccagcaagcctggtatgcccctgctgggactgccctgctgagtctattgttagggtgccctttgtttgcctgaccacgggaggcctgcaggacaggatggtctggggacaacctcagaacaggaggtctgggctccttctctgcttccttccttggagtttcttgtgtgagagaggaaagggctgcccaggccgcaccacaggaatcgtgagaccataactggggctgttttaagcctgcaggggtgtggaagttgtggtgcagggacagaacccagaccagcctctgggagagaggatggggagctccctgggccctctcctgtccctacagttcacagcccatgcaccagaactggtcacagggcacaggcacaaccccctgcagggatcaggggccccggggagtgcacaggcccttggggaggaccaaggcctcctctgctgccattgggatggcacaggttctgaagggcaggtgtagcccctgcagggtacaagcagagggtgacatcctctgacacaggctggggagggaccccaggcagttgtgtggggagtgcagggcctggatgcaggcagcagcctggggtgtgtcctgcaagaccacaaggagaggccatgggtgcggaagaggatcccagggtgaatctcaggaaagcagcactgggacacgtctgccgctaaggttattctaaaggcagaagcacagggacttcctgaaaggctgcgtagaagcgagaggcttgggctcggctgcctggaagaagggaggcgccctgttcttggaggccagaggatgagagcgaggcaggctaaggaagaaatcatggcccagcctgggcctggggcaggggcctggctggggaaactcctggctcaggagcagagcacgggaggagaagcacagctggcccctgctctccaggcctctgggaggttgggaagtgcatgaaagcacctctgagtcttgggttctccatctgcacagtgggcaggatgatgacgggcccttcttccctagaaggaactttttaggcacaaatgaggaaataacatggaaagacttggaggcttcgcccacataaggcaggagatcactccaaggtaggatgactgctattttgattggctgtaatcaaatgtaatgtcttgttttcatgatttggattggaggtggaaatattaattcgaatcatctatcctgcaggaaatggacctccctgayggtggcttcccccgttccctgtaactgcctgtgactgatgagccatcagcagggatgggagggatggagcctcggacatcatttactcacttctgcttgttaaataactcaggacctggggccgcttctcagggctggggctgagtctccgtgcccaccgtggtgctgggcatatttgctgtctctggggagacagacgcgaagcagaaaggcagaaggaaaagctgtcagcccaggcgtcctgccaacccatgccggcctgcagccaccgccctctgcccatcccggaaggacgtgttttcctcttaaatacctgagtcaaggggctggggtgcatctttccctccgccctcttgctgagctgcgtggctgcattgaggggatttttctgtctctgccattaaacaaatcctggcaggctaattagctgtgggaggtttcaggtgctttcattttcaaaagaagtcaagcacatattatgcttggaacaagcctagctttctaatgaaaagagactgcaactgaatcatcaaacaaatataaacaaatagatcaataaatgtgc

SEQ ID NO: 78488 - DNA, 1192 bp, Homo sapiens
gcatactatataatacataatacagaacaaaaaactaatacataatttcttaaatatgatatgtgcattgatttatctataatctatgtaaacacatcaaatttagtggattttctagagggaatatataagtttaatattataaatgaagaccaaacatgaattttgacccaatagcaatggggtcatggctacagcaatgtcttgaaatttctctaaattctagcatgaataccagactgaccaaaaaaaaaaatagaacaacaaataatttatgaacaaacaacatactccctgaaaccacataggagtttcttgaatgcttgtggaactcctgagggtgagtggcatggccagtgcccttcacggctttaaatccatgctggactagctattgtccaagggtaggtgacaagaaaaagggaaacagtgaagaagcagagaggttatggaattcaagagtaacaaataaaaacttgctctcaaaaggatgtagaacaacagtgtgtgaactaagtacaatactataagaaaatgtgcaggctccagaactttgtaagagaagactaaaggaaacacagtaggacaatgagaagatcaaaccatctgagcctaaattccaaggcatcagtgaaagtagcataatacagtttgtcataaagacaaagacctaccatagaggaaaacatttgacaatacaattcaagctgagaagatggtaacactgggaatcctatgaaagattgtcgaagtgctaggagtaaataaatccagaataagcaggtctcagaaaacaatatcaaaaaaatatatataacattgaaagtgagtcatcactttggaagacaaggcctgtagcatgcaggacaatacagagttagaaaggttgagtcttcytgcatcagacttatgtcattcacacacacacacacacacacacacacacacacacacactattggctcacatagttattgaggctgacaacccaaagatttgctgtcagcaagctggagacctaagaaagctaatggtgtagtcccagtacaagtctgaaaagaatgcacatgccatatcaatgtccacaccaggaacctggagttgttatctgctctaacaaagtctgaaggttaggaatcaggaaagtcaatggtgtaatttccagtgtaggccaggcacagtggcccatgca

SEQ ID NO: 78489 - DNA, 933 bp, Homo sapiens
tgcccaattctgtctttggaagactgtccttggactactggagctactttaccagcacatgtacagatcctgtagcttctgttaggatatgaattctaaccctcaaaggtgaccttgaggcatgagggagtataataagagcctggaactgactcttaggtatcttacactctagagatcaccctgcaggctcagactcaggctgacactgcacgaaattaccactgaacttgacttgtctccctttcctatcctgcttcctctgtcacctaccagcttttcctggaacacattgttcataaatcgctttacatgtgttgkcatctcatggtctgctcctggagaatgcaatataagtcagctttccattagcagaccagaaattataagaatgaggatagaaaaatgatagaaaaatattaagggaaaaataatagaagttacttatacaagaaaacataaataaatttaaacatatttttaaaaatcttccaagtttggaatactaaattcccaattacagagctgtatgtgaatgaagtattttgagtcaatagttggagtaattatcaaaagtactatttgaataaataaatgcagaaaaactgaacttgctaggtcatattactcctcctacaaatactgaactactaatgtcacttggtttagcaactagaaacttacggaatataggcctatatcaacaacaccgggcaatactgtgtttaacatatcaagcatccaatgtgcaagaaatactgagagtacaacacttcacggaagttatacccaactcatcaaataattgtagtcaaaactatcattcaattagaagtgtaaaacaagaacagttttagacaagctaaatcttagaaagttattctcaaaagcttagaaatagaagaaacttccacaaaaaacctacagccaata

SEQ ID NO: 78490 - DNA, 1329 bp, Homo sapiens
tctacagggtaggaaactgataacggacaagaccttgacacttaaaatcacatggtctgtgcaaaggggcaagctggggtcaccagcagctggtatgcagagctgagtcaaggctgacttgaacaactgtaagcagctcttaaaaaaagatccctgactgttttctaagttggtggcaacttatccgactatacctgttaattatccgctcaagaaccatcaacagggacagtcagcaatcaaacaaactcttagaaagacagaactgttagcccagtctttaaatcattgttttgtttcatgagataagaggtagaaatgtggcttaagaaactaagatccaaatcctagcctactccatgactattcccagctatgtgaaaaacaacaacaaaaactcacatccttcctgtccttagctaccattagtggaagcaatattgactttgctgaagacataaagaataagtcacttaactttgtaaaggcacttccataaaaagttaaacccaaagtagcaaaaaggaaaacaaaatccctgaaagaaatccctggaagagtttaatttttatatggctgatatagtttggatgtttgtcccctccaaatctcayactgaaatgtgattctccactgttaaaggtgagtcctagcgagaggtgactgggtcatgggagaggatcgctcatgaatggctttgtgccctcctcatgggaatgagtgagttatcactctattagttcccacgagatgtgattgttaaaaagaggctggcacttcctcctctttctcttgcttcctctctcaccatgtgacatccctgctcccctcttcaccttctgccgtgagtaaaaccttcatggcagaaggtgatgaggcctcctcagaagctgagcagatgtgggtgccttgcttgtgtggtctacagaaccatgagccaaataaacctcttttctttgtaaaatacccagtcccaggtatttctttataacagtgcaaaactaacacaggggtcttttcaaaaagtctaatgattctggaacacataatctttaatgctggcgacgaggaaataccatggggtgtcccactgtattaggggcctgaagtatgtagttaaaggcatggcgagagtgagagtcactaaagctaaaagcttccattctgaacagtatggatggtgctagggagatgagaaaaaattccattttcaggtcacacctgaaaggaaatcacctttctaccaatagaactgaatgagtgcaaagagctgaagtcatgcaaaaaacgccataatgatcagcagaatcctaggcttcaactttcacc

SEQ ID NO: 78491 - DNA, 1329 bp, Homo sapiens
tctacagggtaggaaactgataacggacaagaccttgacacttaaaatcacatggtctgtgcaaaggggcaagctggggtcaccagcagctggtatgcagagctgagtcaaggctgacttgaacaactgtaagcagctcttaaaaaaagatccctgactgttttctaagttggtggcaacttatccgactatacctgttaattatccgctcaagaaccatcaacagggacagtcagcaatcaaacaaactcttagaaagacagaactgttagcccagtctttaaatcattgttttgtttcatgagataagaggtagaaatgtggcttaagaaactaagatccaaatcctagcctactccatgactattcccagctatgtgaaaaacaacaacaaaaactcacatccttcctgtccttagctaccattagtggaagcaatattgactttgctgaagacataaagaataagtcacttaactttgtaaaggcacttccataaaaagttaaacccaaagtagcaaaaaggaaaacaaaatccctgaaagaaatccctggaagagtttaatttttatatggctgatatagtttggatgtttgtcccctccaaatctcacactgaaatgtgattctccactgttaaaggtgagtcctagcgagaggtgactgggtcatgggagaggatcgctcatgaatggctttgtgccctcctcatgggaatgagtgagttatcactctattagttcccacgagatgtgattgttaaaaagaggctggcacttcctcctctttctcttgcttcctctctcaccatgtgacatccctgctcccctcttcaccttctgccgtgagtaaaaccttcatggcagaaggtgatgaggcctcctcagaagctgagcagatgtgggtgccttgcttgtgtggyctacagaaccatgagccaaataaacctcttttctttgtaaaatacccagtcccaggtatttctttataacagtgcaaaactaacacaggggtcttttcaaaaagtctaatgattctggaacacataatctttaatgctggcgacgaggaaataccatggggtgtcccactgtattaggggcctgaagtatgtagttaaaggcatggcgagagtgagagtcactaaagctaaaagcttccattctgaacagtatggatggtgctagggagatgagaaaaaattccattttcaggtcacacctgaaaggaaatcacctttctaccaatagaactgaatgagtgcaaagagctgaagtcatgcaaaaaacgccataatgatcagcagaatcctaggcttcaactttcacc

SEQ ID NO: 78492 - DNA, 1556 bp, Homo sapiens
caaccgagtattaattttaccctttggcatttcgtggatattagcctgttgttaatatgagtaataaaattgttacagagttttgaagtactttattccagtcaagaaacctggtctctcttgggaaaagatacagtgggatagaaatagttaacctactagtgaaattttaagtgacaccagtgttaattacaaataaagttgaatagatgaatccaggatgtttattatagcatccttcctttgtgttctattttcccacctttctgggagaaaaaaaaatgtatgttattagctggaagagtcccatcactggtggtagatggaaaacagtgagtccttggtgcaatgtatactgatgaaagaaaattaatcagctaatacattctattaagcatttagcaatatggtagaattagtaactgtaatgacaaacttgattgatcttcagacaaaaataaaatggagtggagagcaattacttaatgattaaaagtcaataagaaagcctgacaagcaccttggaagtttgtaaagagacaattatcatgtgcaatgagagggaagagtaagcttaggaygaggaccagggcttaattgtcagagtagctgagtgccaatgagtttgaacttccaagtaaagctatgccaaggtttaagcactgcttgggacataatgggatcctaacaaaggtgatgggagatctgggttgatactctcaaaaattatgaaaggcacgactcccccaaaccctctgaatttgcacaagtggcctctctgctagaagctagcactccctcttttcttgaaaatgaagcaaaggcttcttctttgccaggcaacatatacctgtcttagaatgctccttcctctccttctaactgctagacccataactagagttaagttacaacatgacacagtcagggacaggcagagactgataatggagaaagagactgcgcctccaaagagttagagaacctagccagtatatactggcaagagctgggagactacccacgagactggtttctgagggtgtttgatcagaatggctggaaaataaagttgtataagcaagaacttatcaatttgggactctcagaacacagaatttaacactctggaaatactactctactagaatggtttctagaagcatggaacaagcaatgggctacttgagcagtaagggaacttttgctaccagggacaaataataaatattttaggatttgcaggccacatggtctcgattgcaactcatcaattctgccattgtagtggaaaagctctcataaataatacatatataaatgagagtggctgtgtgtgtttcaataaaacttgatttacaaaagggaacaggctggattcaagatatgaggcattatctgctgctcatgctgagacagaaatgccagaatatccatgacactctgaaagagtcagagaaaggctcatgatagagcgaacaaacaacataagctcagaagacccagtaaaggactaggttccatgggaaggcccgtagaacacactattcacccaa

SEQ ID NO: 78493 - DNA, 832 bp, Homo sapiens
tggatcctgagcacataggggtttttgcaggattccaccaaaaggggactttattaccacattcctctgttgggctagttatgcagtcctattaattccggagaacctttttttctgtttaatagcagtagatgagaaaaagctttggtacatacagtacttttcatctaagaagtataatgaatgagtaagaatgggactgccagcaaccctgcaggagatgtaagaaacagaacacatttcatccattagaattcctaatagtagcatattacgggggtggtggagaaagaagcactgtaataaattactccatctcagagatgcccaaggaacagcagatgggggctaaaraaccccataagaacagtaggacctgttaagtgagcataatgagatgggtttgggaatataaatctggagagaggagctgaggtggagaacaaactcggagagaagaaagaattgtgtcatgttgaggagccacatgatgagagaaaataagcaggaaaaagcaagagagtgttctttagaagcaacacagccaaggagctctttagtgactacatatggctacagatttgtaaggtgcttactgttggtagggtgttcagtacaatcttccttttctcccccttcttaggaaataatcaagtcagtattgcttattagagctttaggataagcaaatatttgtaggaattcaaagagattctgagttccaagtgcaggttggcaaagggggaaaataaagaccccatgcacacaggaggcagaggatggtggtcatagacagtgaggtcactttcagataggagctgctgttgcttta

SEQ ID NO: 78494 - DNA, 557 bp, Homo sapiens
tttttgaactattatgctgccaaattaggtattagctacaggctaggcattaccttttttacatttcatccccttcatctagaattatttcccatctgtttgaataacattcattagaatttactagagaagttctgggttgaaaaaaatagtttttaatatcctgttttcttgagaatgtctctaggtatagagtccaagttttctcttttccctactttmaataaatcaactgtcttctgtcttccgtgctactctgatggttcagtcacgattctaattatctttattttgtagattatctttcatttctttctgactactttcacaatgtatctttctgcaacatttatgatgtgttaatgtgtgattttatttttatttttactgccttggacttctaagtcttggcttactagtaattataaaaagttaccagcactatctatctctcccttaggctctcacatccttttggaactctggttagaattctgttactttttattctattctccatatttcttgccttctcttttatatttatatatcaatcc

SEQ ID NO: 78495 - DNA, 557 bp, Homo sapiens
tttttgaactattatgctgccaaattaggtattagctacaggctaggcattaccttttttacatttcatccccttcatctagaattatttcccatctgtttgaataacattcattagaatttactagagaagttctgggttgaaaaaaatagtttttaatatcctgttttcttgagaatgtctctaggtatagagtccaagttttctcttttccctactttcaataaatcaactgtcttctgtcttccgtgctactctgatggttcagtcacgattctaattatctttattttgtagattatctttcatttctttctgactactttcacaatgtatctttctgcaacatttatgatgtgttaatgtgtgattttatttttatttttactgccttggacttctaagtcttggcttactagtaattataaaaagttacmagcactatctatctctcccttaggctctcacatccttttggaactctggttagaattctgttactttttattctattctccatatttcttgccttctcttttatatttatatatcaatcc

SEQ ID NO: 78496 - DNA, 557 bp, Homo sapiens
tttttgaactattatgctgccaaattaggtattagctacaggctaggcattaccttttttacatttcatccccttcatctagaattatttcccatctgtttgaataacattcattagaatttactagagaagttctgggttgaaaaaaatagtttttaatatcctgttttcttgagaatgtctctaggtatagagtccaagttttctcttttccctactttcaataaatcaactgtcttctgtcttccgtgctactctgatggttcagtcacgattctaattatctttattttgtagattatctttcatttctttctgactactttcacaatgtatctttctgcaacatttatgatgtgttaatgtgtgattttatttttatttttactgccttggacttctaagtcttggcttactagtaattataaaaagttaccagcactatctatctctcccttaggctctcacatccttttggaactctggttagaattctgtyactttttattctattctccatatttcttgccttctcttttatatttatatatcaatcc

SEQ ID NO: 78497 - DNA, 1141 bp, Homo sapiens
gtactttgtctggaaatgggcatttgttgggattgttgacttgtaggaaataaaattggacttttataagccaccctttatttataaagaaagatgctttggctatagagattcatttagtttatattttggaatcttttgggaacacctgccttggtaacttgattaccaaactttaaactatctttaacttaatttactgatttccagaactctctttttttaactgacccaaaactgatgtttaaaatagttattggatattcttttcagaaaagatgaaatgcaacttttctccacttgtcattccttttcaaatctattgcgactgtttttgaaatgtttctctatttgaagatgagaaatcatagttttcctcaaccttcagaagttcatacttgggacatattcctgcaagaaaagacagattaacaagagaaaaacaagcaagtttgttaatgtgtrcagtgcacatcccgtgggagaaaaataactagatgcagtgccttagagtcccagcttatatggtcttcaacaaagagcaataaattttagagaagcgtcaggacacatgaaagcagtttaaggcttccaaaggcaggaaggtgtgggaaggtaaatttatggggaaactaatgaagtctgcttagatgcctctggtgtagtctctaagctgataaaggttgtaaaggagaatttacctactgttttgaggcaggaaagagggaaagatagactttttgtatttatattaataatactctgctcttaggcaaacagaggaaagacaaagcacttttccatatttgcttcaaatggcctttagccccaaaaaattatgtcaaagaggaatgttttgaggtgacacattctgtttccttcagtactctcgttggtgagtctccagattcaccttcatataaacttcccttgaacactatagacattttataattctttatttctgcatttgctttgagataaggtctttagttatttgtatgatttttttctgtggataacatgggtaagatttttaagctgtttttttggcttaagtaaataaaaagtcaaaataaaagtcaacaacccgctgccttttatgtcaacattaagaactagagttcttacattgcttttg

SEQ ID NO: 78498 - DNA, 730 bp, Homo sapiens
tgatgtctggctggggtataggttattcatttcgatgtgacattgttgactattcacggtcacccacagctttgagggtaagtttctctttggaaaaacttgaaattcaaaatcaatgttaaaattttgtgaactgtttgtaacactgaatgtaaacttagaataagcagatgactcagttatcagattgtgtgtgttgtggtggagaaagtgaamaattacaagaataaaaaaaatcacatgtataattttctataaaatgaaaattggtgcttttcttttttaatttcttggatttaaaaataaattcacatgtggttcctcaaaaaattgaaaatagaattaccataagatccagcaattctgcttctgggtatatacctaaaagaattgaaaacagagacttgaagagatatttgtatactcatgtttacagcagcattatttataacagccaaaaggtagaagcaacccaagagtccatggatagataaatggataaacaaggccaggtgcagtggcttacgcttgtaatcctagcgctttgggaggctgaggcgggtggattgcctgggctcaggagtttgagaccagcccgggcaacacggtgaaaccccatctctactaaaatacaaaacttagcagggcatggcagcatgggcctgtagtcccagctactcgggagggtgaggcaggaaaatcgcttgaacccaggaggtggaggttgcag

SEQ ID NO: 78499 - DNA, 730 bp, Homo sapiens
tgatgtctggctggggtataggttattcatttcgatgtgacattgttgactattcacggtcacccacagctttgagggtaagtttctctttggaaaaacttgaaattcaaaatcaatgttaaaattttgtgaactgtttgtaacactgaatgtaaacttagaataagcagatgactcagttatcagattgtgtgtgttgtggtggagaaagtgaaaaattacaagaataaaaaaaatcacatgtataattttctataaaatgaaaattggtgcttttcttttttaatttcttggatttaaaaataaattcacatgtggttcctcaaaaaattgaaaatagaattaccataagatccagcaattctgcttctgggtatatacctaaaagaattgaaaacagagacttgaagagatrtttgtatactcatgtttacagcagcattatttataacagccaaaaggtagaagcaacccaagagtccatggatagataaatggataaacaaggccaggtgcagtggcttacgcttgtaatcctagcgctttgggaggctgaggcgggtggattgcctgggctcaggagtttgagaccagcccgggcaacacggtgaaaccccatctctactaaaatacaaaacttagcagggcatggcagcatgggcctgtagtcccagctactcgggagggtgaggcaggaaaatcgcttgaacccaggaggtggaggttgcag

SEQ ID NO: 78500 - DNA, 678 bp, Homo sapiens
tcagtgaaaccaataaactgctgtagtttcagttgtctgataactttggttatttctcctattcaggcagacctactgttatcttttttaccttttattatcagtaactttagagaatagataggataaccttattttttcagtattttgcaactctataaagtttctgttayatagctatcagttgattatgataagcatggtgactgtgtcatatactccaaaactgcatctttatatagatggatgacagttgttttatgaatcaagttcaggaagtaaaaagcagaaaacatcttacctttgtttgtttgtttttttatcccaaagcacagtcatccatattcctttaggaggatgaataaactttcacgagaatgttgcattacccctgggctgtcagtaattcagctgcttttctgaagtctgtgcttactgggccctatctcttcctacttcagatcctagtgaggatcgcctctgaacttggatgaccgggtcttgggagaagcacgtgtcacaaattagggtctgtgatttagaggagaaagccatgaacctttgtttccagaggagcttaggaaagctgaatatttgttgtatctttgcagcaagtgtatcttagttatttggagctagttttggctcagactgaaaagtgtgttttctttggaatgc

SEQ ID NO: 78501 - DNA, 678 bp, Homo sapiens
tcagtgaaaccaataaactgctgtagtttcagttgtctgataactttggttatttctcctattcaggcagacctactgttatcttttttaccttttattatcagtaactttagagaatagataggataaccttattttttcagtattttgcaactctataaagtttctgttatatagctatcagttgattatgataagcatggtgactgtgtcatatactccaaaactgcatctttatatagatggatgacagttgttttatgaatcaagttcaggaagtaaaaagcagaaaacatcttacctttgtttgtttgtttttttatcccaaagcacagtcatccatattcctttaggaggatgaataaactttcacgagaatgttgcattacccctgggctgtcrgtaattcagctgcttttctgaagtctgtgcttactgggccctatctcttcctacttcagatcctagtgaggatcgcctctgaacttggatgaccgggtcttgggagaagcacgtgtcacaaattagggtctgtgatttagaggagaaagccatgaacctttgtttccagaggagcttaggaaagctgaatatttgttgtatctttgcagcaagtgtatcttagttatttggagctagttttggctcagactgaaaagtgtgttttctttggaatgc

SEQ ID NO: 78502 - DNA, 678 bp, Homo sapiens
tcagtgaaaccaataaactgctgtagtttcagttgtctgataactttggttatttctcctattcaggcagacctactgttatcttttttaccttttattatcagtaactttagagaatagataggataaccttattttttcagtattttgcaactctataaagtttctgttatatagctatcagttgattatgataagcatggtgactgtgtcatatactccaaaactgcatctttatatagatggatgacagttgttttatgaatcaagttcaggaagtaaaaagcagaaaacatcttacctttgtttgtttgtttttttatcccaaagcacagtcatccatattcctttaggaggatgaataaactttcacgagaatgttgcattacccctgggctgtcagtaattcagctgcttttctgaagtctgtgcttactgggccctatctcttcctacttcagatcctagtgaggatcgcctctgaacttggatgaccgggtcttgggagaagcacgtgtcacaaattagsgtctgtgatttagaggagaaagccatgaacctttgtttccagaggagcttaggaaagctgaatatttgttgtatctttgcagcaagtgtatcttagttatttggagctagttttggctcagactgaaaagtgtgttttctttggaatgc

SEQ ID NO: 78503 - DNA, 898 bp, Homo sapiens
ttgtcccttcccattctttctacagtgatatacattgacacttattggtgtttgtgaaaaactggaaaatacctaaacactcactaatagagtggttattattacttgtgtctatatgactgtgaaacaaaaatgatattcagatgtattaaatgtcctaaaatgaggatcctatacacaaagatttaacaaagctcatcttctttgttaagcgtcttgactcctaaattatcagaaatagatgactattctatttttaaagtatgctagaaaaggtgctttcacatccttataatttatttattctgatttctcccatgaggccaggatacacactgaaaactaaatgtgaatagaagaaagattggaaggcaatatcccaaaatataaacagagrtggtttggagatattgaaacaaaaagtggtttttttctccctctttatttccgtccctttctctatattttctaatttttaaatattgaatatctgacagttcaagaatgggagaaataaattttatttaatgaatacaattgagcatttttctaacttctatgtttgagttcattgatagtgtagtttccatttcaaaagcaagcagtgctttcaataatgagaatttaaatatgatatacttcaattttttttttttttttttttttgaggcagagtttcactcttgttgtccagggtggagtgcagtggtgtgatctcggctcactgcaacctccgcttcccaggttcaagcgacatacctcagtttttaagtggtactatgtttatggacatcagtcactttataacgggtttcttgtccacaccttaatccttcttcttctttacaaaatgagaatagcagaagatagttttcttctctctcatatgttccatgca

SEQ ID NO: 78504 - DNA, 898 bp, Homo sapiens
ttgtcccttcccattctttctacagtgatatacattgacacttattggtgtttgtgaaaaactggaaaatacctaaacactcactaatagagtggttattattacttgtgtctatatgactgtgaaacaaaaatgatattcagatgtattaaatgtcctaaaatgaggatcctatacacaaagatttaacaaagctcatcttctttgttaagcgtcttgactcctaaattatcagaaatagatgactattctatttttaaagtatgctagaaaaggtgctttcacatccttataatttatttattctgatttctcccatgaggccaggatacacactgaaaactaaatgtgaatagaagaaagattggaaggcaatatcccaaaatataaacagagatggtttggagatattgaaacaaaaagtggtttttttctccctctttatttccgtccctttctctatattttctaatttttaaatattgaatatctgacagttcaagaatgggagaaataaattttatttaatgaatacaattgagcatttttctaacttctatgtttgagttcattgatagtgtagtttccatttcaaaagcaagcagtgctttcaataatgagaatttaaatatgatatacttcaattttttttttttttttttttttgaggcagagtttcactcttgttgtccagggtggagtgcagtggtgtgatctcggctcactgcaacctccgcttcccaggttcaagcgacatacctcagtttttaagtggtactatgtttatggacatcagtcactttataacgggtttcttgtccacaccttaatccttcttcttctttacaaaatgagaatagyagaagatagttttcttctctctcatatgttccatgca

SEQ ID NO: 78505 - DNA, 538 bp, Homo sapiens
attgtagagaagatcttattcttcatgtgagacattcttgacaactatgtgcattaagccttacgctatttttggtatgtataaaatgccccttgagatagataaaagcactctgtgaaagcattttgttattggcttaaaaaagataaaactaacagcctagagttgcacaatctytcttttccttagatattaattatataacatagtatttttgctcttctaccagaggtgtttttggttatcttatttgccatatctaagtatcctgtatggaacactgaattgttagtaatgaccactgttttcatcctcatttccctccaaaagcagaaaaaaaaagaccaatacaataactagtatttcccatcttctaattattcatttcctgtgggataagatagtggcatagaaaagcaaattggatcataattatctcaggttcttccctcattccactacgccctcactcaagttatcttcactgaatttgttttgactttgtaacctaatcaattacagagagaaacaatgcaag

SEQ ID NO: 78506 - DNA, 538 bp, Homo sapiens
attgtagagaagatcttattcttcatgtgagacattcttgacaactatgtgcattaagccttacgctatttttggtatgtataaaatgccccttgagatagataaaagcactctgtgaaagcattttgttattggcttaaaaaagataaaactaacagcctagagttgcacaatctttcttttccttagatattaattatataacatagtatttttgctcttctaccagargtgtttttggttatcttatttgccatatctaagtatcctgtatggaacactgaattgttagtaatgaccactgttttcatcctcatttccctccaaaagcagaaaaaaaaagaccaatacaataactagtatttcccatcttctaattattcatttcctgtgggataagatagtggcatagaaaagcaaattggatcataattatctcaggttcttccctcattccactacgccctcactcaagttatcttcactgaatttgttttgactttgtaacctaatcaattacagagagaaacaatgcaag

SEQ ID NO: 78507 - DNA, 538 bp, Homo sapiens
attgtagagaagatcttattcttcatgtgagacattcttgacaactatgtgcattaagccttacgctatttttggtatgtataaaatgccccttgagatagataaaagcactctgtgaaagcattttgttattggcttaaaaaagataaaactaacagcctagagttgcacaatctttcttttccttagatattaattatataacatagtatttttgctcttctaccagaggtgtttttggttatcttatttgccatatctaagtatcctgtatggaacactgaattgttagtaatgaccactgttttcatcctcatttccctccaaaagcagaaaaaaaaagaccaatacaataactagtatttcccatcttctawttattcatttcctgtgggataagatagtggcatagaaaagcaaattggatcataattatctcaggttcttccctcattccactacgccctcactcaagttatcttcactgaatttgttttgactttgtaacctaatcaattacagagagaaacaatgcaag

SEQ ID NO: 78508 - DNA, 836 bp, Homo sapiens
ctaaagcatgggagaaaggcaaggaatgagtccttccctagagccttcaaagggagcacggccctgcagatgccttgattttagacttytggcctctaaaacagtgagggaataagtttctgttgtgttaagccacaagtttttggtaattttttatgtcagtcctggcaaactaacataaccctgttcttacaagtttgagtctggggaggaagtggccttggaccaaggagatgtgtccttccccctctgtttctcctctctgctggtcagaaggcaaacctaacaggctgagctagaatagccattgtggaccaggaagtggaagctgtgcattaagggaagtggatcaacaaggtaagccccccatctccctgggccagggaagccatgttgaccaggcactgccgacttgcacatgacttctatgtggaaataagcactgacactgtataagctactgtcttttttgatttgctgtcacttactgctgaatataatcctaattcagatctggagtcagattcataaatgaaaatacaaaattcagtgtggtcaataacatggtggaaacaagccatgatcacaaagaaatgaaagatcaacttaacctgggagattagggaaggcttctcaggaaaggcaacagtagccagatttaagagcatgagaaggagattgccaggcagcctggatatgggatgataggtaggcatttcaaagagggaacccacttaccgacacggacggggagtgagagtgcagtgcttgggaccacgtgcatggagaaagcagaaggtgagaggaagttaatgatgaagagggaggcaaaggca

SEQ ID NO: 78509 - DNA, 836 bp, Homo sapiens
ctaaagcatgggagaaaggcaaggaatgagtccttccctagagccttcaaagggagcacggccctgcagatgccttgattttagacttttggcctctaaaacagtgagggaataagtttctgttgtgttaagccacaagtttktggtaattttttatgtcagtcctggcaaactaacataaccctgttcttacaagtttgagtctggggaggaagtggccttggaccaaggagatgtgtccttccccctctgtttctcctctctgctggtcagaaggcaaacctaacaggctgagctagaatagccattgtggaccaggaagtggaagctgtgcattaagggaagtggatcaacaaggtaagccccccatctccctgggccagggaagccatgttgaccaggcactgccgacttgcacatgacttctatgtggaaataagcactgacactgtataagctactgtcttttttgatttgctgtcacttactgctgaatataatcctaattcagatctggagtcagattcataaatgaaaatacaaaattcagtgtggtcaataacatggtggaaacaagccatgatcacaaagaaatgaaagatcaacttaacctgggagattagggaaggcttctcaggaaaggcaacagtagccagatttaagagcatgagaaggagattgccaggcagcctggatatgggatgataggtaggcatttcaaagagggaacccacttaccgacacggacggggagtgagagtgcagtgcttgggaccacgtgcatggagaaagcagaaggtgagaggaagttaatgatgaagagggaggcaaaggca

SEQ ID NO: 78510 - DNA, 1077 bp, Homo sapiens
aaaataatgagttgtagagatatctattaagggatttcatgagaaataactttattctcactatgagactaaatgtaagcagcagcacagcattgttcaagataaaatgactgtttgataggatgattataccaggagggataaccttctctgtggtgtacataacttctcagtctcagaaatccagccaaatacaagtagcaatatccctaagagaccttttctggcaatggatgagagctttctcctttaggacattcagaggtcagtgcttacggtttcagcagtaaccaaagtctatttaaagtgtcccgtgttagagaaatgatgaggataaaaattttcctctaatttaattctaacagatcagaagcattgtcaagaacaagcaaaaagaatgcagcgaatgtgtgcgaagatataaaaaactgaccacaagttctcctaccatatacttayaggtgaagccttcacagatgaaaatgaatatggtagcctagtacagatcagggcctcaagctcaagatctgaattatatcctgtgtgcagagaatcggcttcaccttttccttttgagaagcaatcacacacatgacacaactctgaaggactattttttcaagtcactttatgtcttcttaatcgcagacattggaggattgatagatagagctggtaagaaacagaataaagatagtaacaaataggcacaataaactattattaaacagtgataataataatttcgaaaaacgttactagtcacgtatgtatataatcccatatcattttaagtttcttaacttgcttatacaccaggggatctgtgataagcaggattttttttttttctgaaacttattagcagacatgtttatgtgtattttgatggttgaaaaagatcaagagatggctaggtaaggagtgcagtaaatttggagccatttttcaaacattcgaggtatatgagttcagttattgcagtagtgagttctgggctgtcctgcagaaaatgtggatactctttcgagaaatgtgaaaagcctaatgtatttgagaattccatttttcttagtg

SEQ ID NO: 78511 - DNA, 1452 bp, Homo sapiens
tgcattttaaacatttttatagatttgtaaaataataaattaagtaccatatactttaaataccatctactttccatgaggatctgaaacaaagggattacaaatgtgactcctattctttgccagagaacaatattcatttgaaaattctacaaatgctgtatttaccaggttggcaatgataaataactgaatgaacagataaaagctattttttcttttgaaaattgaatgtactgctcatattatggaaggaacttaaaagaagagagataaagacgttgcagaaatagagaaaataccactgcataaaatgttgctttaggattttctgtgcttattgtaatacatacagaaattgtgaattagtgggaaattttgtttataaccaaattttatattcaactttgagtattctagagaaatcttatttatttaccctgattacggttctccatctctatttttgtgtacccctatatgcttattatgcttgcaaatcataatcwccctatagaagacactaaggtattttatattcatatcaacattccttatttggcaatatcctttctttcatcctttaaattttatttaaaatcttaataaatgctctaatcttaaccaacttcctttcaatctaaagaactagaccttggatattttaatattatgaaactatgagcaacacccattttcattacattatccaaaattttatggtgcgcctatatatcaagtgctatggttttatattagagagcagtaataaagacagtagaaaataaaatctcacacctcttgaggcttatattgtatggaccaatcaagtgggctttgtttttctgtttcctgtagttaaaagatacccgtattctacaaataccgtattttcacgattttagtcaaactcatgtatgttcacctaaaatttaaagcattttagcactttctaccaacacttaagtaataattttcaacaagcaatttatttcacagatattcaatacccttaggaaaagaaagagtatagtacttaacgcagtttacaaaggcttccatcaatacattatttttttctctctcctaactcatttctttctgccttccccatcagtatgtcacattttatgctataaatatattgaaactctttgagtcctttgtagttctgatatataatgtaatcttttaagttcagaactttatgtgtatttgctgtatttgctctgacagagtgaaaaactacattaacacatatgtacacacatgcacatacacaaatacacataatcattactggtctgacacattttaacatatgcatactttaattccagatatattctaatgtttccatagtgtcctgtactaacattttcatagcattttcccactgtatttgcatgttttcctttatctgtttgggtcttttagtgaactttcagtcct

SEQ ID NO: 78512 - DNA, 1099 bp, Homo sapiens
aattaatcaaaatatagaacataccaagaaaagttccttacaaatagtaatcagaattaaccattatgctcattaatgtattatttagtaatcagacttttacttcatagttgacaatgattctctacttcatttcagttactgaatatagtattagtgtataaaataaaattgattaactgaactcacgatactgatgcaatggttaggtcattatagtttaaacagtcttcaactttgaacccctaatcactacgaatgccagccccatattttcctatacttgtcaatgtttttatttgttaataataaaaaaaaaaacctaacttgcggttcattgtccgaaatcatcaagcaacagaaaaagtagtgttgtagcctttgagagaactataaatttaaaaggctttgcatactatcttctctctatatctgtctctttctctctctctcttgcttctcttctgtctctgtttcttttatgcttttattttcttcttttttttttaatttctgttttttccaaatagtttaagtttatgaccacagtggaaacaaaattagaattaattgtcttccaacactgtataccaaaccacggaatatgggaataatgccaaaatgctgccaaattgggttagtcagtttttttgtatttaaattttaaagtcataaactttatccaatttctctccctttttctacacagcgaagtaagcataacctgccatctggtggatgtaaggtgaatgatttctggaagaagcaatggatgtttacacaaggagatgcttatcagaaacatggagggaaataagtaaggtgaacaagtgcatgctggaatggggaaattgcaaaccatatatattgtcagaggtaatgactctgtttgttgttgccttgtattgctgcacattaccttttcaagagaagcttgaaatgtaaaacataatgagacatcttatttcgatgaaggcatctacttgaagttactggaaaaaaaaaaagaatatgaatgtcaaattcagtctagggaacacaacttttgctttctattcttaagaaggagactttcaaaataawgtcactaataacaatt

SEQ ID NO: 78513 - DNA, 2977 bp, Homo sapiens
tgccatttcgacctcaaaacctacctgatactaacagccttgaaaggtaaagttgttcatttgcttctactcttttggttaatagcaatagacccttttaggaaagtattggaaaaatccctgtctcagatatttactatarcatttcaggggttttggaatatattttctttatttgacttagatttgaaaactacttagggaatgtgattgtagcagctggtgccagtcttctactctcagctctcagtttttcaattccccataaattagtagagaactagtagaagtatcttgcacctagggagaccatggtcttttagcattactactgatccctgtaggtcaaggcacccagggtgccactccagccttgttgcccattaaggttattacactcttcttattttgtcagttaattggaacccgaaggtttcccaaatttcagaatccttattaattccaatgaaattagggagaatatttccaaggtgacatctcctactgttaactttggtttacaaaagcaaccagaactgagcctttcaaacttgctggtgctcctcacctttgcattcttttcataaaaagaatgtttattcttatttgttacttacctttcattgaagggtatcttctggatcctcctggggaacataattaggtggtaaattttgtggtctcccttagaagtgtgtttcagagctacctgaaccctgccccattgactataataattcttatttccaaacttcatgtagctagagcattttaaaagagtgcagagcatctttctcaagacgttatgtataaaatacaggtaaacactctcatttcagtaaactatcccctaccaacttctatagttttcactccccggatcaaccctttcaaaatccactccaacataatgtgaggcatataatggctttggctgaaaagtttgcagggcttttacttgaagggtagctgatttcttcttcctctattgagggtaaagaagttgtttctgcttttttaaaaggctaaaagaaatttgtatcttcaagattctcaggctcttccacttaattatcactggagattctaaagtcctcagtttgcagccgttccctctccaggagtttgttgaggagagctcctgagattacatattctgtcccatttgtatattttggatacctttaggattacatcttggcttgatttccgggagagtcttccttctgcttacagtaggttgcgtctttttaaatactcccactgaggtatttttactttgacaatatgctttgactttgtactggctaatttgagatttttttttttaatcacggactgcagagtgactctgtccctgtgtgcaattggagtttaattttcctgaagccactattgttttgtgttgatgaaggatccccttgtagagtgagttttagaattatctgagacatgaaagaagggtacaataagtgacaaacttctatttcccattggagtgtcagctcccttacatttccaggttagcccctttctcagattaatctgtgcacaactggttgtctcagcattttcactaaaaatatgggcccggggtatataagacaaagtaatgtgtatatatagcattctctataccaagtgttaaactttagttattatttaaaatattcatagtattataataatgataaatacaaaataaatgaacaacatgatagttcctagccatggggaaaagcatagaaaatcaacaaagaagatgaatattgaggtttacctttttattctgaaataaatgcacttctaaatttggcaatcaaatcactcattgtgatgatatagtatggaaaaacattcaactaatttttcccaacagtttattcttaagtatcttctttacctagtgcaatatacctcaaaggctatttatattttgcaactatcctattgaaatgtatgtgataattcttatttgctggtcacttctctcctaaactttttcctgtaatactgctgaaataatagttttttaaagtttccattttttttcctcctcagtattcaaagatgtaatatttgactaggaaaggaaagaggtttaattgacctcttcccattataaataaacttcagcatggctgggtaggcctcaggaaacttacaatcatggtggaaggggcagcaaatacatacttcttcacatagagacagcaaggagaagtgctgagcaaagggggaaaagccccttataaaaccgtgagatctcatgagaactcaatgactgtgacaagaacagcagcatgggggtaactgctcccatgattaaattacttcctgctggatccctcccatgtcacatggggattttgggaactacaactcaaggtgggatttgtgtggggccacagccaaaccatacatttggcaagttttatttgcagttaagtcctgctgtacgtgactctaccaaatatttcctacactttatttttcctcatggaaatggattacatattcacagtctatttcaggaaaatacactaccttaacttaaatatacctttgaattagatgcctgtattttgctttgactgaagttgcttacttttcaaacacttagttctccataaatattaaaattgataggccatattgaagcatgctgccacctgcacatcacaattcagaccaagtccatagataggtctactttattttaattgttaattaagcatgaaccaatttgaacaaattatacacaaacttctccacataattctatactggtaatacaaaacatgagaagagagaaaaatatattatttaatgtgggcttaatatatgtaggcatttctatttactttatgtaaaaccctgtatcttattcacacagtaatcacttgatattacaagtgctcttcttatgttcatgaagaaaatatggtgttaacaatctcaatagctttcccaggag

SEQ ID NO: 78514 - DNA, 2977 bp, Homo sapiens
tgccatttcgacctcaaaacctacctgatactaacagccttgaaaggtaaagttgttcatttgcttctactcttttggttaatagcaatagacccttttaggaaagtattggaaaaatccctgtctcagatatttactatagcatttcaggggttttggaatatattttctttatttgacttagatttgaaaactacttagggaatgtgattgtagcagctggtgccagtcttctactctcagctctcagtttttcaattccccataaattagtagagaactagtagaagtatcttgcacctagggagaccatggtcttttagcattactactgatccctgtaggtcaaggcacccagggtgccactccagccttgttgcccattaaggttattacactcttcttattttgtcagttaattggaacccgaaggtttcccaaatttcagaatccttattaattccaawgaaattagggagaatatttccaaggtgacatctcctactgttaactttggtttacaaaagcaaccagaactgagcctttcaaacttgctggtgctcctcacctttgcattcttttcataaaaagaatgtttattcttatttgttacttacctttcattgaagggtatcttctggatcctcctggggaacataattaggtggtaaattttgtggtctcccttagaagtgtgtttcagagctacctgaaccctgccccattgactataataattcttatttccaaacttcatgtagctagagcattttaaaagagtgcagagcatctttctcaagacgttatgtataaaatacaggtaaacactctcatttcagtaaactatcccctaccaacttctatagttttcactccccggatcaaccctttcaaaatccactccaacataatgtgaggcatataatggctttggctgaaaagtttgcagggcttttacttgaagggtagctgatttcttcttcctctattgagggtaaagaagttgtttctgcttttttaaaaggctaaaagaaatttgtatcttcaagattctcaggctcttccacttaattatcactggagattctaaagtcctcagtttgcagccgttccctctccaggagtttgttgaggagagctcctgagattacatattctgtcccatttgtatattttggatacctttaggattacatcttggcttgatttccgggagagtcttccttctgcttacagtaggttgcgtctttttaaatactcccactgaggtatttttactttgacaatatgctttgactttgtactggctaatttgagatttttttttttaatcacggactgcagagtgactctgtccctgtgtgcaattggagtttaattttcctgaagccactattgttttgtgttgatgaaggatccccttgtagagtgagttttagaattatctgagacatgaaagaagggtacaataagtgacaaacttctatttcccattggagtgtcagctcccttacatttccaggttagcccctttctcagattaatctgtgcacaactggttgtctcagcattttcactaaaaatatgggcccggggtatataagacaaagtaatgtgtatatatagcattctctataccaagtgttaaactttagttattatttaaaatattcatagtattataataatgataaatacaaaataaatgaacaacatgatagttcctagccatggggaaaagcatagaaaatcaacaaagaagatgaatattgaggtttacctttttattctgaaataaatgcacttctaaatttggcaatcaaatcactcattgtgatgatatagtatggaaaaacattcaactaatttttcccaacagtttattcttaagtatcttctttacctagtgcaatatacctcaaaggctatttatattttgcaactatcctattgaaatgtatgtgataattcttatttgctggtcacttctctcctaaactttttcctgtaatactgctgaaataatagttttttaaagtttccattttttttcctcctcagtattcaaagatgtaatatttgactaggaaaggaaagaggtttaattgacctcttcccattataaataaacttcagcatggctgggtaggcctcaggaaacttacaatcatggtggaaggggcagcaaatacatacttcttcacatagagacagcaaggagaagtgctgagcaaagggggaaaagccccttataaaaccgtgagatctcatgagaactcaatgactgtgacaagaacagcagcatgggggtaactgctcccatgattaaattacttcctgctggatccctcccatgtcacatggggattttgggaactacaactcaaggtgggatttgtgtggggccacagccaaaccatacatttggcaagttttatttgcagttaagtcctgctgtacgtgactctaccaaatatttcctacactttatttttcctcatggaaatggattacatattcacagtctatttcaggaaaatacactaccttaacttaaatatacctttgaattagatgcctgtattttgctttgactgaagttgcttacttttcaaacacttagttctccataaatattaaaattgataggccatattgaagcatgctgccacctgcacatcacaattcagaccaagtccatagataggtctactttattttaattgttaattaagcatgaaccaatttgaacaaattatacacaaacttctccacataattctatactggtaatacaaaacatgagaagagagaaaaatatattatttaatgtgggcttaatatatgtaggcatttctatttactttatgtaaaaccctgtatcttattcacacagtaatcacttgatattacaagtgctcttcttatgttcatgaagaaaatatggtgttaacaatctcaatagctttcccaggag

SEQ ID NO: 78515 - DNA, 2977 bp, Homo sapiens
tgccatttcgacctcaaaacctacctgatactaacagccttgaaaggtaaagttgttcatttgcttctactcttttggttaatagcaatagacccttttaggaaagtattggaaaaatccctgtctcagatatttactatagcatttcaggggttttggaatatattttctttatttgacttagatttgaaaactacttagggaatgtgattgtagcagctggtgccagtcttctactctcagctctcagtttttcaattccccataaattagtagagaactagtagaagtatcttgcacctagggagaccatggtcttttagcattactactgatccctgtaggtcaaggcacccagggtgccactccagccttgttgcccattaaggttattacactcttcttattttgtcagttaattggaacccgaaggtttcccaaatttcagaatccttattaattccaatgaaattagggagaatatttccaaggtgacatctcctactgttaactttggtttacaaaagcaaccagaactgagcctttcaaacttgctggtgctcctcacctttgcattcttttcataaaaagaatgtttattcttatttgttacttacctttcattgaagggtatcttctggatcctcctggggaacataattaggtggtaaattttgtggtctcccttagaagtgtgtttcagagctacctgaaccctgccccattgactataataattcttatttccaaacttcatgtagctagagcattttaaaagagtgcagagcatctttctcaagacgttatgtataaaatacaggtaaacactctcatttcagtaaactatcccctaccaacttctatagttttcactccccggatcaaccctttcaaaatccactccaacataatgtgaggcatataatggctttggctgaaaagtttgcagggcttttacttgaagggtagctgatttcttcttcctctattgagggtaaagaagttgtttctgcttttttaaaaggctaaaagaaatttgtatcttcaagattctcaggctcttccacttaattatcactggagattctaaagtcctcagtttgcagccgttccctctccaggagtttgttgaggagagctcctgagattacatattctgtcccatttgtatattttggatacctttaggattacatcttggcttgatttccgggagagtcttccttctgcttacagtaggttgcgtctttttaaatactcccactgaggtatttttactttgacaatatgctttgactttgtactggctaatttgagatttttttttttaatcacggactgcagagtgactctgtccctgtgtgcaattggagtttaattttcctgaagccactattgttttgtgttgatgaaggatccccttgtagagtgagttttagaattatctgagacatgaaagaagggtacaataagtgacaarcttctatttcccattggagtgtcagctcccttacatttccaggttagcccctttctcagattaatctgtgcacaactggttgtctcagcattttcactaaaaatatgggcccggggtatataagacaaagtaatgtgtatatatagcattctctataccaagtgttaaactttagttattatttaaaatattcatagtattataataatgataaatacaaaataaatgaacaacatgatagttcctagccatggggaaaagcatagaaaatcaacaaagaagatgaatattgaggtttacctttttattctgaaataaatgcacttctaaatttggcaatcaaatcactcattgtgatgatatagtatggaaaaacattcaactaatttttcccaacagtttattcttaagtatcttctttacctagtgcaatatacctcaaaggctatttatattttgcaactatcctattgaaatgtatgtgataattcttatttgctggtcacttctctcctaaactttttcctgtaatactgctgaaataatagttttttaaagtttccattttttttcctcctcagtattcaaagatgtaatatttgactaggaaaggaaagaggtttaattgacctcttcccattataaataaacttcagcatggctgggtaggcctcaggaaacttacaatcatggtggaaggggcagcaaatacatacttcttcacatagagacagcaaggagaagtgctgagcaaagggggaaaagccccttataaaaccgtgagatctcatgagaactcaatgactgtgacaagaacagcagcatgggggtaactgctcccatgattaaattacttcctgctggatccctcccatgtcacatggggattttgggaactacaactcaaggtgggatttgtgtggggccacagccaaaccatacatttggcaagttttatttgcagttaagtcctgctgtacgtgactctaccaaatatttcctacactttatttttcctcatggaaatggattacatattcacagtctatttcaggaaaatacactaccttaacttaaatatacctttgaattagatgcctgtattttgctttgactgaagttgcttacttttcaaacacttagttctccataaatattaaaattgataggccatattgaagcatgctgccacctgcacatcacaattcagaccaagtccatagataggtctactttattttaattgttaattaagcatgaaccaatttgaacaaattatacacaaacttctccacataattctatactggtaatacaaaacatgagaagagagaaaaatatattatttaatgtgggcttaatatatgtaggcatttctatttactttatgtaaaaccctgtatcttattcacacagtaatcacttgatattacaagtgctcttcttatgttcatgaagaaaatatggtgttaacaatctcaatagctttcccaggag

SEQ ID NO: 78516 - DNA, 2977 bp, Homo sapiens
tgccatttcgacctcaaaacctacctgatactaacagccttgaaaggtaaagttgttcatttgcttctactcttttggttaatagcaatagacccttttaggaaagtattggaaaaatccctgtctcagatatttactatagcatttcaggggttttggaatatattttctttatttgacttagatttgaaaactacttagggaatgtgattgtagcagctggtgccagtcttctactctcagctctcagtttttcaattccccataaattagtagagaactagtagaagtatcttgcacctagggagaccatggtcttttagcattactactgatccctgtaggtcaaggcacccagggtgccactccagccttgttgcccattaaggttattacactcttcttattttgtcagttaattggaacccgaaggtttcccaaatttcagaatccttattaattccaatgaaattagggagaatatttccaaggtgacatctcctactgttaactttggtttacaaaagcaaccagaactgagcctttcaaacttgctggtgctcctcacctttgcattcttttcataaaaagaatgtttattcttatttgttacttacctttcattgaagggtatcttctggatcctcctggggaacataattaggtggtaaattttgtggtctcccttagaagtgtgtttcagagctacctgaaccctgccccattgactataataattcttatttccaaacttcatgtagctagagcattttaaaagagtgcagagcatctttctcaagacgttatgtataaaatacaggtaaacactctcatttcagtaaactatcccctaccaacttctatagttttcactccccggatcaaccctttcaaaatccactccaacataatgtgaggcatataatggctttggctgaaaagtttgcagggcttttacttgaagggtagctgatttcttcttcctctattgagggtaaagaagttgtttctgcttttttaaaaggctaaaagaaatttgtatcttcaagattctcaggctcttccacttaattatcactggagattctaaagtcctcagtttgcagccgttccctctccaggagtttgttgaggagagctcctgagattacatattctgtcccatttgtatattttggatacctttaggattacatcttggcttgatttccgggagagtcttccttctgcttacagtaggttgcgtctttttaaatactcccactgaggtatttttactttgacaatatgctttgactttgtactggctaatttgagatttttttttttaatcacggactgcagagtgactctgtccctgtgtgcaattggagtttaattttcctgaagccactattgttttgtgttgatgaaggatccccttgtagagtgagttttagaattatctgagacatgaaagaagggtacaataagtgacaaacttctatttcccattggagtgtcagctcccttacatttccaggttagcccctttctcagattaatctgtgcacaactggttgtctcagcattttcactaaaaatatgggcccggggtatataagacaaagtaatgtgtatatatagcattctctataccaagtgttaaactttagttattatttaaaatattcatagtattataataatgataaatacaaaataaatgaacaacatgatagttcytagccatggggaaaagcatagaaaatcaacaaagaagatgaatattgaggtttacctttttattctgaaataaatgcacttctaaatttggcaatcaaatcactcattgtgatgatatagtatggaaaaacattcaactaatttttcccaacagtttattcttaagtatcttctttacctagtgcaatatacctcaaaggctatttatattttgcaactatcctattgaaatgtatgtgataattcttatttgctggtcacttctctcctaaactttttcctgtaatactgctgaaataatagttttttaaagtttccattttttttcctcctcagtattcaaagatgtaatatttgactaggaaaggaaagaggtttaattgacctcttcccattataaataaacttcagcatggctgggtaggcctcaggaaacttacaatcatggtggaaggggcagcaaatacatacttcttcacatagagacagcaaggagaagtgctgagcaaagggggaaaagccccttataaaaccgtgagatctcatgagaactcaatgactgtgacaagaacagcagcatgggggtaactgctcccatgattaaattacttcctgctggatccctcccatgtcacatggggattttgggaactacaactcaaggtgggatttgtgtggggccacagccaaaccatacatttggcaagttttatttgcagttaagtcctgctgtacgtgactctaccaaatatttcctacactttatttttcctcatggaaatggattacatattcacagtctatttcaggaaaatacactaccttaacttaaatatacctttgaattagatgcctgtattttgctttgactgaagttgcttacttttcaaacacttagttctccataaatattaaaattgataggccatattgaagcatgctgccacctgcacatcacaattcagaccaagtccatagataggtctactttattttaattgttaattaagcatgaaccaatttgaacaaattatacacaaacttctccacataattctatactggtaatacaaaacatgagaagagagaaaaatatattatttaatgtgggcttaatatatgtaggcatttctatttactttatgtaaaaccctgtatcttattcacacagtaatcacttgatattacaagtgctcttcttatgttcatgaagaaaatatggtgttaacaatctcaatagctttcccaggag

SEQ ID NO: 78517 - DNA, 827 bp, Homo sapiens
aatgagagtgtaaggttttatatttcaactaaggttagaaataacaaaataaaatattatggatacgattaacttagtctgatttgtataggtcttattgcattcctaaggcattctaagttaggcaaataattatacaaataattcagcaggatgtctgtaattggtttcagtgataaaatttatattcagtgcctaaatctgaaacaataaacccttacaataatttattataattttgcagatttcataatagagataatttgaggtttttttgtaactggaagtcaagattgcagccgcatgaaaaaactgcattaaaattatactaaagtaaggtgtttaaaaaataacttgctttgttattacagaagtagataggtcattagtcttcacatattagttttcttttttctcaaaatatataatgaaaaaatagtctctgccttttaaaacttaaataaagtctgaaagtataatacaataaatagtcccttaatttcatttctttatatcttatgaagccttcaaacttcaatgttggtggttctcacaaattttctgtattcacaacatgctgatggtgtcacagaggtgtccacaaaaaactgargaaaacaaccagctgtgtaaaccaatttttagtttaacttgcatcgttttacctgccaaacaaagctctgcagtaacagattctctgtcatcattgaagaacaacttgaagggttagaaaaaggcaatagagattcaaatcccaagagacgagggagactgcattagctcatatgaaatgtacatactttaccattaattttacaaacacatgc

SEQ ID NO: 78518 - DNA, 730 bp, Homo sapiens
cctcaaataacttttcctgcatgcttgccacaatatccaacattttcacctcttaagccagtcctttgagttctgctgcccatttctgctaacctacccagaaaaccagaagaaaaggatacgtcctgactggaatctcagaggggctgtattaaccttgtcttttattttttatattctgatgctttgacatctggggccttgctgaccctggcgagactgccccttccagggatagccaattcctagagatagcaaacaactcgcctacaagcaaacttttcaaatacaaaccaatccagtgcccacatccccagtaaccttttttatcaggttctcatactccaggccactatccacatgccctaatcatctcagagccggatatcagacaactagggagagctgccatgccccagagtcccctgaaatgattcacgctagcccgtcctaagcctgcttaccctgccttacctgctcyttcccgcagaaacaattaaggctcttcctcacagcgcctccccaccccctaaccctgtaatcaacctgggtgttttctgcttgcatgccccacttcccacggtgaagtgtggctcatgctcccctgttgggaactaggaataataaactatcttttccagcaattgtctcctgatctgttggccttgccaatacctcaaattttgtattagtatgatatattttaaagcaagggcagagccaaaaagga

SEQ ID NO: 78519 - DNA, 730 bp, Homo sapiens
cctcaaataacttttcctgcatgcttgccacaatatccaacattttcacctcttaagccagtcctttgagttctgctgcccatttctgctaacctacccagaaaaccagaagaaaaggatacgtcctgactggaatctcagaggggctgtattaaccttgtcttttattttttatattctgatgctttgacatctggggccttgctgaccctggcgagactgccccttccagggatagccaattcctagagatagcaaacaactcgcctacaagcaaacttttcaaatacaaaccaatccagtgcccacatccccagtaaccttttttatcaggttctcatactccaggccactatccacatgccctaatcatctcagagccggatatcagacaactagggagagctgccatgccccagagtcccctgaaatgattcacgctagcccgtcctaagcctgcttaccctgccttacctgctctttcccgcagaaacaattaaggctcttcctcacagygcctccccaccccctaaccctgtaatcaacctgggtgttttctgcttgcatgccccacttcccacggtgaagtgtggctcatgctcccctgttgggaactaggaataataaactatcttttccagcaattgtctcctgatctgttggccttgccaatacctcaaattttgtattagtatgatatattttaaagcaagggcagagccaaaaagga

SEQ ID NO: 78520 - DNA, 362 bp, Homo sapiens
agggtgcacccggcacctcagcccttactctctttctgtggaggagggagrcctctcatgtggctcaggctttgagggattctaaagccagactccatctcagcaaggaccagagacactgagtaagcaggtgcctccaaaggtcttactaagccacaggtaggaaggaaaaagaaagaaatcaaaacaaaaccaggtaagagatcagaagaagacaggagaaggtggccaggtgcagtggctcatgcctgtaatcccagcactttgggaggccaaggcaggtggattgcttgaggtcaggagttcgagaccagcctggccaacatggcaaaactctgtctctactaaacatacaaaactta

SEQ ID NO: 78521 - DNA, 701 bp, Homo sapiens
tggcttcctccagtccctcacggggcgcacacccttcctgtagttggtcaaaaggtaatccgacagcctcagcagagcgggcctggtggtgtttcggctcctcctggctgggaaggagaacagttcaaagtagacaccagccccccaagacttcccccggttctcttgtcctggtttgtaagctgttaaaagagacgtatccccaccatccccacctcacaaaattctaaacacagactgacattctcaccactagagcattttgtctgcagagatttctaccataattcaaatgtattaccttgtagaaaggacctatgcattcattgacaggaaagcagagatctggcttggaagagcaagtggcacaagacagctgagattcaaatcaggttgagggctaagaaggtcggagcaggtggcccacgcctaagcgagggcctctggggagcaacaaggaagctggctctcagggtatgatactaaaagcaagagggttgcaagaaagcatgaccccaagtgcacaatttctaagcccaagggtctgcatcagggttttcctcagccraggtcaaacctcagcatctgcacacaacatctcctttttgagtatgaaacaggtaaagaaagaaggaagtgtgggcatctggtgaaaactgacatttcctctacatcctgcaaaagccaccccaagaggatcc

SEQ ID NO: 78522 - DNA, 1153 bp, Homo sapiens
tgcattttgtctaaattcagaatagcctagaacaggcaaaattgccactatttctaataccataattttcttataaaagaaaaatgcacaggacamagaaaaacataaagtcctaccatgtgtgtgacatcttgagtaaaggaggcattgaggacatatactttaaatgacctttctgtttcatgccctttgtttcatggccaggtaccatagtacagctgttaatatgtgagaggtatgccccatttccctttgtagtaaactagaaagagttattgtgaaggaaaaggtgagaaaaaaagaaatcaacatggcactatacaggtaaattctcaggcagatcaactttagaagaaatatatataggagttacagaaatgaaaattgattctttacaatgtattcatacctttactgctaatgaatatgggttttcttgaggtaataaaaatctaaaattagattgtggtgatggttgcacaactctgtgaatattcgaagaacattgaattgcactctttaaggggttgaattttatcatgcatgacatatatctcaataaagctgttttttaaaaatgtttttatatctgtgtatgtcttaggattctttaagtatctcaatttaaatgtcaaggatttagagactataaaatctacacaggaagatgattaagaacataatcctcaaattctgaaaaatatttaggtttaaattttggttttatatttattatctgtcttatcaaaagtcagttacttaacaacattgggcttctgttttctcaaataatatgacaataacaacactacttgttaaggagcagggattcagagaggattgttgttccagtgatatattgtgggaatgctctcaggccaaggggagggaagacagaagaataggagaaggaaaagaagctagtgagaatgcagctggagagtagcattaatccgttgctctaagaagtcagtcagtcactggccaaaatctgaaagagacagcatgagaaggtgcagtcctccagtctggtggctgttagcctttcagtggtcatcactcattgctactgggaatagacacacttgccagtgaaggaagtctgtgatgggcaccagctgcatctactactcactcctcccccatggtattg

SEQ ID NO: 78523 - DNA, 1153 bp, Homo sapiens
tgcattttgtctaaattcagaatagcctagaacaggcaaaattgccactatttctaataccataattttcttataaaagaaaaatgcacaggacaaagaaaaacataaagtcctaccatgtgtgtgacatcttgagtaaaggaggcattgaggacatatactttaaatgacctttctgtttcatgccctttgtttcatggccaggtaccatagtacagctgttaatatgtgagaggtatgccccatttccctttgtagtaaactagaaagagttattgtgaaggaaaaggtgagaaaaaaagaaatcaacatggcactatacaggtaaattctcaggcagatcractttagaagaaatatatataggagttacagaaatgaaaattgattctttacaatgtattcatacctttactgctaatgaatatgggttttcttgaggtaataaaaatctaaaattagattgtggtgatggttgcacaactctgtgaatattcgaagaacattgaattgcactctttaaggggttgaattttatcatgcatgacatatatctcaataaagctgttttttaaaaatgtttttatatctgtgtatgtcttaggattctttaagtatctcaatttaaatgtcaaggatttagagactataaaatctacacaggaagatgattaagaacataatcctcaaattctgaaaaatatttaggtttaaattttggttttatatttattatctgtcttatcaaaagtcagttacttaacaacattgggcttctgttttctcaaataatatgacaataacaacactacttgttaaggagcagggattcagagaggattgttgttccagtgatatattgtgggaatgctctcaggccaaggggagggaagacagaagaataggagaaggaaaagaagctagtgagaatgcagctggagagtagcattaatccgttgctctaagaagtcagtcagtcactggccaaaatctgaaagagacagcatgagaaggtgcagtcctccagtctggtggctgttagcctttcagtggtcatcactcattgctactgggaatagacacacttgccagtgaaggaagtctgtgatgggcaccagctgcatctactactcactcctcccccatggtattg

SEQ ID NO: 78524 - DNA, 1153 bp, Homo sapiens
tgcattttgtctaaattcagaatagcctagaacaggcaaaattgccactatttctaataccataattttcttataaaagaaaaatgcacaggacaaagaaaaacataaagtcctaccatgtgtgtgacatcttgagtaaaggaggcattgaggacatatactttaaatgacctttctgtttcatgccctttgtttcatggccaggtaccatagtacagctgttaatatgtgagaggtatgccccatttccctttgtagtaaactagaaagagttattgtgaaggaaaaggtgagaaaaaaagaaatcaacatggcactatacaggtaaattctcaggcagatcaactttagaagaaatayatataggagttacagaaatgaaaattgattctttacaatgtattcatacctttactgctaatgaatatgggttttcttgaggtaataaaaatctaaaattagattgtggtgatggttgcacaactctgtgaatattcgaagaacattgaattgcactctttaaggggttgaattttatcatgcatgacatatatctcaataaagctgttttttaaaaatgtttttatatctgtgtatgtcttaggattctttaagtatctcaatttaaatgtcaaggatttagagactataaaatctacacaggaagatgattaagaacataatcctcaaattctgaaaaatatttaggtttaaattttggttttatatttattatctgtcttatcaaaagtcagttacttaacaacattgggcttctgttttctcaaataatatgacaataacaacactacttgttaaggagcagggattcagagaggattgttgttccagtgatatattgtgggaatgctctcaggccaaggggagggaagacagaagaataggagaaggaaaagaagctagtgagaatgcagctggagagtagcattaatccgttgctctaagaagtcagtcagtcactggccaaaatctgaaagagacagcatgagaaggtgcagtcctccagtctggtggctgttagcctttcagtggtcatcactcattgctactgggaatagacacacttgccagtgaaggaagtctgtgatgggcaccagctgcatctactactcactcctcccccatggtattg

SEQ ID NO: 78525 - DNA, 1153 bp, Homo sapiens
tgcattttgtctaaattcagaatagcctagaacaggcaaaattgccactatttctaataccataattttcttataaaagaaaaatgcacaggacaaagaaaaacataaagtcctaccatgtgtgtgacatcttgagtaaaggaggcattgaggacatatactttaaatgacctttctgtttcatgccctttgtttcatggccaggtaccatagtacagctgttaatatgtgagaggtatgccccatttccctttgtagtaaactagaaagagttattgtgaaggaaaaggtgagaaaaaaagaaatcaacatggcactatacaggtaaattctcaggcagatcaactttagaagaaatatatatagkagttacagaaatgaaaattgattctttacaatgtattcatacctttactgctaatgaatatgggttttcttgaggtaataaaaatctaaaattagattgtggtgatggttgcacaactctgtgaatattcgaagaacattgaattgcactctttaaggggttgaattttatcatgcatgacatatatctcaataaagctgttttttaaaaatgtttttatatctgtgtatgtcttaggattctttaagtatctcaatttaaatgtcaaggatttagagactataaaatctacacaggaagatgattaagaacataatcctcaaattctgaaaaatatttaggtttaaattttggttttatatttattatctgtcttatcaaaagtcagttacttaacaacattgggcttctgttttctcaaataatatgacaataacaacactacttgttaaggagcagggattcagagaggattgttgttccagtgatatattgtgggaatgctctcaggccaaggggagggaagacagaagaataggagaaggaaaagaagctagtgagaatgcagctggagagtagcattaatccgttgctctaagaagtcagtcagtcactggccaaaatctgaaagagacagcatgagaaggtgcagtcctccagtctggtggctgttagcctttcagtggtcatcactcattgctactgggaatagacacacttgccagtgaaggaagtctgtgatgggcaccagctgcatctactactcactcctcccccatggtattg

SEQ ID NO: 78526 - DNA, 1153 bp, Homo sapiens
tgcattttgtctaaattcagaatagcctagaacaggcaaaattgccactatttctaataccataattttcttataaaagaaaaatgcacaggacaaagaaaaacataaagtcctaccatgtgtgtgacatcttgagtaaaggaggcattgaggacatatactttaaatgacctttctgtttcatgccctttgtttcatggccaggtaccatagtacagctgttaatatgtgagaggtatgccccatttccctttgtagtaaactagaaagagttattgtgaaggaaaaggtgagaaaaaaagaaatcaacatggcactatacaggtaaattctcaggcagatcaactttagaagaaatatatataggagttacagaaatgaaaattgattctttacaatgtattcatacctttactgctaatgaatatgggttttcttgaggtaataaaaatctaaaattagattgtggtgatggttgcacaactctgtgaatattcgaagaacattgaattgcactctttaaggggttgaattttatcrtgcatgacatatatctcaataaagctgttttttaaaaatgtttttatatctgtgtatgtcttaggattctttaagtatctcaatttaaatgtcaaggatttagagactataaaatctacacaggaagatgattaagaacataatcctcaaattctgaaaaatatttaggtttaaattttggttttatatttattatctgtcttatcaaaagtcagttacttaacaacattgggcttctgttttctcaaataatatgacaataacaacactacttgttaaggagcagggattcagagaggattgttgttccagtgatatattgtgggaatgctctcaggccaaggggagggaagacagaagaataggagaaggaaaagaagctagtgagaatgcagctggagagtagcattaatccgttgctctaagaagtcagtcagtcactggccaaaatctgaaagagacagcatgagaaggtgcagtcctccagtctggtggctgttagcctttcagtggtcatcactcattgctactgggaatagacacacttgccagtgaaggaagtctgtgatgggcaccagctgcatctactactcactcctcccccatggtattg

SEQ ID NO: 78527 - DNA, 725 bp, Homo sapiens
aagtgagccgcctgcctcagcctcccaaagttttgggattataggcatgagccactgcacctggtctatccagtctactactgatgggcttttaggctgattccatgtctttgctattgtgaatagtgctgcaataaacatatgtgtgggtgtgtctttacggtagaactatttagtaamttttttcttttaaacatgtatcagcatgtgcctttatgatagaactatttaataacatttttcttttaaatatgtatcacatttaaagtggtgttcaggccaggcatggtggctcatgcctgtaatcccagcactttgggaggccagggtaggaggattgcttgaggccaggagtttgagattagcctgagcaacatagtgagatcctgtctctacaaaaattaaaaaaaatatatatatatatatagccagtgtggcagcgcatgcctgtagtcctaaatactcatgagggtgaggtgggaagattgcttgagtccaggagatcgaggctgcagggaggtctgattgtgccactgcactctagcctgggtgacagactgagacctgcctaaaagagtaaaaataaagaaagtggtgttcaatttctgtcctttaatctccttgcagtcagggcccttcctgtacttgtcctttctccagcacctagctcagtgccagcacagagtaggcactcaaagcacttttgctggatgaaggagtaagtg

SEQ ID NO: 78528 - DNA, 549 bp, Homo sapiens
caaaccaaagactttgagaattgaatgaacacatagaccgtgggcaaggtctctaactaaccactgagggacacatatgggacacatcagaattgcactgcaaaggctttaaaaatggaaatgaggagcttccagatagctgaacatgtgaaggttcccacagggtggatggaagctctgcrcccctcctcccatatcttgccctatgtatctcttcatctttatctatcctttgcaatattccttataataaactgataaatgttaaggaggaaaagaagtagaagaaggagaaggagggggaagaggaggagagggaggaggagggaaagaaggagaagaagaggaagaagaagaggaggaggaggaagggagaaagaaagagaagaagaaaaagaggaggggggaaggagaagaagaggaagaagaagaagaagaagaagaaaagaggaggaggaagggagaaagaaggagaagaagaaaaagaagaggtgagggaagaggaagaagaaagaaaaaggaggaggaggagggaggaggaggaagaag

SEQ ID NO: 78529 - DNA, 1031 bp, Homo sapiens
agcacctacagtatcccagggacacgccagccacaaaagatacaaagaaggacacaatttggttcttgccccaaggaccctagagcaatatttttcaaaacgtgatgttaatygattttataggaaaaggaattccactggcaagtaaatctggaaaatgccatgttaaattacctctccccactcctaccccatgccacacacaggacttgtcagagtctttaataagctaatgcacactactgcaaatctccaatagagagagtaaaatatgtagtgtttcctgaaatgttttgaccatagaactgtttgtatgtgatgtaatctcatgagacaagtgttttgtgaaacgtgctttaaggaatggtggcttagaggctggtagaaaaaacatggaaatgtcattgaaataatgtcagtcaacagttacggagttccagctctgggccagactctatatagatgctgagaagggggaatcaatccttgtgaggaaggtagagaaaataacatcaaggaagagctcttcttgagctgacaatggaaagattgggcaaagctttgcatatagatatttaggaatatttgttgatgaaatgagtaaaaaagatatatctgcattcaacttaatatatactcttataaattttaatagtcatgttttgttttgttggcttttttttttttgaaacagagtttctctctgtcacccaggctggagtgtagggtgcgatctcggctcactgcagcctcacctcctgggttcaagcgattctcgtgcctcagcctcctgagtaactgagtttataggcacacatcaccacatctggctaatttttgtattattagtagagacggggttttgccatgttggtcaggctggtctcgaattcctgacctcaagctatccaccctcctgggcctcccaaagtgctgggattacaggcatgagccactgcacctggcctgttttgtttatatattaaggatccacttggtaaatatctcaaaatggaattttggtgacctga

SEQ ID NO: 78530 - DNA, 1031 bp, Homo sapiens
agcacctacagtatcccagggacacgccagccacaaaagatacaaagaaggacacaatttggttcttgccccaaggaccctagagcaatatttttcaaaacgtgatgttaattgattttataggaaaaggaattccactggcaagtaaatctggaaaatgccatgttaaattacctctycccactcctaccccatgccacacacaggacttgtcagagtctttaataagctaatgcacactactgcaaatctccaatagagagagtaaaatatgtagtgtttcctgaaatgttttgaccatagaactgtttgtatgtgatgtaatctcatgagacaagtgttttgtgaaacgtgctttaaggaatggtggcttagaggctggtagaaaaaacatggaaatgtcattgaaataatgtcagtcaacagttacggagttccagctctgggccagactctatatagatgctgagaagggggaatcaatccttgtgaggaaggtagagaaaataacatcaaggaagagctcttcttgagctgacaatggaaagattgggcaaagctttgcatatagatatttaggaatatttgttgatgaaatgagtaaaaaagatatatctgcattcaacttaatatatactcttataaattttaatagtcatgttttgttttgttggcttttttttttttgaaacagagtttctctctgtcacccaggctggagtgtagggtgcgatctcggctcactgcagcctcacctcctgggttcaagcgattctcgtgcctcagcctcctgagtaactgagtttataggcacacatcaccacatctggctaatttttgtattattagtagagacggggttttgccatgttggtcaggctggtctcgaattcctgacctcaagctatccaccctcctgggcctcccaaagtgctgggattacaggcatgagccactgcacctggcctgttttgtttatatattaaggatccacttggtaaatatctcaaaatggaattttggtgacctga

SEQ ID NO: 78531 - DNA, 1031 bp, Homo sapiens
agcacctacagtatcccagggacacgccagccacaaaagatacaaagaaggacacaatttggttcttgccccaaggaccctagagcaatatttttcaaaacgtgatgttaattgattttataggaaaaggaattccactggcaagtaaatctggaaaatgccatgttaaattacctctccccactcctaccccatgccacacacaggacttgtcagagtctttaataagctaatgcacactactgcaaatctccaatagagagagtaaaatatgtagtgtttcctgaaatgttttgaccatagaactgtttgtatgtgatgtaatctcatgagacaagtgttttgtgaaacgtgctttaaggaatggtggcttagaggctggtagaaaaaacatggaaatgtcattgaaataatgtcagtcaacagttayggagttccagctctgggccagactctatatagatgctgagaagggggaatcaatccttgtgaggaaggtagagaaaataacatcaaggaagagctcttcttgagctgacaatggaaagattgggcaaagctttgcatatagatatttaggaatatttgttgatgaaatgagtaaaaaagatatatctgcattcaacttaatatatactcttataaattttaatagtcatgttttgttttgttggcttttttttttttgaaacagagtttctctctgtcacccaggctggagtgtagggtgcgatctcggctcactgcagcctcacctcctgggttcaagcgattctcgtgcctcagcctcctgagtaactgagtttataggcacacatcaccacatctggctaatttttgtattattagtagagacggggttttgccatgttggtcaggctggtctcgaattcctgacctcaagctatccaccctcctgggcctcccaaagtgctgggattacaggcatgagccactgcacctggcctgttttgtttatatattaaggatccacttggtaaatatctcaaaatggaattttggtgacctga

SEQ ID NO: 78532 - DNA, 526 bp, Homo sapiens
tccagaataataataagggacaagacccttgagactacaccagccaacatttctcaaagcatatttcatggaacacctactccagggtaccttgaaagatgttagggataaaaaawtgttcgcgggcagtgaagtctgggaaagcctgagctgaagaaagctggatggacaggttagtttgcaacaggactactgagagccttgactgtgttggtgtgtatcgtgaatgtctgagagaagaacaagcatatagtgtttccccaaattatttgacattgtaacttaatttagattctcccaaaagcagagacaaaagcttggtatcaagtgtagtttatttgggagttgattccagtgatcagaaatgagggggtggaaagtatgaaaagaaaaagcaaaaggcaataaaagtgcataatgggctggtttccacggtgatcaagtagaaatcagtattgctggaaaatctaagaaggaccatataaaaaatacgtaaaaattgtgccactaaaaggcgaagcaacca

SEQ ID NO: 78533 - DNA, 453 bp, Homo sapiens
ctcccaggtctggaaggcagctggcaaagttgcaactgagggctcatacatctggggtcagctrgacaaaactaggccattctggtccatgtctctctcctatccctccagccagctagcccagtcatgttcccatggtcagacagggacaaaggcaaacaacccaatcctgcaagaaggcaaacggaaatgtacacatgcttttcaagtgtttgcttacatcatggttgctaacatctcattggccaaagaaagtcacatgatggagtccagctccagagaggcaatagtctataaagttacaggacaaaagatgcagttacagggaagccattagttgggaccattaaagaaatcactttgccacagatagaaaataaatgctacaagcataaagcaggcttatggagatggagagggttgaggcttagaaattttaaataggagggtcgg

SEQ ID NO: 78534 - DNA, 2284 bp, Homo sapiens
aaaatacataggattccaaaaaaacccaaatatatctcaatatagttatcagccaggcatggtggttgtaatcccagtgctttgggaggccaaggtgagaggagcactagaggccaagagtttgagaccaacctgggcaacatagtgagaatccatctctttctattaaaaaaaaactaccataattttgaagttgtgatgtgaaaaagatgatatttcaaggcatctacaacaactgtaatgtaataccaaaaaaaattaacttctccaggttataaagtctcaggtaccactaattcaatggtgtggtttgttgcatacattcttaacggaaggaaatgttagatttcagtgagaggttactgaaaataaagatgtgtttctacctcccattcaagttgaaggacgctctgaattctaaccaccaacccattggacatccatggatcccagggtaaaaacccctgtttctagacaaaagttcttctaataacagctggcataaagccactttagttattgttgttgccatggtcattgtcatcattttaggaggtggcacggataatcatgaagtttttctactactttagggcagatggctttgccacatactggcactgtgacctgggcaaggcaggtgcctccttgagcttggtgccctcatggtgcttctcctggagaccctgacaggagagctatggaagggaagagccaggagaaaaggaggagaccatttctggacacatcctgccagttatcattccagcctgatgcagatcattatttataaactataactactcattctctggattttattgcttgttaagagctgagtgtaacatctttaattagagtcaggagttggatgcataagagagagagacagaaaacatctgaaattctgaatctaaaataaaactctttaaatggattatttttctaagaaaaaaatctttagatactgattggggaaaaatctttgttgtcttttttttggttgaattttgagcctgtgaagtttgtcctgaatccaacggttccataattcagggtttgtctgcttccttgcaaaaagcagccttcctgagttctgcaaggtatttgtatttatactcttgacatttaaaatattttcatatctcctatctctacttctccccaaaggacttacggggttgatgtggtcaacttttgcttgagttagccagagaaggtgcattttgcttgtaatgtacatttctttgctgcaggacttctcagagcctctgtatggtaatatgaattgggaagtccagccaggggacaaagtagtcaacacttctcaaacttgtgtgacctgcttttttatctatagaatttctcatagggctagtgagaaaatgctaccttagataaacactttaaagagaaacatttttcttaggaagtgtttacagtcactgtaattatcaaacaacaaaaaaacagggaaagtagggggtatgacaggctgaatctagaatggggacagagctgccctagggggattccacggattaaaaaaaaaaatcatcttacctgccttattgaacttgggattgtttataaaggttaaataacattcccaggtggcctgctgtggtttcagagccacttgttaggccctgggtcctctggaaccactcaggactgtggccccacctctgaggttggcctctatagctatactgaatggcctatacatatcagctctctcktcttcctcccacatttcttcaaggcccaccctgccccctcccacagaggtgctatttgctgagactgtttttctaaagcagatggtctagaaaaagccggccacttggagcacagaaggcaaggttaacgcaagtgatgtgggctgtagcatctgggctgtcccaaacccaaggctctatctccacccaacatgaaatgaagcggtggcagaacctttcccagatggggcctgggccaggaggatgacacagtggattaaaaggagtttttggtttcccttaagcatagttgtaaacttgcatcttacttgctagaagcaagaagtcagtattttgaggggcatgtattcatccatcaaaccaactttaacttaccatctagaccagcggttctcaactgaggatgatgttgccagcttcccacaggggacattgggcaatgtctgcagacattttattcatacgttgtcacaatacagggaggttctactggcatgtgacaggtagagcccagggatgctgccaaacacctgcaatgccca

SEQ ID NO: 78535 - DNA, 2284 bp, Homo sapiens
aaaatacataggattccaaaaaaacccaaatatatctcaatatagttatcagccaggcatggtggttgtaatcccagtgctttgggaggccaaggtgagaggagcactagaggccaagagtttgagaccaacctgggcaacatagtgagaatccatctctttctattaaaaaaaaactaccataattttgaagttgtgatgtgaaaaagatgatatttcaaggcatctacaacaactgtaatgtaataccaaaaaaaattaacttctccaggttataaagtctcaggtaccactaattcaatggtgtggtttgttgcatacattcttaacggaaggaaatgttagatttcagtgagaggttactgaaaataaagatgtgtttctacctcccattcaagttgaaggacgctctgaattctaaccaccaacccattggacatccatggatcccagggtaaaaacccctgtttctagacaaaagttcttctaataacagctggcataaagccactttagttattgttgttgccatggtcattgtcatcattttaggaggtggcacggataatcatgaagtttttctactactttagggcagatggctttgccacatactggcactgtgacctgggcaaggcaggtgcctccttgagcttggtgccctcatggtgcttctcctggagaccctgacaggagagctatggaagggaagagccaggagaaaaggaggagaccatttctggacacatcctgccagttatcattccagcctgatgcagatcattatttataaactataactactcattctctggattttattgcttgttaagagctgagtgtaacatctttaattagagtcaggagttggatgcataagagagagagacagaaaacatctgaaattctgaatctaaaataaaactctttaaatggattatttttctaagaaaaaaatctttagatactgattggggaaaaatctttgttgtcttttttttggttgaattttgagcctgtgaagtttgtcctgaatccaacggttccataattcagggtttgtctgcttccttgcaaaaagcagccttcctgagttctgcaaggtatttgtatttatactcttgacatttaaaatattttcatatctcctatctctacttctccccaaaggacttacggggttgatgtggtcaacttttgcttgagttagccagagaaggtgcattttgcttgtaatgtacatttctttgctgcaggacttctcagagcctctgtatggtaatatgaattgggaagtccagccaggggacaaagtagtcaacacttctcaaacttgtgtgacctgcttttttatctatagaatttctcatagggctagtgagaaaatgctaccttagataaacactttaaagagaaacatttttcttaggaagtgtttacagtcactgtaattatcaaacaacaaaaaaacagggaaagtagggggtatgacaggctgaatctagaatggggacagagctgccctagggggattccacggattaaaaaaaaaaatcatcttacctgccttattgaacttgggattgtttataaaggttaaataacattcccaggtggcctgctgtggtttcagagccacttgttaggccctgggtcctctggaaccactcaggactgtggccccacctctgaggttggcctctatagctatactgaatggcctatacatatcagctctctcgtcttcctcccacatttcttcaaggcccaccctgccccctcccacagaggtgctatttgctgagactgtttttctaaagcagatggtctagaaaaagccggccacttggagcacagaaggcaaggttaacgcaagtgatgtgggctgtagcatctgggctgtcccaaacccaaggctctatctccacccaacatgaaatgaagcggtggcagaacctttcccagatggggcctgggccaggaggatgacacagtggattaaaaggagtttttggtktcccttaagcatagttgtaaacttgcatcttacttgctagaagcaagaagtcagtattttgaggggcatgtattcatccatcaaaccaactttaacttaccatctagaccagcggttctcaactgaggatgatgttgccagcttcccacaggggacattgggcaatgtctgcagacattttattcatacgttgtcacaatacagggaggttctactggcatgtgacaggtagagcccagggatgctgccaaacacctgcaatgccca

SEQ ID NO: 78536 - DNA, 489 bp, Homo sapiens
attaaattaaagtaaaatttaaatagctcacatgtgcctagtgactactgtattgaacaacacaggtctaaaagaagccatatgcctttaggtcccaggctctccaaggacacactgagagatggtgggctcactgctctcctggaaaatgattaggcatraatccctattacttctcacccatattcacgtgccagacaggctaactggtgccctgttccagaccaaccgacctaccttccttccttccttcttttctttctttctctttctttccttccttcctttctctctttccttccttccttttctttctttctctttctctttctttccttcctttctctctttctctttccttccttccttttctctctctttctctttctttccttccttcctttctctctctctttccttccttcctccctccctccctctctccctccctctctccctccctctctctctctccttccttcctttctt

SEQ ID NO: 78537 - DNA, 602 bp, Homo sapiens
tgactgaaagggggaaattgttaagttaaattaaattagatttgatctaaggcatttcttttaacatcatatggaagaaaaatatttaaacaaagtttggctttgctaaaaagcacattatatgaaagggtatctgaggcaggtttaccaaacttttaaacacacattggttttgacgtatgtgtcacagcagctattgtttttttttaataagtgtacatagagttttccaaaagcatccacctgacactttcaaatgtgttttgcaactttattcatgtgcttggcagattctgtgcaggaataacttaactygtcatgcatttggcattccattacatattgttatatgattacaggaaacaaacaagtatcctctacactactttcagtgtttttattcagttcattgggtaaaaaaaaaattaagatgcacacagtgatagcacagatatacctatactgtggttcaaatcatgtatagcaaatatttgttcactacctctctcttcactaccaatacttcaatttgaaacattattatcattactagaaatattggaataaccacctgattcatcactctacatccagtcactccg

SEQ ID NO: 78538 - DNA, 998 bp, Homo sapiens
ctatatagtatgaaaagtaatgttataaattttgcctttcaaaaaaaaagttaatgatgctcaaaagagatagttatcttgttatatagtagttactattaagtcttcacttgaacagaatataattgatcaaactaattaattcataattgcgattctcctgttttacagaactggccctaagtgaagttacgaaataggcattttatcttaaatttttatttcacttatttttattgttttcttggtactcgctagttacaaccagtcttaaactttgtcccccattctttgcaatgcacttctctcccatcttaacatcctctacccaggtacccattttaacattttagcaaggtccaggttgtgagatcattcagtgctctcctgtgtgtctttcataatcttaattcatcactgacctcatcttaaagcaggctaaaaaataatttcaatcaatcagttaataactgatagttaagaatcccagtgttgttacatgttttaaaatgttgattagggcttggctgaaaagtagtttcagttgcatcttataccatgtagactataaataagcattcatgtttatgtcagatatgaatatatataaacatcgatatgtgtatttttaaaaatttaacataaatatcttacgcctacctcccctttgttaagtgccaatgtagattactttctctgcctatgaattaattgaactcttgtgctcacaaaaaaaaaaaaaaccgcttaaaatgattttttgaaaaatattgggctgtttttaaatattaactcgaacmctgatgtagtccgatgtacttcctgggggcagttttatcactggacaatgatgaactttgttgagtaccacacatacacagcattgttgctttgccaccttgtcgaatctttttagatcttgtactgactataaatagttacctttgctcctctgggaaaacaggaataactctgactttgtataattttggaccttc

SEQ ID NO: 78539 - DNA, 865 bp, Homo sapiens
atttgagaagattcactgagagccacactgaataagaacgcagatggatctgaatgagaatacaaccrcaaagggtttcagaagtgctgaagctcaaccagcacaacataaaaacggccacagcaggattcagcagaaaggaaggacaaagagcaggggcctggaaagtaaagctttgataatttctgcttcaaaatctgacatatctcttgtaggattttagaaaatgattttgctctattgattcacttaagaaacatgaagcagaggttgggcatggtggctcacgcctgtaatcccagcactttgggaggcctagacgggcagatcacttgaggccaggagtttgacagcagcttggccaacatggtgaaaccctgtctctactaaaaatacaaaaattagccgggcatggtagtgcacgcctgtaatcccagcagggttatttgccaaagttaaggaaatatgcccgggagacaggtctacgcctttctctgaagataattttgagggctccaaatttaaaggggaaagggcaggttactgagaagtacacaattttcatgtaaggggggttagggaaaatagtaattcacgcctttgtctggcccagtgaatctgcactttatttttttagagacagcctctcgctttttcacccatgctggagtacagtggctccatcatggctcattataacctcaacctccagggcttaagtgatcttcctgtctcagcctcctgagtagctgggactacagtcacgtgccactacgcctggctaattttttgattattattattattattttttgtagagacggcacttttacataagataacccaaacaaaatggggcaggaga

SEQ ID NO: 78540 - DNA, 865 bp, Homo sapiens
atttgagaagattcactgagagccacactgaataagaacgcagatggatctgaatgagaatacaaccgcaaagggtttcagaagtgctgaagctcaaccagcacaacataaaaacggccacagcaggattcagcagaaaggaaggacaaagagcaggggcctggaaagtaaagctttgataatttctgcttcaaaatctgacatatctcttgtaggattttagaaaatgattttgctctattgattcacttaagaaacatgaagcagaggttgggcatggtggctcacgcctgtaatcccagcactttgggaggcctagacgggcagatcacttgaggccaggagtttgacagcagcttggccaacatggtgaaaccctgtctctactaaaaatacaaaaattagccgggcatggtagtgcacgcctgtaatcccagcagggttatttgccaaagttaaggaaatatgcccgggagacaggtctacgcctttctctgaagataattttgagggctccaaatttaaaggggaaagggcaggttactgagaagtacacaattttcatgtaaggggggttagggaaaatagtaattcacgcctttgtctggcccagtgaatctgcactttatttttttagagacagcctctcgctttttcacccatgctggagtacagtggctccatcatggctcattataacctcaacctccagggcttaagtgatcttcctgtctcagcctcctgagtagctgggactacagtcacgtgccactaygcctggctaattttttgattattattattattattttttgtagagacggcacttttacataagataacccaaacaaaatggggcaggaga

SEQ ID NO: 78541 - DNA, 565 bp, Homo sapiens
tttcttttaaaatacctgacataatgacaaaatattaacatttttcaaatctgaggattgaaaacactggtctcaggttttttttctattttctgtttraattacaactgaaaaaatatataaataaaaaagatataggaaaaaagaagacaaaaataagtaagggtcaccagaatgtcagctccatagggcagacatctttggttggtttggttttactggcctatcacaagcactgagaacagtacctggcactcagtaggtactcccatagatatgatttgaaggtttatggcactcatgtcactatttagaagttgagatgcaaggtcatacaagtagggagtgaaaaagctgggatcaaacctaaagtctggaatattttccttgtcccatgttacctagaaagtctagatccttcagtgttttttttttttttttgagacggagtcttgctgtgtcaccaggctggagtgtagtggtgcaatctcggctcaccacaacctccacctcccgggttcaagcgattctcctgcctcagcctccccagtagctggaactacag

SEQ ID NO: 78542 - DNA, 565 bp, Homo sapiens
tttcttttaaaatacctgacataatgacaaaatattaacatttttcaaatctgaggattgaaaacactggtctcaggttttttttctattttctgtttaaattacaactgaaaaaatatataaataaaaaagatataggaaaaaagaagacaaaaataagtaagggtcaccagaatgtcagctccatagggcagacatctttggttggtttkgttttactggcctatcacaagcactgagaacagtacctggcactcagtaggtactcccatagatatgatttgaaggtttatggcactcatgtcactatttagaagttgagatgcaaggtcatacaagtagggagtgaaaaagctgggatcaaacctaaagtctggaatattttccttgtcccatgttacctagaaagtctagatccttcagtgttttttttttttttttgagacggagtcttgctgtgtcaccaggctggagtgtagtggtgcaatctcggctcaccacaacctccacctcccgggttcaagcgattctcctgcctcagcctccccagtagctggaactacag

SEQ ID NO: 78543 - DNA, 565 bp, Homo sapiens
tttcttttaaaatacctgacataatgacaaaatattaacatttttcaaatctgaggattgaaaacactggtctcaggttttttttctattttctgtttaaattacaactgaaaaaatatataaataaaaaagatataggaaaaaagaagacaaaaataagtaagggtcaccagaatgtcagctccatagggcagacatctttggttggtttggttttactggcctatcacaagcactgagaacagtacctggcactcagtaggtactcccatagatatgatttgaaggtttatggcactcatgtcactatttagaagttgagatgcaaggtcatacaagtagggagtgaaaaagctgggatcaaacctaaagtctggaatattttccttgtcccatgttrcctagaaagtctagatccttcagtgttttttttttttttttgagacggagtcttgctgtgtcaccaggctggagtgtagtggtgcaatctcggctcaccacaacctccacctcccgggttcaagcgattctcctgcctcagcctccccagtagctggaactacag

SEQ ID NO: 78544 - DNA, 1598 bp, Homo sapiens
tgcataggagcagccagaacaaaaaatgagatatgccaaaaaagtgcttaggataaactgtagtcactgaatctgaagagctttctcagtggtgactgttcagactggcacattttaaacttcgatgaaatttgaaatgtcttaggatctaaattttaaaattcatgctgtcaatggggcaaattatatttgtgttaggaagaatcccgagaatttggcaacctctttggctcttgcattttgaggattcagaattagaaatggcccacttttagtaaatgttgggcataactgtcttcctttggacagtctccttgttcttagtgatgccayagtgatcttcaacctcttggtcttgcttagtactatttctattttaagaaatatacaatttaactgaaggaatttctaaaatttacataaacgtttttccctcgtcaccatatgtattcattcctgaaaactcatgtagtttttttaaaaacacatttacctatctttccccattcctgcccaagtctttatcttatcttatctttattttattttattttattttgagaaggagtctcactctgtcgcccaggctggaatgcagtggcgcaatctcggctcactgcaacctctgtctcctgggttcaagcaattctcctgcctcaccctgctgagtagctgggattacagtcgtgcaccaccatgcccagctaatttttgtatttttagtagagacagggtttcaccatgttagtcaggctggtcttgaactcctgcctcagcctcccaaagtgctgggattacaggcgtgagccactgtgcccagcctgagtctttatcttgactcctcccttggttggattgtgtcatagaggcagttactggctgatttagaagagctaatggtggctttggtctatgcatttttgtgttttgtgaaatgtctttctgtgatttctgaactagtgtttcataagttattttccattcagccattgctggtttattgctcttcctgattactttcaccagtgagacctttggataggaaagaactattgtctttacaaggattaagcacctataagattgccatgaaacccacttcatgttgcaggagattcaacctttgaataagattcaacctttgaataagatagagtattaaatatttgaatctatattaattgtgcattgctttctaaaggttttgtattttaaacatctattttttagaggataaaaattgtacttatttatagtgtacaatatgatgtcctcacatatgtctacaatgtagaagggctaaattgagccaatgaatacacaggttatctcacagaagcatcctttttctgtggtgagaacacttaaaatccacttgcttatgtcatgctgtctttgattgtcctgatattaagaaacttcttggctgggcatggtggctcaatcctgtaatcccagcactttgggagcccaaggtgggtggatcacaaagtcaggcattcgagaacagcctgactaccgtagtgaaaccccttctctacgagaaataaaaataaaaataaattagctgcgcgtggtggcaggtgcctgtaatccca

SEQ ID NO: 78545 - DNA, 1159 bp, Homo sapiens
tgtgccggggctgcgggcagagctgcctgccagtcctgcgctcagagcagggggcagcgcctgtcggggaggctcaggtcccccgggagcccacggggtgggggaggctcgggcatggtggactgcaggtcccgagccctgccctgcagggaggcagctgaggcccggcaagaatkcgagctatttgagggtggcgtcagtgagccggcactgctgggggacccagcgcaccctccacagctgctggcccaggtgctaagcccctcactgcctggggccagcccgctgccccgaatgcgaggcctgccaagcccgcaaccacctggaacttgcgctagctcgcgagcgccatgcgcagccccggttcccacccgtgcgtctccctccacacctccctgcaagctgagggtgctggctccagcctcagccagcccagagaggggctcccacagtgcagtggcaggctgaagggctcctcaagcatggccagagtggacaccgaggccgaggaggtgctgagagcaagcaagggctgctagcacgttgtcacatctcactaagaccaggagaataccaggcaaaccaggatggcttttcaccctagcctgactgcaaagctctgttacattatctttaagccaagaagcacagagctcagatagatctcccaggagggcaaaggactctcaagaatatcctaagatgctcaacatttaccttctgcctgaaaatctgttctcctctctgcaagtgggccctggagttagccctgtaggactgcgtggatggagctaaagtctctgatctgttttcccattctaagccaagctcctgccactggcccccctcagttaacacccctagaagatccttgtcctgtgtggagagcagagccttgtcctatgtgggacagacaccctggttcctgtccagctaggcaaatgctattccttccagctgaagtaatctccaaatcctcctccctccttaagacaccagatagaactgcttaaaaaattagaataacctctacatcttcctagtaaaatcctttctcctaagagtgtttttttttttttttttttttttttttttttttttttttagatggaattttgctctgttgcccaggctggagtgcagtggtgtgatcttggct

SEQ ID NO: 78546 - DNA, 1070 bp, Homo sapiens
tgccatgcagagtgcacattgcaggagaacgtccagctgagtgagcaagtgaggactgaaatgtagcctacacttcagygactaagccatgctatgggatgctcaaaaaggacacatttcctggtatgcgatggcctcctaagggttagcagaggctctggatagactcacacttgaaggaaaggaacagagggaaggaaagcaagcctgggccctacttgggaagagtatctagactaggaggggagaagggcaaattcattaataatttctctatttctacttggtaaatgcaatcacattcacctgggcagcaaagagccactctaccctgggtgtggaaagtccatgaaggcttgagagggatggagaaggatggctgagtagttctgatggatggataaaggcattaggatggataagagggtgagggcgttccaggaaggggaaacagtgtacacagccacatgggggtggaaaataacatggaaagtgatgtaaagtgcaggagtccccaagagcattcccacttctgacaccaactacaattctgaggggtccctagctccaaacccaggttcagtaatttgctagatggcctcagagaattcattaaaagctattgtgcttatggttgtggtttgtttcagtaaaaggatagagattaaaataagccaagggaagaggtgcattgggcaggggtccaagagagttccaagaactacctcccactttcctctcccagtggggtcacgtggacagtgcctacttctcccagaaatgatgtgccacaatacacatggggaattgccagccggggaagctcagccaagtcttgatgttcggagatttggaacttagtcataaagacatttttggtcaccgacatgtcctgaggcttagtctccaatctcctccagagagtagagctgatatgtgcagtgatcctaaagcccctactcgtaaattacattattaggtgtggtctatctggtatggttcaaacaccctcaggcaaacaaagatagtcttatcaggcaggaaattccaaacacttaatcacctcccag

SEQ ID NO: 78547 - DNA, 1070 bp, Homo sapiens
tgccatgcagagtgcacattgcaggagaacgtccagctgagtgagcaagtgaggactgaaatgtagcctacacttcagcgactaagccatgctatgggatgctcaaaaaggacacatttcctggtatgcratggcctcctaagggttagcagaggctctggatagactcacacttgaaggaaaggaacagagggaaggaaagcaagcctgggccctacttgggaagagtatctagactaggaggggagaagggcaaattcattaataatttctctatttctacttggtaaatgcaatcacattcacctgggcagcaaagagccactctaccctgggtgtggaaagtccatgaaggcttgagagggatggagaaggatggctgagtagttctgatggatggataaaggcattaggatggataagagggtgagggcgttccaggaaggggaaacagtgtacacagccacatgggggtggaaaataacatggaaagtgatgtaaagtgcaggagtccccaagagcattcccacttctgacaccaactacaattctgaggggtccctagctccaaacccaggttcagtaatttgctagatggcctcagagaattcattaaaagctattgtgcttatggttgtggtttgtttcagtaaaaggatagagattaaaataagccaagggaagaggtgcattgggcaggggtccaagagagttccaagaactacctcccactttcctctcccagtggggtcacgtggacagtgcctacttctcccagaaatgatgtgccacaatacacatggggaattgccagccggggaagctcagccaagtcttgatgttcggagatttggaacttagtcataaagacatttttggtcaccgacatgtcctgaggcttagtctccaatctcctccagagagtagagctgatatgtgcagtgatcctaaagcccctactcgtaaattacattattaggtgtggtctatctggtatggttcaaacaccctcaggcaaacaaagatagtcttatcaggcaggaaattccaaacacttaatcacctcccag

SEQ ID NO: 78548 - DNA, 1070 bp, Homo sapiens
tgccatgcagagtgcacattgcaggagaacgtccagctgagtgagcaagtgaggactgaaatgtagcctacacttcagcgactaagccatgctatgggatgctcaaaaaggacacatttcctggtatgcgatggcctcctaagggktagcagaggctctggatagactcacacttgaaggaaaggaacagagggaaggaaagcaagcctgggccctacttgggaagagtatctagactaggaggggagaagggcaaattcattaataatttctctatttctacttggtaaatgcaatcacattcacctgggcagcaaagagccactctaccctgggtgtggaaagtccatgaaggcttgagagggatggagaaggatggctgagtagttctgatggatggataaaggcattaggatggataagagggtgagggcgttccaggaaggggaaacagtgtacacagccacatgggggtggaaaataacatggaaagtgatgtaaagtgcaggagtccccaagagcattcccacttctgacaccaactacaattctgaggggtccctagctccaaacccaggttcagtaatttgctagatggcctcagagaattcattaaaagctattgtgcttatggttgtggtttgtttcagtaaaaggatagagattaaaataagccaagggaagaggtgcattgggcaggggtccaagagagttccaagaactacctcccactttcctctcccagtggggtcacgtggacagtgcctacttctcccagaaatgatgtgccacaatacacatggggaattgccagccggggaagctcagccaagtcttgatgttcggagatttggaacttagtcataaagacatttttggtcaccgacatgtcctgaggcttagtctccaatctcctccagagagtagagctgatatgtgcagtgatcctaaagcccctactcgtaaattacattattaggtgtggtctatctggtatggttcaaacaccctcaggcaaacaaagatagtcttatcaggcaggaaattccaaacacttaatcacctcccag

SEQ ID NO: 78549 - DNA, 1908 bp, Homo sapiens
aataacactatttggctcctttaaaagaatttatttttaaaaatagatcatgcaggagggtttcataaactgtaggatgaattcttataggccacaggattcaacgcttgagaacatcacagctaattgccctctggccaaagtggagagtggagttgacacaatttcaagtatgtgatggcagatgacaagtcattgttaatctctaatactcagggaattcacctccctccagcctctaggtgcaaatatttgactatgaaatggcacagcctgatgtttactgacagaattatcaggtactgctctcatcaagacttcaacagcccattacttgaacctgcagtcctcaagtgaataccaaattaattaagtcttaggaaagccacatatccaggaagagaaaggggattcctaagcacctactcagtttctagcacaacccatcaatttggccaccagatacatactcattacagtcggccctctgtatccacaggttctgcatccatggattcaaccaactgtggattaaaaatacttggaaaaaatggttgcctttgtactgaataagtatacgcctttttttcttattattccctgaacaatacagcatcacaactatttacacagcacttacattgtattgggtattgtaagtaatctagagatgagttaaaatatatgggaggagtctatgtgtaggctatatgcaaattctatggcattttatattagggacttgagcatctgtggatgcagtatctgtgcaggatcctggaaccaatgtcccatggatcccaaagggcgactgtgtatgatttctcctccacactcaatactcttacttcctcttttctgtgacaatcccatccagtcactgtctccatctcagtgttagaatttcggttcatatcctaacctaagatctgaaggctatgatcaaaatggtaagatatttgtcaccactcactcccaaaatataattgtgactcagggacacagtgaaagggaccaattcaaactgctgaagaagtaactgctaaccaaaatttctacacatagcaaaagtgtttttgaagaaacagcataaagcaaaatgacttcagagcaaaaataagaaatttaatggaaaattaacctgcataaaatgaaattcttaaagaaaattctatttaaggatgacaaaaagtgataccaggtgaaagatctgtgatgagagaagaaatgtggatccagagagaaggcrcatctgtggattaaaaaaatactcattatctgtagaaaacgtgacaaatattccactgtgaagttaaaaagatggaattatcatgtatagcctcgataacatatatactgagatgggataaaatgattaatattctaagactctttttaaaagtattaacagataaaattgtatatatttgccatgtgcaacatgatgttttaacatgtatagacattagaatgactaatctagctaattaatatattcctacctcacacagttatcattttgtaatgagaacactttacacccaccctcttagcattttttaagaagactatatattattaactatattcaccatgttgtataatagatttcttgacagtattcctgctaactgaaattttgtatcctttgagcaacttttccacaaagctcccatcccctagtgaccattctaccctttactcctatgacttttttagattccttatatgagatcaggtaaaatttgcttttctgtgcctggcttatttcacttaacacagtgtcctctaggctcatcaatatgtgccacattttctttacccaatcatatctcgatgaacagttaggttgttcccatagcttagctttcatgaataacattgcaatgaacatcagattgcagctat

SEQ ID NO: 78550 - DNA, 657 bp, Homo sapiens
aacctcagtggggagagcaggtacatacaggctgccccactgggaaccttgaatgctgaacagctgaggatcagcctaattgattccaacctgaggtgcagagccttattttatgagggcaaaagaaaaaccatgagaaataattgtatccaaaaccttcagaaagaacaaataaaccctgcattattctatttattctattgccccattttacctaataagttataaagtatacaaaaagtaaaatcatggctcccttatataaagactccaactaaatatgtaatgtggtcaaagcctggcgaaagtttaacaaaataaaaaagcaagcaaacgcagagtatatgctaaatatattgtcttgattcatagtgtaactgtctactgaattccttcagtataggcttgataagaccttaagcactgcatatcagcctgtactgcaagatttattgctgaatagtctttttatactttagagagtattttatttatttcattttccattaataaatcttctgctctttcacgtggacatctatggctttttcttttaaaataacgacaggctctatgactccctactctcttccctctaaatatatagaatggggaragtgtagcaagctaaagcacacattggtttttgtgaaaatg

SEQ ID NO: 78551 - DNA, 806 bp, Homo sapiens
caggaaagggcaggccccggggactgagaccctctgactgaacaggcgtctgtgacctggcctcacgacctgggacatgccatcctcaggccacagacactggactttggtcaagtactagcctccaggtggggtcctggtgcaagcagacagcaacccccgagccgtgactgcggttctcagtttggagtttggtcaaacaaccaatggggacagagtcttggggtcaggtccagcaggaactgccacccctcccagggacagcctgtctctcccactcaccatcgctggtgcccacgggctgctgaccacctgccaagtcctcctgtccctggaccagcctctcaggcagcaggtcttacctttgcctccagggcactgatcgatggcagctttgtctcactgtaaggcaacccagacagagctgagggcctgtgctgggccgggagctgtcctcctccttccctagcagtcctagggaaggaccagccgtgtctctccccaccccacccctggtcttagcccaggagacacacagggaaggtaggaagagggtctccctgtgggctgacgcctgtgaagggacaggacctgggagaagaggggtgtgtgggtggggcagggaccactagggccctgtagagcatgggcttgggctacacaacagggctgcccctcctgggctagaggcagtgccctctgcaggagctgagaawgtccagtcctgagaaaggacgtgtatggcccagggtgggtgactgggccccaaaagcagtcctcgagggagtgaccacattaccaggcca

SEQ ID NO: 78552 - DNA, 589 bp, Homo sapiens
atgtcctgtgcatcatagggtgctgagcagcattcctgagctccatccaactagatgctactagttgtgacaactaaagatgtctccacacgttgctaagagtcccctggacgtaggtcaccttgattggttgagactcactggtacagagtaactggacacagggttttgcagatattggtgggggacactgcttaggtggggactacaggtttctcccacttctgtcccccagggcaaggaagtggagcaacagtcagcctgcagatttggcacatatggggcggtcaagagaagaccccgctgggatgggtaagtgtctgctagaatggcctgtggctcagggattggctctgccactcaccacctaagagatcttggtcaggtgcaggcacctcttcgagcctcaatttcttgctttagaaaatgatgacaatcacgatgacttaaaacatgcagggactttgtgggtgcttaaaatgtgtgtttacaaggctgagcgcggtggctcatgcctgtaatcccagcactttgggaggccgaggcyggtggatcacttgaggtcaggaattcgagaccagccttgcca

SEQ ID NO: 78553 - DNA, 1020 bp, Homo sapiens
tatatgtcctttggtgaaatgtcatgattttcttagtataagtttttcacatttcttattaaaattatgcctagatattttagttttatcactatttcagatgaagtttcttcattacattttctagttgagtattgctaatatttaaagttgattttgcatataagccacattatgtactgtctctttagttgtcatggtttttcaagggattcactttgattttctagttatataatctaacaatagtggcagtttgttttctccttatagccaatttctctttcttgccttgttgcattggctagaatttgcaaagttgagtatcattcatgatattcaacatccttattccctttttcttctttagcagaaatgtttctgatataataaaatggacaaagttcttttctaatcttgatctaccaataattaaaaaaaatcaggaatgggtattaagtattaatgtttttgtaacatctgttgaagggcattttctgtagtgaatttcagttacctattttctgatccaattatatgttttataattggatatgtatttactatttttaagtaatatgtatttgttaatatgtatttaacatttttgcatccacccaatctgtggaattggcctgatgcaggggtggagggagtgtgcacacataacttctatagcagaatataatttttttttgctcagctatttggcatttcttacctcagaaatattttaaaataacaaaagtgtttattaaaatattggttttaatattacatattttttctctacggtcttcattatgtatrtctcctatttgcagaaagatgaccacctgatatttctgaatggtgctaatcaaactaacagcatttagagccacttataactgctactgatacttaaactaaaaaataaacaaataagctaagcttcccgagaagaaactcattcacttgccgttctgtgccattcagagggcatctaattaaaattctcagtgccaaaatgtttcacca

SEQ ID NO: 78554 - DNA, 560 bp, Homo sapiens
gattatcccaatgaccacatagcaaagtagcttgttgctactaaaaataaattatcaaacagcaaaatgcagaaaactgttctggaaagccaaagcagttctgcgctgggtgaaaatctaaacgggtcagagaagcagtgaaggcagacaggcccctcttggtatcagctggcacctccaactggcagcacctgaggctgtgtccccagtataaaaatagaaatgcacatcaacagcccagaaataaccccagtcacacaacacacagaggaggaaggagtcatcaaaaygggcatcacaaacagccggcaggccagggcacctggaggagcagctagcgggtctctgggaaaaacttttttttttttttttttttgagacagtctcgctctgtcacccaggctagagtgcagtgcccccatctctgctcactgcaacctctgcctcccaggttcaagtgattctcctgtctcagcctcccgagtagctgggatcatgggcgtgtgccaccacgcccggctcatttttgtatttttgtattttcttttttttgagatgga

SEQ ID NO: 78555 - DNA, 1296 bp, Homo sapiens
tcttctctacaattttggaggcagaggttggtggggggggaacttaagaagcagtaatgaggatggttttatagctattccatagccttcctctttcttatcctcgtatgtgttctcactgtttttggtcaaattttactttgccctttttgttgttcctctgcaggtcattgttgaaaataaattatctgaattataatacgaatctgcatggttttgatttatttattttttttctttaggagtattcacattgtgtgtaggtacagaaagggcagccaattccatttttccagggttaaggttttagtaggatagtgggacgaagaagagggatcaaggagtcctgattatctttcaaggctcagtttaactcttaggtattttgtactcatccttttctcccttctctctcccttcttagaatcatatttcttatttttaaaagttttaaaaacattttttaatactgctgcttgcagaacaaggctayctgataggcagtgtgcccagagtagccagaagaaattagaagttatatttcttcttggtgttacctcagcccgttacttctaaggccttatgatccttatcatgctttttgtttggtgttttgttttgttttcagacggagtttcactcttgttgcccaggctagagtgcaatggcacgatctcggctcactgcatcttccgcctcctgggttcaagtgattctcctgcctcagcctctcgggtagctgggactggctaattttttgtatttttagtagagacggggtttcaccatgttggcaggctggtcccgaactcctgacctcaagtgatccacctgccttgtcctcccaaagtgctgggattacaggcgtgagccaccacgcctggcctgttttgttttgttttgttttgttttgttttttgagacagtctcactctgccacccaggctggagtgcagtggtgcaatcacagctcactgcagcctcaacctccagggttcaagtggtcctcccacatcagcctcccaagtagctgtgactacaagtgcatgccaccacacctggctgatttttgtatttttagtagagacgggtttcgccatgttgcccaggctggtctcgaactcctgagctcaagcagtctgtctgcctcatcctttcgacataccaggattataggtgtgagctattgtgcccagctgtcatacctcttatactcagtatagatatctgttgctcctgtaattccttaaacaaggagtatatatttttcattgttgtgttcctgatacccatcat

SEQ ID NO: 78556 - DNA, 588 bp, Homo sapiens
gatttgtctatggaattgccaggacagagttacaaaatgagtttgaaagcctggaaacagagcctgagttacagaaatttttgtgctctagttttttgcayatgtaaatggattaaaacagtgtgtgatatttgatttggcacactagatttgaaagtgaaagatctgctttgtgaaagactgctgaattagattcctggaaactttccctatcactccagcaaggtggactgggtgatttcttaactcttgttaatggatggctaacctcaatatctttgctttacatcctgatgtctttaggtctaaaataaacaaacaaattcagaagtagtttctcctttaatataaatcaaaaaaaaagcagaaagaaacatcatatatcaatgatgatgtttcctaaaaatatatttagaataattatgcaatctttaaacttgcacgtcatttttcttcttttgaataaatattgatcaggaatactatgtaaagcacaactcaaagaaatgcaaacaatgatgcaatattagcacatcttcaactacaacaaaataattttatttttattttttataatttcagctttta

SEQ ID NO: 78557 - DNA, 588 bp, Homo sapiens
gatttgtctatggaattgccaggacagagttacaaaatgagtttgaaagcctggaaacagagcctgagttacagaaatttttgtgctctagttttttgcacatgtaaatggattaaaacagtgtgtgatatttgatttggcacactagatttgaaagtgaaagatctgctttgtgaaagactgctgaattagattcctggaaactttccctatcactccagcwaggtggactgggtgatttcttaactcttgttaatggatggctaacctcaatatctttgctttacatcctgatgtctttaggtctaaaataaacaaacaaattcagaagtagtttctcctttaatataaatcaaaaaaaaagcagaaagaaacatcatatatcaatgatgatgtttcctaaaaatatatttagaataattatgcaatctttaaacttgcacgtcatttttcttcttttgaataaatattgatcaggaatactatgtaaagcacaactcaaagaaatgcaaacaatgatgcaatattagcacatcttcaactacaacaaaataattttatttttattttttataatttcagctttta

SEQ ID NO: 78558 - DNA, 466 bp, Homo sapiens
tttttttttttggagatggagtctcactctgtcacccaggctggagtgcagtggcgcaatctcagctcactgcaacctccacctcccgggttcaagtaattctccagcctcagcctcccgagtagctgggactacaggtgcccaccaccatgcctggctaatttttgtatttttagtagagacagggtttcaccatgttggccacgttggcctcgaacccctgatctcaaatgacccacccaccatggcctcccaaagtggtggggttacaggtgtgagccactgygcctggccagccaataaactttgaaccaatgcaccctcctgagttgtctcagccttcacagcactctgcaaaggtggagaaacttaagagtggggaaacgatgttcagggtttctcagtgttcagaagaacacgggtcccaggctgcttctgccatgaacaaatactcatgatattttaa

SEQ ID NO: 78559 - DNA, 702 bp, Homo sapiens
ttctgccatactcttctggctgaaatggtcacaagctgccctgattagaaggaagaaggcaaaagactcactgctagatgagagaaatgtctatgaatatttaagtcatattttagagcagccacatggtctgtcgtgacattattctctgctaacttcttttgcagcctattctatttctatttatactgtatgctgctattactrttaccttcacctttagattacttttaacagtgttatttccctccataacagccttcagtacacccccatttacttctgaataaagaagcaactcttaatttcaactcagctttccagtattttcttccactttttaaagcattcaacctgtgctagaccccaacttgctgctttctagaaatatatttgcttaggctgggtgcagtggctcacatctgtaatctcagcgctttgggaggccaaggcaggtggatcacctgaggtcaggagttcgagaccagcctggccagcatggtgaaaccccatctctactaaaaatacaaaaattagctgggcgtggtgctacatccctgtaatcccagctactcggaggctgaggcatgagaatcgcttgaacctgggagacagaggctgcagtgagccgagatcgcagcattgcagtccagcttgggtgacaagagcaaaattccatcccccccaccaaaaaaaaaaaaa

SEQ ID NO: 78560 - DNA, 831 bp, Homo sapiens
taccaatgagaaaccaaagcttagggaagtgaaatgacttgttcaaggttacattttctgggtccttttgtgccacactgttttcaggtttttagacagccctggggaaaaagtacctctggaaaaggaaattaagcaaggcttgaatgcttgggctactttagcttcgtgtgtgtgtgtgtgtgtgtgtgtgtgtgtgtgtgtgtgtgtgtgtgtgatgatagaactctagccttaaatattctcttatttgccctacagacaataagatcagattaattaattagttccacaagtgtttatttagtgacggacagtgttggaactgttgaggatataacactgaacaaaagaccaagtccttgccccatggaactcacattctatatgcaacacatcaataataaatagaatgtcaggtactgattagtgctaagaagaaaagtaaaggtgggtgaggggatcggcaaatagaaggggtgctgctgttttatttagggtggttagagaaggccttaatagtaaggtggcatctgaggagagacttgaaggaagtgagggagtgcgctaggtggaytggggtgcagactggcagagacaagtgtgtgcaggggccctgaggcagggacatgtttcccatgcatgacaaataacaaggtcaccagcctggctggagcacagtgagtagatcaggagggagggagagagatataggcaggaaatggggtgagaggatgtggtgaggggaggtgagggacggttaagaaaaatcctgcaggaccttgcaggtaattgaaagggctttatctcttagtggagagagacagggat

SEQ ID NO: 78561 - DNA, 1155 bp, Homo sapiens
accttcatatagacccatattcataaacaaaaatgttttcagggaaaaaataacagggaaaaaggcatttaattacaaataaaagtactgtttccaatatgcacagatttttttttttttttttttttttttttttaaccaacctaccaaagcaaaggcaggctgcagatggtgaaaactgagttgggaaaactgcacagatattttcccaaaacgttctcagcgatgctgcaaatgccattctgggtagccgagaggaaaagacagcaagcatcatcttgccaggggcagaacctattcccaagccactttgagagcaggagttgaacaaatatgatttagatgtttcccccgccctggaaacatggtcttgggttaaccggtccttggacaaatttaagaacagtgtctcctaccagggaaattatctcatgcaagaaaaaaagttcccttaagcatcaaattatttttccktaactttcttttagaaagtttccttttcaaagtttaggaggttacacagcatgttaaactcttgacgagatctaaggcagaggagcgaggaggttcgctgctgccagccttccaagagaacccagtcattaaggagccccaactgtcaccaatcatacggatccccatgtgggacacactttagcatgaacacaaccttgcctcggaaagcatacgtgggaaaatatgccaggggggtagctccccaattctcctgcccaaagatgtttgccatagactacgctgactggcccattcaggagcccctcgggtttccgctggacctacccttctgatttgagatcatccacgtgttttcccacctccggaggcttttattttctgcttcctcccttcttagtacagtgccaatcactgctctcccccgccgcccccctccccaaaggctctctgaggctgctccctttgtgattggcatctcattaatgaagaagggctggtgtctctcattacagttagagtgagtgagaggacctcagaactaatttacttgctctcactagggaagacacttgcctccatcaagaacttcactttcctgctgcctgtggcaataaaagaacccgttttgttttaacattaataaggtgagagaatagagaatttccaaaagaaattaag

SEQ ID NO: 78562 - DNA, 1075 bp, Homo sapiens
tgggtacacagagttttcaagaatttaaaaaagacgttgccttaaaatgtcttgtttggatagggccatttctgcatatmcacccccaaattagattatttttaaaaggttctattatctaaaaatactatgtaacattttaaaatatagtaaccatcaaggaaaacagagactgaatctaacaggaagaggatgtgagtgtcaaattgttggattatataagatggaaaggtaggtgcgggtgagccagcaccttccagattcctgagaggcagcaaagtcagggtgcctgtgcagaagtcaggccaaagcttttctctctgtgggaaatcttcagcaaacagccagttccctgagctcaggacacaccacatctaccaccacatttcaggaggcttacttggagtttcagtgtagaagttgtcctcaaaaaaattaagcaaattaatctagaaagccttaacctgatttggccagcttagttcaactgtgtcagagggaggttgagcaagcccttccagcttgtctgagatgtgataatcattctcattctctctctctctcttaatcactcgtacatatccacccgtggacaaacacacgtgtacacacacccccctttacataaccaacacatgaacacttacacaaccctacataccctgacacgtgaacagttaaacatacttacaatcacacacacacccacatacactcacatacttacagctacgcacacacacgtgcacttacatgcttctataaagactatcctgttatcacccttcagagatgcagattcaaatattgccccataccccatcatagtattttctttcaaaacaaaaactactttcttttgacagaaatctccgtctttgaaagggacactctcataaacattaggccttggggaccgtgtggaaaataagcacacacctgctctgcggccggcccctttattgccaagatggcattagcttgctcctctggaggaattctggctcagaactttcataagttggagactcaattatgcttcttatgagttccctaaatttggaaatggaggtaa

SEQ ID NO: 78563 - DNA, 1183 bp, Homo sapiens
tcagagatttagccacaaaattagtggtggctgacggtttataatattgaaaaattggaaacaacctgatttccagacaaaaattataagacatatgtcttaagtagaatgtgatatattcatgcagcctcctgtgctgtcctctcactcctttgctccatctgttatttgaaaggccctgggaatgagacctgcctttttagcctggcctgcaaagccaccttccataggtccttatcactttcygctgcttccctttgccgccactcccaggaccctctgcttcccaacatgccagcccagtacttcctcaagagtccttttattctatcttcttgtctagctcttgaccttcctgagtttttattaaagctctgctgtgctgtaggttacatcaaagagtgcctcctccatgaagcccctcaaatatcttaacccttggtgatccacctgtcctcgctcccctgggacagccacactggtttcctccagtgcggcagttgtgaaccagcctcatttcttagctgtttcccccgcctgtgggcggcaagccactcaggtgccaaggcaagagactgaaggcaaaaactgttccagtataataaagaaaatatacagaataagaatagttatactagaaatagattatagatatgattatatatgaatatcattaatcattagtttgttaacattactctttattccaatattataataatctttgttctacaattataacttaggaaaaaccaggccatacagagataggagctgaagggacacggtgagaagtgactggaagacaagagcgtgagccctctgttacgcctggaaaaggccactagagggctccctagtctagcggtaacgccagcacctgggaagacgccccttacgtagcggacctcggtctagcggtagcgtcagtgccaatggaaggcactatggagtctccctttccttgggggagttagagaagactgctgtaccacctcttgtggaaggcctgacaccagtcagccccgcccacagccatctggagcccggaacgtctccctgtgatgctgtgcttcagcggtcacgctcctggtccactttcatgttccaccctgtacacctggctctgccttctagatagcagtagcagaattagtgaaagtactaaaagtctttgaaatgc

SEQ ID NO: 78564 - DNA, 801 bp, Homo sapiens
gaatccagggaagggtacttggaaagaatggcagccacaagctctgcttccagggaccacagctctgggttaggaattagaacaggattctgggtccataaaggtaagcatctaagagcaagaaagggttccatgctttggagaaagacctgggaatgagaaaggatgcaatatagaaacagcaagtggagaccaaagcaggagtccagttctgaatctggcaccactgggaraagagtgacttgactctgcaagtggggtccagttcagataaagaatgagggtggttcactccaagagcagagacactttggaaatcgcatgccaggaccactcaggtcgggtttaaaatatgagtttgtccgggtcagacttgctccttttagctggcttaacataccccctctctggccagcacaccactgagctgccagcccgactctgtcaatgacatcactcaacagagccttcttgacttgctccccaaatgctcctatgtcagtttagttcccaccccaatgctgcttcctggttccatcccctatcctgaacaattcaagatttgctctttcctccatgaagccctggccccttggctgcttccttgacttggatcttttcttccatttctctctgcaccaagtgtttcctgtggtgactaaacacacagatgtgggaggtgtgataattaaagaaagaggaaagaaacacgaagggtggcttgatggttaacaaggacaggtttattttagaaaacaaacctaggagggggttttggccaagttaggttagagccccact

SEQ ID NO: 78565 - DNA, 801 bp, Homo sapiens
gaatccagggaagggtacttggaaagaatggcagccacaagctctgcttccagggaccacagctctgggttaggaattagaacaggattctgggtccataaaggtaagcatctaagagcaagaaagggttccatgctttggagaaagacctgggaatgagaaaggatgcaatatagaaacagcaagtggagaccaaagcaggagtccagttctgaatctggcaccactgggaaaagagtgacttgactctgcaagtggggtccagttcagataaagaatgagggtggttcactccaagagcagagacactttggaaatcgcatgccaggaccactcaggtcgggtttaaaatatgagtttgtccgggtcagacttgctccttttagctggcttaacataccccctctctggccagcacaccactgagctgccagcccgactctgtcaatgacatcactcaacagagccttcttgacttgctccccaaatgctcctatgtcagtttagttcccaccccaatgctgcttcctggttccatcccctatcctgaacaattcaagatttgctctttcctccatgaagccctggccccttggctgcttccttgacttggatcttytcttccatttctctctgcaccaagtgtttcctgtggtgactaaacacacagatgtgggaggtgtgataattaaagaaagaggaaagaaacacgaagggtggcttgatggttaacaaggacaggtttattttagaaaacaaacctaggagggggttttggccaagttaggttagagccccact

SEQ ID NO: 78566 - DNA, 651 bp, Homo sapiens
tttttttttgaaaactgagtgtctttgcagaagcactctttccttaatggtgaatgtagtccacaaacttacatacattgagattttggaaatagtaggctttttttcctagccttatttaaaaccagattcaaagtgaaatactgaaggaaagaaagaatctgatcatctctctttgaaacaaatacctttrgaaattctttttttttttttctttttcttttgagataggcagtcttggtctatcgcctagcctggagtgcagtggcatgatcttggctcactgcagccttgacctcctgggctcaagcaatccctccacctcagccttctgagtagttgagaccactggtgcatgccaccatgctgggctagtttttgtatttttttgtagagatggggtttcaccatattgcccaggctggtcttgaattcctaggcttaagcaatttgcctccctccacctcccaaagtactagaattacaggtcttagccactctgccccatctagaaattcttaataacctaaattagtgctaactagcaggctaataaagtcctgtttgctaattaacatttttttggtgcctcattgaatgttaatgtggtataccttcatgttattcattaaaaaaaaaaaagaatcctgt

SEQ ID NO: 78567 - DNA, 739 bp, Homo sapiens
caaaaatataatttataatctgtcatgggattagaggaaaaacaaacaaagtttaaaaatataattcagttacatagcaggaaagagtgcagtaaaagaaccaataatgaacaaacaaaagaccaaaaagtacaatgatagatttaggtttaaatgtatgtgtgtggactaaaataaactaaaaaataacacagatgatgggatgggagaaaacattttaagatccttgttttatttcaagagaagaatagaattattgatttacctcaaaacttattagkctatgtatatatttttattaagagtaactcctaaaagaatggaaatagaatgtctaactcacaaacgtacaaaaagatactttctaaaagtgacgtaaagatggaaataaactcaaccattacaagagatataatctctaacctgtctgggtttttttcattgatttttatagcttaccaaacatactagtaaaagtaagatattacatgcattttcaggaattatgatgaagatgaagctagaagaattgtacatagggtatttcgaatattgaatgaggaagacagagcaagatggcagaatagaagtctatacccattaattctccccaacaggaacaccaaattttaacaactgtctgcacacagaaaagtgctatcacaagaaccaaaaatcaagtgagcaatcacagtacctagttttagcttcatgtctctaaaagaggcattgaagggat

SEQ ID NO: 78568 - DNA, 1106 bp, Homo sapiens
aggcaaaagactatagaagcttgtgtaccttcagtgtagttacaaaacattgcttcctgataaactggtcaaatatccagtctatttagcagcatggcccttagtgaagaggggtgccaggcaattatagctgaaagacataaactagaaataccatctaactaactttacctactctgcttccttttcaccaaacagctttgtgattctactgaggcttccttataaattggtgtgcatggactaaatgccctaatttttacaatgtgtaattgttttctttatagtcatatgtatcgttgttaatttttaaagttgaaccatggtttatatactggtcctttgtgaatytgagtagtgtgagatgaagacgactaagcagagttggggttattgcttaaaaatatatcaagcatggctataacaaggaaaccaagatggtatgacaagaagagggttacattaagttctggtaggaaaaggatctgagtgaaagtttctagtggaatgataaatagcttggaaggagcagaaagtgtagagtgtgctgattcttcttcctggctctgtgggcaaagagaaggagtttaggagatagtatggctttcaattaatgggagatagaatgtttgtgaaaaggttcaagactatgcttggttattttgacagtgaaaggggctctacgaaagactgcagaccaagttatcctaaattttcaattgtaatgcggggtaatggtgccttctactttagcaaagtcgcttctccaggttggtggtttggtttgatccattaccaaaagtctttgaagatgagtaataaaggtgattgcaaagcatttggtaaacataaattaatataaaactcaacattagcaactttccagcaaatgtatctgaagtaagtggtgtgttttgtgtaaaatttcatagagtggtttcttaatacattaaaatgtttttctcttattactgatgctttcatagttggcttgattcacttgatatcgatgatctacactataataaaatttaagcagagaaacttaatacagtctgaattaggaaccacagcttcaccgggacttaatgtatcatgttgcagca

SEQ ID NO: 78569 - DNA, 1443 bp, Homo sapiens
gagccaccgcgcccagccgagagaaattaacttgtatgctgcttaaatagtattattttggactttgctttaacataaagaaaagctaaaaaatacagtgtgtttaaaatattcataagtcatgcattttacatacaaagttatagtagccagaaatgatcattaaccaagttgcagatcttgaggctttagattacttcatcttatcataaataactctgtagtctgtctgagtatgtaattatgccttcatgtagtcttcaggatgtctcaagcagtgtggtccaacagaacttggggcagtgatcgaagaggatgtattctgtgctgtycaagatggtagccctgtttctcttctgttttcttctcatttgcccttcttgaagaagtcatgcatgactagacagatataaagatatcgaggcaataaatagatttctcatatatcaagtgagtagatatagaaaaagagtaaacaagtaggaacatacatgtaagtcaaactagatatcttgcagtgtctcagtgagtacttaaaacttcatggtgaacacggtatatttttctgatgcagcagcttttacaattattttggtggaactaattatgttaaaaaccaacacattttttaattctcatacatttctagtgaaacctcagagctttggctctttagtaaaaatctgctgttgttaattcttcagtggaaattttcaggagtatcctgcagaagacagacttcaagccctggctttccctctattttttcctcctaactttgatcttttaatgcctaactttgcttcagagagtgtgtgaggtttacctagttcccaattaaaattgccctgatgattatacagatactgctccaaaattttgagatccattttccaccttgtatgtagcagggtgatatttgcatctggagctaaaaagcaacctgggagatgaagagagccttgaggtaatagggcatttacagtctaattgcctagagactccccagttacagtctccatttgccagtcaggagacagacagcatgtgtatctagaattttggtgggaatttaataaagtgaatacaaagggaacgcgtgatgaatgtttgttgaggcatacagagattagcaacagttggaagccattacaaggctgcaggtaaaaggaagaatcaacatcacccgatattaccaaagcctgacactttaataattataggttatatttaaaatcttagactcgacccgtggcttccgcttccggaacaccaaagcaggaagggtgtgtgtgaagaaatcgcctgctctctcttccctcacctctcagtttcctgctggggactcccgttgcctgaacctagtgaggccagagtgcaagagatctagggtgatgaaatccttcgggaccagtctcccgaggcctggtgtaggacaaaaga

SEQ ID NO: 78570 - DNA, 434 bp, Homo sapiens
atttaattttaagaaccatcctggccaggcgctgtggctcacgcctgtaatcccagcactttgggaggccgaggtgggcggatcatgaggtcaggagatagagaccatcctggctaacacggtgaaaccccatctctactgaaaaaaaatacaaaaaaattagcccggggtggtggtgggtgcctgtagtcccagctactcaggaggctgagtcaggagaatggcgtgaacccgggaggcggagcttgcagtgagcccagatcatgccactgcactccagcctgggcgatagagcaagattctgtctcaaaaaaaaaaaaagaaccatcctaaaaatattacatttttttctttgtagtttgtcttttaattttgttcatgrtgtttttggatatatatcttaaaagttttgatgcagtcaaacttcttcccac

SEQ ID NO: 78571 - DNA, 808 bp, Homo sapiens
tctgggagggtcatgtcccaggacactctcacaatccaccatcctccaatgggttcctgctgaagataaagacccagacatactctcctctcagccttaacttgatcagcctggactgtgccaccattatccttctgagagagggagagaaaaggcattcattttgccttcgtcttacgcttccattatgatgcctttttgtgtagtttggggtggaggaggatgcacattgcagcttcgagaaagattcaactcggtgttaggtgggcccctttctcggagggcagcagatgttccagtcatcaagccctcctctctttcccatggagtctgataatcgacaattctcacctgtattggctgacagacccttttagtcttttattcctggcctctcagacttgttagtgaaaggaaagaaaagctactttgatgtatgtgtgcccttggcttaatgcygccttttctttccagatatgttttctgtgcttacaagcagtccctgggagaggcctttccctcagcccttcctccaggcttctcaaaggaattgctgcaaatgagccgccgccataaggaaaccctaacaagtgatcagagagcactaatgggtcccagtagcacttctgagccttttcacaaatggaaaagcaacgtggaagtaagcctgtaactggaagacttgagatatagatttgaattcctgcttcacaaggttactgagaactttaaatgagtgggtacaaaataagtattagtttcctgctcttagaaaagttccatataaatctcagttatagagaaatct

SEQ ID NO: 78572 - DNA, 555 bp, Homo sapiens
cctgtgcaaaactgtcaataatttcctaaagcacaattgatcagaaaaatccatgattgttcagccttcacacccttcttcatgtaagaacacctttctgtacatctggaagagaaaaataaaagacaaatgcttttgtagatttggtgtgaaacactacagagctttgtaatctgtttcttgttttaaagagatatgtgtttgaaaaaggttatgctcatcactgatggtagactgataaatgcagactctggaactgatggttactttcaatgcctgtcacatccaggacttgcaaaatactttcttttctaatttagagccaaattcatttgggtctctaaagagtgactttatgaaatcaaaaatacatgttatcaccagggcaatccagaaaccaaggtattctatatcaccagggcaatgcagaaaccagggtattctaagttctacacagctattttattacagtctgcatggtaaagtgaaaagttttgaaatttgtggttcaagtgagagttggraatataatctttcaatctaaggatattgaca

SEQ ID NO: 78573 - DNA, 721 bp, Homo sapiens
tccttctgaggaatataattctggaagagaagtcagtgaccccaggatacctgacacagatagcctagctgtaggttgtatatgccagatgcaaggacacttgcaagtttaaccagtttgctgttgagggccaggtttggggaaaatgtgccttctcagaaaaaactctcctgactctctaataatttattgaaycaaatatgccatcaattgtaaaatgcactaccaaattaaaagcagataaatggcaattttctaaaacaaatattaaaatggaaaactataaatcggactaactgaattttagagttgaatatctagtcctttatattatattctacaataattcaattaattttacatattgtaaccatttctgtatttctttattgctttttctatatgccaagataaacaagtatatatttgggaactataaaatatttgaaaatgtgttctatatatacaatattttacaaatatgatcatattttaaaactttttaagcaatccataaccaggtaagtaggttagttttcttgataatattcccaatttggcaaatattattgaatttaaaaataatatgaggaagaagtaacaacatatttttcagtatccagttggtgtcaagcaccaacaagtaaaaactctgtctacaatgttctgagtttaaagtagttctggaaatacattggtaaataagacagaaattatctct

SEQ ID NO: 78574 - DNA, 502 bp, Homo sapiens
ggatgtcttcccaggacctctagagggaagcctgggcagccgggctcagttggggccttggcttccccagctcctccccagttgccttggccgattcattcctttgtcttgtgtttctcccgccatcccagcgaggctgcccctgctagggtctgagaaatacctgaccaygcagtttcagtttataccatccccttaggaaatgccttctcttcctttcctgagtctcttcaggccccatcgcttccgtgttattaatctttacagcggcatcaggaatggatgggttgtctaggttttgtgggagtagctctgtgtctgtcagcttccaaaggtgtagtcaagctggatctgaagggttaggagcagagggcaagctagagggagcaggtaggtccaggaggcaacatgtgccactcaccgaatgctttctggccaaggccagggctaggaaacaggaaggtcctccccgtgtcatgccagcatctttcgtgaggatttc

SEQ ID NO: 78575 - DNA, 524 bp, Homo sapiens
tcaccacacccggctaatctttgtatttttagtagagatgggattttactacattcaccaggctggtcttgaactcctgacctcaagtgatccacccgccttagcctctcaaagtgttgggattacagttgtgagccactgtgctggcctcagacacagcatttctaaggccatgttgagggtgccaaaggaaaccaagatattttaccccagaatatactactttgacgtattttgagtcggctgtcagagggccagcacacagaagtggccctgcaaatctggcttttgagggagatttgcatctgcagagaatctgcaytgatgcaacctggctttctctgaggccctccctggtccaaatctaggaaagattaactgaaagtctgacatgtttaaaggtctgaaagacacatacatcacctgttttctctgaggggtgttacctatgaggtttcattcatataaaaagaccacttttacaggcctggcctccgtttatccctcccataactatttttgcc

SEQ ID NO: 78576 - DNA, 3233 bp, Homo sapiens
ttccagcctctggattctgaggatctgtgaaaggatgggcccaaggctacccaggatgtgaatggactttttggctctttgttgggttatgtttttcctgccaaataaattgttagttcttttcctttaggcttccttctttaattctggtaagattcctgactctcctgatcctcccttggtctctaaatttgctctttatcttgaatttttttctcaaacctatctgtattaggccattcttgttgtgctataaagaaatacttgaaactggtcaacttataagaaaataagtttatttggctcatggttctgcaggctgtagaggaagcatagtgtcagcactgcttctggtgaggcctaaggaaactttcaatcatggtggaagatgaagggggagcaggtgtttcacatggctgtagtgggagcaaaagacagaaggtggtgtggggggagatgccacatgttttaacaactgtatctcatgagaactcactcgctatcatgagaacagcaccaagccatgagagatcctgcccccatgactcaaacacctcccaccaggcctcacctctgacattgggaattgcatttcaacatgagatttggggggatgaatatcccaactatatcattatcttgcttacatcttgacctttgcctctgatatttattttgtctaatgcaaatttgtgaacccctaaaaaattccaccacagattgctcctgctgactcagatttaagtgggatgagtcaaataccagctccctcattcctatagctggtatttctcctgcagaaactggatgctcaataaatatctgttaattatgcactggtagcatggtcttcaaatgagttactaaatgaaattatcagaaatgatcacagccatatcaaatttgtgcatatggaaatatcagaaagacatatgctgaaatataacagttatctaaggtggcaggaatatgggcaaacacaaagctattattctacagcaaatatttgttacacttagaaattaaaaagtaaaatatattttcttaaaaaaaatgccccagtaatgcatatggtaggtcctactggtaactttcttctgatagaagttaatcacttctctcagcttctgcgtctgcagattgaaaacagagagcacaatatctgtctgacatactctaagatttgaacaggatgatgtatgtatcagtctgttttcatgcagctgataaagacatacctgagactaggcaatttacaaaagaaagaggtttaatggacttacagttccacatggctggggaggcctcacaatcatggcagaaagcaaggaggagcaagtcacatcttacatggatggcagcaggcaaagagagagcttgtgcagggaaactcccatttttaaaaccatcagatcttgtgagattcattcactatcatgagaacagtgcaggaaagatccacccccatatttcaattgcctcccactgggatccccccacaacatgtgggaattgtggcagttacaattcaagatgagatttgggtgggtacacagccaaaccatatcaatgtatctgaagctactttctaaactggagaaaaatatatgagttttaggtgttttagttattggcattgctgtggagatggatgttatattgccatacggatatacaactgccatactttctgatcttctgtcttttttttggacacagtcagttctcattgggcaaacatgtttgatgtgctcatgttcaactcttcaggagagaggcctggaataaaaagctattactaattccgacaagattctgtctttcctggcacatttgtcctgaaacaattccttattgagactttccttgagtggctaaaaactggattttgaatcagtttcctgaggacttcctgtttgtggtcactcagctgtgtcctaattgattactcactgcatttgcatctgatgcccatcactgttcttgttctacaagctggatagatgctcttgccttgattaaagcagagaatagccctagcctcctcctggagatcgctacttttggcctctttttgtctgcaatgtgcaatttttctagaaactgagaagcagagtgcttgagatccattcacatttgccatcttccccacactgtctcttcctcgtagggaaggatatggccttggtagaatagtatgaccttccttttggcagagcagttcatgtggagggatcataagctgagggtcttctagtgtccattatttgtctttcgttattaagggacatctgctaagaccttcagtcctgagcaaggtgagccattccataaagaagatatctacacagagtgcgtatgcattccctgggtctaaggatgcagctggggaaaatgtctaaatggattaaaaatccattcattatcaatccattgattaaccatcttgattatcatacacaggcacacaggtacagaatcttggaacttttgcacaagaagggacttgtgggtgagaggaaaaaatgagcctctgatggaaggaggtaacgagggaaaaagaagtagagagcagaaaggaagcatgagtggacactcagaagttgttttaaccttcccagaagcttccctttataaacagctagacagcttggttcaaaccaatatttggatttttcctgaaactagctaaaataaaagttccctaactaataataagcagcatttatttagtgcctaccatctactagagaactgacactgccctaagagcttccaaataattttattcctaatgctgataaaagaaaaactttacctgaattaaacttaaaggagtttattgagcaatgaacgattcatgaattgggcagcctcttaagccaaagtaggctcagagactccagtgcacccaggtggtagaagaagatttatggacagaaaaaggaaagtgatgtacagaaaatggaagtgaggtgcagaaacagccggactggttacagctcaacatttgccttatttgaatatggtttraacagtgggttacatttcattggcccaacttggtgattggcaaaagtgtaggctacagtctgcttatacctccacttgttatagttcatgatgtacagaactctaacaagtgcaggtataaacagactgtagacctttaggcctgtgaacactgaatatctgaaacaggtctgggttaatttagaaagttcattttgcca

SEQ ID NO: 78577 - DNA, 514 bp, Homo sapiens
ttttaaaatgacacatgataatagaaatgcatgataatgcttcattggtaaacaaagattggtaggagaaagtattaaattaagagacatatattctcccactatgttttcattcgtttttcttgtatctgttttatctacctttgtttttcctttaattccaacttaaaatatattctcctgagttcttccttttcctcccctcattaatatgactgctgtgttttgctcaggtaagactagaaagccttagaattctataatgtgatggagcaatgcaaagaatgctaaagtgaaaaactctcatgtgttctcacaattctatacttttataatccaaatgtcataatacttttccccataggtcagatgcagttatctgaactccaggaaattgctggttctcttggacaagctgtaattttaggaaacatcagtagtatccttggatttaacatttcrtccatgtctattactaatcccctccccagcccaagtgactctgggtggatta

SEQ ID NO: 78578 - DNA, 1063 bp, Homo sapiens
gtacgtaaacggagtcatggactgtgacaaatctttcccattaaccacactcacttcacaggcttgctcagctcccgtgcctatgaaaggaagatcagactgaatgcagttctgccatcgggccctgattcatttccaaaacctccaaacattttcaataacatcttccttttcacacaatcatcttccttttccaatatacctaggctacatgtgaataatagtggccctctagcaatagccaaaaacattacaaaagttcatgcccattatcgacagaagaaaaagcccttcgaccctcctggggagactcttcctgtagaacattctacaaacctgcctgcttagttttccaattctagaggatccaactttgtaaattagaacaggaaggagggaagaactgcttaaaggcaggcacactgacaacagcaaggagtgacagctgaaggcaaggtcagagacaaggactacagaaacctgatgcaaaaacataacgagaagatgcagagccagtgttaagacaaacaacctaaaaccttgacaagtctcaaagcattgctatatatatatatattttttaatcaggattcaaactctggtgtggaaatgatacataagctcagtcataaaaatattgcatttttcaatattctttgttaaggaagtcagagaaagaagcaacaatatttagaaaagcttcacaaattttgctaaggttttaaaaaatgtgttcacataaaacatatcctttattcttatagaatattcacattgtttaaatatcttcttaaattttgttaagtaataactaagttttgttgtccaaagtaccaaatatttaatcttcacaacaatccattgaattagagttaataatatccccatttaatacatggagaaactgaagcagagagaagttactyggctagggttacacagtaagtaacaaaattgagattcaggaactcctcagagcccaggctcttaaccattaactaaaaataaataagtaagaataagaataatagcaaattacatatggtcctagacatcattccat

SEQ ID NO: 78579 - DNA, 939 bp, Homo sapiens
tgcatgcaggtttaacatatgaatagtgagcatttattctatcaaagcagaagttaaaataatggcatatgtcaacatgtatctctataataagtgccgtttttttaaaaatggtggtgggatgaggtacttactgtcccaataccaaccaaatcaagaactcaagttgtcgttggagttttgggatcataaacttgggaaaataaagttttccttagaaacctatttatttatttttttagatccaatgttatcttgaaataatttatcttgttgmgttatttcagtgcccggaaggaaaagacatcacatattgaattaacaaacaataattatttattttaacaattttgtacaagttatttcctagttttagcgattcctggtttaaaagacttacctgggcaaggttcaccatcaatgcggtatcctgctcttccaaatccagccactacattattctgtaaaactgtattggtccctctatttatctagtgcaatgattaaaaaaaaatactgtgcatcaggctagtaaacatttatataaatcgagagtaagtatatgacaatacacttatgaaaacctttaattatgactacattttcaggaggaaaatttgtatttattatttaccccattcaaacttaattacaaatgatgaaattacaccaggttcttggtgtaaaaccatcattaagtactacagcctggacttcatttaaaaactacattaaagagattatttcttatttcagtcacaaaatccactgaatgtggtttaaaatttacaaggcacagaacaaattccagtattacaagaaggtaaggagaatgttaacacttttttcaggaagttgtgatcactgaaaaagtgataaatatatgtttatgtattatatttatatatgtttaatataaatatatatttatataaaagt

SEQ ID NO: 78580 - DNA, 731 bp, Homo sapiens
tggtttgtaaaaaataataataataatataaagctatgaaggacgtttgcagaacaaattagggaaagtgaatatggattaagtaacaagtattgaaagatattatagaagcgttcattttattaggtataatagtggtatcatactttagtcaaagagtgttttcaagtgatggaattgcatgatgaggtatttggggtcatagtgtctttatgtctggaatttacttcaaaatggttttgctgaaaaaaaatctggcaaattttaaacaatgtttgaatttaagtgtaggtatgatcctttgcacttttttattagtttaaaaatttttataagtagaaaattttaaattmtctttctttcattccctcccttccttccttccttccctccttcctttccttttgttcctctctttcgggaagaagtatttttcttccatgacatggtcaatcccctctttgaactctttgtgaaaactcttctcttcccatcttactgattattattctaacaatatcccccttatctcacttctaattacttcactttcccctttctcctcttttcctagaaagatatacagtattcattactaaaaaactaaacacaaaccaaaaatcctttcttttcttcttaattgaggcaaactctctagtttacttgttattaaacttcttgaaagagttgcctgttttagtaaactccttgttcaaggtcactgtccacct

SEQ ID NO: 78581 - DNA, 679 bp, Homo sapiens
ccttcctgcagcctgtcactcttaaaaagtttaacgctaatacagtcaatgaaacagaaaaccaaactgagggaggtgggctatgtgcaccctcaaaagatctatcttacacttgctaaaatgacctttaaagagtcatctactgggccgggcgcggtggctcacgcctgtaatcccagcactttgagaggctgaggcgggcggatcacgaggtcaggagacggagaccatcctggccaacatggtgaaaccctgtctctactaaaaatacaaaaaattagccgggagtggtggcgggcgcctgtagtcccagctactcgggaggctgaggcaggagaatggcgcgaacccgggaggcggagcttgcagtgagmcgagatcgcgccactgcactccagcctgggcgacagagcgagactccgtctcaaaaaaaaaaaagagtcatctactgcagtgcagctttgcaactacagtcttgtgcctacacagaaataacctaattcgtattggtgccttctctacgatatggtgcatagttaaacaaatttccactttgtcatattccctgttagatagttaaatttcagatttctttgtgccacatacgctgacctaaaatggctaatttttaaagtaattatatgtaatttttttttctggcaggtaaaatggtttcgga

SEQ ID NO: 78582 - DNA, 679 bp, Homo sapiens
ccttcctgcagcctgtcactcttaaaaagtttaacgctaatacagtcaatgaaacagaaaaccaaactgagggaggtgggctatgtgcaccctcaaaagatctatcttacacttgctaaaatgacctttaaagagtcatctactgggccgggcgcggtggctcacgcctgtaatcccagcactttgagaggctgaggcgggcggatcacgaggtcaggagacggagaccatcctggccaacatggtgaaaccctgtctctactaaaaatacaaaaaattagccgggagtggtggcgggcgcctgtagtcccagctactcgggaggctgaggcaggagaatggcgcgaacccgggaggcggagcttgcagtgagccragatcgcgccactgcactccagcctgggcgacagagcgagactccgtctcaaaaaaaaaaaagagtcatctactgcagtgcagctttgcaactacagtcttgtgcctacacagaaataacctaattcgtattggtgccttctctacgatatggtgcatagttaaacaaatttccactttgtcatattccctgttagatagttaaatttcagatttctttgtgccacatacgctgacctaaaatggctaatttttaaagtaattatatgtaatttttttttctggcaggtaaaatggtttcgga

SEQ ID NO: 78583 - DNA, 679 bp, Homo sapiens
ccttcctgcagcctgtcactcttaaaaagtttaacgctaatacagtcaatgaaacagaaaaccaaactgagggaggtgggctatgtgcaccctcaaaagatctatcttacacttgctaaaatgacctttaaagagtcatctactgggccgggcgcggtggctcacgcctgtaatcccagcactttgagaggctgaggcgggcggatcacgaggtcaggagacggagaccatcctggccaacatggtgaaaccctgtctctactaaaaatacaaaaaattagccgggagtggtggcgggcgcctgtagtcccagctactcgggaggctgaggcaggagaatggcgcgaacccgggaggcggagcttgcagtgagccgrgatcgcgccactgcactccagcctgggcgacagagcgagactccgtctcaaaaaaaaaaaagagtcatctactgcagtgcagctttgcaactacagtcttgtgcctacacagaaataacctaattcgtattggtgccttctctacgatatggtgcatagttaaacaaatttccactttgtcatattccctgttagatagttaaatttcagatttctttgtgccacatacgctgacctaaaatggctaatttttaaagtaattatatgtaatttttttttctggcaggtaaaatggtttcgga

SEQ ID NO: 78584 - DNA, 679 bp, Homo sapiens
ccttcctgcagcctgtcactcttaaaaagtttaacgctaatacagtcaatgaaacagaaaaccaaactgagggaggtgggctatgtgcaccctcaaaagatctatcttacacttgctaaaatgacctttaaagagtcatctactgggccgggcgcggtggctcacgcctgtaatcccagcactttgagaggctgaggcgggcggatcacgaggtcaggagacggagaccatcctggccaacatggtgaaaccctgtctctactaaaaatacaaaaaattagccgggagtggtggcgggcgcctgtagtcccagctactcgggaggctgaggcaggagaatggcgcgaacccgggaggcggagcttgcagtgagccgagatcgcrccactgcactccagcctgggcgacagagcgagactccgtctcaaaaaaaaaaaagagtcatctactgcagtgcagctttgcaactacagtcttgtgcctacacagaaataacctaattcgtattggtgccttctctacgatatggtgcatagttaaacaaatttccactttgtcatattccctgttagatagttaaatttcagatttctttgtgccacatacgctgacctaaaatggctaatttttaaagtaattatatgtaatttttttttctggcaggtaaaatggtttcgga

SEQ ID NO: 78585 - DNA, 679 bp, Homo sapiens
ccttcctgcagcctgtcactcttaaaaagtttaacgctaatacagtcaatgaaacagaaaaccaaactgagggaggtgggctatgtgcaccctcaaaagatctatcttacacttgctaaaatgacctttaaagagtcatctactgggccgggcgcggtggctcacgcctgtaatcccagcactttgagaggctgaggcgggcggatcacgaggtcaggagacggagaccatcctggccaacatggtgaaaccctgtctctactaaaaatacaaaaaattagccgggagtggtggcgggcgcctgtagtcccagctactcgggaggctgaggcaggagaatggcgcgaacccgggaggcggagcttgcagtgagccgagatcgcgccactgcactccagcctgggcgacagagcgagactccgtctcaaaaaaaaaaaagagtcatctactgcagtgcagctttgcaactacagtcttgtgcctacacagaaataacctaattcgtattggtgccttctctaygatatggtgcatagttaaacaaatttccactttgtcatattccctgttagatagttaaatttcagatttctttgtgccacatacgctgacctaaaatggctaatttttaaagtaattatatgtaatttttttttctggcaggtaaaatggtttcgga

SEQ ID NO: 78586 - DNA, 1091 bp, Homo sapiens
aatatcaatggttcataagattttagacacaaataataaaaattaaatggctaccaagaaatagactagcacataaaaatactgctacagcaacatggcaaaatgccacaaattagcaaaagtattcatatttgtctacaccacacttacaatctttggagtgattttctcctaaatcatcaagcacaatacagttcacaaaactgattccaaatcttgcaaatattagatatatattgcatcttttcttaacaaatgtagcactgtggtaaaaataggatatgatttggttgcattttcacacaatactgtgcttgagtcatgctcgcagaatacctccatctgcaacagctgttttactccttaaaaaaaaaaatggaaaaggaaaaaacccaacttctccagaataagcaaacagtccctaatcttgtcaccctggatgtctgacaagtactaataactatgactaggttttgataacttccttgatttgttttcagggttattattattttgctggaaaagggccttgtgagagccaatgattgtattggaaataaagccaaaacaaagttcaaagcttgctgagatgcctctaaggtagaaagggtagcaaggtgaatggcatgatgaggaaagtgaaaatgctgtcgcaaattggataaaagtgatgagttggtagcttccatacctttcacaccttgatgtttcccatcactaattcacagtagcatcaagaatgtatcaaaatgtagcttgtcttcacttwattaaaatttctctaaaacgcaaattttgaatgttataaacaaggagttaatagatgttcattcaatcactcagcttagtcccttccaatgtttcctttaaaaacaacatacgcttttattctctttttaaaaaatgctctactaaaatctacacaccttctgcaccttctataaacattttgctctagtccaatcctgtttcctttcctgcttcaggttttgtcattttcctcctgatgccaacctgagattccaccatggtttatccccatacatggctgaatccacagaaaatggcaattatgacacagatacccactt

SEQ ID NO: 78587 - DNA, 1091 bp, Homo sapiens
aatatcaatggttcataagattttagacacaaataataaaaattaaatggctaccaagaaatagactagcacataaaaatactgctacagcaacatggcaaaatgccacaaattagcaaaagtattcatatttgtctacaccacacttacaatctttggagtgattttctcctaaatcatcaagcacaatacagttcacaaaactgattccaaatcttgcaaatattagatatatattgcatcttttcttaacaaatgtagcactgtggtaaaaataggatatgatttggttgcattttcacacaatactgtgcttgagtcatgctcgcagaatacctccatctgcaacagctgttttactccttaaaaaaaaaaatggaaaaggaaaaaacccaacttctccagaataagcaaacagtccctaatcttgtcaccctggatgtctgacaagtactaataactatgactaggttttgataacttccttgatttgttttcagggttattattattttgctggaaaagggccttgtgagagccaatgattgtattggaaataaagccaaaacaaagttcaaagcttgctgagatgcctctaaggtagaaagggtagcaaggtgaatggcatgatgaggaaagtgaaaatgctgtcgcaaattggataaaagtgatgagttggtagcttccatacctttcacaccttgatgtttcccatcactaattcacagtagcatcaagaatgtatcaaaatgtagcttgtcttcactttattaaaatttctctaaaacgcaaattttgaatgttataaacaaggagttaatagatgttcattcaatcactcagcttagtcccttccaatgtttmctttaaaaacaacatacgcttttattctctttttaaaaaatgctctactaaaatctacacaccttctgcaccttctataaacattttgctctagtccaatcctgtttcctttcctgcttcaggttttgtcattttcctcctgatgccaacctgagattccaccatggtttatccccatacatggctgaatccacagaaaatggcaattatgacacagatacccactt

SEQ ID NO: 78588 - DNA, 1063 bp, Homo sapiens
gaatgaaccttgaaaacattatgctcagtgaaataaaccagacacaataggacacatattgtatgattccacatgcgtgaagttcctagaatagggaaattcatagagacctaaagtagattagagatgatcagtagcaaaggagagggaggaaatgggagttcttgcttaatgggtgcggtagtttctgtttgggatgatgaataaagttttggaaaaagtagtggtgatggttgtacaatgttctgaatataattaatgccactgaactgtatactttataatggttgggatgaagggagagaaaagatccaaggcctctttagcttagataagcaagtgaatgatgctggtaaccatggacacagggaattgagagagaagagctggtttgggtgagaagtaaataatccaatctccatgcaagctttcccctgaaatttgagaattttaaaattgtatagctttagagttcttawgatatgacagagcttttatttaaagttaaaatttcatcgactatatccacagcatcagttgccaaaaggaaagttagacaatgaatatttgttgaaataatggttgtgtgttttacaccatgacacactatgcaaaatatattttaaaaagaaacagttcaaatcaattgaatgctatactagaaaataaaacagaaaaagtcaataatttttcaagtgcttacttctttgtcaaaaaggctgaatgtaaaatggcttttctgccctgctatccaggtgtcttcctgagagagaatatttcatcccatatccccagaagaataggtagtatccagtggttgatggagacacacatacagcaatagttatcatgaaccagcattttctttctatgttaattcatgggccagtttttatacaacagtaggtgaagcgttgtgtctattactctttgagaattggctctatgattctaaatgatgatgcatagcagaatgttaacaatggttatctgcaagttgagatattttgagtgactcttacggttttctatgttttcttttttctatgaatatgtattttta

SEQ ID NO: 78589 - DNA, 658 bp, Homo sapiens
ggggtggagctcgcagtgagccgagatcacgctactgcactccagcctgggcaacagagcgagactccgcctaaaaaaaaaaaaaaaaaaaaaaaaaagaaggcagacacagggcaattagtagtattttattccaaaaaactcaaaagagacaaaattaagccaagctaataagaatcattgtagtggttactcctgaggaggagtaacaatcagaagaaataaggaactgttggtttggtgctactggactcttccttgatacgattcctgatttctgtgtgtgctgaatttgtgaaactttacaaagctgtaggttcatgatttatatattttatgtatgtatactattaataggcaaaatgcacattaaaagtattgtgggaaaattaatagtggaggacattttattactcttttatatgctacctcccctttttttgcaacaagatatattaccttataattaaaaaaattagtaagactaatacatttttagtcttttaggtaaagcaaagaaactgattcaaacacacatagattacattattttgagctttgcaaataataagatrtatgtctaatgtggaagtgatgaacaatgaaagcaaaagataacttttcagaaagaggggctatgtcaggaaagacagaagga

SEQ ID NO: 78590 - DNA, 783 bp, Homo sapiens
agaatgttttgtgtatgtctgttagatcaatttgatctatagtattattcaagtcctctgtttccttatttgtcttctgtctgaatgttctgtccatcattgaaagtgggggattgagtcttttactattactgtattgctgtccatttctccattcagatcagtaaatgtttgctttatgtatctaggagatctgtaagggagtgcacatatacttattataccttcctgatagattaacccatttatcaatgtttaatgttcttctttgtcatccgtgacaagtcttgacttaaaatctgttttgttggatataggtataaccactcatggtcccttttggttaccaaaaggtaaacaaaatgttacccataggtaacaatatgttaccaaaaggtaacatattgaagacattcaatatgtcttttcccatcccttcacattcagtctatgtgtgtccttaaatctaaagtgaatttcttgtagacagcatattgttaggtcatagttttttaatccattcacccccctatgtrattgcattgggaaattcaattggtttatgtttacaataattattgacagggaaggatttattatttacatattgttagttgttttctattagtgttatttttttctttgaaatttctttcaccttacttttctctaacttctttagcttttcttctttcttacctttagggcttacataaaaatattttataacagtatgctctaagcatataacaagttacatcacttgcaaaaactttttacact

SEQ ID NO: 78591 - DNA, 783 bp, Homo sapiens
agaatgttttgtgtatgtctgttagatcaatttgatctatagtattattcaagtcctctgtttccttatttgtcttctgtctgaatgttctgtccatcattgaaagtgggggattgagtcttttactattactgtattgctgtccatttctccattcagatcagtaaatgtttgctttatgtatctaggagatctgtaagggagtgcacatatacttattataccttcctgatagattaacccatttatcaatgtttaatgttcttctttgtcatccgtgacaagtcttgacttaaaatctgttttgttggatataggtataaccactcatggtcccttttggttaccaaaaggtaaacaaaatgttacccataggtaacaatatgttaccaaaaggtaacatattgaagacattcaatatgtcttttcccatcccttcacattcagtctatgtgtgtccttaaatctaaagtgaatttcttgtagacagcatattgttaggtcatagttttttaatccattcacccccctatgtaattgcattgggaaattcaattggtttatgtttacaataattattgacagggaaggatttattatttacatattgttagttgttttctattagtgttatttttttctttgaaatttctttcaccttacttttctctaacttctttagcttttcttctttcttacctttagggcttacataaaaatattttataacagtatgctctaagcatataacaagttacatcacwtgcaaaaactttttacact

SEQ ID NO: 78592 - DNA, 2440 bp, Homo sapiens
tgcatgccaaggagacaatgacattctgtctttaaggaatcctgcagcatttatatttttctgagtactgcataacaaggccatttcttgctgaaggaatatttttattatctaccttgcatgttgacttgcttataagtgccttgttgttagatgtttgcttaagatttttcttttatgactgtagcttgacactaaagtgtgttacatggatcagcctggatgttgttaaagtcactctgaggggcttttttcagactttctatatttcgttgataaaacattgctattgctaaagcctctgggattgagtataagaccaaagtcttaaacaactgtttcgttcatattcaaccaagctctgtattccgtgcagggtctcattaatgaaatatgtttgtttgaacattagtaaacatgaatttttgtggtacaaattgtcattaagttcttggaataaaattctctagatttcttggcaaaatatttggtcctgttttcatttccttgagggaaaaacacatgaaactttataaactatggtaccctccttatactagtgccaggtgttaaaaagataaaacattcaactctgtaattcaccaacaattttttttgaatgattaatctgtgctcagttttgtgctacaatctgtgacatcattcatgttgtcaactctgaagccttgaacccttaagaaagaaaaggttgaaaaatttccttaagtggataatatataccaaaagggtctcttcctaactcctatcacaaacatcatgatgaacacactaatactaatactataactcaagatatccataattataaattcctggagtttctacccatacaccaatgaatagcaatagtctccattaaccatactggcctaaaggtgtgtgtgtcaattcaaactccattgtgtctaaatatatatattcaagtagataccataaaagcattttaaagaagaaacaagtataataggagtttattgtaacacgtttaaggaatgaaataattgtccagatttcagaagcaatgttgggattgggatactagtagaagatattatggtaaggaagctaggaaacctcagattcttgcctaaggttgtcttgcttctctgcctcacaacgtcctcaaagaacataaaacacaagaaattacagcaaataaatgtcaattcataagttgtctttaagcttgacaaatcaatgaaaatctgcagtgagccagattagaccaaattaatgagtacaggagctaagtgcaatttagaatctaggcacacatcacatgccagatccagcaggaaaagagacagaaacagaaatccactgccatgtgctgaaactttgcagcccagtgatctcactctcttacaaacgcagcccagcaaatgttctggaatctctccaatcaaaatcattgttcttcctctagaggacaagagaagatgggagcatataaaggaggtcttgaaggcacacctttctttagatatgaatgccacttcatggactctaaaatataaggcaaatgtactacatatatatttacatatgcatacatataaatatatatgtaaatatatttattttataattatatatcaatggccacacattttgtgagacagtcctaatattatgtaagcatattttttaacaagaatgaaccataaaatgtgtaatttamtgtgattttatatttatagcctttttaaaaaaatcaaatgtataaattggaaaattatgtctcttattagaacacatgaacagatttaataaaatgtgttccccaggtatataaataataatttcaacactatgctgacattgtaggaacaggagtatatacaaaaagcaacagcccagatgaaggagggattaattctatgggagacacaaagaagcaaatcccagaaagttcactcaaaagacactaactatttggaaggataaattgtaattcagaagatagatggtgagagaaaggcattcccgttagaggaaacaaaatgctcaaaggcttaaaaaggtaaaagagtaggctatgtttgtatgagagcaaatagttgatatctgtacattatgtctcgataaatgtggagaaagtgatttatatagtcctgtaagagaataagcataaagctctctagcaccttctcaaaagcctatttattatagaatctctgttctgtactttgatttacttctcctaatattccaaaatcattttttcaagtgaaaatctaatgttactgtcttgattagtaacctgcattgtctacggagaatattcttacaggaaactagtgatggctaataaccatcaggagggtgtcctgtgggtgaccagcacctgcagcttgccatactgaaaaggaagcatgttaggaaattaattactggagagtagggagtggccaagaga

SEQ ID NO: 78593 - DNA, 936 bp, Homo sapiens
gtgacaattgtgataaatgtgtactatatctttaaatgtcagggttcttgtggtgtagattaagcccacgcttggatataaaagctgcaccaggccgggagcagtggctcatggtggatgcctgtaattccagctgcttgggaggctgaggcaggagaatcgcttgaactcaggaggakagctgagataatgccactgcactccagcctgggtgacagagcaagattccatctcaaaaaaaaaaaaagaaagctgcaccacttccatttacctgtgtgaggacacatagtcatcatgctcaaaatcactttgtaaagggtgacttgtacttttagagcacattgattagaaattataatatgttgacaggactgtcctcagtacaatgatatttttcatgggttactcttgagctattggtactactacttaaacaaaaattaattgttattacttgttattatttaatacctaaagcaacagcaataaatattaaattatttgtttattctattttagcactgtccgggccactgtcagaaacatttgtttactaaatccttcacaattgcaatatgaaaaaatttgataaactttgaataacagaagccaaataaaaagtagtacatattgcctaattccatttatataatgtttgattacagtaaaaactgatttttttcttttgagaaacctgtttcctttagagtagggagtgattgaaagggatgcttctggaatgatggtaatgatctgttttttgatctgggtgccagttatatagatgttttcagtttgtaaatatttgctgaattatgcaattgaatatgttcacttttacttatgaatattgtacttcaataacaactttaaagacaaaccttcactctttctatgttttatgaataatactgattttaaaactgagatgtagga

SEQ ID NO: 78594 - DNA, 936 bp, Homo sapiens
gtgacaattgtgataaatgtgtactatatctttaaatgtcagggttcttgtggtgtagattaagcccacgcttggatataaaagctgcaccaggccgggagcagtggctcatggtggatgcctgtaattccagctgcttgggaggctgaggcaggagaatcgcttgaactcaggaggagagctgagataatgccactgcactccagcctgggygacagagcaagattccatctcaaaaaaaaaaaaagaaagctgcaccacttccatttacctgtgtgaggacacatagtcatcatgctcaaaatcactttgtaaagggtgacttgtacttttagagcacattgattagaaattataatatgttgacaggactgtcctcagtacaatgatatttttcatgggttactcttgagctattggtactactacttaaacaaaaattaattgttattacttgttattatttaatacctaaagcaacagcaataaatattaaattatttgtttattctattttagcactgtccgggccactgtcagaaacatttgtttactaaatccttcacaattgcaatatgaaaaaatttgataaactttgaataacagaagccaaataaaaagtagtacatattgcctaattccatttatataatgtttgattacagtaaaaactgatttttttcttttgagaaacctgtttcctttagagtagggagtgattgaaagggatgcttctggaatgatggtaatgatctgttttttgatctgggtgccagttatatagatgttttcagtttgtaaatatttgctgaattatgcaattgaatatgttcacttttacttatgaatattgtacttcaataacaactttaaagacaaaccttcactctttctatgttttatgaataatactgattttaaaactgagatgtagga

SEQ ID NO: 78595 - DNA, 1102 bp, Homo sapiens
tatatatgactcttaacatcttcctcaaataaatgttcaatactgtgagcactggttttagttcatacatgaattgtttacatttgatttcctagttatcagcctgaacaaacaagtgaggaagggaagaaagcgtgcactgtcctcctctttctaggtcttgaatgtattcaaaagtttcatggttggccacagggtgaaaccttggaggtcttcctaaaaagtgtgggggaggccctcaaatccataaaggcrgtcagcatgctcctgaatcaactctcagaaaagcaccttctaagctattaatgattaacatttatgggtattgttttttacatgcacatcctagttttgggggaaaatacttacacacgttaattttatgttttaattcaaaccgcaaatggcacaatgttacatagtaactcagtagtagagcagggactaggggacaagaattgttccttttcttttctttttctatttcagtctttactgatcacctgacatgccagcgactacaactatacagggcacacagaaaaaaaaaatgcaacccctgttcatcatcaccccatcatttacaatctctgatgtgattgtagcatcatcactctgcttggttgggcctgtgagcaggagttacataactcagagcagcagcaatcaccagggccctgggagggtagatttgcctgcatcctctactcacccagagccatgcagcaagggctggatggctgctagccccagaaaaccttagcagactgtgaggctcaatccagttttgaaaagcggtaaagaatgcacccattgggccgggcggggtggctgacacctgtaatcccagcactttgggaggccaaggtgggcggatcaaggccgagatcaagagatggagactatcctggccaacatggtgaaaccccatctctactaaaaatacaacaattagctgtgcatggtggcgtgcgcctgtattcccagctacttgggaggctgaggcaggagaatcacttgaaacccgggaggcagaggttgcagtgagccgagatagcaccactgcactccagcctgggcaacagagcaagactccatctca

SEQ ID NO: 78596 - DNA, 1069 bp, Homo sapiens
aattaatttctttctctattctctctaacttcttcacaaacatataaaaattgctctttactgagtgctcctattgcatttcattcatatcctatttagccatcactagattgctaccgaattgaggacaggtctatattttttatttctctgtgtagcccacaaatcttcaatcatatagctaaccatataataaatgctatatgataagtaaaaataatgacaaagtaaaggaatgtacaaaagtgtcaggtaggtataaaggtaaaatgtttttataaaaacaaatgtgaacctctaatgaaatatacgttgaagaaaactcttcacttccgtttatcataaaaatgtcagaattttaaagacatttaggtgaaacagctcattatgtgtatattatgccattgcttttaatggcaaaacccgcaattacttttgcaccgatgtatacttttkttttgttttgttttctgatcactatctgtgtttatatgatgctaaggctttaggcttttgtatattgtgtatttttgtacattgattatgtggctgaagaaaataattttgtgaatgttataagcctacgatcatttgtagagctattttcttaccatggaagacactatggtttagaaagcttgtgttgtatgcaaggtcatccagacagcaaaaggtataaccagaattagaacttaggtctagtgatctccaaagatattttatcattttaattgcactctattctcatggatttcaaaagcagtcttagaatacagagaaataagtaaatatggcttggcatgaagaagaatatagtaacagagttctcaaaaatgggaagtgttgagctctcattcacaggaagtgtttcagcacatgttggatgatcatgtctctgtgatgttgcagaaggcatttctgcacatgttaaggaccaagatagattatctctatgatccctttttgctctcagagatgtggtggtacccagattgcatgaagaggtacttgagagacacgcccttggcttttggatcacacccagtgtcttcattatagagcaggtgct

SEQ ID NO: 78597 - DNA, 601 bp, Homo sapiens
gagaacattatagaacagagagcttagtgagtatcaggtttcgtggcacgtaatttaagaatttatgagaaagatagtgttgcactcagatgggctaagtaacaaataaccccaaagcttagtaattggaaatgacagagtttatatgttgctcttgctattagtccatcaaggactctggaggatgttatgtgtccataatgttcctgttacactcttcatcaagggctcacctcagcactcagggactgcgccagggtrccggagcggcccccgtgtctcatgttatcagttgacatgacagagagaaaactgagagttctacaaggtttaccaccaacaactggagacatgacctagaagggacacacatgactaacactcatgacttatccaaagctagtcacttggccctacacacccacaagagtgctagaagctgtgattctgtaagtgtccagagggcagaccttcagaaatatttctgaagttcactactgcctatcacagagagaaagaaaacgcaaagattgaatatgtaggctgggcattctaagaaaagtacaagcccagtattccacaagggaggtgtagttacagg

SEQ ID NO: 78598 - DNA, 601 bp, Homo sapiens
gagaacattatagaacagagagcttagtgagtatcaggtttcgtggcacgtaatttaagaatttatgagaaagatagtgttgcactcagatgggctaagtaacaaataaccccaaagcttagtaattggaaatgacagagtttatatgttgctcttgctattagtccatcaaggactctggaggatgttatgtgtccataatgttcctgttacactcttcatcaagggctcacctcagcactcagggactgcgccagggtaccgragcggcccccgtgtctcatgttatcagttgacatgacagagagaaaactgagagttctacaaggtttaccaccaacaactggagacatgacctagaagggacacacatgactaacactcatgacttatccaaagctagtcacttggccctacacacccacaagagtgctagaagctgtgattctgtaagtgtccagagggcagaccttcagaaatatttctgaagttcactactgcctatcacagagagaaagaaaacgcaaagattgaatatgtaggctgggcattctaagaaaagtacaagcccagtattccacaagggaggtgtagttacagg

SEQ ID NO: 78599 - DNA, 601 bp, Homo sapiens
gagaacattatagaacagagagcttagtgagtatcaggtttcgtggcacgtaatttaagaatttatgagaaagatagtgttgcactcagatgggctaagtaacaaataaccccaaagcttagtaattggaaatgacagagtttatatgttgctcttgctattagtccatcaaggactctggaggatgttatgtgtccataatgttcctgttacactcttcatcaagggctcacctcagcactcagggactgcgccagggtaccggagcggcccccgtgtctcatgttatcagttgacatgacagagagaaaactgagagttctacaaggtttaccaccaacaactggagacatgacctagaagggacacacatgacyaacactcatgacttatccaaagctagtcacttggccctacacacccacaagagtgctagaagctgtgattctgtaagtgtccagagggcagaccttcagaaatatttctgaagttcactactgcctatcacagagagaaagaaaacgcaaagattgaatatgtaggctgggcattctaagaaaagtacaagcccagtattccacaagggaggtgtagttacagg

SEQ ID NO: 78600 - DNA, 601 bp, Homo sapiens
gagaacattatagaacagagagcttagtgagtatcaggtttcgtggcacgtaatttaagaatttatgagaaagatagtgttgcactcagatgggctaagtaacaaataaccccaaagcttagtaattggaaatgacagagtttatatgttgctcttgctattagtccatcaaggactctggaggatgttatgtgtccataatgttcctgttacactcttcatcaagggctcacctcagcactcagggactgcgccagggtaccggagcggcccccgtgtctcatgttatcagttgacatgacagagagaaaactgagagttctacaaggtttaccaccaacaactggagacatgacctagaagggacacacatgactaacactcatgacttatccaaagctagtcacttggccctacacacccacaagagtgctagragctgtgattctgtaagtgtccagagggcagaccttcagaaatatttctgaagttcactactgcctatcacagagagaaagaaaacgcaaagattgaatatgtaggctgggcattctaagaaaagtacaagcccagtattccacaagggaggtgtagttacagg

SEQ ID NO: 78601 - DNA, 767 bp, Homo sapiens
gcttgatcttacaaccagtgccatatcctctttcattaaagtaccagatgttgtcaatttgtagtttgcacatttaaataatatactaatctraaatatgccttcattgaaactataaagaaaactgattccttatctgatcactattgaatgataaaaaggcactgacaagttattttatagaacacgacagcatttttcatcaaaattcgttattattaagatatctctagattttgtagttaaaatatttgagggccaacgtttacattttcactaattgtagacatttggacaaaagtaatttcctataatgtagttccccaaatatgaaaatgacaaaaaatggagcgtgttgcaagaaaaatattttgcaaattgacaaactaaaggcagtgacaacacccttgcatagttagtaacatcattccagcattttaatgtctgcccaattattttcttttttatgttggatctttacgttcattaaggctgtaatggggtgcaagccagtaagcaagccatatattcaatcaacatctagaaaaaggatacctttgaggcaagtactggatataatgacatgaaagatgctatcctgagccaagatgtgtcactttctaacttcgatatggattttccttttgagtatcagtagtctttgttttcatgttaacttcaggctgagtcatctttaaaaagattaaacatggaagtctaccaatgtttccatgctggtctttccacaaccatgcgaacacaattat

SEQ ID NO: 78602 - DNA, 767 bp, Homo sapiens
gcttgatcttacaaccagtgccatatcctctttcattaaagtaccagatgttgtcaatttgtagtttgcacatttaaataatatactaatctaaaatatgccttcattgaaactataaagaaaactgattccttatctgatcactattgaatgataaaaaggcactgacaagttattttatagaacacgacagcatttttcatcaaaattcgttattattaagatatctctagattttgtagttaaaatatttgagggccaacgtttacattttcactaattgyagacatttggacaaaagtaatttcctataatgtagttccccaaatatgaaaatgacaaaaaatggagcgtgttgcaagaaaaatattttgcaaattgacaaactaaaggcagtgacaacacccttgcatagttagtaacatcattccagcattttaatgtctgcccaattattttcttttttatgttggatctttacgttcattaaggctgtaatggggtgcaagccagtaagcaagccatatattcaatcaacatctagaaaaaggatacctttgaggcaagtactggatataatgacatgaaagatgctatcctgagccaagatgtgtcactttctaacttcgatatggattttccttttgagtatcagtagtctttgttttcatgttaacttcaggctgagtcatctttaaaaagattaaacatggaagtctaccaatgtttccatgctggtctttccacaaccatgcgaacacaattat

SEQ ID NO: 78603 - DNA, 580 bp, Homo sapiens
tattttctgtgactctcaaaaaatcagagaaattggaaacaatggtttgttgcctttttagtaatcagagaccttgtttctacatacagatagccattgtgaaactgaaattacttatttctactgctcagatacttagggcatcaaagcatcaacaacaggtcctaggaatattcttgcagtattcagtggcatgaacagaggatctgacccagatgaagggggcacctggtggagaatggaggtccaacaaaaggtagtcagcagcaggattggcaaccacttgcagggcaaccaggtgcttccatgaatcatgggaatagaaactccagcagcatgggatgagaggccrcaatgagtctggtaacctgcactgacaaagccaatttggcactatgcacctgcaccctgtatccttatagacaatggatcctatcagtgctgagaaatacaattcaaaaatttgtggaaacagaggtgtcagagtccttaggcagtatgtatgtattttattattcatctatcagcttcacctttaagaatgtgtagattatctttctgacactttcttgggagtggg

SEQ ID NO: 78604 - DNA, 1063 bp, Homo sapiens
ccactctacctcagaatccactgtgaggcaaaaccaaaggcgagtttcactggaatttcttcatttgagttcatgtttcaagaagtggccacccctctattttctgaaaaatgtgagacacttttctttgtaaaattgcatgtaagtatgtttctgtgatggctatgatgacaatttaaggcaagtaatgatatgcaaaattaagtgtattttatatttaagaatattgcatctgattcttaaagtggctagcactatggaaatattaagaagagagcttggctgagggctcaatattaaatatcagggttatctgcaggagacaggcaaagggagagaagctattccaaatgtcctcttacccagaagacttcaaatgtcctcctacacaaaagactccaaatgtcctcttacccagaagactccaaatgtcctcctacccagaagactccaaatgtcctcttacccagaagattccaaatgtcttcctacctggaagactccaagtatcctcttactgagaccgttttattctttctcaattatctctgaccactgcaaactcttcaaggagctgatcaatacaaatgccttcagaagcttcagggtggagtacaccacgacttcaccacacatttaaaaggaagccattgggataagaattmatctacttgaacttttttattcagcctaattctcagaaatttatattcaccatgagatttgtaaaatacttataagcagcatgcagaatgtgtacaattacaccctatgtgtggctctgatcaagggcgagcgtgcaggagagtggccatagcaaagtcttagaaaatcacaatctccacgtttgctccttatccccacccctaggtacacttcttctttgaatcctcttttcctaaggaaagatgttaaattccacaattaagtcattcccattaagctgtagaatcattaagtagagttcaagttaatcttttgtctctatgttgaggcatagaacagggaacgtttcattctttggggacaataataattatacgttaaacatttttaaatagga

SEQ ID NO: 78605 - DNA, 872 bp, Homo sapiens
catgacaaacgttctacctaaagtgtctctatttagcctttcatgacaaatgttccattcaaagaatatttttctacttaaatattaaatatgtaaattagaatattaaatattctatttaaagaaatgttctatttaaatgctctatttaaatagcacgttcatggcacatgttctgtttaaagtgtctttctatttagcctttctattactatagttaaagaaaaaatataaaaacatgaaattctactttggtatctaaacctcttaatcaacttactcaacacacatccacatagcatcaccatgggccaccctgtgcagatgggacgaaccccmaaaaattgaacagtagaaacactgaaattgcaacagaaaaaaggaatgattacttcaattgtatcgttgtgaaaaaaacttctgtaacagcaaacgtaaaagtttcctaggccaagataatctgccggaaactaagcagatggtaccgagctgaattaccttgtagttacttcttctgaggcaggttggagctcatcacagttaactgaaagctccccacataaagtcaaaacataaaaatgagatgcacattgtcgatcagttgtagcggccttgcagcctctgccaacctttgattaagatgctttgaggttaagaacttcctatttcatgaacaatggcatcccgtggctgttacatgatgcagataaaatgtgcagaaagaccatgaggacaatatacaccattaatttgtgtgatgagaacaggaataagaagttcctataatactagaatgtttctgtaaaacacacggtttatgttctgaaaattctgcctttaatctcagtttagtatggtcttctaggaaatag

SEQ ID NO: 78606 - DNA, 872 bp, Homo sapiens
catgacaaacgttctacctaaagtgtctctatttagcctttcatgacaaatgttccattcaaagaatatttttctacttaaatattaaatatgtaaattagaatattaaatattctatttaaagaaatgttctatttaaatgctctatttaaatagcacgttcatggcacatgttctgtttaaagtgtctttctatttagcctttctattactatagttaaagaaaaaatataaaaacatgaaattctactttggtatctaaacctcttaatcaacttactcaacacacatccacatagcatcaccatgggccaccctgtgcagatgggacgaacccccaaaaattgaacagtagaaacactgaaattgcaacagaaaaaaggaatgattacttcaattgtatcgttgtgaaaaaaacttctgtaacagcaaacgtaaaagtttcctaggccaagataatctgccggaaactaagcagatggtaccgagctgaattaccttgtagttacttcttctgaggcaggttggagctcatcacagttaactgaaagctccccacataaagtcaaaacataaaaatgagatgcacattgtcgrtcagttgtagcggccttgcagcctctgccaacctttgattaagatgctttgaggttaagaacttcctatttcatgaacaatggcatcccgtggctgttacatgatgcagataaaatgtgcagaaagaccatgaggacaatatacaccattaatttgtgtgatgagaacaggaataagaagttcctataatactagaatgtttctgtaaaacacacggtttatgttctgaaaattctgcctttaatctcagtttagtatggtcttctaggaaatag

SEQ ID NO: 78607 - DNA, 1051 bp, Homo sapiens
ttggctctctattctgcgaggaacatgagaattgccataaggatgatggtggagtctctatttaagaatttcacaaatctcaataaccaattttattttttaacaaaaatatattgaactatttgtatggggaggcatttgcatattgataactaaaagtagatgagatagttctggcttcaaggagttctaaaccataaaatagaggacaatgttggatctaatcttctccttatcatagttaatcccaaagagaaacatggcaacaggttatgcacaaaaaaaagccaaggtcaccatcatctcgagggtgaacatcagcaaagatcaagcctgaatattggcacacctctccttgtttaagtttatacacaaatattccattctggaaaaaaaataccagagtaaaaataatcagtttatttatttatttatttccccagggaaaacaaaatcagattgaattagggctctgaaacacaacataaagccacagaaaggtttatggaaactaggaastaaaaatacagcatttttcttcatatcaagccctttagattgatattttgaaagcccaagaatgtataaatagataataataagatttaacatttatgcagcatttgctatttgccaaattttctcttgttttacatatgtcaacatatttaaatatcacagcaccattttgagttgatacctactattatgcacattttatagaagaggaaactaagacccaatagattaatgactcttctcaagaccccaaagctggcaggtggcagagtcagagatacccctagaaagctggcctccaaacagtgcactctgctttatgttagcactcatgcagcactactattttctccaggaatttcagcagacagaaaataaaaaggtaattgcattgccagatacattcattcagcattaaccaggcatctcctgtgtgccatacattctcctggagtcacattacagaacaaatgaatcctatatggtctttgccttgatcagattcacacaaagttattaaggaaacagcaca

SEQ ID NO: 78608 - DNA, 1051 bp, Homo sapiens
ttggctctctattctgcgaggaacatgagaattgccataaggatgatggtggagtctctatttaagaatttcacaaatctcaataaccaattttattttttaacaaaaatatattgaactatttgtatggggaggcatttgcatattgataactaaaagtagatgagatagttctggcttcaaggagttctaaaccataaaatagaggacaatgttggatctaatcttctccttatcatagttaatcccaaagagaaacatggcaacaggttatgcacaaaaaaaagccaaggtcaccatcatctcgagggtgaacatcagcaaagatcaagcctgaatattggcacacctctccttgtttaagtttatacacaaatattccattctggaaaaaaaataccagagtaaaaataatcagtttatttatttatttatttccccagggaaaacaaaatcagattgaattagggctctgaaacacaacataaagccacagaaaggtttatggaaactaggaagtaaaaatacagcatttttcttcatatcaagccctttagattgatattttgaaagcccaagaatgtataaatagataataataagatttaacatttatgcagcatttgctatttgccaaattttctcttgttttacatatgtcaacatatttaaatatcacagcaccattttgagttgatacctactattatgcacattttatagaagaggaaactaagacccartagattaatgactcttctcaagaccccaaagctggcaggtggcagagtcagagatacccctagaaagctggcctccaaacagtgcactctgctttatgttagcactcatgcagcactactattttctccaggaatttcagcagacagaaaataaaaaggtaattgcattgccagatacattcattcagcattaaccaggcatctcctgtgtgccatacattctcctggagtcacattacagaacaaatgaatcctatatggtctttgccttgatcagattcacacaaagttattaaggaaacagcaca

SEQ ID NO: 78609 - DNA, 1522 bp, Homo sapiens
atagctttatgttaaattcatttctcatctttcattggcccttgggaagacgtccagatcccttaacatagcttacgaaaccctctcaaactcagggcccacctttctctccaacttcattcccccagccccgacgtcatctgaggttcaagttcagtagcccctcttgatagctgagcacaggaagctcagggccctgcgttttgggcatttgaagggttccgctggtcgtggctttccccaccatctcctccgtttccacacgacttgctcctgcatacctcagcttcagtgccgctccgagaggcctttcctaatstctgaaccaggagaggcttcccaccacaagctcctctatgggattctggttaattaccagtgaaacgtccacctttccagcccgcctgtaagctaggccataataggggccgtagccctccttacagccgcgttcttgtcacctgcgcagtgtccagcgcacactcgcctcctacgtatttgccttgtgagggatcaatcggtgtcgtagagccgttcagagctattcctctattaagtgatttggataccatggtgactaagaagcatgctgtgatcgctggggtttatggaaatattgtgtgctcctgagcgttcaaacaggtggaatatcaactttattaagcccaggtggtggtgcagtttaaatgcgatttcatcttttcttattttaatttacgaattgctcagttgatcatattagaaaagagtacccacattgtgcctgctggagccatatctttgtaaaaattctgaaagcaaggggaaatgttggagtaaaattatcacatttcctaacaatgtctgttttgactggaagctctaatgcataattttgtgtcaaccagaataaaagtaatctttttttttcctggtggtgctttatagttagattgtagggaatgttcataaaatatgccagccatgcacctttgattcaatattcatgtattctcccacatacggaatttcaaggccatgtttaaggggaatgaaacgaggcctcataaagaatggcagcttatgcagcttacttttaaaaagaggctctgagaaacctttagctttttcaaacttccaaattttaaccccaaatccactagagcccaaatacccacatttgtctctgaataatcgtttgcttttggttaaggatggttacactagcacaatttgtttttttttttgagatgaagtcttgctctgttgcccaggctggagtgcggtggcatgatctcggctcaccacaacctccacctcctgggttcaacaattcttgtgcctcagcctcctgagtagctgggactacaggcgagcaccatcacgcccagctaatttttgtatttttgttacagatgaggtttcaccatattggccaggatggtcttgatctcttgacctcatgatctgcccacctcggcccagtcacacatgtttccctacgcaagctccctattgattggaatgatgaatatttccaatg

SEQ ID NO: 78610 - DNA, 1522 bp, Homo sapiens
atagctttatgttaaattcatttctcatctttcattggcccttgggaagacgtccagatcccttaacatagcttacgaaaccctctcaaactcagggcccacctttctctccaacttcattcccccagccccgacgtcatctgaggttcaagttcagtagcccctcttgatagctgagcacaggaagctcagggccctgcgttttgggcatttgaagggttccgctggtcgtggctttccccaccatctcctccgtttccacacgacttgctcctgcatacctcagcttcagtgccgctccgagaggcctttcctaatctctgaaccaggagaggcttcccaccacaagctcctctatgggattctggttaattaccagtgaaacgtccacctttccagcccgcctgtaagctaggccataataggggccgtagccctccttacagccgcgttcttgtcacctgcgcrgtgtccagcgcacactcgcctcctacgtatttgccttgtgagggatcaatcggtgtcgtagagccgttcagagctattcctctattaagtgatttggataccatggtgactaagaagcatgctgtgatcgctggggtttatggaaatattgtgtgctcctgagcgttcaaacaggtggaatatcaactttattaagcccaggtggtggtgcagtttaaatgcgatttcatcttttcttattttaatttacgaattgctcagttgatcatattagaaaagagtacccacattgtgcctgctggagccatatctttgtaaaaattctgaaagcaaggggaaatgttggagtaaaattatcacatttcctaacaatgtctgttttgactggaagctctaatgcataattttgtgtcaaccagaataaaagtaatctttttttttcctggtggtgctttatagttagattgtagggaatgttcataaaatatgccagccatgcacctttgattcaatattcatgtattctcccacatacggaatttcaaggccatgtttaaggggaatgaaacgaggcctcataaagaatggcagcttatgcagcttacttttaaaaagaggctctgagaaacctttagctttttcaaacttccaaattttaaccccaaatccactagagcccaaatacccacatttgtctctgaataatcgtttgcttttggttaaggatggttacactagcacaatttgtttttttttttgagatgaagtcttgctctgttgcccaggctggagtgcggtggcatgatctcggctcaccacaacctccacctcctgggttcaacaattcttgtgcctcagcctcctgagtagctgggactacaggcgagcaccatcacgcccagctaatttttgtatttttgttacagatgaggtttcaccatattggccaggatggtcttgatctcttgacctcatgatctgcccacctcggcccagtcacacatgtttccctacgcaagctccctattgattggaatgatgaatatttccaatg

SEQ ID NO: 78611 - DNA, 1490 bp, Homo sapiens
caggctctcacgtccctacagttcagtgggggaagaaagacagaaaacgaaagaaatgagataattttggattgtgataatagccttgaagatactgtaggcataatagtaggtgaaaatagttcacaatcagtgaatatttgtagcactcccacccatagctgcttctgatcactgtccgtgctatgttgccagctttggaaatgtcttcttcacctttgtcctgaatcacaggaacagtatagggcattgacacagagatggcacttcttgttttctgggacaactctatccttttgtagccccatcgctgaaatccctcccctacatcttgccccctatcaggcagcacatcgctccaacactcttggagttgggatgcagaacctgtattttgggttcttcttagaggtgatgggctgttgtcatagcaactgcttcctagacttaaccgtcagcctcagtggaggtttctcctcagcttttcaggctgtaggcaatgctttctcctcaaatgccagagctgatctaactcccctgcctctagcctgcaagctggagagactctttactttcaaggaagtctggcttttacaggttcaagcctttataagaacaccaaagcaagagcaagtccaaaaggggcctccctgcctggatgacagaggtgctggctggggcttaggtaagaagctctcctttacctcttgcccctcactgatctttccagacccctggggaggcttatgcagggggctctggcggcaatttccctatccattttgggttgtgttagttttcaggtttctctgctgtttggatcctgatgttagattcaaaggccagatttataaggtcaggagaatcaaagacggccagtgactcacacactttcatgtttctcagccctggcctgttggcaagtttctggacccacttgtaaccactttcctggagccagtgcaggtaaaggaaaggagtttagcaaacagggaaggggtgggcagcctgcctgaacctgaacctgagcctgggcctgtgatgtggtcaggctagtgtgccccaccagccctgggcagacgccgggccagggcacacaccacttggtgcccactggcgcctgggagagctcctgggtcccctgcagggtgggactggctgggtcatctgccctcagtgctgctatggggggtgctctgtgaggtgggagcagccagggagagaaayggcagggcgtgttggtgaggctcctataaacgtgcacttggctgtgtgccttcaatgctggcaggcatgggcttctgttctggcttctcagagatctttaggagaagagagttatgttcacttctgtaatcctccttctcgaatcttcagactatgggtcatgacccatagtggggcaaaaaccaatgtagtggattacacacaacatggaaaaacaaggagaaagaaaagatattaatgttaattttttaggcacagtaatg

SEQ ID NO: 78612 - DNA, 705 bp, Homo sapiens
ctctactcactttcaagtcatccatagtgataatataattttgtgtttacgatgttccatgcactgtgctaagcagtttacatgcattatttgcattatcttatttaaccttcacaggaactcttgtgaagtgggtattactcctatcctcattttatagacacactgaggcttaggttaaatggatggcccaagggcacacagctaataatggaagaacagaggcttagatctcttagactacaaaatccaagcttttaaatattatgccrtctgcctctaaccctctcaaagcttccaaactgaatattgcttgctttggaagtgagaggagcttcagtctcctgaaggttgaaatgtgtggttgatcaagtagccatgccctctccctcttccattccttcctctggagtcagtgtatgtgagcatgagtgctgttttgatcttcgaaggacaacggtgttcatcctgaagtggtgaaaatttgaccacaaaataatctttagggctgaatggcaaaaaagcaacaagtgatcatgaaaatatttgactcaaatttcaacttgaccgagtcgtacctacatacagatttccccaaagctcagagtgctgcgtttcagggtcagaaatgaggggctcatacccctccttccacctgggcaatttttagagtgtaaacaaagcttcaacaagttgaccaggatc

SEQ ID NO: 78613 - DNA, 573 bp, Homo sapiens
tcccaaagcactgggattacaggcgtgagccaccgcgcccagccatgcttttgtatttttaatgaatatagtcatattgttttctctgtggtatgtctcagcataacaatacgtgcttgagctttgtgaatgttgaaacctgttgctctagatcatgtgtttcccttgctgtgcagttttccaaggtctgagtatgttgggatttatttgtacattttgctggtggcagtcatttagggggtttccgccctttcactcttgggagcacgggattatcactgggcggtacaggaggggaggaggcagtccctgctgtggtctcagtttccagaaggcctgactggaagttggacatttgctaataagcagtgaggagccactgaagacttttgagcaggagcaagyctcagcaaaatgcggcgctttaggaacttctttttgccagtgctttgcagtttgggttggaggtagagagctgggggacagaggctcttgtaaggccctaggtgagtttccagggcctgttctcacaggtgaggctgcgctgggggcagtggaaggcaaaattgagag

SEQ ID NO: 78614 - DNA, 803 bp, Homo sapiens
tccatgccagctgaaacaygttggttctaaaggactgacaaatgtcttcctggtgctaaattctaagcaaaatgggtcatgtgtgtggtccttacctgagggatggtgtgccaacctcccacggggtgtttcctaaactggccccacatagaagcaaggggcagatacccacaatggaactccagcaaaggttttcggtaggaagaaggccaaggtacagtgaagcctggcctggtggctctgggtgctctaaattgtcacaacagatggctttagggaagcagaaagcttaatttccttaaatttgttggtttgtttttttaaattctgcagttagatgggcttttagtttttactcaaggcagcatatcgagatgccaggttttctcaatccactttagttatcacctttccctcacctcaagtgtgtgctggcttctctctcagcctcattcactcattcattcattcattcattcagcataagtgtgctctaggatatggagatgggactcctcagagccatggtcccttcactcctctgtggcagggctcccttctattatctggggggacccccacccatccccaggagccctgcatttcccagagcctacatagcctaggcagggttctccatactgcctgtgggttcttgccctggcccctgcaggtggcaaaagatcctgcccatccccatgtcaggctgagctgggacaaatatagcctgcgctccacttttctgatctggcagcccctctggtcccaatctcaccatctaatctcctttttcagggaccctc

SEQ ID NO: 78615 - DNA, 2133 bp, Homo sapiens
cccccacttctcattcttcttgctgttttacttcagtgcctctagtggttttgtttcctcaatttcctagtgaaatggttctcaattttttttttttttttttttttgagacacagtttcactctgcctcccaggctggagtgcagtggcaggatctcagctcactgcaacctccacctcctgggttcaagtgattctcatgcctcaacctcccaagtagctgggattacaggtgtgtgccaccacgcctggctaatttttgtatttttagtagagacgaggtttcaccatgttggccagtctggtctcaaactcctgacctcaagtgatccaccagcctcggcctcccaaagtgctaggattgcaggcatgagccaccacacctggcctggttctcaaattttatcatgcatagaagtcggggagatgggggcagggagtgagggggaagcatattaaaatgcagattccaaggccccattcccaaatattctggtttatagacttagaattggcacctaggaatctgcatcttttaaatcttattttaaaaaggtaatttcatgtagttagtccatggactacactttgagaaataatgctgtctctatactccatcacctttgggatcccttctctaggtagaataactacaactcctttggtctttcagtgagttaacagaagtgtatttaggctgggcacagtggctcacgcctgtaatctcagcactttgggaggccgaggtgggtggattgcttgagcccaggagtttgagactagtcttcgtaacatggggaaaccccatctttacaaaaaataaaaaacagccaggtgtggtggtgcgtgcttgtggtcccagctactcaggaggctgaggtgggaggttggtttgaacccaggaggcagaggttgcagttagctgaaattgtgccactgcactccagcctgggcaacagagtcagaccctgtctcaaaaaaaaaaaaaaaaaaaaacccgaaaaaagaaaagaaaaaaaatgtatttagcctttaggcctgggacacgggaatatgaaatcaaaacctttgctttgagaagttcacaggcttatagagagaacaagacagagctaactctgaggaatgtgtccagaattcaagagcaagttcacaagcacactggggtataatcaacagatggtcaaaacctgcagcactcatgaaacccttcttggtggactgacagtacagactggcatgtatagataggtcaaggttaagtgaatttatagatgacaatttcacaacagataagagagacagggtcataaatatccaggctagatctccaactctggggaaagccatgggaaagttaatgaatcgttaaagaaaagagtcattttccaccaatggacttcggtcagaacagaccactaagctctatgttgttgttgttgttgttttgaggagtctctctctgttgcccaggctgaagtgcagtggcgcaatctcagctcactgcaacctccacctcccaggttcaaacgattctcctacctcagcctcctgagtagatgggattacaggcgcctgacaccacacctggctaagttttgtatttttagtagagatgcggtttcaccatgttagacaggctggtcttgaactcctgacctcaagtgatccacccacctcagcctcccaaagtgctgggattacaggcgtgagccactgcacccagcctatgttgttcttatgagtgtgtgtgtggcagggtggggtgggacatgggaggcttcttgaaggtggtgccctagagacttcagagagaaaggcagcctgggaggtagctgtscaccagctaaagtaaccagtggtttccttttctttcctaggaggtcacaagccccaaagtggacgtgttcaatgctaacagcaacctcagttctgggcctctgcccatcttccccctggagcagctagtgaacaagcctgtagaggagctccccgagggtgtggaccccagcaggaaggaggtaggtcagattctcaaaggaagacaaagaagtccatttgttggaccaccatagttgactcccagatttggccctgcaggtgactaggtgctggggatgaacaagacagatg

SEQ ID NO: 78616 - DNA, 750 bp, Homo sapiens
tcgcctctaggtctttaggctgatgttatttataagctaatgacagagcaataaatattgtagtaaatagttgtggggtgtcatttgctgaaccgaagttataggcagctggagagtctttccttgtgaaattctttctccattcttcctattacaatggcctacagcatagatcaaaatacatctgccaccccctccccaaatgcattgacatttccttataagatcaatatacctttcagtggaaaccactgtatatgcattgtgtcctacaagaatcccttggcaatttctatgtgaaatccaggggaacstgtgcatattctgaatgggtacatttctaattttttgcataggttcaatgagctacatttattaatgtctactgtgtgtgcatatatatatatatttatatatatatatataaatatatatatatatatgagacattcttctggttgatgcttaaaatgatgcaatacctttctttataaagctcacattttagagagaaggaagagcacatacaagcaattaaacacatgtaaaaagtaacaagggcttttaaaaagtgtagagaaagtggcataagagattaagaaattattttttaactctctaggacagggaaatactgctgaaggggaccacatgtatcttatgtcttgactgatgtgtaggatttagcctctccctctgatgactatagattttcaacttctgactggtatctacactgctactttcatt

SEQ ID NO: 78617 - DNA, 684 bp, Homo sapiens
ctttggtgggccrctgggatcttgaatcatggataagccagcttggtgtaaagaatcaggattttggccgggcgcggtggctcacgcctgtaatcccagcactttgggagcccgaggcaggcggatcacaaggtcaggagatcgagatcatcctggctaacatggtgaaaccccgtctctactaaaaatacaaaaattagccaggtgtggtggcgggcacctatagtcccagctactcgtgaggctgaggcaggacaatggcgtgaacccgggaggtggagcttgcagtgagcagagactgtgccactgcactccagcctgggcaacagagcgagaccccggtttaaaaaaaaaaaagaatcaggattttatccaaaagaagtggcaactactgccactaaagcaatgacgagatgactgttcatggtcaacaccatcaggaattagccttttattaagtttaagtaatacagagatgcaagaatagcccaacagccaattaattactcttctaacattgccatttacaatcaagtataaaatataatgtgtatgtatgtatattatgtatgaggatgtaattatatatgcatgtgtatatgcactgcaacatttgttatttttgtatgcattatgaggtcaaaatagaaaatctaaagaaatgatgtattttgatccacttta

SEQ ID NO: 78618 - DNA, 684 bp, Homo sapiens
ctttggtgggccactgggatcttgaatcatggataagccagcttggtgtaaagaatcaggatkttggccgggcgcggtggctcacgcctgtaatcccagcactttgggagcccgaggcaggcggatcacaaggtcaggagatcgagatcatcctggctaacatggtgaaaccccgtctctactaaaaatacaaaaattagccaggtgtggtggcgggcacctatagtcccagctactcgtgaggctgaggcaggacaatggcgtgaacccgggaggtggagcttgcagtgagcagagactgtgccactgcactccagcctgggcaacagagcgagaccccggtttaaaaaaaaaaaagaatcaggattttatccaaaagaagtggcaactactgccactaaagcaatgacgagatgactgttcatggtcaacaccatcaggaattagccttttattaagtttaagtaatacagagatgcaagaatagcccaacagccaattaattactcttctaacattgccatttacaatcaagtataaaatataatgtgtatgtatgtatattatgtatgaggatgtaattatatatgcatgtgtatatgcactgcaacatttgttatttttgtatgcattatgaggtcaaaatagaaaatctaaagaaatgatgtattttgatccacttta

SEQ ID NO: 78619 - DNA, 684 bp, Homo sapiens
ctttggtgggccactgggatcttgaatcatggataagccagcttggtgtaaagaatcaggattttggccgggcgcggtggctcacgcctgtaatcccagcactttgggagcccgaggcrggcggatcacaaggtcaggagatcgagatcatcctggctaacatggtgaaaccccgtctctactaaaaatacaaaaattagccaggtgtggtggcgggcacctatagtcccagctactcgtgaggctgaggcaggacaatggcgtgaacccgggaggtggagcttgcagtgagcagagactgtgccactgcactccagcctgggcaacagagcgagaccccggtttaaaaaaaaaaaagaatcaggattttatccaaaagaagtggcaactactgccactaaagcaatgacgagatgactgttcatggtcaacaccatcaggaattagccttttattaagtttaagtaatacagagatgcaagaatagcccaacagccaattaattactcttctaacattgccatttacaatcaagtataaaatataatgtgtatgtatgtatattatgtatgaggatgtaattatatatgcatgtgtatatgcactgcaacatttgttatttttgtatgcattatgaggtcaaaatagaaaatctaaagaaatgatgtattttgatccacttta

SEQ ID NO: 78620 - DNA, 684 bp, Homo sapiens
ctttggtgggccactgggatcttgaatcatggataagccagcttggtgtaaagaatcaggattttggccgggcgcggtggctcacgcctgtaatcccagcactttgggagcccgaggcaggcgkatcacaaggtcaggagatcgagatcatcctggctaacatggtgaaaccccgtctctactaaaaatacaaaaattagccaggtgtggtggcgggcacctatagtcccagctactcgtgaggctgaggcaggacaatggcgtgaacccgggaggtggagcttgcagtgagcagagactgtgccactgcactccagcctgggcaacagagcgagaccccggtttaaaaaaaaaaaagaatcaggattttatccaaaagaagtggcaactactgccactaaagcaatgacgagatgactgttcatggtcaacaccatcaggaattagccttttattaagtttaagtaatacagagatgcaagaatagcccaacagccaattaattactcttctaacattgccatttacaatcaagtataaaatataatgtgtatgtatgtatattatgtatgaggatgtaattatatatgcatgtgtatatgcactgcaacatttgttatttttgtatgcattatgaggtcaaaatagaaaatctaaagaaatgatgtattttgatccacttta

SEQ ID NO: 78621 - DNA, 684 bp, Homo sapiens
ctttggtgggccactgggatcttgaatcatggataagccagcttggtgtaaagaatcaggattttggccgggcgcggtggctcacgcctgtaatcccagcactttgggagcccgaggcaggcggatcacaaggtcaggagatcgagatcatcctggctaacatggtgaaaccccgtctctactaaaaatacaaaaattagccaggtgtggtggcgggcacctatagtcccagctactcgtgaggctgaggcaggacaatggcgtgaacccgggaggtggagcttgcagtgagcagagactgtgccactgcactccagcctgggcracagagcgagaccccggtttaaaaaaaaaaaagaatcaggattttatccaaaagaagtggcaactactgccactaaagcaatgacgagatgactgttcatggtcaacaccatcaggaattagccttttattaagtttaagtaatacagagatgcaagaatagcccaacagccaattaattactcttctaacattgccatttacaatcaagtataaaatataatgtgtatgtatgtatattatgtatgaggatgtaattatatatgcatgtgtatatgcactgcaacatttgttatttttgtatgcattatgaggtcaaaatagaaaatctaaagaaatgatgtattttgatccacttta

SEQ ID NO: 78622 - DNA, 684 bp, Homo sapiens
ctttggtgggccactgggatcttgaatcatggataagccagcttggtgtaaagaatcaggattttggccgggcgcggtggctcacgcctgtaatcccagcactttgggagcccgaggcaggcggatcacaaggtcaggagatcgagatcatcctggctaacatggtgaaaccccgtctctactaaaaatacaaaaattagccaggtgtggtggcgggcacctatagtcccagctactcgtgaggctgaggcaggacaatggcgtgaacccgggaggtggagcttgcagtgagcagagactgtgccactgcactccagcctgggcaacagagcgagaccccggtttaaaaaaaaaaaagaatcaggattttatccaamagaagtggcaactactgccactaaagcaatgacgagatgactgttcatggtcaacaccatcaggaattagccttttattaagtttaagtaatacagagatgcaagaatagcccaacagccaattaattactcttctaacattgccatttacaatcaagtataaaatataatgtgtatgtatgtatattatgtatgaggatgtaattatatatgcatgtgtatatgcactgcaacatttgttatttttgtatgcattatgaggtcaaaatagaaaatctaaagaaatgatgtattttgatccacttta

SEQ ID NO: 78623 - DNA, 925 bp, Homo sapiens
catggttattttttaaatcacagaacaaccagtgattttcggttttttcatctatgacttttcagtcacctgagtattagagtttgttatattttacttctattgtctattgtatcttatatgcaaaaacaacaacaaaaaaaaacctcctgggatttttataaggcattctaagtcatgcaagtaacactaatttattcatgaaaatcacaatacttataagtccacctttgatttcttgatttgaagtacagattttggagccagaatgctggtgttcaaatctcatttctgtcatttactaactgtattaccttgtaagttttctcatgtgtaaactggcaaaaaataatacctagaaaagaatgcttctgtaagcattaagaaaataagctaacgcttgtaaagtgcttagagaaggtgtaagtcctacaaactgtttatcaaggaacatattctctgtaaaacagggactgatrgaagtcaacgatccttccagatttatctcagtcacattggtagtgtgtcaaacagcttgattgaaaaaaaacgaattgaaataattctcagaaaataaaaataggcttcatgagagatcacatgatattattctcctgaactccatatcttagaaagcagctatcaaagatggatcataacttggattctctttgtaagcaaaatagtactaatgagatatttaaaaattactcagaataaagtttatgtgtgttattaagtgaataagaatgggcattacatagataaaattttatgaatatttaaatttgctttaaaaaactttcactgaagaatcaatttttttcaaaggctctttgaatatttttaatgtagtattttaattttataaacttaaaatttccaaacttgaaaactttttacaagtaaatttaattttacagac

SEQ ID NO: 78624 - DNA, 636 bp, Homo sapiens
gatatgtatggtatccattctcttcagtatgtattatttctatgtgttaggaacatttcaagtcctgtataattattttgaaatgtgcaatacattgttgtcaactgtagtcagtcaccctatatgacacttcatctggaaatccttcctgatttaattctaagaatctgagttgcttttcactacaatttcctaagtccagacatcagtgacttcctcgggggctaatttgcaagggaaataatgaggaacagcaggactcttaggagctgcaaaggtaatttgcttatttaactattactaagggcaggaggaacagccaggccaaaatggcctgtgcttttgcatagcatcatggctattagaataggggcctaccatcccattttaaaaagtggtgaagaaataaaacaggataraagacaagtaaagaaaacctgaaattgagcagcatccttaagacagttatgaaaacagaatagttactgacttagaaaaatcctattcatttcattgctttttctttaaaacattttctactgtggtaaaataatataacaatttctgttctccctttattatctagctatttggtaatacggaatgtctttgtatatagaaaatgataatataaaa

SEQ ID NO: 78625 - DNA, 1384 bp, Homo sapiens
aaataagaaatgttattgtcggccgggctcggtggctcacgcatgtaatcccagcactttgggaggccgaggcgggcggatcacgaggtcaggagatggagaccatcttggctaacacagtgaaaccccgtctctactaaaaatagaaaaaattagccgggcgcggtggcgggcacctgtagtcccagctacttgggaggctgaggcaggagaatggcggaacccgggaggcggagcttgcagtgagccgagatcgcgcccctgcactccagcctgggcgacagagcgaaactctgtctcaaaaaaaaaaaaaaggaaatgctattgtcaaatgcagtagagacatactgcaaattatacatcagtctactgaaagttcatagtgcccattggatatcaaggatcctgaaaattctaccatttttcaagctgatgctgtgtggggctcatgctcagccccttatctcatctcatccccagaacaatctaatgccacaggtgaaaaytatctctatctttcagattaggaaattgaggcttagagaagtcaagcaaattgcccaggttccaaggtcattaaattgacgtgaaatcttttttctctgaacaaattcaaaaggcagacactttgggaaatgttaccctgagcagactggttttcttaacccaaaatcacttactcctacttctctgtgctgattctcatcccagataggaggaagtgctttttcttcttctcctcctcctccttctcctcgttgtcttcctcctcttcctctttctccttcttgtttcctttccttttcttttggtagtaggcattaggaaggtcataatgcgaagaagacactaactacttccttaaatctttaaatacctaaatcctaaaaaggtgatgcaaatgtcaacttgaatttcctcttctctattaacacactctaggtttagactatttctgactaactgtatacaggctcaccactttcgatgcaccccagttcaacaattagaataaaaagatgcattaaaagggcccatgcttgcatttttctagcaaactgaacacataaaaataattgtgcctgctggaaatgaccagaccctatgttcaaagaggaagattaatgaattctcactttataggaaaagtataggaagtccaagcaagactacccaaatccacactttaatttgcagacaactaattagataacaataaaaagtgtcctaagtccccactctaaagcccagctgaaactaccagctagcaaatgattctaattattctagagaaaagagtagatgtttgtgtatgtgctcatagcagaacaggaaataagcccctgatcaaaaaagaatttctaacaactcagaaaagtgtata

SEQ ID NO: 78626 - DNA, 1384 bp, Homo sapiens
aaataagaaatgttattgtcggccgggctcggtggctcacgcatgtaatcccagcactttgggaggccgaggcgggcggatcacgaggtcaggagatggagaccatcttggctaacacagtgaaaccccgtctctactaaaaatagaaaaaattagccgggcgcggtggcgggcacctgtagtcccagctacttgggaggctgaggcaggagaatggcggaacccgggaggcggagcttgcagtgagccgagatcgcgcccctgcactccagcctgggcgacagagcgaaactctgtctcaaaaaaaaaaaaaaggaaatgctattgtcaaatgcagtagagacatactgcaaattatacatcagtctactgaaagttcatagtgcccattggatatcaaggatcctgaaaattctaccatttttcaagctgatgctgtgtggggctcatgctcagccccttatctcatctcatccccagaacaatctaatgccacaggtgaaaactatctctatctttcagattaggaaattgaggcttagagaagtcaagcaaattgcccaggttccaaggtcattaaattgacrtgaaatcttttttctctgaacaaattcaaaaggcagacactttgggaaatgttaccctgagcagactggttttcttaacccaaaatcacttactcctacttctctgtgctgattctcatcccagataggaggaagtgctttttcttcttctcctcctcctccttctcctcgttgtcttcctcctcttcctctttctccttcttgtttcctttccttttcttttggtagtaggcattaggaaggtcataatgcgaagaagacactaactacttccttaaatctttaaatacctaaatcctaaaaaggtgatgcaaatgtcaacttgaatttcctcttctctattaacacactctaggtttagactatttctgactaactgtatacaggctcaccactttcgatgcaccccagttcaacaattagaataaaaagatgcattaaaagggcccatgcttgcatttttctagcaaactgaacacataaaaataattgtgcctgctggaaatgaccagaccctatgttcaaagaggaagattaatgaattctcactttataggaaaagtataggaagtccaagcaagactacccaaatccacactttaatttgcagacaactaattagataacaataaaaagtgtcctaagtccccactctaaagcccagctgaaactaccagctagcaaatgattctaattattctagagaaaagagtagatgtttgtgtatgtgctcatagcagaacaggaaataagcccctgatcaaaaaagaatttctaacaactcagaaaagtgtata

SEQ ID NO: 78627 - DNA, 1384 bp, Homo sapiens
aaataagaaatgttattgtcggccgggctcggtggctcacgcatgtaatcccagcactttgggaggccgaggcgggcggatcacgaggtcaggagatggagaccatcttggctaacacagtgaaaccccgtctctactaaaaatagaaaaaattagccgggcgcggtggcgggcacctgtagtcccagctacttgggaggctgaggcaggagaatggcggaacccgggaggcggagcttgcagtgagccgagatcgcgcccctgcactccagcctgggcgacagagcgaaactctgtctcaaaaaaaaaaaaaaggaaatgctattgtcaaatgcagtagagacatactgcaaattatacatcagtctactgaaagttcatagtgcccattggatatcaaggatcctgaaaattctaccatttttcaagctgatgctgtgtggggctcatgctcagccccttatctcatctcatccccagaacaatctaatgccacaggtgaaaactatctctatctttcagattaggaaattgaggcttagagaagtcaagcaaattgcccaggttccaaggtcattaaattgacgtgaaatcttttttctctgaacaaattcaaaaggcagacactttgggaaatgttaccctgagcagaytggttttcttaacccaaaatcacttactcctacttctctgtgctgattctcatcccagataggaggaagtgctttttcttcttctcctcctcctccttctcctcgttgtcttcctcctcttcctctttctccttcttgtttcctttccttttcttttggtagtaggcattaggaaggtcataatgcgaagaagacactaactacttccttaaatctttaaatacctaaatcctaaaaaggtgatgcaaatgtcaacttgaatttcctcttctctattaacacactctaggtttagactatttctgactaactgtatacaggctcaccactttcgatgcaccccagttcaacaattagaataaaaagatgcattaaaagggcccatgcttgcatttttctagcaaactgaacacataaaaataattgtgcctgctggaaatgaccagaccctatgttcaaagaggaagattaatgaattctcactttataggaaaagtataggaagtccaagcaagactacccaaatccacactttaatttgcagacaactaattagataacaataaaaagtgtcctaagtccccactctaaagcccagctgaaactaccagctagcaaatgattctaattattctagagaaaagagtagatgtttgtgtatgtgctcatagcagaacaggaaataagcccctgatcaaaaaagaatttctaacaactcagaaaagtgtata

SEQ ID NO: 78628 - DNA, 550 bp, Homo sapiens
aaaatacaaaaaattggctgggcatggyggtgtgcatctgtaatcccagatactcaggaagctctggcagaagaatcgcttgaacccaggaggcggaggttgcagtgaaactccgtctcaaaaaaagaaaagtagaaaaaaacaagaaccaacaactgatgaataactaatatcctaataatgaaacaaagttttaaaaaagtagagggaaaagttttaacagatattttccccttctaaatattagtgtaacatttagatttaacaaatatagtgtgttaactacagccatattttttttcttttaagggcacatgtattaaaacaagcaccctcaatttttatagttaatatttttgcttctttagtggattcttaaaatcttgttcaaacaagtataatgcaatctcatagatttaaatatcgaaaacaaagaaacaaaacaaacctatttcctaggaagcgagcactaatttaagcatgtgctcaaaacaatacttaatctaatagaaagttcataatttcatgaaaatactttagaaattttttt

SEQ ID NO: 78629 - DNA, 550 bp, Homo sapiens
aaaatacaaaaaattggctgggcatggcggtgtgcatctrtaatcccagatactcaggaagctctggcagaagaatcgcttgaacccaggaggcggaggttgcagtgaaactccgtctcaaaaaaagaaaagtagaaaaaaacaagaaccaacaactgatgaataactaatatcctaataatgaaacaaagttttaaaaaagtagagggaaaagttttaacagatattttccccttctaaatattagtgtaacatttagatttaacaaatatagtgtgttaactacagccatattttttttcttttaagggcacatgtattaaaacaagcaccctcaatttttatagttaatatttttgcttctttagtggattcttaaaatcttgttcaaacaagtataatgcaatctcatagatttaaatatcgaaaacaaagaaacaaaacaaacctatttcctaggaagcgagcactaatttaagcatgtgctcaaaacaatacttaatctaatagaaagttcataatttcatgaaaatactttagaaattttttt

SEQ ID NO: 78630 - DNA, 550 bp, Homo sapiens
aaaatacaaaaaattggctgggcatggcggtgtgcatctgtaatcccagatactcaggaagctctggcagaagaatcgcttgaacccaggaggcggaggttgcagtgaaactccgtctcaaaaaaagaaaagtagaaaaaaacaagaaccaacaaytgatgaataactaatatcctaataatgaaacaaagttttaaaaaagtagagggaaaagttttaacagatattttccccttctaaatattagtgtaacatttagatttaacaaatatagtgtgttaactacagccatattttttttcttttaagggcacatgtattaaaacaagcaccctcaatttttatagttaatatttttgcttctttagtggattcttaaaatcttgttcaaacaagtataatgcaatctcatagatttaaatatcgaaaacaaagaaacaaaacaaacctatttcctaggaagcgagcactaatttaagcatgtgctcaaaacaatacttaatctaatagaaagttcataatttcatgaaaatactttagaaattttttt

SEQ ID NO: 78631 - DNA, 550 bp, Homo sapiens
aaaatacaaaaaattggctgggcatggcggtgtgcatctgtaatcccagatactcaggaagctctggcagaagaatcgcttgaacccaggaggcggaggttgcagtgaaactccgtctcaaaaaaagaaaagtagaaaaaaacaagaaccaacaactgatgaataactaatatcctaataatkaaacaaagttttaaaaaagtagagggaaaagttttaacagatattttccccttctaaatattagtgtaacatttagatttaacaaatatagtgtgttaactacagccatattttttttcttttaagggcacatgtattaaaacaagcaccctcaatttttatagttaatatttttgcttctttagtggattcttaaaatcttgttcaaacaagtataatgcaatctcatagatttaaatatcgaaaacaaagaaacaaaacaaacctatttcctaggaagcgagcactaatttaagcatgtgctcaaaacaatacttaatctaatagaaagttcataatttcatgaaaatactttagaaattttttt

SEQ ID NO: 78632 - DNA, 867 bp, Homo sapiens
tcctgatcagccgaggacactctccttgtccatgttgctctccttggattggttaatcctgttttcctaacctttctcttgatgttaaatgttattttcttttagaatgtttagcctataatatttatatgttatgtatactactatgtttggtttgcaatattgactgacttgtggartggctagagctttgtgtccttggttctgactaccaaatgaatgggtactactaaggaaaattacctccttcggaccttcatacagctcatggcttttatgattgaaatagcatcaacaaaagtctgactgtggaaagacacaaacttgcagggacttgagccactgacaggtagtcacttatatctcctccacaagccccagagcatactgaggtatacttaattattccttttcctgctgaggtcttgtaatcttcttctagaagctcatttaagttggaggagaggcctaagacaaccccaagccagttcttcccctttccccaaatagtctaaatcccctctgtaggaatgatgatacataccttgcaccaacaactttgggagcacaggccaatcccaatgtagctccattctcctagttctacaatcaaaggaatcagccctttttgattatacccaagaaagtcagcccctgatgctacagtccactgtagttctctctactgggtcagacactagccctctgtgtcctcaatttcaggggccatatttcaaattctccaagtagctcccttgaggcctcccttactaggctaagggttagaaggtaacaccccactccaacccacccacccctccacctcacccacaaatacaccactctttggagttaaggatggaattc

SEQ ID NO: 78633 - DNA, 867 bp, Homo sapiens
tcctgatcagccgaggacactctccttgtccatgttgctctccttggattggttaatcctgttttcctaacctttctcttgatgttaaatgttattttcttttagaatgtttagcctataatatttatatgttatgtatactactatgtttggtttgcaatattgactgacttgtggaatggctagagctttgtgtccttggttctgactaccaaatgaatgggtactactaaggaaaattacctccttyggaccttcatacagctcatggcttttatgattgaaatagcatcaacaaaagtctgactgtggaaagacacaaacttgcagggacttgagccactgacaggtagtcacttatatctcctccacaagccccagagcatactgaggtatacttaattattccttttcctgctgaggtcttgtaatcttcttctagaagctcatttaagttggaggagaggcctaagacaaccccaagccagttcttcccctttccccaaatagtctaaatcccctctgtaggaatgatgatacataccttgcaccaacaactttgggagcacaggccaatcccaatgtagctccattctcctagttctacaatcaaaggaatcagccctttttgattatacccaagaaagtcagcccctgatgctacagtccactgtagttctctctactgggtcagacactagccctctgtgtcctcaatttcaggggccatatttcaaattctccaagtagctcccttgaggcctcccttactaggctaagggttagaaggtaacaccccactccaacccacccacccctccacctcacccacaaatacaccactctttggagttaaggatggaattc

SEQ ID NO: 78634 - DNA, 678 bp, Homo sapiens
  misc_feature (1)...(678): n = A,T,C or G
ggatccatcatttgatttagaaaatttagtaaccctgtgrgtagctgttattatcctcaatacacagatgagggcacagaggattccagagctagagtcaagtggcaaaaacagtccttatgcaggcaggtggaagagccagggttcaaatctaagtgtttctcacacccatactctcacatcctactctgcatttctccagttgtggggttattgaacagcttttcaattttttcattctgacttcagcatatagggtggaaaatctgcccccctcctccattttttatcctacttctattctctttatatctgatttaaaaattagcagtaatttgggatcactgtctcctgttttcacctcacatccaagctcaactcactttcatctgtcagtctagagcatctgtgtcaattgaggtcatcaacaactccccanaggtctcatttcaagctcttttcctggggctcgttttccatctcttggcctgaccttttaaaaaaaatgaaggtcttcaagggctcgttggtgtattatgaagtttcctgtggccgctataacatatttcctcaaactttgtggctaaaaacaagataaatttatatctcagggttctggagatgagaagtccaaactcaaggtgctagtggggctgcgttccctctggcggttctgtg

SEQ ID NO: 78635 - DNA, 585 bp, Homo sapiens
tttcagctgtgctgaaaaataagggggagctgtcaatctgaaaatttttgctcttcatttttgtaaaattttattttcatttttcttttatttattccctttcatatttctataatcttcttctcgaactcattctttgaataccctgaactaatgttttagttttattatattatttttttctattgcttatatgatatgctttctaggagatgttatcaattttgtcatccattctttctatttatttttttatttcaccatttaatttttaatgtctgagaggtattttctattatctataggggaaaaagttctcagctctttttacatagatgcagtaactacttttatrtttctaagtgtgtgtacacacataacgtacacatacacacccgcactcagagcagctgccatcagtggatggctgagacaggaccataaggtctggagcccttgtcttatcataggacaaattctgcaggaccatcttaactccagtactccctgtaggacatttttggaaggacaccatctccctagagccactcctactttcttcactccctcctctgctggcgtgga

SEQ ID NO: 78636 - DNA, 632 bp, Homo sapiens
ttttcagtcgacagtttgtttcaaatgccttgattggtcctaacgtgccaacagttttggtcaccattgctttgaaaccaccggtgcaaacctcaatagtgtgaaaaagacataacatatgaagatattatgaaaataattttaacatgtctcatggttgccaaagattctgcaaacatcaccttgagaacccctgccctacagaagtgtcctttggccagcctggtttcgtctttttcttcccagtcaagctcacttgcaccatgttaatcttcctagtatctctgctctcccagacctccctgagctactgcatgaagctgccagcatctcaacagcaggctacattctgggtgtgtttcttctgagcacagagtatagggcctaatgttgtcaaatgaaagagtgaatgggccagtgagtgaatgaagagatgaatgaacaaacaaatgaacgagtggacaaacgtggttctggctgtactgtattttcttccatctctcaaacacatacagattgctcctacgtagggtgttttgcttccccttctcactgccaggagtattccttccgatatttcagcrtctggctcttcttatacaatctcagctaaaacgtcacaggcattccct

SEQ ID NO: 78637 - DNA, 534 bp, Homo sapiens
ctgaacgcctgggtgaccagtccacagcatttattagggaacttacacacataagcctgtggtgtcattgccatggacagcgagaaaggagctgcctactcaggcatgtccgtaagcggggcccggttgcaccctgtgtttcttggtcagcgcacagtggaccagggcaccctacctctccctttctgaggtcagawatgcaggaacagtgtggctggtggctctgcctctgggccgctcatgtgattgcagtcatgatgttgcctggggctgcagcagcgaggggtggaaaatctgcttctgggctcacactcatggttggtggcagggggctcaggtcctcaccacctgggcctcttccagaggggctgctcacagaacagggcagccggcttccccagggtgagcaacctaagatggcgatgaagtgaagacagacagacacacacacacacacacacacacacacacacacacacacacacgccacccccccaccccccaacccccccgcttgctttcttttctgtcctg

SEQ ID NO: 78638 - DNA, 1213 bp, Homo sapiens
ttattagcccagaggtggcactagaggactctacataaccaagtttactgactagcccttatctgtcattagtacttaatatatttaccttcccacaatttgcttccctagagactcaaagtccttttcctttgtcttgccacttctctgcaaatttattgggggtggctgttgttaagatgctatggaagtccaagttctagcaacctctttaagcccaacatccatgggtttctcccatgtatatatgatataaacatattcataaacttgtttgtttttcacttgttagttttttgttacagagtcctgactgagaatctgaaagrgtagaagtaaaaatattttttccttctctataatagaatgagatgtttgactagtatgtaatagaaatgaggcaacctagcaacattcaggggcggcaattccttgggtttgctgatttctgtttacactctataaaatacccatcagagacttaaaaaaacaaacagccaatttcagttgatcatattggcacagatagccttccccaaccccaggtatccactcctcaatcatatttgcctttccccttctatgggtgactgaagcatgaaacctcctctgtaccaatttataagctacacgacaaatctttgggacctggaacaaagagctaaaggcacgataaatcatttatgacagatgaaactatttgatagaaaatacatggcattacattcaagtcaccccttatcaatgaactctcatgtatctgttctttgaagtgcttaaaaccctggtaaatttgtaagctttgtatttctaataatttaatttgttattaattacatctcaacctgtctgaaagataaatagatatcttcccccaacaaagaccactggtcttcctgctctcaacttgttcactcagccaaagacctggcacagcacctttacagcttctgatggctgctttttcacaccaataagtcaatgatttaaagagcttcagatttccacatgccctatatctaagagcaaggtcaaaaccaatgcatatagaaagtatttccaaaatacccctccatttagagagattttataaatatactattgatgaggaaagcaaccttgttaacaaagccaacctaggccgggcgcagtggctcacacctataatctcagcactttgggaggctgaggcgggtggatcacgaagtcagga

SEQ ID NO: 78639 - DNA, 561 bp, Homo sapiens
ttctctctctctctctytctctctttctttctttcttccttcctttctttctatttttgagatcacgtttctgtcttgtcacccatgctggagtgcaatggcacgatctcagctcactgccacctccgcctcccaggttcaagtaattctcctgtctcagcccctggagtagttgagattacaggtgcctgccaccatgcccagctaatttttgtatttttattagagacagggtttcaccttgttgaccaggctggtctcaaactcctgaccttaggtgatccgcccacctcagcctcccaaagtgctgggattacaggcatgagccaccacgcccggccacatgtgctttttaacatttttattatttcatttttggagtcattattatttttgttacaccacacaaattgcaataacattaagagattgagatgatgatggtatgagggtggtgttggtgatgacagtgatgatgacagcaatgttgctgatgttccatagtggtaatggtgaagatgatggtgatactggggagatatgatggtggtggtgatggaa

SEQ ID NO: 78640 - DNA, 561 bp, Homo sapiens
ttctctctctctctctttctctctttctttctttcttccttcctttctttctatttttgagatcacgtttctgtcttgtcacccatgctggagtgcaatggcacgatctcagctcactgccacctccgcctcccaggttcaagtaattctcctgtctcagcccctggagtagttgagattacaggtgcctgccaccatgcccagctaatttttgtatytttattagagacagggtttcaccttgttgaccaggctggtctcaaactcctgaccttaggtgatccgcccacctcagcctcccaaagtgctgggattacaggcatgagccaccacgcccggccacatgtgctttttaacatttttattatttcatttttggagtcattattatttttgttacaccacacaaattgcaataacattaagagattgagatgatgatggtatgagggtggtgttggtgatgacagtgatgatgacagcaatgttgctgatgttccatagtggtaatggtgaagatgatggtgatactggggagatatgatggtggtggtgatggaa

SEQ ID NO: 78641 - DNA, 533 bp, Homo sapiens
tttcccttacccaaaggagcccggccatctcaacagtattttcgccatctgggccaaccacgtgcyggcagagtgcataaataccacttttgtgaccaaaactgtatttcctcggttgatccaacatcagcatctttgcacctgcaactttccttaagaagaatttttccatgatgtgatgacagaatttgcagccagcaaaggggatcatagacatacatgtacacacgagcccacaaccatctacttcaaagcctcccagcctgaagtacgctctccagatgtctctatataccaggtgcttcgaggctggccagcatctccctgacagcagaacaagttagtataaggaatttctatttaaaagccaagttctacaaaagctaagccaagcaaggttctaataaacagtaaaaccgccacgttgtgacacatggcttaaagttggtcactcacctaggtgggtcagaaagacaccaatgcttttcattttccccagcacctcaaccctggttagtgctagggtgggatcc

SEQ ID NO: 78642 - DNA, 1419 bp, Homo sapiens
tgcatttgaatttgtttctaatctgaattttccatataaactctagttagcagtttcaaaactgtggacgcacttcagcctaagggacaaaaacaaaacaaatgacccaaggtaccagctgcaagatgctggaataggagggagggagggaaggccagtgagagggcaagattattaatatgcttttcttactaaattggctttcagaatcaaggggaagaaccaaggtgggttgttaagggagtactgatttagatgtgctgagcagttgaaatgtttttgtttctcaaacatgaaagcacttggctttgcatgactgggttttaaattgctcagcaaagcatcacttggggctaacctgagtctgtgaagttccacaattcaggaatgatggttactgcagcactcttgtgtttcaaggttcgtcatgaagactagcatagattccactgttcaattaaagcaacgtttaccatgatattcctattttccatgatgcaggrtcctgggaagcatctctttcaggaagggagtatgtattcaaggtcagtcagtatatgaatgtgtctgagacttggatggctcaaggggatagagctaggtgttatctggcagtcgcaaaagtgagagatgatgacaaggccaaggtaggtaggagaatggggatccctcattcatttatcccatcattatttattgagcaccaactgtgtcccaggcattgttcaaggttcaagcacaaagccgtgttcaatgggttcaggtagaaacatgcacagttacatcacaacaaagtaaaccatgggaactgcatggtgcagagtagggggtatttgcatggcagttgaagacctgtgtcggacgctgatgcttctataataacccaacttggttcctctccacttttagagccaattaattaggaaaaacactttcttccttccctctctgtcattctatgttggcatttgtcccccttgggttgatgggcagacacaggtatgaaacccataacttcatctctctgggattcagtttctgggcagagtgggcaagggaggccagggtcttctagactcactaagtcagaagcatctcctcctgatctttggtttaatttttcttttgaaggtactcagtccatgatttcagattagggaggcaccacctggcaaagggggagcctgacaatgcagggcagttctaagtaccaggcttgggaccgattctatggagatatggtagatgggactaccctcaactgaataatgtgtgaagagaatttaagaccatgcctgatacatagagggtccagtgaaagttgaaggcaaataaccctggtaaagaaggcaggaaacacaaggaagccattcatttatttattattcattcaatcaacaaatatttcttaaatattta

SEQ ID NO: 78643 - DNA, 1481 bp, Homo sapiens
tgtataaacttaataatttttaaaaatttaatactcagctcaacctcataaggcagaaattattgttgttttacagaaagtaagttaattaacaatatagcttttcttcactgatgaagaaaatgataaatatcaaaaaagggagaacttacaaatgtagacttttcttttcttccctctgagtccatctagcaacttctactaattcatagtgtatggtatttttatggttccagttctcaactgtacactttttaaacacaggagataagcaatgcatcaaagatttactctagtttagggaggtggtctaagtcttaaaattaaaggacatttttagaggtcccttctacttgttcagttctacttgttgatgcatccatgtcataaaaccatatgtcttgaggaacaaatttattctaggatgtgccagaatagaactgaagcaggcctgaaggactggatctggacatcttgggtagtggtacccttctgattttctgattttcccatatgtataggacgtattcaacaattttctgggactgtttgtagttacttctgcttcgtgatgagacaggcatataagcagagctttcagaacattcaggagggctaggaggttataaaaattcttggcagatcagcaaacaagatttttgcaaagagcttgaaagtatcttctcctcttcaaatggtatcattggcagctgagcacttctggaggaatctgagggccacagaattttgcctgattggcctggagtcagatctggatccttgtactgggcaaccatctatgggaggaagttgtgttaccctacctactttattttatttatttatttatttttgccattgtaaaccattttattaaaatattaatcctgctgttcctgcaattcctaaaacaaattaaacaaaataattagcctgaaaaaattttttaacattctcagkaaaactacttgaaataagtcataaaattatgaggcattttcctgtccttatttaaaaaatcttcctagagaaaatggcaagtagctctggcatctaatatatatatttttttatatatgtataattttttttaattttattattatactttaagttttagggtacatgtgtacaacgtgcaggtttgttacatatgtatacatgttccatgttggtgtgctgcacccattaactcatcatttggcattaggtatatctcctaatgctatccctcccccctccccccaccccacaacagtacccggtgtgtgatattccccttcctgtgtgcatgtgttctcattgttcaattcccacctatgagtgagaacatgcggtgtttggttttttgtccttgcaatagtttgctgagaaagatggtttccagtttcatccatgtccctacaaaggacatgaactcattattttttatggctgcatagtattccatagtctatatgtgccatattttctttatccat

SEQ ID NO: 78644 - DNA, 651 bp, Homo sapiens
ccgcccccctccccgaggagctgcggcgggaggacgcgggttcagcgatgagggacgaacctcagagcgcgctcggccgcccggccgcccgcagccgcggggctgacaaaccagcggcgggaggctgcgaagcggctgtgcctgtggcggctgctccttaccgcagcgccctccgttttccgcggacacggctgggcgtgcgcgcgcgcgtgcgtgcgatccttccgcggcgyccgggcacggagggtcccgggaagggcggggggagactgaggcgggggcgcggagggataccgccccgggacaatcacggccgccacgtgcgggaggcgccggccgggagcggtggcgggccgagcttcggacctcgggccggcggagagggtggaccccgcgtcgctctcggcaccccaggaacagcggcggcacggacgccttggagccccgcggccgggccgcgatgtgcttttctcctgtgttcgctgcccgggatgcggaatcttgagcctcggtgtcgggttacagagttgtcctggtgacgggatgcggagcgtttcctcctttttgttgtgggggcggctggtggcaggggcagctggtggcagggttgcccacgctaatctccgagtctctaagggcaccgtctttcct

SEQ ID NO: 78645 - DNA, 640 bp, Homo sapiens
ggctccggcctcggccagcccagagaagggctcccaaggtgcagcggcaggctgaagggctcctcaagcgcggccagaatgggtgctgaggccgaggaggtaccaagagygagcaagggctgcgagggctgccagcacactgtcacctctcaataccatcttgatttgagatttttaaccttctgaacacctctgttgttttaagccactgaggttgtggtgctgttacagcagtcctaagaaactaatacagcttctaaagtaagttccatattttattagtgaaaagcactcacatagtacaagcatacacactactaagccactgtaagaccatgccagacctgaggattccagagacagaaagtccatcgtaggtctagaggtcccctatagtttcttgtcatgtttctcagataccaccctaagaactaagagccagaagaaaccctctgaaccatagaggagaacgaccatcaaaagccatgtaccaagggccaagctgggctgggcaggtagggtagcccttctgaagctgattcccagccttacacagctccgtacattgaaaagaccttcccatgtccccatgctctggtctgcttctctggaagtctaccttggaagagccctggaggga

SEQ ID NO: 78646 - DNA, 584 bp, Homo sapiens
gagggcagacagatgaggccagagaagctgcataatggggaggaagaaggcaaaaagaggtggcctagaaaggcttgaggaaggaattaactttggctacttgttcaacacggccctggcagaatctctgggaagaataatctgggaagaagctgggtcttggcggtaaagtagtgggtgcacagatgacttcatcctacacaggagccttggggtcaccggggagagagcactggacttagcatcagacrtgaagtctgtatccaactttgccataagctgcataatcttggcgggcttcttttgctatctgagccttgggcttcacagagaggcctgggcttgaagatgcacaaacctccttgtagtactgtcatttactatcacaaacaacttcgtgaccttgagggccactgtatagcaatccttctgactcattgtttttgtttattctttttttctttttaatctacagaaacgttaatggacaccagaacggctactgcagagctgggctggacggccaatcctgcgtccggggtgagtatcaaaccattcgtctttcagtcctgctatgaggtcct

SEQ ID NO: 78647 - DNA, 584 bp, Homo sapiens
gagggcagacagatgaggccagagaagctgcataatggggaggaagaaggcaaaaagaggtggcctagaaaggcttgaggaaggaattaactttggctacttgttcaacacggccctggcagaatctctgggaagaataatctgggaagaagctgggtcttggcggtaaagtagtgggtgcacagatgacttcatcctacacaggagccttggggtcaccggggagagagcactggacttagcatcagacatgaagtctgtatccaactttgccataagctgcataatcttggcgggcttcttttgctatctgagccttgggcttcacagagagrcctgggcttgaagatgcacaaacctccttgtagtactgtcatttactatcacaaacaacttcgtgaccttgagggccactgtatagcaatccttctgactcattgtttttgtttattctttttttctttttaatctacagaaacgttaatggacaccagaacggctactgcagagctgggctggacggccaatcctgcgtccggggtgagtatcaaaccattcgtctttcagtcctgctatgaggtcct

SEQ ID NO: 78648 - DNA, 584 bp, Homo sapiens
gagggcagacagatgaggccagagaagctgcataatggggaggaagaaggcaaaaagaggtggcctagaaaggcttgaggaaggaattaactttggctacttgttcaacacggccctggcagaatctctgggaagaataatctgggaagaagctgggtcttggcggtaaagtagtgggtgcacagatgacttcatcctacacaggagccttggggtcaccggggagagagcactggacttagcatcagacatgaagtctgtatccaactttgccataagctgcataatcttggcgggcttcttttgctatctgagccttgggcttcacagagaggcctgggcttgaagatgcacaaacctccttgtagtactgtcatttactatcacaaacaacttcgtgaccttgagggccactgtatagcaatccttctgactcattgtttttgtttattckttttttctttttaatctacagaaacgttaatggacaccagaacggctactgcagagctgggctggacggccaatcctgcgtccggggtgagtatcaaaccattcgtctttcagtcctgctatgaggtcct

SEQ ID NO: 78649 - DNA, 737 bp, Homo sapiens
ccactgcccctgaggagcttagggagtagaggaacgggaatgtgagctgggcatgatgatgcaggtgacaggtgcagtgacagtgacttcagttcactctcactggtgaatatgatcactccatgaacttcctggttcatcccttaccaatgggaaatgaacactatccgtgaagtccccaaatgtagatcaaattctgatgacttttctttgtgcatgttagtgaaggcttacatcttagtccaaayggaatgctgatgccaactcccatcaaaaattacaaatcttggctcttctttagcttgggaggcatagagaatagtggttaccagcagaacctccaagtcctgtgttgtatgatcttgagaaaattacttaccttctcggtgcctcggtatcttcaatggaaaaatgaggctaataatcacatgtacctcataaagctctgtgaggatttaagagttaatgcagaaaaagaatttggcagagcatctagcacaccgtcactgctttataaatgacagccacactgtattagcatttcgacacaagatggaagccaacccagaagtgtgctccatacccaggttataaccatcatacaaccatcagtggcagtggaatgtggggctacactgaagagtgcataagctgctctcctagcccaggtaaacagagcatcagcattcttttcaaatatcagctgtttgcctattatctttattcctttttgccat

SEQ ID NO: 78650 - DNA, 737 bp, Homo sapiens
ccactgcccctgaggagcttagggagtagaggaacgggaatgtgagctgggcatgatgatgcaggtgacaggtgcagtgacagtgacttcagttcactctcactggtgaatatgatcactccatgaacttcctggttcatcccttaccaatgggaaatgaacactatccgtgaagtccccaaatgtagatcaaattctgatgacttttctttgtgcatgttagtgaaggcttacatcttagtccaaacggaatgctgatgccaactcccatcaaaaattacaaatcttggctcttctttagcttgggaggcatagagaatagtggtwaccagcagaacctccaagtcctgtgttgtatgatcttgagaaaattacttaccttctcggtgcctcggtatcttcaatggaaaaatgaggctaataatcacatgtacctcataaagctctgtgaggatttaagagttaatgcagaaaaagaatttggcagagcatctagcacaccgtcactgctttataaatgacagccacactgtattagcatttcgacacaagatggaagccaacccagaagtgtgctccatacccaggttataaccatcatacaaccatcagtggcagtggaatgtggggctacactgaagagtgcataagctgctctcctagcccaggtaaacagagcatcagcattcttttcaaatatcagctgtttgcctattatctttattcctttttgccat

SEQ ID NO: 78651 - DNA, 737 bp, Homo sapiens
ccactgcccctgaggagcttagggagtagaggaacgggaatgtgagctgggcatgatgatgcaggtgacaggtgcagtgacagtgacttcagttcactctcactggtgaatatgatcactccatgaacttcctggttcatcccttaccaatgggaaatgaacactatccgtgaagtccccaaatgtagatcaaattctgatgacttttctttgtgcatgttagtgaaggcttacatcttagtccaaacggaatgctgatgccaactcccatcaaaaattacaaatcttggctcttctttagcttgggaggcatagagaatagtggttaccagcagaacctccaagtcctgtgttgtatgatcttgagaaaattacttaccttctckgtgcctcggtatcttcaatggaaaaatgaggctaataatcacatgtacctcataaagctctgtgaggatttaagagttaatgcagaaaaagaatttggcagagcatctagcacaccgtcactgctttataaatgacagccacactgtattagcatttcgacacaagatggaagccaacccagaagtgtgctccatacccaggttataaccatcatacaaccatcagtggcagtggaatgtggggctacactgaagagtgcataagctgctctcctagcccaggtaaacagagcatcagcattcttttcaaatatcagctgtttgcctattatctttattcctttttgccat

SEQ ID NO: 78652 - DNA, 620 bp, Homo sapiens
gtcgattgaatattttggggaattctggaaaattgatcagaatgattgatggctcctttaagatggtctcttgagtttgaatatcaagctctggaaatcaggctcctgggttagaagaaaaggctggttagagaaagagaaaaaggaaacaatgtttgctttttatttaagaggtgaagtgtggaagagggaagctgcttagtcatgaggtttgaatttgagtttaggctctgacagcactgtggccaagtcatggtgtctccaaggatcagctttctttctcataaagaaaccttataaaaatataaatggccaagcgcagtggctcacacctgtaatcccagcactttgggaggccgaggcgggcggatcacgaggtcaggagctcacgaccatcctggctaacacggtgaraccccatctgttctaaaaatacaaaaaattagccgggcgtgttggctggcacctgtagtcccagctactcgggaggctgaggcaggagaatggcgtgaacccgggaggcggagcttgcagtgagccaagatcatgcccctgcactccagcctgggggacacagcgagactccgtttcaaaaaaaaaaaaaaaaaaaaaaaaaaaaa

SEQ ID NO: 78653 - DNA, 546 bp, Homo sapiens
tttcttgagctcataacaattactcatccttaaattctagtttgattggaaggcatcagaagtgctgatgccttctgcaaatgcaaagacatttccaaagaccacttgtgttgtttacaagatcattttcttatagtgttaagaaaaaacacttagtaatgtaatctgtttaaaaagatttttgaagaatcgtggtgtgtaatgaaaaaataaaaaataagataaaataaaataaaaagttattttacatgttgggatcattcacatcattttaaatgaacccactgataaggtagtcagtgcctgtctgtgcatcatgctttattcctttactactttctatcaactgctaggcatgatggaataaaatatttcaggccttttttatttcacataaatgttctaaaaaattttagcatgatgcagcagaatatagaattcaaagtgggacaggtgtygtggttcatgcctgtaatcctagcactttgggaggccaaggtggtaggatcgcttgaggccagaagttccagactaccctgggtaaca

SEQ ID NO: 78654 - DNA, 888 bp, Homo sapiens
attgcgtctgaagtgacacagctgttcttaattgaatagttatttaattaagggattgctactggcttcatctggggatgtcagtaccttaaaatggtgtgtatcaagtcagacagataataaactgggtcagactctactctcttattcccatggaaatcattttattttatttatttatttttttgacacagagtcgcactctatcgctcaggctgatcttggctcactgccaccttggcatgatcttggttcactgcaacctccgcctcccaggttcaagtgattctcctgcctcagcctcccgagtagctgggattacaggcacccgccaccacacccagataatttttttgtatttttagtagagatggggttttgccatgttggccaggctggtctcaaactcctgacctgaggtgaaccacctgccttggcctcccaaagtgctgggattacaggcgtgagccaccrcacctggctatttgttttatttatttatttatttttttttttgagacggagtcttgcttctgtggcccaggctggagtgcagtggcctgatcttggctcactgtaagctccgcctcccaggttcacaccattctcctgcctcagcctcccctgtagctgggactacaggcgcccgccaccacgcctggctaattttttttgtatttttagtagagacggggtttcaccgtgttggccaggatggtctcgatctcctgacttcctgatccgcccgcctcagcctcccaaagtgctgggattacaggcgtgagccaccgcgcccggcctgttttatttttttaaagttaatttttaaaaagatatatttttaaattcatagtaaataatacaaaaagcagctacctagttacatgc

SEQ ID NO: 78655 - DNA, 888 bp, Homo sapiens
attgcgtctgaagtgacacagctgttcttaattgaatagttatttaattaagggattgctactggcttcatctggggatgtcagtaccttaaaatggtgtgtatcaagtcagacagataataaactgggtcagactctactctcttattcccatggaaatcattttattttatttatttatttttttgacacagagtcgcactctatcgctcaggctgatcttggctcactgccaccttggcatgatcttggttcactgcaacctccgcctcccaggttcaagtgattctcctgcctcagcctcccgagtagctgggattacaggcacccgccaccacacccagataatttttttgtatttttagtagagatggggttttgccatgttggccaggctggtctcaaactcctgacctgaggtgaaccacctgccttggcctcccaaagtgctgggattacaggcgtgagccaccgcacctggctatttgttttatttatttatttwtttttttttttgagacggagtcttgcttctgtggcccaggctggagtgcagtggcctgatcttggctcactgtaagctccgcctcccaggttcacaccattctcctgcctcagcctcccctgtagctgggactacaggcgcccgccaccacgcctggctaattttttttgtatttttagtagagacggggtttcaccgtgttggccaggatggtctcgatctcctgacttcctgatccgcccgcctcagcctcccaaagtgctgggattacaggcgtgagccaccgcgcccggcctgttttatttttttaaagttaatttttaaaaagatatatttttaaattcatagtaaataatacaaaaagcagctacctagttacatgc

SEQ ID NO: 78656 - DNA, 715 bp, Homo sapiens
atgaatgaatctggcaatctaaggaaattagctctttgagggtcattatgttttcccaatttattattgtgttttaattgatggggggagctttttattgttgttgcagttcgtttttgtttttatgaagaaattttccatttttatgcagttaaatttatcaatcttttctttcactgcttctgaaccttgtctcttgcttagaaagatttaatccccatattggtttgctagggcttccataataaagtaacccaggctgagtggcttaaacaacacagagatttatttcctcacagttctggagactaaaagtccaagatcaaggtgtaggcagggttggtttcttctgagacctctgtccgggacttgccaggtaccttctgcacgtgtcttcacacagtcttrtctctctgcttgcctgggtcctgatctcttaaggacaccagtcatactggattagggcccaccctaacaacttcattttaacttaattacctttttgaagaccctatctctaaatacagtcacattctgagatactgggggttagagcttcaaacatgaattttggggaatccaattcagtttataacatcacccagaattatttttttatttctcccatgttttatttcagtacttttatggttttatttttaaatgttaaatatatgattcatctgaactttgtttggtataagaaatgagatag

SEQ ID NO: 78657 - DNA, 1065 bp, Homo sapiens
cttttgattgaaccagcactgagtacatgtcactgggacattttggaagtaaactatgcaattcacatcaataccaaattggctgtgctcactgtggtgttattataaagggagttaactcataatgtttggaaactcgacgtcactttaaaggtctgaaacttcagtgttatatattttttaaaatttctttataaaaatacctttaagtgccttagatgtaataaacactcagtaagtagctattgatttaatttccaccagaaacatactgcattggaagtcagaatagaagtaaaatgcaaagcaaattatcaatttgatatttactaggtgggtatggaagcaagtgacatgtatggttttggcaattcaagaaagatatatctgcccacagaactctacacaagtaatcatttgctaatctcaagagaaatattctttaaaaaacaaatccttttgtgtatgcttatgaagattaaaaaatctttcaaaacttcattgaaatgacaagcaaactatcatttctgtaaatgagctacaaatgtatgatttyacaattagaaaaatatttaaatgagaaatctgcaaccacaaagaagtttagactgaaacagtgctactttttttttttcctggcatagatagatgatcccctagtctttttcaccatagtctggagtccttgtaaagaaaccacacacaagttattctctgggcagaagcattttagcttccaactttaatttttttgttcaacaggcagatagtttaaaaagtcttctctcccatcttactctgtttcttaaaatccttcacatcttaaaaggatagaattatagtgctgttcattttgtaccttccatcctacctgctaagttggttttgttttttaataacctaggcctaattattaaaaattcagttgctctccttcctttccctctctctctctctctgtctgtccctctcttcttcctttcttccttcctccttctccaagtccctcttgtcctccccactccccccttgtcccctttagaagcccctgggatgacactgttc

SEQ ID NO: 78658 - DNA, 867 bp, Homo sapiens
cttttggaaccagaccaagagagagttagaattatggtatatgtcattgtaaacgtttgtgtatgtgtgtgtgtgtgtgtgmacatctcaggggaaatggttgtgaaagcatttatctttatcatttatattaagagagctgtcgttggcaggtgcaacctttggctgacaatgctggtctgacacttatgaaagaggtgggaagtggaggaggattgggcaggaaagacatcagctctgggaaagtttcagccagaccaatgtggagctcagcatgaagactattggttgagttcaatggacagatatggtgaactttatacctccgttgtgctcagtcatcaactgggagttgccaaggagaatgtggcagggcaggtatctaaagctgagacagatcctgaaatgactcacacctagaggttgtcaagtaagtgcactcctagtgcaggttttctcatgaaggaatacccgactggcacacttccgtgactaccacaaagactacttgatgaagtcaacaatagaaatatgaggaaggcactggaattggttagtattaagaacctttttttacatttgtatttccacaaaaatatcttttaaacgatccatcaaataaatgattaacacatctataattgcattgtgaaaacctatgcctgcttgtattaaagttttaaaggtaacacaatgttttattctaagctctgagaaagtcttaaaaactggatttttaaatgaaattgtatttattttattgaaaaccttattcaaagagagaaatatgtctacataaaaacatcaatttcttgttttatatattatcttgatgtatagaaataggcattacacttcaacatcttt

SEQ ID NO: 78659 - DNA, 867 bp, Homo sapiens
cttttggaaccagaccaagagagagttagaattatggtatatgtcattgtaaacgtttgtgtatgtgtgtgtgtgtgtgtgaacatctcaggggaaatggttgtgaaagcatttatctttatcatttatattaagagagctgtcgttggcaggtgcaacctttggctgacaatgctggtctgacacttatgaaagaggtgggaagtggaggaggattgggcaggaaagacatcagctctgggaaagtttcagccagaccaatgtggagctcagcatgaagactattggttgagttcaatggacagatatggtgaactttatacctcygttgtgctcagtcatcaactgggagttgccaaggagaatgtggcagggcaggtatctaaagctgagacagatcctgaaatgactcacacctagaggttgtcaagtaagtgcactcctagtgcaggttttctcatgaaggaatacccgactggcacacttccgtgactaccacaaagactacttgatgaagtcaacaatagaaatatgaggaaggcactggaattggttagtattaagaacctttttttacatttgtatttccacaaaaatatcttttaaacgatccatcaaataaatgattaacacatctataattgcattgtgaaaacctatgcctgcttgtattaaagttttaaaggtaacacaatgttttattctaagctctgagaaagtcttaaaaactggatttttaaatgaaattgtatttattttattgaaaaccttattcaaagagagaaatatgtctacataaaaacatcaatttcttgttttatatattatcttgatgtatagaaataggcattacacttcaacatcttt

SEQ ID NO: 78660 - DNA, 867 bp, Homo sapiens
cttttggaaccagaccaagagagagttagaattatggtatatgtcattgtaaacgtttgtgtatgtgtgtgtgtgtgtgtgaacatctcaggggaaatggttgtgaaagcatttatctttatcatttatattaagagagctgtcgttggcaggtgcaacctttggctgacaatgctggtctgacacttatgaaagaggtgggaagtggaggaggattgggcaggaaagacatcagctctgggaaagtttcagccagaccaatgtggagctcagcatgaagactattggttgagttcaatggacagatatggtgaactttatacctccgttgtgctcagtcatcaactgggagttgccaaggagaaygtggcagggcaggtatctaaagctgagacagatcctgaaatgactcacacctagaggttgtcaagtaagtgcactcctagtgcaggttttctcatgaaggaatacccgactggcacacttccgtgactaccacaaagactacttgatgaagtcaacaatagaaatatgaggaaggcactggaattggttagtattaagaacctttttttacatttgtatttccacaaaaatatcttttaaacgatccatcaaataaatgattaacacatctataattgcattgtgaaaacctatgcctgcttgtattaaagttttaaaggtaacacaatgttttattctaagctctgagaaagtcttaaaaactggatttttaaatgaaattgtatttattttattgaaaaccttattcaaagagagaaatatgtctacataaaaacatcaatttcttgttttatatattatcttgatgtatagaaataggcattacacttcaacatcttt

SEQ ID NO: 78661 - DNA, 867 bp, Homo sapiens
cttttggaaccagaccaagagagagttagaattatggtatatgtcattgtaaacgtttgtgtatgtgtgtgtgtgtgtgtgaacatctcaggggaaatggttgtgaaagcatttatctttatcatttatattaagagagctgtcgttggcaggtgcaacctttggctgacaatgctggtctgacacttatgaaagaggtgggaagtggaggaggattgggcaggaaagacatcagctctgggaaagtttcagccagaccaatgtggagctcagcatgaagactattggttgagttcaatggacagatatggtgaactttatacctccgttgtgctcagtcatcaactgggagttgccaaggagaatgtggcagggcaggtatctaaagctgagacagatcctgaaatgactcacacctagaggttgtcaagtaagtgcactcctagtgcaggttttctcatgaaggaatacccgactggcacacttccgtgactaccacaaagactacttgatgaagtcaacaatagaaatatgaggaaggcactggaattggttagtattaagaacctttttttacatttgtatttccacaaaaatatcttttaaacgatccatcaaataaatgattaacacatctataattgcattgtgaaaacctatgcctgcttgtattaaagttttaaaggtaacacaatgttttattctaagctctgagaaagtcttaaaaactggatttttaaatgaaattgtatttattttattgaaaaccttattcaaagagagaaatatgtctacataaaaacatcaattycttgttttatatattatcttgatgtatagaaataggcattacacttcaacatcttt

SEQ ID NO: 78662 - DNA, 1470 bp, Homo sapiens
cctgcttccccttcaagggtctctttattcgatcacaaagtcactgtcagcgacttggcctggccctctatggcttccaacaaggaaatgcttaaaagtcaggaaatgcatttgctgcctttcctagtaccaaaaattgactacaacctctttgggtaccctgagataaatcaatagcatttgctttttctttacttttctaacagaattccagaaaaaataaatctcatatatatatatctatatatagatatagatatagatatagatatatagatatagatatatagatatatatatgtgtgtgtgtgtrtatatatatatgtatatttatatttatatacacacattcatatatagagagatccctcaatcaagaagaggcaaaggatccagcatcctctgaggtgccccttggcctggtgcaggaaggccaggaggcaccagctgtcttgggaatcaccttgagatgtgcagtgctgagctggtgtggcatggatgggggtctgcaacagccttctccctctaaggaaggtggaactaggacaaaccaggggagccctcactcaagctttccacacatcctgaaacgtgagctgtacctgatggagctttgaaactaaaacccaaagtgcagatacaaaaggattccctgataggcctctaggggactgactccttagggaagagttccaagagcatcaagcagcaggggctgggggagccagcagggaggacatacgcccacagcccccaggcccccgaagacaggtgtcatggacacagaggcctgctcagccacaggagaggggctgggctctgtcccctcctcaggtctccaaccacagcccctgcaggccctcaggcaggggaacccaaaaggccagggcaaggctcggctcacccaggaaagcccaaggcaaacttatttatttatttatttatttacaggagacagggtctcactacattgcccagactggtctcaaactcccaggctcaagtgatcctcccatctcaccctccgaagtcagcctcctgattagctaggattacaagcacatgccaccacaccgagccatgacctacattctaactgtctcatttgcagggtggtgacatggagaaatagcactgtgagagttactattacagtgcttattttttacattttcttttttgggtttcagaaataatgcaggctcttgcttgctacgtttcaagcatcccctagcatttgaactccataagggcaaatattttgttaagttgattatatcccagtcttgacacataaataacagacttaaaattagtctttcttcattgaatgaaataccaatgtagataatgtagaaagtgaagtacttcttttattttaccctccagaaattgggatttttctctataggcattaaacaagcaaatacagtcttatgtcacttaacaccagggatatgttttgaggaa

SEQ ID NO: 78663 - DNA, 433 bp, Homo sapiens
ggatttcattgtgttagccaggatggtctcaatctcctgatcttgtgatccacccatctgggcctcccacagtgctgggattacaggcatgagccaccgggcccggcctaaagaaacctcttaaggatgggggagattataaaaaacattgatcagttagggtggggcagaaacaaatcacaatggtggaatgtcatcagttaagctattttcacttctgtggatcttcagttgcttcaggccatctggatgtatacgtgcaggtcactggggatatgatggcttagcttgtgctcagaggcctgacatatataataaatatattacatatgtaatatgacatatgaggatggcgattaaaaataacaaatatgcaaacaaawttttttttttttgagatggtgtcttgctctgttgtgcaggctggagtgca

SEQ ID NO: 78664 - DNA, 988 bp, Homo sapiens
taacttgcacattgtgcacatgtaccctaaaacttaaagtataataataataaaataaaaaagtagtttgatgagataataataactgtgtatcaagtccacaaattctacaagtcgctgttataattcctttattccctaatttttcagtgaaaattcaaaattatcatggaaacttaaaatatcctacatatacttttcaaatatctgtaaatgccagagtgacctttgccataaaaatggaattacacattaaacataataactgcaaggagaaaatttgaagtttatgattgacrtaataagtcttcaaattgttaacattaagagtttctgatgtcatttcttcgtgagcagatcttcctagatttgaataatctaagtatgtttacaagtagttttttctactttatttgacttgtcaaatacgtcgaaatatgattggctagcatgccagcagtgaatggataagatgccacacctagaagtctgtggcagagtcttcttactacaatgaatatattgtttgacaaactgagatgtatgttatatttttaatttttttgtttgccttcatctgttcactcggtattcatactttattttgtggatatcagagtcacagagatacattagtttcacttatttaattttgagattctattcttattaatattaatataaatgaaatgatgttataaaatagtattgaaattagtaacattgtaaaattgtttcatcttaaaatattgttcagtaaaacatttggggcaatattttcagtgatatattcatactttagaataatgcaatacattatgttaagtaaaggaagtaaaatactggcagcaaattctaaagaacttcctgaactataacttagacaaaacaacaacacaaactttttttaatatattttttaaaagatcgatatatattatatataagatagatagttctctaggttttaaatgtatatacaaataaa

SEQ ID NO: 78665 - DNA, 404 bp, Homo sapiens
  misc_feature (1)...(404): n = A,T,C or G
gnnnnnnnnnnnnnnnnnnnnnnnnnnnnnnnnnnnnnnnnnnnnnnnnnnnnnnnnnnnnnnnnnnnnnnnnnnnnnnnnnnnnnnnnnnnnnnnnnnnnggcaccccccagcacctgaggacccacctctaggtgcttccccagtacctaccaggcaccccttccccctagacccactgccaggtcccacccccaggacccaaaactgggtgccccccggacccacygctaggttgccccaccaggacccatcacccggtgaccccaatacccaccgccagctgcccctccttcaggacccaccaccaggctccctcccagcacccattgccaggcaccccgttccccaggacccatcactgggcaccccccttggacccaccgctaggcactccccctcca

SEQ ID NO: 78666 - DNA, 1998 bp, Homo sapiens
tatgtatgtatttatatatgtcatatatacacatatatgtatacataaaagtatatgtgtataattattttatatatatttttcagttgaccaaaaagctgaaaaagcccacttaatatggggccaaaaattaacataatacaactatataaatatatgaactagtgaagcatgttataaagattaaactgttttaacccccaaattacttattttttcattaagcaatgaaaaattaaaattttaaagcattacatgaataacctatatttggctattagtttagaaagtgaatggaatttacagtgtcataccataattttgtttcttgcctttttgttcctgaacacttgtaatcttggtaatatatattctgatatttagatggtctcacaaaatgcttgtgtatccaggtcctccacatttcattcacttgctttaagaaacaggttgaaatatgatttcaaatatctttctggacctacttgaaatatatgatgtaatttttcatttaaaatatctcctcagccccatttgggaaaaacagcataaaggattgaatgtactgactgcacaattatggatatttagtctaaaaggaaatttcccttaaagtaatatgaaactattacttttctgaaattattcttggtttattytttataaagtagatatgattttctttataaagtcaaagtggtgtcagagattgcttttgtcacattattctgcttgctgtacatttttcttggaagcatttgcagctcttaccctgcagtcagactgagacccaggactgaaaccacaagttcacgtttggttaacatagatctgggtgttgcagagatcttaagactagagctactaaaagcatgatggaggaaatgaagctcaaatataattatgtttaataaaatgtaatattttgaaaatgagccttatcataggaaacagaaaactgctgaaatatgatttttaattcttaatctaagtggccttgcctaaatgccagagggttggctgttcctcacaaggatggattcacgggccatgtttcctttgaaagtaatgcataggtagtgaagacatctacattctatctcctgtccactcactttgcttcctctctcccgcctaggaattgctctaagtcgtctcctgtttcctatagtagttgcaagttacctggtttcatggtgcttctcttgaggttctgtgcctcctggtgacaagaacctacccttccctgagagaaggatgctggtggcagcaacatgtctggaaatccccatcaggaacatacatgggagatgacagtggagcagccatttagagagtgaattccaggcaacagcacagctcacagggcctcttccacccagtgccacaaaacacatcaccctccctttggactaatatatttgccctcctttctctacttcctttctagctggaagttccaagaaaatgtgttttgtgaaacaatggaattttcttggtccctgaatttatcttgaggtgaaatgatagtagttaaattcccagattttacagagaggagaaagatgccttgaggacccaaacaagtacagccaggttcaaacccagtgtggcaaatccccaccaagactcttttccctccagccctgttctcagaaataattaagtaaatttcaaactcctgtccaaaatcttggtgacctgtttaatctctgtgagctctttagaaagtgtttcactaaaatacactttccaactctctgtgctcaaagacgtgtcctgactctgcatttagagttctttccacccctattctaaaatctggagacaatctaagagtaaataacacagaacaagacattcacatcttcacagatagttggaaaagctccagcatccattgtgctaacaggcggggataaaatgaggggtggcatggtccatgccctttaaatagctattctctacgctgcattgagtcctttacagagacagaag

SEQ ID NO: 78667 - DNA, 396 bp, Homo sapiens
  misc_feature (1)...(396): n = A,T,C or G
cnnnnnnnnnnnnnnnnnnnnnnnnnnnnnnnnnnnnnnnnnnnnnnnnnnnnnnnnnnnnnnnnnnnnnnnnnnnnnnnnnnnnnnnnnnnnnnnnnnnnaaaatcgtgatgtgtttttcatttgatgtgtgcatttaattgacgctcattactccatcaaaagcatcctgaaatcaaggaaacagtacttaytagacagaatgtttcagtgatcgatttctgcctattaaaccacccaaaacttaatgcattaagactaatttattattgctgtgattctgggacaaaacataactaactttttattcccctttcaaggtgtattttctgcagaacccccatctcagtaaatgccactatcatccactcccttgctcagctccttaaacttgga

SEQ ID NO: 78668 - DNA, 654 bp, Homo sapiens
caaaaccacttcacatgcgttatctccttaggtccccacaacaaccttgggagtttgcaaagcaatttcactgaggttatccactggattcttgaattctcatccctcatttccctgcagtccacacgccagccaagcctgtcgttttacagttctgcaaacacagcatgctttcacacttccttgatttttcacttgcggctccctctgccaagaaagaaacccatccttgcccatccaaggagtgtcctatttattcaaggaaaccctgggcaggcagggaagatcctcttcctcctggggcagctaggaaggtctgggcacctttgagtagggagcacccaacaatgatgcccatgtcaggggtagaccagcaggccggtgggcacaagttctgtcctgcatctgatttgggtgtcagtgaaaacaatgttccccatgccccctcttatagaagtctaacaagtgatccgttagagttgakcagacttggcttcaaatttcagctcttaacttaccagctatgtaaccttgggcaagtctctaaacccaatcctaaatccccttctaaatagagtccattaacatctaccttcaaagcaagaggagctgcaatgactattgcttataaaacacttgagggagagagagctt

SEQ ID NO: 78669 - DNA, 3218 bp, Homo sapiens
agctcagttcctagctctcagtacgtgctcaatataggtgcaatgaaggaaactactttttactacttaaaatctaggctgctctttaagaagaatgaatttctttttttattttattttactttaagttctgggatacaggtgcagaacgtccaggtttgttacataggtatacatgcgtcatggtggttttctgtacctatcaacccatcatctaggtgttaagccccacttgcattagctatttgtcctaacgcatcctccccttgcctccatcccccaccaccccccartaggccctggtgtgtgatgttcccctccttgtgtccatgtgttctcattgttcaactcccacttatgagtgagaacatgcggtgtttggttttctgttcttgtgttagtttgctgcgaatgatggcttccagcttcatccatgtccctgcgaaggaaatgaactcattcttttttctggctgcatagtattccatggtgtatacgtgccacattttctttatccattctattattgacaggcattcgggttggttccaagtctttgctattgtaaatagtcctgcaataaacatatgtgtgcatgcgtccttatagtagaatgatttataatcctttgggcatacaaccagtaatgggatggctgggtcaaatagtatttctggttccagatccttgaggaatcgccatactgtcttccataatggttgaactaatttacactcctaccaacagtgtaaaagcattcctatttctccacagcctcgccagcatctgttgtttcctgactttttaataattgccattctaactggcgtgagatggtatctcattgtggttttgatttgcatttctctaatgaccagtgatgacttcagctgcatggatgaaactccttatctaactttttgatgagctttttttttttttatgtttgttgcccgcactcagaagagtaaatttctttacagagaaggcctttgtgttgctggatgtcctcataggtttgggtttataaatcttccaataaaagctaccccatctctgttcccagggtctgggtgtcgccaggattccaggctttggggaatgggggaagctaatctttctaatactgtcagaaaaatgtggacttcatagtgatggcaaagcactgggaggcataaacagagtgcaggcaggatacaggggctgtttgcttgtcatataagccctctccaggtgagatctcggctcattccaacctctgcctccttggttcaagcaatactcatgcctcagctgggattacaggcatccgccaccatgcccagctaatttttaaaatatttttagtagaaatggggtttcacccctgccccatcttaaggatccaaactcataaaatgtttagtgtgagtgcattttgtttttttttaaagaaaccagtgaagaagctgaccatggtacatggtggtaaagagcaaagcattcctaggcatttggaattggcagaggacaaacttgtataatttagatttttgaagggtgagggggtcctctagattgcccagttcgagttggtggaatgaatgaataaatgagtaacggattaatgaacagaagaagttaaaaatgatatacaacatagattcttatttttaacaaaactcattgcttcttatctggaagggccctgctcctggctctgttccagcccccactttgttcagaggaggtgcctcaggcctagagaggggaatagattgacctgaggccacacagctgcctgattaatggtagaacaagagctggagcccaggaccctcaattccaattcccatgccatcttatcccaagaacttttgtaatgcgggaagaggaagttttcagtatgcatgcaactttaatggttttgccctgtggtctctcttcattctcaacactggtttctcctgaggtttcacaagaccaagctagctgacctccctctccccctgacccacgttgtacaagccccattaagagaaggctcactgaggaggtgatggaggtcttggagttcacatatccatgaggtctcaacatcccttctttctgaaccattgcttactgggaagaccagtttcctgcctattttctgccagaagcagcttaattttttctgtgtcagcatcccctcagcaagaaaggtcatttgctaacaaacaaccggtgtgttcctgagagcacagatgggaattctggactggcgggcgccatttgagggtgacgctactgagtgttctcacaccctcggcttccctctgaacaccacggtcaaaccaccagcttccaaagagccatgatcaaaacaacagtgatgatattgaaatgaacagcacatatgtgtcagacactcttctaagtgctatcatatagtaataattacttatcctgtgaccctctgaggtcagtaccacaatcacccccattttattatccctcagagaggacatggagcttatccaagctcacacaggtaggaaatggcaaagctgggatttaaatcccaatggttggactcctgggtctgggatcccagctactcccttgtgcaggaggaccactgggaagtcagacctgggtgtttaatttcagttctgcctttacacactaatgtgtgaccttgggccatgcctaagcctcctcacctccaaggtcctcctaggcatgctgatactctcacagggccattgtgagaattaaaatggatatctacaaagtgcttcccagtatactctgcccagcacaccgaaggcactcaataaatccaaaaagaaaggaaattatagaagccatttgtttctccaaaccttcgaccatctgagatttgcccataagttttccctcttacccagcccatccctatgtagccccaagatggttcctatctttactatgttgaattgatttggaaaaatatttagatgataagaatatcatgtgcatttatgatgttcctctcttggcaagtggtttgcaaagctcatttctatactgccagacttcaaagttcagtcttatggcaccgaatcaacccacaaaaggtttttggggcaatatgcattgaatatttattatatgccaggcatgggcctaggcacattgatttttatcctcacattgagggcaaatgcattttcctgtagcaatggtgtgtgcatggtgatttccaaactgcaagg

SEQ ID NO: 78670 - DNA, 606 bp, Homo sapiens
agaagatgagaaaggactaatggacttaagagaagaatactttcatctgtccttcccacttgtattagatatagtgatgataacccttcagatcatagtggggcatataaaggtccagatagaaataaaattctccgagagggmtgtttgcttgtcactagcccacagggcccagctgtctctctataactatgtttttaagcattctctgactgagctgttttataggaggccttcttccagaaagaacttgagtagcctatagtgatacataacattaatggtgggagccaagcctgaaaggaaaactaaaatggaaacctaaatggagcaggagtgagcctcccatgaccaacacactttctctgcaggtggctcagccaagctctctgcctaagctggcaacacaacaacaggaacacatcagaaacacaaagtatcatgtttggaagagaccacaaaaacaaagcatcccattgctcagtaaaaccgtaaccattcagaagttttcccaggagttctcttttaaaatgatatcaggaggagtagtatcttccacagcatcttcaacggggtcatcctcacagtgaatggatctttttacag

SEQ ID NO: 78671 - DNA, 642 bp, Homo sapiens
tgtttctatcagagaatatattatctatatctatatctcccagctttgcgtgagctgcagacttgataagcattacctgctgcgtgtgtatgtatayatatacatcatcagatacattgctataatgatcatatgacttgttagccaaaccaggacaattttgaaagtgaaaggagcactaataataattatgccagcacactaggtataaacagttactgttctggacaaactgggattcaggattagcttacccactaacaatgggaaaacagaggtgcagaaacaagtttgtgggggaaaaagtcaaattagaaatcaagactaataaatttgctcaaaaccgtacaattacatagaaactgaataacctgcttctgaataactttttggtaaataatgaaattaaggcagaagtcaagaagttctttgaaactaatgagaacaaagacacaacatgccatattctgtgggacacagctaaggcagtgttaagaggaaaattttacagcactaaatgcccacatcaaaaagttagatctcaatttaacaacttaacatcacaactaaaataactagggaatcaagagaaaaccaaccccaaagctagcagaagacaagaaataaataaaatcagagctg

SEQ ID NO: 78672 - DNA, 642 bp, Homo sapiens
tgtttctatcagagaatatattatctatatctatatctcccagctttgcgtgagctgcagacttgataagcattacctgctgcgtgtgtatgtatacatatacatcatcagatacattgctataatgatcatatgacttgttagccaaaccaggacaattttgaaagtgaaaggagcactaataataattatgccagcacactaggtataaacagttactgttctggacaaactgggattcaggattagcttacccactaacaatgggaaaacagaggtgcagaaacaagtttgtgggggaaaaagtcaaattagaaatcaasactaataaatttgctcaaaaccgtacaattacatagaaactgaataacctgcttctgaataactttttggtaaataatgaaattaaggcagaagtcaagaagttctttgaaactaatgagaacaaagacacaacatgccatattctgtgggacacagctaaggcagtgttaagaggaaaattttacagcactaaatgcccacatcaaaaagttagatctcaatttaacaacttaacatcacaactaaaataactagggaatcaagagaaaaccaaccccaaagctagcagaagacaagaaataaataaaatcagagctg

SEQ ID NO: 78673 - DNA, 642 bp, Homo sapiens
tgtttctatcagagaatatattatctatatctatatctcccagctttgcgtgagctgcagacttgataagcattacctgctgcgtgtgtatgtatacatatacatcatcagatacattgctataatgatcatatgacttgttagccaaaccaggacaattttgaaagtgaaaggagcactaataataattatgccagcacactaggtataaacagttactgttctggacaaactgggattcaggattagcttacccactaacaatgggaaaacagaggtgcagaaacaagtttgtgggggaaaaagtcaaattagaaatcaagactaataaattygctcaaaaccgtacaattacatagaaactgaataacctgcttctgaataactttttggtaaataatgaaattaaggcagaagtcaagaagttctttgaaactaatgagaacaaagacacaacatgccatattctgtgggacacagctaaggcagtgttaagaggaaaattttacagcactaaatgcccacatcaaaaagttagatctcaatttaacaacttaacatcacaactaaaataactagggaatcaagagaaaaccaaccccaaagctagcagaagacaagaaataaataaaatcagagctg

SEQ ID NO: 78674 - DNA, 805 bp, Homo sapiens
caatgacctgtgttgtgtgtggttctgcttctggttaagccagatgctctgcccttccatgaatgcgtgctgccttaattactataatttgtcaagcattttgtgacacaaaatacacaacgcaatgatgttttgtgtaaaggtttggtatgattttccttttatggtttttgttatttacatttcattttctatctttcttgcttttatatactttttggctttttttttttttttttttcagatggagtctcgctctgttgcccaggctggagtgctggagtgcagtggcacaatctcggctcactgcaagctccacctcccgggttcacgccattctcctgcctcagcctcccaagtagctgggattacaggcgcccgccaccatrtctggctaattttttgcatttttagtagagacggggtttcaccgtgttagccaggatggtctcgatctcctgacctcatgatctgcccgtctcagcctcccaaagtgctgggattacaggtgtgagccaccgcgcccagcccctacttcttgtttttcaatgttgtatccagtgaccttgctaaatttgcttattctaacagttggcccctagcatcttgattttctaggtatattgtgttgtctgtgtgtaatgtcagtttttaaatttcttctttcctaatcgttatgccttttgtttctttttcttgcctcattatacttggaatagaagtagtattagcaggcattttggtcttgttcctgaaggtaaccattttggtttccattgtgtggtcccgtcacatttgtttcatt

SEQ ID NO: 78675 - DNA, 805 bp, Homo sapiens
caatgacctgtgttgtgtgtggttctgcttctggttaagccagatgctctgcccttccatgaatgcgtgctgccttaattactataatttgtcaagcattttgtgacacaaaatacacaacgcaatgatgttttgtgtaaaggtttggtatgattttccttttatggtttttgttatttacatttcattttctatctttcttgcttttatatactttttggctttttttttttttttttttcagatggagtctcgctctgttgcccaggctggagtgctggagtgcagtggcacaatctcggctcactgcaagctccacctcccgggttcacgccattctcctgcctcagcctcccaagtagctgggattacaggcgcccgccaccatatctggctaattttttgcatttttagtagagacggggtttcaccrtgttagccaggatggtctcgatctcctgacctcatgatctgcccgtctcagcctcccaaagtgctgggattacaggtgtgagccaccgcgcccagcccctacttcttgtttttcaatgttgtatccagtgaccttgctaaatttgcttattctaacagttggcccctagcatcttgattttctaggtatattgtgttgtctgtgtgtaatgtcagtttttaaatttcttctttcctaatcgttatgccttttgtttctttttcttgcctcattatacttggaatagaagtagtattagcaggcattttggtcttgttcctgaaggtaaccattttggtttccattgtgtggtcccgtcacatttgtttcatt

SEQ ID NO: 78676 - DNA, 756 bp, Homo sapiens
tgtctgagctggtggacgctacactgctcacrtagctggtggtgtctgagtagttgtccaggctggtcttactgatgtcccggctagccagcaggtggctcgggtccagctcataagcgggaaacccttcacaactgttgtctcgggaagaagggttggcattttccactgaaaagtctacacggaacccctggtccttctgcctgtggcgctgtggggggctgctcaccaccccatcctcgtcagagtgtgtgtgggctggagtggagggcagcaccaactgaccatcgctctccttcccaatacagcaggaggagtctatttgtgatggggtgttttctatgctgccttcctctgtctcacccagttctggaggactgatgcttgcctggaagcggatggctccttcattgccatctggatatgattcttcttcattaatggcacttgggtagctggccttaaagtcatcagggatgagggcctcagaggggcaggtactgaggacttcaatactgtcctcgctgatggtcctgtggctgactgctttgctccggaccacctgggggctcaatggtactgtgaggcttgcctggctgtcagatttagaaagcacggaggtggatttctccgtgcccaaaacttcaatactttcaccactgctgatactccctttcatatccatatccaggtagtccaagttttcctgggggtcgaaactgctcaactcagtcacttccacttccttgtactcct

SEQ ID NO: 78677 - DNA, 756 bp, Homo sapiens
tgtctgagctggtggacgctacactgctcacgtagctggtggtgtctgagtagttgtccaggctggtcttactgatgtcccggctagccagcaggtggctcgggtccagctcataagcgggaaacccttcacaactgttgtctcgggaagaagggttggcattttccactgaaaagtctacacggaacccctggtccttctgcctgtggcgctgtggggggctgctcaccaccccatcctcgtcagagtgtgtgtgggctggagtggagggcagcaccaactgaccatcgctctccttcccaatacagcaggaggagtctatttgtgatggggtgttttctatgctgccttcctctgtctcacccagttctggaggactgatgcttgcctggaagyggatggctccttcattgccatctggatatgattcttcttcattaatggcacttgggtagctggccttaaagtcatcagggatgagggcctcagaggggcaggtactgaggacttcaatactgtcctcgctgatggtcctgtggctgactgctttgctccggaccacctgggggctcaatggtactgtgaggcttgcctggctgtcagatttagaaagcacggaggtggatttctccgtgcccaaaacttcaatactttcaccactgctgatactccctttcatatccatatccaggtagtccaagttttcctgggggtcgaaactgctcaactcagtcacttccacttccttgtactcct

SEQ ID NO: 78678 - DNA, 1108 bp, Homo sapiens
gagaagtaattgagatcaaaagtgccaaaaactttggtgtcattggggatggtcagtaagggttggggtcccacctgctcagagaactcggaaataagaatgaagtccctcgaaaacttggccccggacagttttgaccaggggttagcaccctgactggcgaaggggaagagcggcaccgagtactcctcaggcagggccggctcattgtaaggctcttcttcatactcttcctctttggtgaaggccactacgtcaggggcgctgatcatatttccagatatatgaagaaaacattgagaggaagtgggaaagaatgcggtgttaatcgacgcgcagaaggcaggcctccggagaaggaagtgaagcccttacggccttctttgcgactccccgaacccggggtcctaggctgcttctcacacacccgaggagaagaactctagcagccccctcacagttgtagctcctccggwgctctctgaggcctcatgaacgccaaggccgcaggcccaactgcccttctcttcttcgtccggcgagcgcggccagcacaagaaacctgctgcgaaatcacctgcactctccggaacccactgcgacagcaaaagcccccgctctgaacaaggcttaacgcgaggctacgggacgccgcaggggtcagccaagcgctgctgcccctcactgcccgagggcagaaaccgtcgcggctcctaggacgccacaacccggatcctgctaccgcggcgccgccatcttgacatcacatgactcctggtgtccgcgccgcgtgacccggaagcgtcctcgtagacttccgagcaggagattaaaaagtcatgagaaagaggccttggatgggagtgtctggcggctccccgcaagaaggagtccgattaaccaaccactgccgggaaggaggggaaagaggggcggagtgagacgggggcggcgggaaggtggcagaggggaacgtgcttggacgaggggcgcgggacagtctgggagttgtagttccaggtcgctgtggggcgcgcgcctggcggaagtagctggagaaggcgggcggaagttccacgccaagatactggattcggtgctgaggcgg

SEQ ID NO: 78679 - DNA, 1108 bp, Homo sapiens
gagaagtaattgagatcaaaagtgccaaaaactttggtgtcattggggatggtcagtaagggttggggtcccacctgctcagagaactcggaaataagaatgaagtccctcgaaaacttggccccggacagttttgaccaggggttagcaccctgactggcgaaggggaagagcggcaccgagtactcctcaggcagggccggctcattgtaaggctcttcttcatactcttcctctttggtgaaggccactacgtcaggggcgctgatcatatttccagatatatgaagaaaacattgagaggaagtgggaaagaatgcggtgttaatcgacgcgcagaaggcaggcctccggagaaggaagtgaagcccttacggccttctttgcgactccccgaacccggggtcctaggctgcttctcacacacccgaggagaagaactctagcagccccctcacagttgtagctcctccggagctctctgaggcctcatgaacgccaaggccgcaggcccaactgcccttctcttcttcgtccggcgagcgcggccagcacaagaaacctgctgcgaratcacctgcactctccggaacccactgcgacagcaaaagcccccgctctgaacaaggcttaacgcgaggctacgggacgccgcaggggtcagccaagcgctgctgcccctcactgcccgagggcagaaaccgtcgcggctcctaggacgccacaacccggatcctgctaccgcggcgccgccatcttgacatcacatgactcctggtgtccgcgccgcgtgacccggaagcgtcctcgtagacttccgagcaggagattaaaaagtcatgagaaagaggccttggatgggagtgtctggcggctccccgcaagaaggagtccgattaaccaaccactgccgggaaggaggggaaagaggggcggagtgagacgggggcggcgggaaggtggcagaggggaacgtgcttggacgaggggcgcgggacagtctgggagttgtagttccaggtcgctgtggggcgcgcgcctggcggaagtagctggagaaggcgggcggaagttccacgccaagatactggattcggtgctgaggcgg

SEQ ID NO: 78680 - DNA, 612 bp, Homo sapiens
ctcagccaccaagatgcttatgttctttcttgtactgagtcaggctgaaagaaaaaaaaaacagagaggaaattagatgtgagtctgagagccccacccctgccaagaggcccccagccctgaccccaggctcccccactcactgggcatcctcgccctccagcaggcggtggtaggtggtgatctccagctccagccgcatcttcatgtccaggaggatcttgtactcctggttctgctgctccatctcgcagagaagctgggccagccgctcctccacactgccgatcagtccctggatctgggacagctgcatgcagtarcggttctctgtctccgccaggttgccctccagggatgctttctgcaggagggcaggaagaccaggggtcagtgagggttgtcagtgtcctcttctgggcccatccccatgcacaggactgttcctaccatgctgagctgggactgcagctcgatctccaaggcctgcatggtgcaccggagctccgaaatctcgctcttgccgctctggaccagctcactgttggtagccacctcgcggttcagctcctctgtctgcagacagaacacaggacagggtggtgtgagcct

SEQ ID NO: 78681 - DNA, 1915 bp, Homo sapiens
tgcatgtgcaagtatctttctcatataatgacttcttttcctctgggtagatactgggattgtggggttgctggataaaatggtggtcctacttttagttctttaaggaatctccacactgttttccatagtggttgtaccagtttgcattcccataattgctttgacttagaaaatgatggctgtttgtaagccccttgtgagcaacttttttttttttttccatttttgagtcagggtctcattctgttgcttagctaaagtacagcagtgcaatcatagctcactgcagccttgagcttytgggtgcaagcgatcctcctgctttggcctcccgagtatctgagactataggcatatgcaaccatgcccagctaactttttttttttttggtagagacagggtttcaccatgttgcccaggctggtctcaaactcctgggctgaagtaaattgcctacctccgcctcccagagtgttgggattacaggcatgggccactgcacctggccgtgagcaatttttaatagttgtctcttgtctcttctatatggcctctgttcttaattggtataacccagttttacctagatgaggtcattgctcagtgggtctgctcgtccaggctctgcagaggtctactttgctctggaagtgtttcctgctccttcttttcccacctccagtggtggagtgtgtgctgattggatagagtccatgctctggaaataggaaccaattttctctcctcactacttctttttatttctaactgcttctgttcatcttttcttggctgcattcattttccctctttactgctgtagtttattgctctttgctgactcctttatttttattttccagacttgcctgaaatgcatcttgattctggcatctttagatgtttaaagccctgcactttgttactaatgatttccctcattttgcagaattccattcagttgcagttctatttggcaagaccctgcttttcttctttcttaaatcattacattttaatattcttctcttcctgctcttttatagaaatttgtatttcattttttaggttgtaataatggaccttcaacgccctacagtttgacttcttatcatacttacttgttttcagaatcatatgttcatggagcagaggcacttttatgctgtccttgctttttctaaaaggcaaatctgtccataccattttcgtactcagcacccttcataggctcttgaagatcagctctgaatgccccatcccagtgttggagaccagtggtgtccccctcccttcacctgcccgctacgacactagctcagcagttctccacaattggtttcaggacccctttatgtaactcttaaaaattagtgagattcccctaagagcttttgtttgtatagattgtatctagtaatatttactgtgttagaaattaaaattaaagaaatttaaaaatatttataaacttgtttaaatataacaataaacccattatatgatatatgataatataaagtagcatttttaatgaaaagtaaatatttccaaagcacaaacatttagtgagaagagtgacattgttttactttttcccaaatctctttaatgtctctcttaatggaagacagctggagtctcataaatgcttttgcattcattctgttgcagtatattgtgttggttgaactatatggagaaaatccagccttacacagacatgtagttagaaaagggaggagtgttttaatagccctttcagttaattgtggatagtctttgaaactatatcagaacttgacccaggtgtaaaggtttgttgcaacatagactctgaaaccaatcaatgaacttttcataatgctgttacattaaagtctgttgtcctatcacatccattgaaaggat

SEQ ID NO: 78682 - DNA, 1085 bp, Homo sapiens
tctaataaaaaggaggataggaagcagttagcattcacatgtggtggccaacaatatatatccatggttttgccccaaagttatgttaatgaagctgtcacaataaattctgaaggggcctagcccatctggacattccaaagactatcacatggaacatcatatattaacactaacatcatgttaatgagacttgatgagcaagaagtggcaagtatgttaaagggatggaaagatgtatgtactccagaaggtgaaagataaaccccataaaagattggggcttgacacattgtttttaggtgtctactgctatgtggcatgtcagaacatcctaggtaaagcaaaaattaatgcaccttgaaaatgttccacccttggatcaaataattgaataatctgattcatttattgggtgacacagaaaaaawttttttttttttttttgagacggagtctcactctgtcgcccacactggagtgcagtggcgtgatctcggctcactgcaagctccacctcccgggttcacgccattctcctgcctcagcctcccgagtagctgggactacaggcgcccgccaccactcccggctaattttttgtatttttagtagagacggggtttcaccatgttagccaggatggtctcgatctcctgacctcgtgatctgccctcctcggcctcccaaagtgctgggattacaggcgtgagccaccatgcccggtgaaaaaattattttgtgagaaagcccagaactctggaaagaaagagctgtgtaggaggttcaggatagggtacaagtagtcctgctactttggtcaaataacttggtagatcccatactagaagaatctctggtaaagaaaaatgccttgtggagcctctggcaagtttcatcgggaaagctgtgttgcagacccttaagattctggaacaaggctatgctatctgtagcagaaacctatatactatttgcaagacaattcttgtcatgctgttgagtcctggttgagactccagcaagtggacaggatgatttgatccagcctttgtctttggctacctcagtgggaattatgcatc

SEQ ID NO: 78683 - DNA, 943 bp, Homo sapiens
tttcatgaattactcatgactgctttccccacttctttgttggtgagtttgatctttaagattcaagtatttcctccactcaggtaaatagtctgaatccagcttcaaatagaaaaggtcagagagtgagcctaagaatcctaagtataaaagcacgaggcagaattcatggatgcctaaacttggaaacacacgcttcagttcttcttcatggtgtctcaaaatatcacagatcaagttacagtctctcgtgtccttttccaacctgtctatttcctctgtaaacaaagaggaatttctcttttacttcatttctttgtttctggaatcaatatgtagtacttgtgtgcatgtttcaaaacatcacacaaatggttttaactgtgatgtcattctgaaacttgcttttcacagttggtattgttttccacttccatgtgggttgatctgcataaagtcatttaactcctctatagagtgcccttctgagaacatatcccaatcttctgtgttgtgttgttgctgaccgtttagcctgtttctggtgttctgcctttacaacatgctgcaggggtgcataggtrgaaacatgttggtagagcctgtctctagaagtagaattcctggggcaccttaatgtcactataatcgtcaaactgctcttcaaattgtttaaatcaatctgtactcctagtagggccaaggagagttaacattcgtctactttctctccaataccaagtattattagactttttaattttagctactgtgatggttgtgaaaaggtatctccagtggaggattcaagttttgtagggcccatctcagttcttttaacagaaagaatacaaaattgtaaatacaaatttagtcatgacagtggatatttatttggaatgaaaaaacaaatcacaatgaattataaacttaaaaatgcttt

SEQ ID NO: 78684 - DNA, 591 bp, Homo sapiens
tcctcttgcctcagcatcttgagtagctgggactacaggcgtgcaccaccacacccagctattwaaaaaaaaatgttttttgttgtgacatggtcttgctgtgttgcccaggctggtcttgaacttctcatctcaagcaaccctcctgtcttggcctccaaaaatgctaggatttcaggtgtaagccacctcatctggcctgaaatagctgtgtttaggtgtttatacctctattagaaagtagatcacttgataacttttaatgaagcatgataatattaccatagcttgcaggtagtggtgtttgtagtaacaaagggaactaacctatcaagtcaagtaattaactgaattagaagctgtgttaatggaagagtcacctcccaaaggttggattccccacatagagtgtgagaagggagtccatgggctttctgggccaagtttgtgctgcatgtggggctcacaggagaaggccaaggcactatgcaaaccttggcttcactccctcctggcttacaaccctgcagagtcacctaacgtttctcaatgtcagtgtagttagtctctgagggagttagggataataac

SEQ ID NO: 78685 - DNA, 585 bp, Homo sapiens
cacaaagcgccttgaaagggcactggctggaagtggggaccttgaggttagtgttggcactggggcaagtggctcaggcaggcctggcccctcttgaggtggcgggacctggtttttgaggtctccacctctctcaggatcttgggcaccggtgataggagacaaagcgtgctccctgccaccctccagaagtttacgggaacgatgatgagataacgtgattaggtgggacataattaaaggacaagaggaccacactttctatgccaggctgaaggtgatcaggtgccaaacacattatgatacaaagtgtgttggtgaccgagaagaggagtgatcrgggtgaactggagtcttggggaaggtcttctggacaagtggcactcagttctttgaggggcttagggtttgtccaccttatagacaaacagcttgaggcccctaaaggctccatggggttcctgcatcacatggcctgacagtggcagtgtcccagttcccctggctctgggcaagcccctagcatccttcctgtgtgtccgtctccccaacacactggggctgcaggtgccctatattcatgca

SEQ ID NO: 78686 - DNA, 738 bp, Homo sapiens
tgctgtctcggctcacagtgacacaggcatagcctctaggcctggtccaggccataggcccttatctgggctaggctctaagagctgccttgagagctccagacctcagactagcacaggggggcaggacttgtcacttgggagccacaggagcaagcttagggcagggcagggccctcagttccagtctcaactctgccaggtgatcttaccccagtcccgacacctctctgccccagagaactgacctgtcccgggatgatcaccaccaccttcctccctcctgggcctcggtttccccatctgtacayggggctgtgagaatcgtgtttagtgggatggttgtgaggatcgttgtgtggagagagcagagcacgagcctgccctgtgctggggctgcacacgcttgggccaccaccgcttctgtcctgctgtctcctgggagccacagcctgaggtgcaggcctggctgtgggaaggccagcatgctggtccagccagttgtccacaggtctgccacaaggccctagtgtgtgtctggcaaagacagaaagcagttgttttagttggacaaacatttcttgggtgtctacgccgagctgggtgcctggaatatggtagtggctgagctggcgatcactgagggtcaatgggaggcagagaagttctgaggactccagggtcaggtccatccatggccaggtggctactccagaaacactgacgcagggtgtgcac

SEQ ID NO: 78687 - DNA, 538 bp, Homo sapiens
tgaagagagtatccccrtaggtgctttttattcctctcatttggtttgttgagatctgtttagtctctatgatagtttgctatgtttaaaaacataggagtcattctgcttcttcatttcatactaggacatggaaaatgtctgtaaggttttctttggatacattccaaatacaataaactgttttgcttcttgaggtctatttgaggatctgttgggcaggccatcaaattggaaattgggaaaggatttctatgttacagtcttaaggcagaatgtcttcgtctccaattgatatggtttggctttgttcccacccaaatctcatcttgaattctcatgtgttgtgggagggacccggtgggaggtaattgaatcatgggggcaggtctttcctgtgctgttctcatgatagtgagtaaatctcatgagacctgatggttagtataagggggagttttcctatctaagctctctttccctgctgccatccatgtaagatgtgacttgctcctcctcaccttccgccatgattctg

SEQ ID NO: 78688 - DNA, 538 bp, Homo sapiens
tgaagagagtatccccgtaggtgctttttattcctctcatttggtttgttgagatctgtttagtctctatgatagtttgctatgtttaaaaacataggagtcattctgcttcttcatttcatactaggacatggaaaatgtctgtaaggttttctttggatacattccaaatacaataaactgttttgcttcttgaggtctatttgaggatctgttgggcaggccatcaaattggaaattgggaaaggatttctatgttacagtcttaaggcagaatgtcttcgtctccaattgatatggtttggctttgttcccacccaaatctcatcttgaattctcatgtgttgtgggagggacccggtgggaggtaattgaatcatgggggcaggtctttcctgtgctgttctcrtgatagtgagtaaatctcatgagacctgatggttagtataagggggagttttcctatctaagctctctttccctgctgccatccatgtaagatgtgacttgctcctcctcaccttccgccatgattctg

SEQ ID NO: 78689 - DNA, 1490 bp, Homo sapiens
gaggccaggagttggagaccagcctgggcaacataacgagaacttgcctctataaaaaacataataaacttttgatattctgttcatcaaaatattatttttttgtattcattttgattttttaaaatattgcattgaagtattctctatcttgattcctgagttttggtgccatcttagatgttgtaccccaggtaggtgcctccttacctcaccctagtttgggctcctagtttgaggtggaacttcaggggacatggcatcactcccttcccaatctgccctgtcttcttgatcctgcagagcaaggagcaggactgccatggtgagatggtggagtggaaggacagagtaggagaggcccctgattaaggagacacctggcagttcatccctgaccccacagctttattgggccattggttgaataactgataacctgctcaggaccagacacacaggtcagaaggattatgtcccagtctgcacaaagaggacctttcagaaaagagccatggagacttagatttctggaagcaattgttcgtgggtgttcagaaaggacagtggggttcattaagagccagtatggattcaataacgccagagcttaaaaaacaccacaaattctcaggctccaccctggatggactggttcagaaacactggggcaatggattttgggaatttgttgttgttgttgttgtttcaagttccccatgtgttcctggcgaagttgcagagatttaaaaatgtgattctgatggtcatgtaggtgtgggaacttttttttttttttttttttgagacggagtgttgctcagttgcccaggctggaatgagtggtgtaatctctcggtttactgaagcctctggctccgaggttcaagtgtttctcctgcctcagcctcccaagtagctgggattacaggcatgcgccaccacgcccagctaatttttgtatttttagtagagatggggtttcaccatgttggccaggctggtctcagaatcctgacctcaggtgatctacccgcctcagcctcccaaagtgctgggattacaggcgggagccaccatgcytggccaggaacttccgatctataagatttcaaaccaattttataattggtgacccgctcgattgtcagaacatgaggcttccaccatctcaggggctttgtgatcccctctgcagctacacatcgagggtccacacaggagcaaggccacctggaaggaggtccctctgacagccatagggcttgtccccggctctgcctaaagacaggaggaccaggctttaagggataacttatctggagagtgcagatgtcaggtcaggaacccgaaggcctcatgggcaggctggaatgacatctgccttggaacagatgaaactactgggataaatataaatcctggcatttaagtttagaatgagttgggagagatgtggtttagcagcagctcacgaggaaaagatttgg

SEQ ID NO: 78690 - DNA, 682 bp, Homo sapiens
aagctcagcttctgtgtaggggggcatgaagggcacatgtgggtcagagacaacagagccaaatggtgggatttgggatcaccagtagcttcctaggcaccctttgccccaggccagtagtgttgctggtccgtccacccccagagtgggcacagaggagggcaaaggctacagtggggcaccaactgttcccaggccctaggctgtgagcatgctgcatggggttcagccacccaaaaaagctgctgtgctcagcagtgcggcaaataggctggagggggatgggcatccaggccagctgccggctggtggcagacacacagctgggtgtgcataaggcgtggctgcaaggctctcaggctcttgatccctggagcctctggcccagcgtctcagggtgtctctgtctccattttgttagtttaaggcattgaggaagccagggcaggggagggaaagagctgaaaggagaagaaaaagccrcggtttccaagactggcttgatcactcattttgctgtgtgaccctggacaagtcattagcccactccaggcctcagtttccccatgtataaagagggcagtgttgagctgggtaatctgtgtgaccttagataagccacctaacctggctgtgcctcagttcttccctgtgagaggaggacacccccacttgcctcaca

SEQ ID NO: 78691 - DNA, 390 bp, Homo sapiens
cctcctcccagggagctcatggtgcagtgcccagcctggcctcccagcggaagtgctcactagacatctcagggctgactggccttaggtttggagcagtcaaggtcccattttccagttctcaactttctcagccttctcccaagtttcttcgttttcccagcttcccaattctcctttcccacctaggcccccaacaatttcttccccttccctgttcccctgaatctcacttggccgaggtgagccccccatcaagcagcagctgcttcccactgccagagagcccacccatacaaggyggagggcttcctggggaggtggggaggaagttgagggcccaggtactcaaaaactaggtgcaagtggtcgagggacaggagggactgg

SEQ ID NO: 78692 - DNA, 1780 bp, Homo sapiens
taaagagctcaggaagatccttaagttttaaaagcaccccttccatggctttcctgccctggaggacctgggtaatgggaggtgaggaggagagccagctggcacaaccccttctcctctccacttgagctcccgtgagagatgtcacctggcagggacccaaggaaggctttagagtggggaagaaaccccccacctgcctgcctcctgccagcactgatatgggagccaggaggcagcttggcaggtcggagtcctggctggagactaggtgctggtgactttctctgtctgagctcattccaccttggccatcttggggattaaaagctgggaaaggtcttagagatcaatccaactcatttattttatggtgggcaaatagcgaggtccaaaaatgcaaagagagttgcccaaagttacactgtggggatgagaacaggaaggagaagtggagatctggcataggctaaaacccacaccaagctacacagactcagcggacctcatgagcgccaaagtgacgtgtgtcagacatgcctgtgtaagacggaagacacagtgcggattcttgtgcccaccctctgggtattcacctgctaagggaagggcactagctgaaaagtagtgggagcaaacggggatcccagccaagagggagaggagggaggagcctgaatgagtgcgcatggccacagagacagctgactacaaaagggcagtgggcttcacctctgtggcactgcacatgctgacatgaggtytggggtcccttagtgcttccagctaagtggtgtggccccaggagagtcttttatctcccttttcaggagtcctcctgtcagaggcgtttgaaccagagcaactccatcttgaataggagctgggtaaaatgaagctgagccctattgggctgcattcccaggaggttaaggcattctaatcacaagatgagataggaggtcggcacaagatacaggtcataaagactttgctgataaaacaggtgacagtaaagaagccccacaaaaacccaccaaaaccaaaatggcaatgagagtgacctctggtcatcctcagtgctacactccctccagcaccatgacactttacaaatgccctgacaacatcaggaagttaccctatatggtctaaaaaggggaggtataaataatccactcctcgtttagcatattctcaagaaataaccataaaaatgggcaaccagcagccctcagctgcatcaatgtgagcagccaatcttttattcctgcactttcttaataaacttgcctttactttactctatgggactcgccctgaattctttcttgcatgagatcaagaaccctctcttggggtcagaatctggaccccattcctgtaacacccccttgatgctaccagatcacttatgtccataggcccacaggaaaagctggagtagagggcgaaaaacactagattttgggaaagttataagcgggttgtaaacacagactgggcaaaccagctctgtcccatctgcctccaggctgtgggcatgacgtagtcttgaagataagagtcaggaaacttaatttattagcaagaattagggtcagccacatgcaacacaaaacccaaactaacagtggcttaaccaagatggcaacttctttcttctcttatacagaacaagtgcagaggtaagtggtctcaggctagtaaggcaattctggggttatcagaactcagtatccctctgtctttctgcttctgccatcctagggctgagctt

SEQ ID NO: 78693 - DNA, 568 bp, Homo sapiens
ctacctgtgttccctacaaggtctatcttgagtttggtttctcacatgagtccttcccagcaaactcgtgtacatctctccccttctggtcacttggcccctctggtaatcctggcctcttttgtccccagaccacgttctagaattgtagaatcctggcaagaaaaaggcagctcgtccagccttctgtccagtggaasagccccagccagagcaactgacagatggtgagccgctgatgtctgcacacggctgagccaggcagctcactactttctgtggcagcacttctaccatggggcagctctaattgccagaaagttcttccctttatttagctgaaatctgcaccaggatgcccttggttgaaggcctgtcctctggaacaccacaaagtcaatctgttattcttccacatgacagttttcacaccgttgaagacagaatatcccttgtggatttgctgttaaacaccctgatttctgaaaaaacacatcagaggaagaacagcgcgagtgccctcactgacctggttttctcctggtcatgctctctgtcttagtccgtt

SEQ ID NO: 78694 - DNA, 749 bp, Homo sapiens
caatcataaaggtagcaactgcaagaagcagccaccatccctagggctgagggaacaagggaagagattgggattattggaatttaaaagcttggtggagaggccactaggagctggaactcagagctcttcagggatggggcaggtgccagttgctgctgggatctctgagagggcacaataaggcaccttctgaagtgtgggacaagcacattgcaaactaggaccaactactgacaatagaaccagctccaccaccagattgaagacccatcaccagagagggacaggaagcaaaggaaaggaacaagtcctcctccctcttcttgcctgtctcccgagtgccccctactggcaggagctaactgggtgcatcaggcgaagcacaaccatggtttgcagagtatgactgggaggtttggaggtaagagtcagcagtttaagaaccagcacagaaagttcttagcttggatctcctgataggtttgccgcgagggyccttcttggagtctgagatcctaggaaacagctcttgtccacagcctcccagccagtcgcagggctgacttcttggtcacacactgatacctgaaccctggtttccaggtcctagagagactcatgtagacagacaccagacttctcatgtgtggtctgtactgtaggctcagaaggaggaattttgcatcattggctattcaaggtcagctgcagattgatgctggggtgcaggggtaagatcagccctg

SEQ ID NO: 78695 - DNA, 689 bp, Homo sapiens
tctgcctggggcactcagggcttttccagcgttcttctgctgtggctcctgggccccctccagctgtctccacctcacttggaagagagtgagacacatgctcatggggtgtggctttgagtcctaagsccccttctccatgtatgtggggttcatacccagggccctgggtaacacttctagcccccaggtgagtcgggaagaagactaggtgcctctgaggaaaagcaagggtgccaaggtggggcaggcaccccgagggcagggcttctcagccgcagcactttcggtattttgggctggatcattctttgttgttggggtggccagggctgtcctgcacattgtaggatacttagcagcatccatggcctctacccgcttgatgccagagcaacacttcccggtcacaatcatcttcagacattgccaaacatctccgggggggcaaagctccccctggttcaaaacccctgatttccaggggtttggaccccgaaagtagggctgaggaggtggagttggctatactgggcagtgggaaccagggaaaattttcagaagaatctcttcctctcctgcctccagctgcctcccaaaatcatttgggaggtggtaaggggagaggaggggagcacgggtgaggggtgcgagggctgggagggagcagccagagggtgccagttgtt

SEQ ID NO: 78696 - DNA, 689 bp, Homo sapiens
tctgcctggggcactcagggcttttccagcgttcttctgctgtggctcctgggccccctccagctgtctccacctcacttggaagagagtgagacacatgctcatggggtgtggctttgagtcctaaggccccttctccatgtatgtggggttcatacccagggccctgggtaacacttctagcccccaggtgagtygggaagaagactaggtgcctctgaggaaaagcaagggtgccaaggtggggcaggcaccccgagggcagggcttctcagccgcagcactttcggtattttgggctggatcattctttgttgttggggtggccagggctgtcctgcacattgtaggatacttagcagcatccatggcctctacccgcttgatgccagagcaacacttcccggtcacaatcatcttcagacattgccaaacatctccgggggggcaaagctccccctggttcaaaacccctgatttccaggggtttggaccccgaaagtagggctgaggaggtggagttggctatactgggcagtgggaaccagggaaaattttcagaagaatctcttcctctcctgcctccagctgcctcccaaaatcatttgggaggtggtaaggggagaggaggggagcacgggtgaggggtgcgagggctgggagggagcagccagagggtgccagttgtt

SEQ ID NO: 78697 - DNA, 732 bp, Homo sapiens
ccaagcagggcatcgagctgagggtgaccagtgagtttcgccaagccttggtcccgcccagttgctgaggctagaaaggcacagggaggagccgcgatggaatctctgcctggccgaggaccccattcttgggtttctccccatgcttgctctgtgcttctcctaagaagcaaaccagcccagctagccctcagctcatgccccaccattttggaggtcagggttttcaaccagggggtactctccccaccaggagatgcttggcaatgtctggagatgatcgtgactgggaaggggtgtttctggcatcaagtgggtagaggccacagatgctgctaaatatcctacagtgtagaagacagccccggccaccccaacagcaaagaatgatctggcccggaataccagtcgtgctgaggctgagaagccctgccctcggggtgcctgccccaccttggcatttttggactcctcggaggcatctagtcttcctcccaacttaccctggggctaaaagtgagtyacccagggccctgggtgggggttgggagtcaggcttttgagcttcagagcatggcaacatcatcgtcatgactgtcgttgtgccaggcagggtcccggcgggaagcagatggtatccttgaggggttccagcaaaggcagtttactaaagaggccatttatagatttgtgagaagagttaaggaaaccagctcccctggtgtaggatcc

SEQ ID NO: 78698 - DNA, 550 bp, Homo sapiens
ctcacagcaatctgtgatgtgggtgctattaccaccccattgtacagatgagaaaatcaggaaatgaagcctccttgcattctctgggtttctcagctccagcactggaggactctgtgctgcttctttgttgattcaatctaatctagccagaatcaagggcacacccaggtagttagagtaaattactgcactgcaccactgcattaatatacaagcctggagacttctggcaatttgggggagtttctggatctttctggaaaattcctgcatttttctcccttccttttcttctagaagcaggagtaaggggagtaggggcatggcagccaaggttgtagcatgggaaaaggcgtgtctgtctggcagttccaattctgtacctgctgagggccctcttgggscccgcctttcctcctttttttgggaaatgtggcattggattctctgacagccttgccatcttctctataagtaggggctctccaggagggcaattagatacttccctagggtctgaaaatgaccagcactcagatactttccc

SEQ ID NO: 78699 - DNA, 553 bp, Homo sapiens
gtggaacccaaccataagtctgggttctaacctggcctagctgagcccagcctagatctgtgaacctagccaattcatgagaaaaataaatgcttgtgtttataagccatgaagaattttaaggtgttttgtaataaaacctctacctagtttccagtttccttaggggtagatatcttcttctcctgctgggtaaaaagatggacacattatcaactcagctgattagcaaactaaaaaaaaaaaaaaaataggtacattccttcaaacacattaaatgctttgtgtccagatccagatgaccaaggcctagagagagtaaccattttcctctctaagtctgagctcccgtatcatatctcaaaatgtgtttctctcttctcaggatgactgacattaaccatatctacttccttcaaggggacccactcctaaycacagaagtggttatacccctagcagcccaagtacatcagaacattacagagaatcctctacttctatccttctaattagaaaaacaagcaaacagaaacctctattatatagacaa

SEQ ID NO: 78700 - DNA, 553 bp, Homo sapiens
gtggaacccaaccataagtctgggttctaacctggcctagctgagcccagcctagatctgtgaacctagccaattcatgagaaaaataaatgcttgtgtttataagccatgaagaattttaaggtgttttgtaataaaacctctacctagtttccagtttccttaggggtagatatcttcttctcctgctgggtaaaaagatggacacattatcaactcagctgattagcaaactaaaaaaaaaaaaaaaataggtacattccttcaaacacattaaatgctttgtgtccagatccagatgaccaaggcctagagagagtaaccattttcctctctaagtctgagctcccgtatcatatctcaaaatgtgtttctctcttctcaggatgactgacattaaccatatctacttccttcaaggggacccactcctaatcacagaagtggttatayccctagcagcccaagtacatcagaacattacagagaatcctctacttctatccttctaattagaaaaacaagcaaacagaaacctctattatatagacaa

SEQ ID NO: 78701 - DNA, 1471 bp, Homo sapiens
  misc_feature (1)...(1471): n = A,T,C or G
cttacatttacactcttgtattttctattntcgtatatgtagtgcttgtcgcactcacagcagttgataatagtctctcagagtaattttcgctgtccctcagaatgatctgtcagcgtctgttcatccgactccgtagtttggttctcctctaaatcgcgggaaaaaataaaaggtgattaaatacaaataattttgactgtgttagtcttagctgcgtgttgcaagaaatgcaaaacgtctttcaaaataagtttaactctcaatgaatctccctgtggctttttagcgacactgcaaaactagtgcctaaaaacacagtgacttggcatttgtgactactgatcacctcctcactcaagcacatcaaacagcgggatatcctggaagtcgcacctacaacccggacttcctaacaaggaaagctagacgaagggacggtctctcccaaccgcagcgcgatgcgggtcctccccccatcagcttcagtccgatggaacattccgtgcgatcgctttgaccgggcgccactcggcgtcacgtggaactggagcgccctgcggagcccggcggaatgacgcgggcttgggttgccaaggggagggacgaggcgccgcggaagaggcggagcgaaggaagccggccgtgggacggggtgcggagcgcaggcgcgggcagagaggggcgcgcgggcggggagggcccagcgtattatgggatgcggcggtggaatggggctgggcgcgtgattttgaacaaaccctggtctgtgtctcggagcgccgcgccgcgctgctgctgggagcccagggaggccgctcttaccccgggaggggccgccggctttggtgagtgtcagcccccgggatnnnnnnnnnnnnnnnnnnnnnnnnnnnnnnnnnnnnnnnnnnnnnnnnnnnnnnnnnnnnnnnnnnnnnnnnnnnnnnnnnnnnnnnnnnnnnnnnnnnntgctgtggtgaacatgggtttgtaattatcattttgggatcctgctttcagttttttgggacatatacccagaagtgggattgctggatcataggatggttctatttttaagtttttgaagaacctccataccattttatagccgttttaccattttacattctcactagtggtgcacaagggttctagtttctccacatcctctctagcactttttgtttgtttcttccttttacattgctgatacyttgcctaattctttcatgccaaacttctaatagcttgatttcatatttgttgcttgtcttttccccctctaatctctactacatattccaagattaatcttcctaaaatggacctttgaatatgttttatgtcactcgtaagtctgttctttggatctgcttaatcttctcatcgtcctatctggtcttctctatctgggtggatcacttgaggttaggagttcaagaccagcctggccaacatggtgaaaccc

SEQ ID NO: 78702 - DNA, 799 bp, Homo sapiens
  misc_feature (1)...(799): n = A,T,C or G
tttcaagacccctcatattttcttaaatttgagaaacaactacaataacaagcctaattcatgacagaactagtattagatttaagattcccagtttcctatcaccttcttttctactgttcctgaacagwtccttaagttataggctagtcatccttggcatatctaacagtcatttgtaaaccctggatctttaagaatatcaggtgctgaaaagattatatcattatttctaagaaaagataaccaacagccaggtgtggtggcttatgactataatcccagcactttgggaggctgaggttggtggctggaagtttgagaccagtctggccaacatggcaaaacatggtctctacttaataaaaaaaattagctgggtgtggtggcatgcgcctctaatcccagccacttgggaagctgggccacaataactatttgaacccaggaggcagagattgcagtgagcagagattgcgccgctgcactccagcctgggcaacagagtgagactgtcaaagttaaaagctccaccccctccaatgcctttcctgaattgaatctattaattaaaaaaatactattttgaaataatacttatctttaaaagctggaagagtaaggaaaagaaatttttaattcagagtacagtatccacattaggctgaaataaatgtcaattttctgctcatacctgaccttttctgtgttcttttatcaaataaatgtgtaagtccataccttattatataatcttcacttcttgantcaataatatgacaatgatgtctctaagaaa

SEQ ID NO: 78703 - DNA, 550 bp, Homo sapiens
tcggacgtgtcggaagtttcttccttctggtgggttcatggtctcagctgacttcaggagtgaagctgcagaccttcacagtgagtgttacagctcataaatgcagcgtggacccaaaccgcgagcagcagcaagatttattgcaaagagcaaaagaacaaagctcctacaacgtggaaggagacagcactggtaacctgckgctggcttgggtggtctgcttttattcccttatttgacaccacccacatcctgctgattggtccattttacagagagctgattggtccattttacagagtgctaattggtccattttgacagagtgctgattggtgtgtttacaaacctttagctagacacagagtgctgattggtgcatttacaatcctttagctagacagaaaagttctccaagtccccacgtgacccagaagcccagccagcttcacctctcaaaatcagtccactagcaaaaaccagcatgtcacggttgtttggaaaatggtatctctgagcaatgagtctttcctttcttaaaagcctaact

SEQ ID NO: 78704 - DNA, 550 bp, Homo sapiens
tcggacgtgtcggaagtttcttccttctggtgggttcatggtctcagctgacttcaggagtgaagctgcagaccttcacagtgagtgttacagctcataaatgcagcgtggacccaaaccgcgagcagcagcaagatttattgcaaagagcaaaagaacaaagctcctacaacgtggaaggagacagcactggtaacctgcggctggcttgggtggtctgcttttattcccttatttgacaccacccacatcctgctgattggtccattttacagagagctgattggtccattttacagagtgctaattggtccattttgacagagtgctgattggtgtgtttacaaacctttagctagacacagagtgctgatyggtgcatttacaatcctttagctagacagaaaagttctccaagtccccacgtgacccagaagcccagccagcttcacctctcaaaatcagtccactagcaaaaaccagcatgtcacggttgtttggaaaatggtatctctgagcaatgagtctttcctttcttaaaagcctaact

SEQ ID NO: 78705 - DNA, 656 bp, Homo sapiens
cggtgctccaacgaacagagacacagtgctccaacgaacagacaaacggtgctccaatgaacaaacagtgctccaatgaacagacaaacagtgctccaacggacaaacagtgctccaacaaacaaacactgctccaatgaacaaacagtgctccaacgaacagacacatttcaagagaagacgtacatgcagmcaacaagcatgttaaaaaaaagctcagtatcactgatcattagagaaatgcaaataaaaaccacaatgagattccatctcacatcagtcaaataactgtattaaacagtcaaaaaataacagatgctggggaggttgcagagaaaaaggaatacttatacactgttgggagtgtgagttagttcaaccattgtggaaagcagtgtggcaattcctcaaagagctaaaatcagcactaccccccagcaatcccatcactaggtatatacccagaggactataaaccactctaccataaagacacatgcccacaaatgttcactgcagcaccattcacaataacaaagacatggaatcaacctagatgcccatgggtgacagactggataaagaaaatgtgtacatctacaccagaatttttctactaaagctaaccctttaataaatacgtactgacaagctat

SEQ ID NO: 78706 - DNA, 656 bp, Homo sapiens
cggtgctccaacgaacagagacacagtgctccaacgaacagacaaacggtgctccaatgaacaaacagtgctccaatgaacagacaaacagtgctccaacggacaaacagtgctccaacaaacaaacactgctccaatgaacaaacagtgctccaacgaacagacacatttcaagagaagacgtacatgcagacaacaagcatgttaaaaaaaagctcagtatcactgatcattagagaaatgcaaataaaaaccacaatgagattccatctcacatcagtcaaataactgtattaaacagtcaaaaaataacagatgctggggaggttgcagagaaaaaggaatacttatacactgttgggagtgtgagttagttcaaccattgtggaaagcagtgtggcaattcctcaaagagctaaaatcagcactaccccccagcaatcccatcactaggtatatacccagaggactataaaccactctaccataaagacacatgcccacaaatgttcactgcagcaccattcacaataacaaagacatggaatcaacctagatgcccatgggtgacagactggataaagaaaaygtgtacatctacaccagaatttttctactaaagctaaccctttaataaatacgtactgacaagctat

SEQ ID NO: 78707 - DNA, 545 bp, Homo sapiens
ggctaacgaagtgttagagacaagtacaactttctctggaataaagaccagagagaaataattcttctgagtcttaaaagaaagatgtatttccatgaacagcatcctaaatactaccttcacaataaacatgtaacttttatgaggttacttcttaaaacagtcttaaatttaagtcattgtcatagctgtgtgctaaatgagcggagtcaatttacgaaaggaagaaaacgaaacaagtcartgaagaaaagcagttctctagcaatggaaataactgaaagctaaaactgaaaggacattaagaaatgaatagaagaaagaaggaatcgtgacatcaaagtaaattatctgacaaatacatggaatccagatatttgatgtcgcatttgatgatgtaactgatgcaggagtaccggtgacattgcttcctaagagctgaggaacccaaccaagagagaagcttgaagagaaggctctccaccccgcagaggagccataagtatctgcctgcaatcctgagattctgcagcacagatgctgac

SEQ ID NO: 78708 - DNA, 553 bp, Homo sapiens
gctacattaaagctaattagaatgccagtgggataaaatagaaacagccctgacccgagagtcacaagtcctgggttcttgtctccatttgtgaaaagtcacttaagctcttgacccaaatttctttacctgtccactagatggattggaccaggcaacagtgtaagttctaaaaccctatttttaaaataaattttagtggtgaatactaaaatgtctttaatatttaaacacattccaatttttcagactagcacaaatttatgttgtgaagcatttgactatcaatgtccctagccacaatgtaaaaaatcatacttattttctaatattataatgataattaccagatgtgttgacataagaccactttcacctatttcacttacagcagcacttctaaaatagactagagaccatcttacatttagccagattttataagaattttccagtaccccattaacacatgtaatggtgacagcgtaattatgatgcaaattamcactttattggtccttcaaaaacaaccatcccttgagcccagctcaat

SEQ ID NO: 78709 - DNA, 1315 bp, Homo sapiens
gaatgatatcagaatagcaataatayggccaatttattgagtatttaccatgttccaggcactgtgctttgcagttacatagattaccttgtttaatccctatcataattgtacctcaagttttacaactgcatttaactgcatttatgatttgaggaaatcaaagctcaaagagttaaacgaactttgcaagtcatgcagcgatgaagtggtagaactacgtttagtttttcttggacatcaagctcttaagagctacatcaaggttctcacatattagtttcgcttgatatgtgtacctcaaggaatgtatcaacattatctgcagatcccactttaccaaacagtgggccatcatttgtttatgctctgtaggatattctatgattcttacatcatctcaacaaattactactcaccagaatctacacatccgatggaaggaaatcctcaaatttatgactgatttattgtgtatactcacctcattctaaccaggagctatgtagtaaagccagtgataaaaacaattaaattttgatttagaaaaaaaaaagtaaaatcttttctcttgaaaagattttgtgttctacatcctggtttgtccaagtcatccactgttatggacaaatagtagaatgatgaaaaagagaatgtggttattataaaataactatttccctggtgacttgagacacgtaggggtctgttgttccttctgctctccaagggatgagtatatgtctctgatggtgttggaaatacactgagatagggtgtcattctgcatggtattctagctgatcacctgcctgcctgcatggcacagagaacattcggtggaatagttgaagctgtgaaacttcactgacccactcagagatagaaaggtctgcagagcacagactttagatctcctaaagagagctcttagaagatcaaaacatgccctttgctttacccacttggagctgatttgaacaagcaacaggaaaacaacacagaacggtatccagtatacttggcagagtttattgccaattggaattaacagaacactatctgttatcctgttattcacgtcaccaccaccaccaccagtaacatttaccaaacacgaatcctacctgggacttggttggtgttatacaaattaatcatcatcttctaagagcgtatttgctttcttgtctaaggctcaacctaacaatgccagactgtttaatttgtgaatgcaaagtattatttatgttcacaagtgagctcattttatcttgcaaatttaagtgttgcaaagatactgatgtgtgacagt

SEQ ID NO: 78710 - DNA, 1297 bp, Homo sapiens
gcatggtgctatgaatgtgaagattactaaaacactgcttctgcctttcaggagtttagagtctaatggatggaacacagaagcaggaaaaaaattgctgtagaatatgataaagattaatagaggtatgtacaaagcacattggggatagagggaagggagtcgggagatactttctgtggtactgggaatgcgtttaccaaatattaatatttgttaaatgaatattggtaaatggtcaatagatgggtgaatgaatggatgaagagaaaaaggagctgacaggaaagtgagcacaggcagtctaggaaaaccagtttgaagaaaagcttaatgaaagggtatgttaaagttgcaaagcgtgagaagagcaasgtgccatggaaagagacttaacagggtgctgagaggtgaagcttgtgagagaaggcagctgttcatgaaaggctttttgtgccatgctaaggagcttggacttgatgatcaagaagctgctggaccaggggagagataaagggagagctatagtttagaaatgtcatttgggcaatgatgtgaatgatggtgtagaaatgtaagactagaggtggaacagaaaaatacacttgaaggtatttttaatacaatgaaacttttctaggagtctgcaataaagactgacagattggaaagatacttaaaaaacaaatcagcaggacttagcaggttattgaatgtgggatgctggcaattttaaggaaaaaatagtgttcacggtactcctttgtaagtatagacatgcctctgcagagaaccatttttctgaaattgatatatacagataaattgcaatggatagcttgctagctatttggagaagtcacctggaaaagtcatattgcaatttaaatatcataacgatggagtataaagtttggactggacagtatcaatatttatataaattcaattatgaatggaatattttgaaatattttgtgatttaaaatagacaattcattcaaatgtatttatcaccgaatttatcaagaaaatttgttcaacatcgatacaataggaaataactatagaatggatgttgacaaatgacaactcatggagcaaacccagtgcccacacttccccacctgtttttgtaaataaaagtttataaataaagttttattggaatacagctatgctcattcatttatatattgtccatggctgctgtcatgctacgatggcaggggtgagtagtcatgagagagactgcaagcagttcattggtttgtgtaagataagaggtagatcatgc

SEQ ID NO: 78711 - DNA, 1706 bp, Homo sapiens
ccaaaatagcaactttaggaactagggtatggcatacaactctgttttggtgttgctgctattgttttggtcaccttgggggttttctttctcctgcgtattaaccccttgactccacaaactcttacaccagggggtgagctcttgattccgcctggacaaacatagcacccctttcctctgaacacatgactcagtgttatattatatgtgtttatttttattgatttaacaaacataaagcatgcttattatgtgtcaggcactattgtaagcattctacaaatattaactaatttaatactgaaaatagcagaaagttgaatccagtccatgtggtacagggggactctaatgaagaaattacttcctgagttgtggatagagcaaaagggaaaaatcagggatatgaggcactcagagactagcaagagtggacaggctttgccacttccaagcctaaagaggcacgaatggaagttgtgttagcaaagaacagtgagagctggggccatgcagatgggcctctctttgggagctgtgttcctggaaggacacagccagtgccagcaatccggcccacagtaggaagaaagaaataccacagtctctgcctcttgttgtcctccagtcttctctcaggacctcccagtggtcaagcccaatttgaagccagttggccaggtagccagggtgatacaatacgcaggagtcagcctctctgggaacaaaacagagtaaagaatggaccgcagcaaatgaaaataaccagtgaacattcaaaccattttagtaattaagcagagacaaataaaaataataagtaaacattaattatttttattctacctctaactttataaaccacccacattaacccttataaaaaactgaagtcataaactagacaaatgtctagattccagctgttagaattcagcagagcattcaaacatcacagaaagaaactcaggaagccagctggctgggcaaagattttacatttactatttctttttgccagataattctacggtartccacagacttccctcacaccagcccagcctatgatattgatacttaaggaataaagagctgtttatattttggtggggagctcatactatcaatttgcacattagtgaggccagctattgctctcttcttgggatctattgagtggtggctggagagatatctgctgaaaaaaaaaagaaaaaccttagctgtctgatgaaatgttttaaatgcatagggttcaccttggggttggctgccgttcagattttatccattaataacacacagggctccctctgtactctccagggctgataggaaaaatagtactacttacaggtccttgctttgcctgagggaggatattccaaatgctggttgtgcttcatgtacacacacgcatgtttgtatgcacatctgctcggctcacatgcatgcaatggtgcttcctgattttttttttcaaataaaatgacacagaggattttcccattttgaaacatcttagaaaggacaatatgtgggtcaaagtgaatgtgtaagtttatgttttatcgtgacacccagagctctaaagcatcttcattcattttaagtcatttggtattatgtttggaaatggaaagggaagccttcaaactgttgtcttctttcagtttttgcccgattcaaccttcagctga

SEQ ID NO: 78712 - DNA, 1706 bp, Homo sapiens
ccaaaatagcaactttaggaactagggtatggcatacaactctgttttggtgttgctgctattgttttggtcaccttgggggttttctttctcctgcgtattaaccccttgactccacaaactcttacaccagggggtgagctcttgattccgcctggacaaacatagcacccctttcctctgaacacatgactcagtgttatattatatgtgtttatttttattgatttaacaaacataaagcatgcttattatgtgtcaggcactattgtaagcattctacaaatattaactaatttaatactgaaaatagcagaaagttgaatccagtccatgtggtacagggggactctaatgaagaaattacttcctgagttgtggatagagcaaaagggaaaaatcagggatatgaggcactcagagactagcaagagtggacaggctttgccacttccaagcctaaagaggcacgaatggaagttgtgttagcaaagaacagtgagagctggggccatgcagatgggcctctctttgggagctgtgttcctggaaggacacagccagtgccagcaatccggcccacagtaggaagaaagaaataccacagtctctgcctcttgttgtcctccagtcttctctcaggacctcccagtggtcaagcccaatttgaagccagttggccaggtagccagggtgatacaatacgcaggagtcagcctctctgggaacaaaacagagtaaagaatggaccgcagcaaatgaaaataaccagtgaacattcaaaccattttagtaattaagcagagacaaataaaaataataagtaaacattaattatttttattctacctctaactttataaaccacccacattaacccttataaaaaactgaagtcataaactagacaaatgtctagattccagctgttagaattcagcagagcattcaaacatcacagaaagaaactcaggaagccagctggctgggcaaagattttacatttactatttctttttgccagataattctacggtagtccacagacttccctcacaccagcccagcctatgatattgatacttaaggaataaagagctgtttatattttggtggggagctcatactatcaatttgcacattagtgaggccagctattgctctcttcttgggatctattgagtggyggctggagagatatctgctgaaaaaaaaaagaaaaaccttagctgtctgatgaaatgttttaaatgcatagggttcaccttggggttggctgccgttcagattttatccattaataacacacagggctccctctgtactctccagggctgataggaaaaatagtactacttacaggtccttgctttgcctgagggaggatattccaaatgctggttgtgcttcatgtacacacacgcatgtttgtatgcacatctgctcggctcacatgcatgcaatggtgcttcctgattttttttttcaaataaaatgacacagaggattttcccattttgaaacatcttagaaaggacaatatgtgggtcaaagtgaatgtgtaagtttatgttttatcgtgacacccagagctctaaagcatcttcattcattttaagtcatttggtattatgtttggaaatggaaagggaagccttcaaactgttgtcttctttcagtttttgcccgattcaaccttcagctga

SEQ ID NO: 78713 - DNA, 2210 bp, Homo sapiens
ggagcaccttctaggcaacatacattgtgctaggtgctcagtagtgaacaaaacagattcagctcctgccctaatggaacttacattctacagggggagagataatagagaaataatagttgtccaatatgatatgacctggggatgagtactttaaagaaagataagacaggagagaggcagcggatggcatttcagatggggtcaggtaggaactctctgaggaggtagcatttgggtggcccaatggtaagatggagcttctccaaacacataccgggcaaaakgtaccaggcagcaggaatggtaaaagcaaaactctcacagctggggatggtgctgtgcacctgtagtcccagctacttgagaggctgaggcagggggatcacttgagcccaggagttcgaggctgcagtgagctacgactacaccactacactacagcctgagtgacggagtgagactctgtctctaaaaattaaaaatttaaaaagcaaagctctcaaggcagaaatggtctaggaccagtctagcagcaggaagaggaagatggggctgtgatatggagaatagactcatacagcacaggaaagcaagatggggctgaacctgggtacacagagaggagagaagtccgtatctcattctaagtgcactggggagccactgggggcttaagcaggagagcatgccagatctgactgatggatcctggaagagcccactcacccactgctcacagatgcagagagaggaagcaggggcagaaacaaaggtggatgcagccctggccaagtccagactgagatcagaatgcattgcctgggtgctgctccagcctcttctctccggggtgttgctggggagggatgagggaaaatgcacaagtgatgggaatttacttagaagtttctggctgcaagcttgggtgactagaatcacccaggaccccatggtagtgatgatctcacaccagcaaatggctttaaatcagaattcaaatgagtctggtaaaccaggataaagtgtgtaatttaaagcatcccggaagccctgggaacttgcgctagatgcttctcgatctgctctcaggggatctccagcattattctggagagatctggtagcagaattaatgactctggcatttcccacctgatctagggctttgatccttcctgccccatgactgtctcagaaccaaaggttgtgggacaatgggcactgtgcatgtgcccagaccaagaatcagcatttaggcctggctgcaaatttcaccatcatgcccgggggccctgctttctgctgatgtttcagccaggaatgccaggcccttcacccctcaccctggcttgcattcaaatgacccctgcctctgtctccttcaccagactttctcctcctcctctatgcctacagaacacttttaccaactccactacagaactttccacctgaattgcttgttaacatggtatagccccctaaaaatgtgtccttctgaggagcagaacttattcaagtttataacccccaagggtctagccccaaacctggtgtatctctgtgtgtgtgtgtgtgtgtgtgtgtgtgtgtgtgtgtgtgtgtgtccatgtgtgtgtgagtgagtgagagagagagagaaagagagagagacagagagacagagagagactgtgttatgccaatatcaacataaacagcagctaacacaatgggggtctgggcccacgtgcctctctgctaatcactaactttcatgatcttctctgaccctcacaataaacctgtcatagaggatctattattactccaaacatacttagactcaaaaaggctaggacatttgctcaaggtcccggcactagtaattggtaggactggaatttgaaccaggctcatgtaagctcataaatcaagacccttctccaccacacttacttgaaggggtaaacagagactgagcaatatgtgggaggagtgggtgggaggctggggagggaggtatggaataaataatcatggaaggggatggcagatggaaattagagaaattaatacatccaagaatgttctcagggttttggtcaaaccatggactgactcaccaatataaagaccactctccttgtcatcccaaaccattcaccttcaagtatccacggatctgcactgtcactttcttagcccaggtcaacctgtcacccatg

SEQ ID NO: 78714 - DNA, 2329 bp, Homo sapiens
ttcaggatactgagtggggaattatgacaaatgctttctttgcagttcctttaaggactgtgtctctcttgatatagctttctggcttaaaaaacgtttgcctagtgcctgcatctgtttacagaaaatctgacgtgttggtaaatttgcaccttgagtgtcctccaagtaacagctttagtccaaacccaggttctaagggcaaccatccctagccttttaatcacatacatcactctctattacttaatcattgttattattattattattgagacagagtcttgctctgtagctcaggctggggtgcagtggcccaactgctgctcattgcaacttctatctcccgggttcaagcaattctcctgcctcagcctcccgagtagctgggactacaggagtgcgccaccacacccagctaatttttgtatttttagtagagacgggrtttcaccatattggtcaggctggtctggagatgcctttttcatcaacagatcagcatggccatgtgtgcgctgaaggcttaaggttgctagatctttccatttatcttgagggaagctggagatcttgaaatttaaatacaagcatctgatttttaattattagcaactaattcagaaaattcaagcatctagcctgggcctggcatcttgctggctttagtctccatgctaagagtgaaagtgagcatgtgtagggtcttaccacctcttcttcctttacgagtctaaatggctatcaggaatcaaagacacatggactttttgttagagggactaaggagtgtcagtatcacaactgaaatggagagtacaaaaaaaaaaaaaaggctggacttggttgaggggacagtgtggaaaaactgatgtgggactgtgacctcagtgggacatcggactggtgatgcccattgtagtttcccggggctgccctaacaaagtcacacagctggggggcttaaacagcagaaacttactgtctcatagtgccggaggctggaggtccaagatccaggcgttggcagggttcgtttcttctgagggctgagaaggaagaatctattccatgcctttcttctggctcctagggaattgccggtaattcatgttccttggccttgagatgcatcacctgtctttacgtccatgttcccttggcattcttctagtgtgcatgtctatctgtgggtctgaacgtcctctttttatacggacacagtcatgttggattagggcacgctctaatgacctcactttaacttgataatttgcaaagaccctatttccaaataaggccacattcacaagtcctggggcttaggaattcaacctattttgggggatacaatgtaatccataatatctacttagcaattgagtataggattctgaaattctgaagagaggcttgatttaggtataattggcatttaggtggctgttcaacgcagaaagtaacgtaaagaacaatgttcaggtgagtcttgtttggggatttaaaagatgaaagattctaaggatgtgtaatatacgaagtttggtgcttctcaaactttaatgtccataaagtagaaatactggtattcaacttacaatcccaattattacattattattatttgaagggctccagaaggagatctgtgtttttcagtattttttccccattctcattccaggaagaagttccaaaatacattagagaaactattaatttttttttccaaatggacttttctcaccccacaagttggcctcccttggggtgactcctgccctctcctctgccttcccacactcagcaatgtgtcttggttgaagatactggttggaggtttaagatcaatgcccttcgtcctgacaggcagtgaactggtttttcagaacctttctcatgactccaggaagtgcacatgtaattaaactgagtctgtgttgggtttcagattagtgaagtgtgcctgtggcaaaaggtctcttccttcctgagagacgcagcggtgtaattagaatccggagacggattcatcagcatttcttaccagcgtttctacaggatgctccaatattcatctgggcctagttctgcttcctgggagaccatgggatgttgttgctggatgccatctgctggcaaaatgcaggggttcctctcgggtcacttgggtgacactgggggttcagtccattccaagcaagttagctgagagcccaggtaaaagtcagtagcaggctggtaagtgtctgtccttatttccaagtcagtattaaaatggtccaggcgtaaggctggctccaaatccctctgaaggtcattgttcatg

SEQ ID NO: 78715 - DNA, 672 bp, Homo sapiens
cacatacatgtatacatatgtgtgcacctatacatatttatgtgtgcatatgtgtgcgtgtgggtacatttatatgcatatattgtgcctgtgtgtacaagcaagtatatatggtatgtgtatatgtatttctatgtgtgcatgtatgtgtacatgtatgtgtgtgcgcatgtgagtatatttatatgcatgtattgtgcctatgtgtatacgtgtatatgtacatatgtatgcatgtatatgtgtatatgcacaagtatgtctacatgcatttatgtgtacgtgtgtgtgcatgtgggtatatttgtatgcacgcattgtgcctgtgtgcatgtgtgtatgcacatgtttgtgcgcacatgtgtgcctgtgtgcatgtgtgtatgcacgtttgtgcctgtgtgcatgtgtgtatgcatatgtgtgtgcctatgtgtatgtacaccaatcataacactcccttttctttcccaagaaaggatttctttttgtactgatctcaggagtttcagggctacagcgaagagatsacatgaggaagtcaagaattgtgtttacttacaaactatatggaaccaatatttaatcattttctacttacaaaatcccaattttggctgggcacagtggctcatgctcgtaatcccagcagtatgggagaccaaggtggga

SEQ ID NO: 78716 - DNA, 718 bp, Homo sapiens
tgatagttgtctgaccctgtctgagcctcaacttcctcacttaagatggggatggtaatagttcctacctcctaggctggtggggaggaataaacgagaacaaatacataaggcctccagcatrgtatctggtgcttgggtaccggtcattattatcacggtatgtcctacttaatgtttacaaatcaaccactgtactgggctgcatggaggatgtctggaatggtcctggaatatatcagggatttgcatcctgctaaatctcctccttctactggagttttgtgccctgtatgggtaggggcgtgtccacagatgtccccgaagtggacagcagctgctttgcttgccactgggccactccacccagtgactttgtgctagcccttgttgcttccttctgtggggggtaggtgagcatgaaagtctcctcactggcctccttgcctctaggtttctcctctgcaatgctcatctgtgccacactgcagccttttgaagaagccatgtacaagtcactcctttgcatggcccatgtggtgtctccccactgctctagtccctgggtttgcatttcagggtgctgcttgctcaccgcctacatctctgctccacctcctccagggaccttgcaccccatggcaagtgagttcagtttcctgaacaagctgagcatcctcccatctctttgccttggtaggagccagttcgtcttctt

SEQ ID NO: 78717 - DNA, 412 bp, Homo sapiens
ggagtctagctctgtcgcycaggctggagtgcagtggcgtcatctcggctcactgcaagctcctcctcccgggttcacactgttctcctgcctcagcctcccgagtagctgggactacaggtgcccaccaccatgcctggctaattttttgtatttttttagtagacacggggtttcaccatgttagccaggatggtctcgatctcctgacctcatgatccgcccaccttggcctcccaaagtgctgggattacaggcatgagccaccacgcccggccagtttatttttttttatgctggactccttcccctcaccacccgtataaatgtatgtcataacttgctctgaccccacaacattttccagcttgctcttttctttgcatttcctcacttccacagaaacgtgcaa

SEQ ID NO: 78718 - DNA, 962 bp, Homo sapiens
  misc_feature (1)...(962): n = A,T,C or G
aaaatgtgctgtatccaagtaaaataacttactgagttcttattatgccatgaaactataatctattattttatttcatactcatgaaaccttatgatgtatgtagtgttatcattcacagtttttagataaagaaactagggcacagaaggtttaagaaatttgtatgcatatgttaatatctgctgtaacactaaaactagatgtgaatagaattttttattttttattattttattttttgagacagagtcttactctctcacctagactggagtgcagtggcacaatctcgcatcactgcagcatctgcctcccaggttcaagcagttctcctacctcagcctcccaagtagctgggaattacaggtgtgaaccactgcaccctgccaaattaattttcttctaataagaaacttgattttcaatttgtaccactttagtataattgctatgtttttcaaaaggaaatcaacattattcttattaaatctattaatattaactactttgtgacgctgagggcctttttgtaagtacctaagtgtgagatgaataacattatcatgattatcttagtgaaccaaacatctgaccctttgactatgaactcgcaaaattgtcacaattttgccgaattctaagataatattanggtaataatgggctacgaaagtctaagacatacgttatacaatgctccagattagattttgtgccagcttaataagtggatttcagaacaaagttatatatttctccctgacccaccttctcngntctgtatttatatagccagaaaagtgtaagaataaaaagaagtggtataaaagtgcactacaagaagcatgtctactctatggatattctcatgagcaaagactggaaatgtgctgcctatcaaaacwacaaggtgtataaatattttttctttattactctgaaataaggatttattcaaa

SEQ ID NO: 78719 - DNA, 1094 bp, Homo sapiens
ttaattatccaaggaaatgaattatcctatataaaaaaaacttgaagatggggcttggtagagtttgattcatttttggtgggaagtaagagaaaaggagtcggttgtaaaataattataatttctttgtattcatatgaattatatttactttaatgttgattatgtaaatttgtaacatattggcatacagtgagagaaggtaacattttggggcacatagctttattttaaagtttagtagaaaaatgggattttatgtatagttaacattggaaatatttctgtacttcatgaccaacaatcctattaattcctatcctgtaatataaaggatttaacaaattaacacacacatctatttcttaaaaagtcaagtatgccttggctgggcacggtggctcacacctgtaattccagccctttgggaggccgaggtgggtggattgcctgaagtcaggagtccaagaccagactggccaacatggtgaaaccctgtctctactaaaaatacaaaaattagcagggcgtggtggtgcrcctatattcccagctcctcggaagctgaggcaggacaatcacttaaacctgggaggcggaggttgcagtgagctgagatcgccccattgcactccagcctgggtgatgagagcgaaactcagtctcgaaaaaaaaaaaaagtcaagtatgccctaaggtgctgctttttctgattatagaaattagatacttttaatttaaaaaacatctaagcagtgtgtatcacatctatactctgttgtgattatgatgatttaatgttataaaacagacaccatgaattataaaatactgattatgtaaaagcatagaaggcttcaaaaaatattctacacatttttgctttctatgtaaagattaatttgtggaaatgaaatactcacctaatgaatccaggctttatccccttattacgattgaagtaagatatggagccatcagaacactgacttattttttatctatagaatactctcttaagctttctcttctaatttcataccgttagctaatagctcgatttgaagaagaaacaagttccgtgggacgagaac

SEQ ID NO: 78720 - DNA, 1067 bp, Homo sapiens
ttcctttttactgtgtacccgcagtgaaatctatgtaactttacaagaaagagggagactaaaatgaaaatcataatagacttaaaaggcaactaacctttttccacctcattcagattagcagctggcagcgacaaagacagaagagacaaaagactttttacattgcaatacaacagcagagcacaggaagccaatgcgcagcgttcacaacagagaagcaggggtgggcgagcaagctgaagcaaggcttggatttcttacctacagccgggccacacgcacaaacatggagaaaatgaggcaaaaggtaaatgccatcacagggagctagaggtctgcgtctaaaccaggtgatggaacaaccagcagttttactgtttaagatggacactgaatggcttgtgcatgggcgtcagagattcggaaaacaaagagaaaatgggtacacaatggaaaatttaaagtggtctgaatattttccacaaaatgtgttctaaggctttacacacccaatctgcatggagatgttcactttatggaatttaagtaatcccattaagtgaaagaagggcttaaaatgtgatcaactgtgtcatacttgtatgtggtcctgtaagaataaaagttaattaagacacacagtcttgatacagcagatccagggttctgactgttgggaaatatacaaaagcacatttttgaattaaacacctaagttaacactacagcctaaaaaaagtgtccattttttwaaaaaacaggggtgccacatttatagtttttatttgcataggtgttaggtttatgttatttcaggaattccttggaaatttagctccaagaaatgtcttgtctttagaaagaagatgatcatgattttaaaaaaataaccaaacaaaaaatcaaaatcaacaaaattctctcaagctacaattaaaaccttaaatttaattttaaaattatttgtttaacaattctgaagtcctactttcttaatagtatagggatgttaatttagattcatagtgaattcaacttttcaaaagttaatcttacctaaaata

SEQ ID NO: 78721 - DNA, 470 bp, Homo sapiens
tcctgaaatcaaaggtaagtcagttgtttaaaatcttatgctcatattttattttattttatttttggtttttgttttgttttgttttgttttgagacagagtctgactctgttgcccaggctggagtgcaatggtgcaatcatagctcactgcaacttcgaactcctggcctcaaacagttctcctgccccagcatctcaaatagctgggactacaggtgtgcgccaccatgccgggctaatttttttttttttttacttttaatagaaatgaggacttcctacattgtccaggctggccttaaactcctggccttaagcagtcctccggccttggcctcccaaagtgctgggattacaggcttgagctgccatgtcttgccattgtgcttgttctgagaagaggacaasctaattagaaaagatcagttagtcacctcctttgaacagctttctagtaacaggtccct

SEQ ID NO: 78722 - DNA, 1154 bp, Homo sapiens
ctgcaccatgaatttaatgtatgtcctgttatagtgctgtctcactaagtctttcccccactatcttaaaattatgttggagggttcttggcagcaaagacattatgtcatgcttttttttatttccagcatttagctcattgtagatgcataataaatgttaactttttaacatgagttattttgtgtgaccaagcaaaagggtcaataattttttaattcagcatcttcaggatctttttgatggataatcaaatatttcactagttttaacaacactggggacttaagaaactgttgtagagtggatttgggtgtgtactgctctgtggtctctctggagctaactttcagccttcatacccattggaataaatataacgcttcttgaaatttaccatctcttcctctttgagtgctttctatttccctttaagatgtttaaaaataccattagaatcagtggtctttctgtggctagtggtgggaccaaatcaatcttttctcctctggtttctcttcctttaaatacagataaagaagaagtgcagaggaaacgtcagaagctcatgcccaatttttcggatagtttcggcggtggtagtggtgcyggagctggaggcggaggcatgtttggtagtggcggtggaggagggggcactggaagtacaggtccaggtacaaaaatacttattcttcctaaaactttttcatattggagagggtagaattttcttttctttggtttctgagcatgtctgtgagttgagtggctatgatattattgagtatattaattaaaatttcctgacaaatgtaaatttatttttcaaagaaatccatgttcattttacaatatgtaggtaatctcaaaagtcattaagaagaaaaaaaagtaccccaaagccagttatttaatgaataccttcctaaagattttggtatatttctcttttacattttttgacatagttgtcttgtttttgtttggaaacattgaaaagattgtatattatcatactacaatatagctatatattaaacatctctatatactacattgtagaaactttgaaaatacataaaatctgccatcaaaggttaactactactatttttatgtatatgttatagtatatatttgtaaattttac

SEQ ID NO: 78723 - DNA, 529 bp, Homo sapiens
aggaattatggaagttataaatcctgtgatttctggctgcatgactcttaagcattaaggaattatagagagtcaagctagagaacaatggctggttgctgtttaactacatcctagaatttaggcctttcccataatcctagtcttctggtctttcattagtcttacaaagacagtttcagtccctcaaataaaagaaggtgattttcagaaagggactgtttacatctttgttttgtagttaacaaaggcagttagcatgtgaggttagacacaagatggagccatcaatgttagatttctttcactgtcattrtttttgcaaaggcagattcagttctattaaacactcatccccattctgtatttagaacatacgttatattttctttttactattaataagattaattgttaaaaagatttgtgtcaaacttttgaattctcacttgattatggcatattagttatttaaaataactttactgccagaaatacaaaagattattcaaagctactatgaatacct

SEQ ID NO: 78724 - DNA, 529 bp, Homo sapiens
aggaattatggaagttataaatcctgtgatttctggctgcatgactcttaagcattaaggaattatagagagtcaagctagagaacaatggctggttgctgtttaactacatcctagaatttaggcctttcccataatcctagtcttctggtctttcattagtcttacaaagacagtttcagtccctcaaataaaagaaggtgattttcagaaagggactgtttacatctttgttttgtagttaacaaaggcagttagcatgtgaggttagacacaagatggagccatcaatgttagatttctttcactgtcattgtttttgcaaaggcagattcagttctattaaacactcatccccattctgtatttagaacatacgttatattttctttttactattaataagattaattgttaaaaagatttgtgtcaaacttttgaattctcactygattatggcatattagttatttaaaataactttactgccagaaatacaaaagattattcaaagctactatgaatacct

SEQ ID NO: 78725 - DNA, 605 bp, Homo sapiens
aaatggaatgaaatactggcattcacagcaacctggatggaattggagactattattctaagctaagtaactcaggaatggaaaatcaaacattgyatgttctcattcatatgtcaaatctaagctattaggatgcaaaggcataagaatgatatgattggatttcggggacttggggtaaagggtggtaggtggagagggacaaatgactatatgttaggtactgtgtacactgctctggtgatgggtgcaccaaaatctcagaaatcaccactgaagaacttattcatgtaaccaaacactacctgttctccaaaaaaccattgaaacaaaaaaaaattaacgttaagaaaatatacagtataccaaaaaaagaacagaaatatgtggttatctcaccattagaaaagatgtaattatcttccatatcagaaagtctagaaatagatcccattattaaagaaattatatttataaaacatagaagaataataatgacaggccagcaacatcattatatttgatggtaaagcactgcaattactcactttaagaactaacagtagtgtgcttattgtctcaagcattgtttaacattatttgca

SEQ ID NO: 78726 - DNA, 605 bp, Homo sapiens
aaatggaatgaaatactggcattcacagcaacctggatggaattggagactattattctaagctaagtaactcaggaatggaaaatcaaacattgcatgttctcattcatatgtcaaatctaagctattaggatgcaaaggcataagaatgatatgattggatttcggggacttggggtaaagggtggtaggtggagagggacaaatgactatatgttaggtactgtgtacactgctctggtgatgggtgcaccaaaatctcagaaatcaccactraagaacttattcatgtaaccaaacactacctgttctccaaaaaaccattgaaacaaaaaaaaattaacgttaagaaaatatacagtataccaaaaaaagaacagaaatatgtggttatctcaccattagaaaagatgtaattatcttccatatcagaaagtctagaaatagatcccattattaaagaaattatatttataaaacatagaagaataataatgacaggccagcaacatcattatatttgatggtaaagcactgcaattactcactttaagaactaacagtagtgtgcttattgtctcaagcattgtttaacattatttgca

SEQ ID NO: 78727 - DNA, 300 bp, Homo sapiens
aaatccwctcacttttgccatatcacatgacctaatcacagctgtgacatcccatcatgttcacaagttgcacccaaactcaaggagagggggtaatacagaggccagaaatcttggagatcctcttagaattctgcctatcacaatcacagatgcttttcagacaatcatatttcccaggatacaaaagtgtgttaacacatatagatgtacacatatatttatataacacataaactatacaaatttatatcacattagtttagtttaaaatattactagactgtacctgcctatgca

SEQ ID NO: 78728 - DNA, 592 bp, Homo sapiens
tattttttaatgatagagaaagactttagggcccaggagtcagatgataaagaggtttcatcagaaagacaagaggtagggtacagggagaaggaagaatgaggtagagaaaagcagttgaaaagaatagggatgaaagagcatagcaggaaagagaggccaggtaactgagaaccaaattaaccactgatcataagttataatatatgtatatctctacgtttttttcaaggcaagatgaagaaccaggggcactgctcaaagttctgcccaccgagaggactttccttcaccacagyatttcacagccacttctgggtagggctgtagtgctgccactgcctggtttctggtagtgccagtatattgtgcagaatcatttgcttcctcagtcaaatagtcaaaggccaccccccatgaagccttaggtgcaaggtgagagggaggagtggcggaggttgggccatgagcccatgcttatcccctacaaataattttggcaccattggatctgttggttcatatgacatatatggcagagcagcttgcatggcagcctggacctctttcatcacctgctctttttccagga

SEQ ID NO: 78729 - DNA, 931 bp, Homo sapiens
tgcatattattcaatagcatttattagcacgttatattccaagccctgttccagctgctggcaattggcagcgagctcaacgagcaagaattatgcttgttttaagcttgtcttccagtagaggaatacaaacaataaaaaaagaaagtatccatcaatgacaaatgttgtaaaacatgttggtatcatattaagtgtttggtgtagagtgggagagggggtttatttkaaacttaatgtccaaagaagaattcttcgaggaagggaaattttaatctacagtcttcatgagaagagtaagatgtctgcaaaatgtctgcaaagatcttgtcaaagacctttccagatagaggaaataactattgatagtataaaggtttatagttggaaagagccttccacactggagtaacagaatgccagagcggttggaacatagcaaaaagggacagcattatatgagatgagttttgagagacaggcagatgctagtttatatgtagcctcataagccaaagtaaacaagcaaagaattgttattattaagcaagagaataacacaatctgatttactgagcacagatcaccctacttgttacttgacatactgtgtagtacatagaagaaggagaatattgcagtgattcaagatacatatgatgatatcctgaaggagggttgaaaccatggatgtgtggagaagtggataaacttgtgatgtaatttggagtttgaatcaacaaaaactgtttgtggatgaagagagtaaggaaccagaaaaaactcaaggttagaactttggattttggcttcaggtactcatgaatggagtagccaaggaagaatgggatgcataagatttttagggggaaaaaaaaaaccaagagttctgctttgatcatgtaaatattgagatgtctattagaagtca

SEQ ID NO: 78730 - DNA, 931 bp, Homo sapiens
tgcatattattcaatagcatttattagcacgttatattccaagccctgttccagctgctggcaattggcagcgagctcaacgagcaagaattatgcttgttttaagcttgtcttccagtagaggaatacaaacaataaaaaaagaaagtatccatcaatgacaaatgttgtaaaacatgttggtatcatattaagtgtttggtgtagagtgggagagggggtttattttaaacttaatgtccaaagaagaattcttcgaggaagggaaattttaatctacagtcttcatgagaagagtaagatgtctgcaaaatgtctgcaaagatcttgtcaaagacctttccagatagaggaaataactattratagtataaaggtttatagttggaaagagccttccacactggagtaacagaatgccagagcggttggaacatagcaaaaagggacagcattatatgagatgagttttgagagacaggcagatgctagtttatatgtagcctcataagccaaagtaaacaagcaaagaattgttattattaagcaagagaataacacaatctgatttactgagcacagatcaccctacttgttacttgacatactgtgtagtacatagaagaaggagaatattgcagtgattcaagatacatatgatgatatcctgaaggagggttgaaaccatggatgtgtggagaagtggataaacttgtgatgtaatttggagtttgaatcaacaaaaactgtttgtggatgaagagagtaaggaaccagaaaaaactcaaggttagaactttggattttggcttcaggtactcatgaatggagtagccaaggaagaatgggatgcataagatttttagggggaaaaaaaaaaccaagagttctgctttgatcatgtaaatattgagatgtctattagaagtca

SEQ ID NO: 78731 - DNA, 931 bp, Homo sapiens
tgcatattattcaatagcatttattagcacgttatattccaagccctgttccagctgctggcaattggcagcgagctcaacgagcaagaattatgcttgttttaagcttgtcttccagtagaggaatacaaacaataaaaaaagaaagtatccatcaatgacaaatgttgtaaaacatgttggtatcatattaagtgtttggtgtagagtgggagagggggtttattttaaacttaatgtccaaagaagaattcttcgaggaagggaaattttaatctacagtcttcatgagaagagtaagatgtctgcaaaatgtctgcaaagatcttgtcaaagacctttccagatagaggaaataactattgatagtataaaggtttatagttggaaagagccttccacactggagtaacagaatgccagagcggttggaacatagcaaaaagggacagcattatatgagatgagttttgagagacaggcagatgctagtttatatgtagcctcataagccaaagtaaacaagcaaagaattgttattattaagcaagagaataacacaatctgatttactgagcacagatcaccctacttgttacttgacatactgtgtagtacatagaagaaggagaatattkcagtgattcaagatacatatgatgatatcctgaaggagggttgaaaccatggatgtgtggagaagtggataaacttgtgatgtaatttggagtttgaatcaacaaaaactgtttgtggatgaagagagtaaggaaccagaaaaaactcaaggttagaactttggattttggcttcaggtactcatgaatggagtagccaaggaagaatgggatgcataagatttttagggggaaaaaaaaaaccaagagttctgctttgatcatgtaaatattgagatgtctattagaagtca

SEQ ID NO: 78732 - DNA, 931 bp, Homo sapiens
tgcatattattcaatagcatttattagcacgttatattccaagccctgttccagctgctggcaattggcagcgagctcaacgagcaagaattatgcttgttttaagcttgtcttccagtagaggaatacaaacaataaaaaaagaaagtatccatcaatgacaaatgttgtaaaacatgttggtatcatattaagtgtttggtgtagagtgggagagggggtttattttaaacttaatgtccaaagaagaattcttcgaggaagggaaattttaatctacagtcttcatgagaagagtaagatgtctgcaaaatgtctgcaaagatcttgtcaaagacctttccagatagaggaaataactattgatagtataaaggtttatagttggaaagagccttccacactggagtaacagaatgccagagcggttggaacatagcaaaaagggacagcattatatgagatgagttttgagagacaggcagatgctagtttatatgtagcctcataagccaaagtaaacaagcaaagaattgttattattaagcaagagaataacacaatctgatttactgagcacagatcaccctacttgttacttgacatactgtgtagtacatagaagaaggagaatattgcagtgattcaagatacatatgatgatatcctgaaggagggttgaaaccatggatgtgtggagaagtggataaayttgtgatgtaatttggagtttgaatcaacaaaaactgtttgtggatgaagagagtaaggaaccagaaaaaactcaaggttagaactttggattttggcttcaggtactcatgaatggagtagccaaggaagaatgggatgcataagatttttagggggaaaaaaaaaaccaagagttctgctttgatcatgtaaatattgagatgtctattagaagtca

SEQ ID NO: 78733 - DNA, 682 bp, Homo sapiens
catgtgcttgtcagtgtttgagggagatagatggaggctgtaatttctaaaacagtagagaatgcttcaagcaatagaggaacaatggccttccttgctaatgtgtaaggaaaattccccgtgtttttagagtgtctaatcatccttaaagcagagagtgaatctgtgtgmaactctttgtcatttagaaatataacaaattatttttcccttttcaaagggagatctgggcttttggaaagatagattgatagtcattgttaaaagtggggtatatttccaaatagggaaaaaaatgctgtttgtaaagaataagagattggtctcatgtatgtactaatataatatatgtccatagaaaaaagatctgaacacatatattttgtggagttaatagtttttctgggtctgttgggattatagatggtagtaattttcttccttttgctcaataataatgacttctaaatgttctgtgatgaacatcttttattttttaataagaaaatgaacaaaaaatatttttaagtcttaacaaagtgcaaggaggataattgaatatgtgttataccacctcccacggtggcaaatgtttttagctttagaaagaaaacaatgaagtgtgtgcagttgggttatatctgctatttcatctagttgttctaaaattaaactcctactt

SEQ ID NO: 78734 - DNA, 661 bp, Homo sapiens
tcatataaatattttttgcctgcaggggggtaaaatggatctctctcatgaatattcaacagtgccatttcttctagcaagacacagacatctttcttcatggttattaagcactaggatgtctatatatattttctccttcatgttgtgtttgcataaaactgatgagatacaggaactgccaaagcagacatttattattccaggtacctcaatattatagggccttcatccaaataactcaataacatttttcagattcaaatcttcagtattatatgggttgtttcatacacacacacacacacacacacacgcacacacacacatataattccagaagcacaaaatgaaattataaattatgaagacttggcttaaaattgtggtggaaaggagctggcagaggcaaagatacttctattctctttgtgacatgacttcttgcaagasaatcttgtgcatgctcagatttcaaattctgatagtaaagagaaaggtgggcaacctctagaaggaaattggaaattgttttttaaagtgagtattgccaggcacggtggctcaagcctgtaatcctagcactttgggaggccgaggtgggcagattgcctgagctcaggagttcgagaccagcctgggcaacatggtgaaatcccgt

SEQ ID NO: 78735 - DNA, 513 bp, Homo sapiens
tttctttcttcacttatgtgtgcctgaatctctaagtgatacttaggctcagcgggcatttacactcttatccaatctgaatttttttcccttaattcatcagaccttaagagccagcatatggcttgttctttagtgtcttaaaagcactgggtaaatttagtattattgtggaactctaccttgtgagaaaagattaattgagttttctcatcttcatttattcttgttactttttttttttaacagaaagctaagtcaggtataagaagttgttcaagtgataaagattagagataaaaattatgaatattttgaagtgtcaactgaaatctcactgtcacttcccccttttcttgcctgcttttattcccccacatttaaacttctttcattttcttttcctgggccttgaaacccttctttccagtgcaggcatctagaaattagtcatgggatgtatgaaaggaaaatatcttgggccsccaaatcactaggctaaagggaaaagtc

SEQ ID NO: 78736 - DNA, 1009 bp, Homo sapiens
tgcataatggttatatgtactttgaacctttagaattcaatgagtacaattcagttatatttttaggcatgggctacgggaagcgcagttgctttaaatgttatctataaaagccttagctggcagttgagctttttcatttcgtttttctcttatctctctagaagtgaggagataatttttagaaataaataacattctaaagcgggggaagaaacactcaacattcaatgatcagatcttagggaatgctttgttcctatttcagctaaagggtataacactgattgaatgattttaagttgggatttttggcgactgttacattggacttcatattaaaataccacaacatgatactagtgtttccaaataaaattgtgtatctttctttggctagaaggtgttttctttcaatgaaatgaagcaaatgcacctgtgtagttaaaattctttatttttgttggtctctggaaagaaaaaaaatgtacgtagtattcaatatttaaattccattcttgcggcagaccgatgtagccatacaattggccacagaatccagattctgccatggaatttgccctgtggatatcacggtgtagccccactctcatgtggccgacacggaggtgagggggagtattccatttgctttgctttggctctggcttaggaaaattgcccaggcaattgctttttgtagcatgtaatgctgttagttcctatcacactgctaacagcctcccaccctcaagtagaccacaaagcagagagaagaaagaaaacttcttcttctactaaccatattggctcagtatcaatagaaaacaggagcttttcaatsctacctcctcagactctttgcggatttgggggcgccagagtggaattacttactctatcatgtaccaggtattacctggcattgtgcaaatattcttttcctaatatatgttttagaaagaaataaaatcttcagaaaagtccaaaaaaaaaaaaaaaaaaaagg

SEQ ID NO: 78737 - DNA, 1263 bp, Homo sapiens
tgcatcagggtgacatatttttaactactctaaggccattgtctgtgcctgaattaggatcattgtgtgttacaagagacctttcacccaacagtagctgagaaatcctagctggactaaatcaatacatcagaaaactctgaagtcttcaatagaaagattccaaattttgttacaaaatgactaaaaacatatgggggtttcattttattttacaggaaaatgtggctcactgagctcaaaaagaaggctctgtgcatgaaatcatgaaaactacatggggcgataactttaatcaaatcccaaagcttagaatatcctgaagatgacccacctccacatatttccaaaattgggagagctttttttatagagtgatttatttctatagctattcatagaaagagtctgttccttaaggtatgtgacaacctgcattcatgcttgagatcactgggactcatatgtttataaagatctctgaaacttctggcttctttttctcatttgttgccgtgtgaaccactcatccactccggaagctctcctgccacggaagtcttttaaagcagcttatcttttgtggtcatctgattgacaatggttcaacaaatcttcaaaatgattgtttataagattatagactttggttattatctttaaaacttgtcttttcaggttaaatataaataatctcctaaagtttagtcatctttttcttattctagtttctattctcattattgtaacatgaaatccaatatgaatttaacgattgttaaatggtgccatttgattacttccttgctctaatgacaagaaatcaacttcacagtgagttcttatcacagtggtggtttattgtatgaattctgatgataaaaacttgatgttgggtatccaaaattactctttaaagtaaagacttttgttatatatatagagagcggragcaaaacaaacaccaattgaatacaatgttaatgttgtcaccaaaatataaagtgatttctcattttaactgctgattgagtaagaaatatttggtatttaaaattacaaatgtttgtgttgtagtgtgggataattagctttttacctttaaattaagtatgcactgtaaatttccttataaatacagttgaattttatattagtcattgtaaagtgaatatgaaaataactttatcttgattagaataacattttcttctttattaacactaatgagaacatcaaagaatgtgattaaattaaaatgca

SEQ ID NO: 78738 - DNA, 559 bp, Homo sapiens
gcctggccaacatggtaaaaccccatctctaccaaaaatacaaaaattagctgggtgtggtggcgggcatctgtaatcccagctagtcgggaggctgaggcaggagmatcgcttgaacccgggaggtggaggttgtaatgaactgagatcctgccactgcactgcagcctggtgacagcgagactccatctcaacaacaacaacaaaaagaacagtgtagaacattaagatagagtctgaggggtaaatgagattcaacttctctggatgtttgaattttttgaaaatagaacgtcttgaaaaggcgtatttcgcactgtgggttttggacaaaagagtttgaaggcccctgggaccagacaacctccagcagggcagttagctcataaggcacctttgtgaaaaacggcttgacaagtggagccacggggatctcagcccccgctgctcccttggccaggaacccttgtgcaggccttagctggcacagctctgcgtggcgacccttgcttgggagtctcttcagctgtaatattccattctgttctaatcaagatgg

SEQ ID NO: 78739 - DNA, 559 bp, Homo sapiens
gcctggccaacatggtaaaaccccatctctaccaaaaatacaaaaattagctgggtgtggtggcgggcatctgtaatcccagctagtcgggaggctgaggcaggagaatcgcttgaacccgggaggtggaggttgtaatgaactgagatcctgccactgcactgcagcctggtgacagcgagactccatctcaacaacaacaacaaaaagaacagtgtagaacattaagatagagtctgaggggtaaatgagattcaacttctctggatgtttgaattttttgaaaatagaacgtcttgaaaaggcgtatttcgcactgtgggttttggacaaaagagtttgaaggcccctgggaccagacaacctccagcagggcagttagctcataaggcacctttgtgaaaaacggcttgacaagtggagccacggggatctcagcccccgctgcycccttggccaggaacccttgtgcaggccttagctggcacagctctgcgtggcgacccttgcttgggagtctcttcagctgtaatattccattctgttctaatcaagatgg

SEQ ID NO: 78740 - DNA, 559 bp, Homo sapiens
gcctggccaacatggtaaaaccccatctctaccaaaaatacaaaaattagctgggtgtggtggcgggcatctgtaatcccagctagtcgggaggctgaggcaggagaatcgcttgaacccgggaggtggaggttgtaatgaactgagatcctgccactgcactgcagcctggtgacagcgagactccatctcaacaacaacaacaaaaagaacagtgtagaacattaagatagagtctgaggggtaaatgagattcaacttctctggatgtttgaattttttgaaaatagaacgtcttgaaaaggcgtatttcgcactgtgggttttggacaaaagagtttgaaggcccctgggaccagacaacctccagcagggcagttagctcataaggcacctttgtgaaaaacggcttgacaagtggagccacggggatctcagcccccgctgctcccttggccaggaacccttgtgcrggccttagctggcacagctctgcgtggcgacccttgcttgggagtctcttcagctgtaatattccattctgttctaatcaagatgg

SEQ ID NO: 78741 - DNA, 1053 bp, Homo sapiens
atgctttggtgcataaaggaaacaaaaatgtcatccattcaaattctagaacaaaaataaatcatttatttccatatttctatggaataaggtagaaaccacatataagaagaatgaatttcagaggtatgttccatcgttttcatgaagtactaagaagtttaaagaatataaactctaagcaagttacattgattatagaacttactggctgataattcctgttaggttagtttccctatctttcctctttccttttactcatatgaacctttgttttcctttcagatttaattcatgactgacacaaacattgactataatccaaataatttaattattttttccactttgcaaattgaactgtttaaacttactgctcagtgagcacaaataaaaataaaatatttatctcagtgctttatctgtaggaaaacaacagaatattccaatccctgtaagttatagttcttggtttccagctttaagaagcagagtgtcgggcccggagcgctgactcacgyctgtaatcccggcactttgggaggccgaggcgggcggatcacgaggtcagcagatcgcgaccatcctggctaacacggtgaaaccccgtctttactaaaaaattttttaaaaattagccgggtgtggtggcgggcacctgtagtcccagctactcgggaggctggggcaggagaatggcgtgaacccgtgaggcagagattgcagtgagcagagagagcgccactgcacttcagcctgggtgacagagcgagactccgtctcaaaacaaacaaaacaaaacaaaacaaaacaaaaaccaaccaaacaaaaaagaaccagagtgtcagaataaacacagaatctctactttcaaaaattacatagttattaataaatgcggtatcacttaccagtcagtttacatcttagcatccatctccaagcaaaatggacactgaaaaaataaaaatataaaaactgagtatttcatagtaaacttagacatcatattatatttttatagctacgttaactcagctatgatttaaa

SEQ ID NO: 78742 - DNA, 1053 bp, Homo sapiens
atgctttggtgcataaaggaaacaaaaatgtcatccattcaaattctagaacaaaaataaatcatttatttccatatttctatggaataaggtagaaaccacatataagaagaatgaatttcagaggtatgttccatcgttttcatgaagtactaagaagtttaaagaatataaactctaagcaagttacattgattatagaacttactggctgataattcctgttaggttagtttccctatctttcctctttccttttactcatatgaacctttgttttcctttcagatttaattcatgactgacacaaacattgactataatccaaataatttaattattttttccactttgcaaattgaactgtttaaacttactgctcagtgagcacaaataaaaataaaatatttatctcagtgctttatctgtaggaaaacaacagaatattccaatccctgtaagttatagttcttggtttccagctttaagaagcagagtgtcgggcccggagcgctgactcacgcctgtaatcccggcactttgggaggccgaggcgggcggatcacgaggtcagcagatcgcgaccatcctggctaacacggtgaaaccccgtctttactaaaaaawtttttaaaaattagccgggtgtggtggcgggcacctgtagtcccagctactcgggaggctggggcaggagaatggcgtgaacccgtgaggcagagattgcagtgagcagagagagcgccactgcacttcagcctgggtgacagagcgagactccgtctcaaaacaaacaaaacaaaacaaaacaaaacaaaaaccaaccaaacaaaaaagaaccagagtgtcagaataaacacagaatctctactttcaaaaattacatagttattaataaatgcggtatcacttaccagtcagtttacatcttagcatccatctccaagcaaaatggacactgaaaaaataaaaatataaaaactgagtatttcatagtaaacttagacatcatattatatttttatagctacgttaactcagctatgatttaaa

SEQ ID NO: 78743 - DNA, 1097 bp, Homo sapiens
taatgacttatttttccatttattaataaaatatgataattctagctaagatttatgatcagcctaagatagccagcttttccacaatgatttggcataataattattaaaaaactcaatgtcttattcattcagctttatatcaggattacatttctatgatgcttagaaaattacaaagtcttaaaaatgagtgtttccctgtaataccagcactttgggaggccgaggcaggcggatcatgaggtcaggagatcaagatcatcctggctaacacagtgaaactctgtctctactaaaaatacaaaaaattagccgggtgtggtggtgggcacctgtagttccagctactcaggasgctgaggcaggagaatggcgtgaaccagggaagcagagcttgcagtgagccgagatagcgccactgtactccagcctgggtgacagagtgagactccgtctcaaaaaaaaaaaaaaagtgtttctatcttttttggaatgccagacatctaggacttggaatcaaacaacttaggggtagtatattaattccactgtaccaagagggaactgcaatgaaagactccttttctcagtccgtaatggagtaaagtggagatgagggaggtacgtcctactttgacacatcaattcttggctctccacattttcaaagaccctcagactgagtcagagcaagagataggttcctagacattcaggacagaggatcacatccttttccatatccaaacaattgccttcctttctcactaccttccactgttcctctcttgagtctgaccaagaaattaagactttacaccaccttgtataaagcctttcttaatcatgaggcaccacactgaattttcttcctctctaaacatcagcagtatttgtaatccagtcccacgtttcacctggctttttttatgaatcacatttacagaaattgttctaatctcatgtactgaacccatatcttctagccattaggaaaccctatctcttcagcaggccctctcacttatgtatttctaagacacccaaacaataaaagcctctacatccaattgtttcctaaactttatcaggtt

SEQ ID NO: 78744 - DNA, 569 bp, Homo sapiens
gatctgatactatcttcaggtaggtactgtcagaattgaataagaggacaccccgctgatgtcagctacagagttggtgtgtggagaagactcctcaaacatctggtcacagaagtattctacgttttgtgagagcagaggaaaaatgatttttgtttttttcacacactatcttctcttccccagagtcaaatgcttatatttagtgataggggccttcctcttctgctcttatattccacagtaaaagataagcactttatcttcagagaggaagagtaagtgtgccagctcctatataaactcggagattaataatgttgaagttctcmttcttcaaaccttgctatgtacaggtataagcatctgactcttgccttgtcattcagtagagaactaggtatgaggatagcgctaccgtgctactctggctgctgttattgccgtaaggtcaattctctaattcagaagtcttctatgtgtgtataacatatatatattacacagactcacaagtagggtaacaactcagactctttggagttttggacttaacaccccctctccta

SEQ ID NO: 78745 - DNA, 243 bp, Homo sapiens
ccaaattttctacaattaatgagtattatttttaatgaaaatgttataagataaataaaattaagattacatgatttatccaatatgaattaaaacatactacagattgttaaatataatataactgagcatcaaattaaaataattttagaattatrattttatgtgaattaaatgaaaaataatataatgagagtaaactgaaatatttcaagtggttgctatgttctcaatcttctaaaa

SEQ ID NO: 78746 - DNA, 644 bp, Homo sapiens
atttgtgccctacatacctccttcacctcaccctggtccccaccctgcagccagggaggccaggtcatgttgaactttctaaaccattgtaagacttgtgagtttctacgaagtcctgaggggtttgagcagggaagtgatatgatctatcttacatttcaaagaattaatataggccaggtgcagtggctcacgcctgtaatcctaacactttgggaggacaaggcgggtggatcacttgagtccaggagttggacaccatactgagcaacacagtgaaaccctatctcaacaaaaaartaccaaaaattatctgggcatgctggtgtagcacctgtagtcccaggcatttgggaggctaaggtgggaggataacctaagcccaggaggtagaggctgcagtaaactgagatcatgccattgcacgccagcctgggcaacagagcaagatgatttctcaaaaaaaaaaaaaaaaaagattaatgtggtaggctgaatatggcctccaaagatgaccacacattaatccctacaacctgtgaatatgttatcttaaatggtataaaggaattaaagctgctaaacagatgactttaaaatagggagattacttggattatccaggggtatccagtgttattaca

SEQ ID NO: 78747 - DNA, 718 bp, Homo sapiens
ttttttttttttttttttgagacggagtttcactcttgttgcccaggctggagtgcagtggcgcaatctcggctcactgcaacctcagcctcctgggttcgtgattttcagcctcccaagtagctgggatttcaggcatgcgccaccacgcccagctaattttgtatttttagtagagatgaggtttcaccatgttggtcaggctagtcttgaactcctgacctcaggtgacccacccaccttgacctcccaaagtgctgggataacaggcatgagcctctgcgcccagcccagccctcccgtcctgagaggtaaggctgcacttgaagagtgcagcctagacccgtgcctgagggcacaggaggtgcaggctctgcccaggtggagtctgggttatctaagttgtggtcaccaagtgaagtgatccccggctgtcccccgcagytgagatctttgccgccatctcaacaaaggttcctatacttgtctttcccctagtgtgaacgagctctatgtcgatgacccagacaaggacagcggtggcaagatcgacgtcagtctgaacatcagtttacccaatctgcactgcgagtgtgagtactccacgcagcccctccctccagcaggacacctccttagggcaaatgtgtgtgtgcagaaatggcaagatctccaggacaagccaagccaacatatggttctccccactcttttttgg

SEQ ID NO: 78748 - DNA, 530 bp, Homo sapiens
caagtctatctgtgctaggggcttcaggctgtaggaacagatgctagcagccaggcgtggtggctcatgcctgtaatcccagcactttgggaggccgaggcgggtagatcacgaggttaggagttcaagaccagcctggccaacatggtgaaaccccgtctctactaaaaatacaaaaarttagctgggcgtagtggtgggcgcctgcaatcccagctactcgggaggctgaggcaggagaatcgcctgaacccggaaggcagaggttacagtggagccgagatcgtgccactgcactccagcctgggcggcagagcgagactccgtctcaaaaaaaaaaaaaaaagaataaatgctagcaatgcttaaagacattcattctatgcccagcacatatgaaatcagacacattcccttgagtcattatggtggtgaattctgaactaggggtggggagggacgtgctctccttcctagcaggacaataccagaatctggagggtttggggggagtagcacacaaatagtta

SEQ ID NO: 78749 - DNA, 577 bp, Homo sapiens
tttttagtagagatggggtttcaccatgttggccaggctggtctcaaactcctgacctcaagtaatctgcccgcctcggcctcccaaagtgctgggattacaggtgtgagccaccacgcctgaccttacatgtaaatttaactaaataaacctcacactaaaaaaggtagtaaaaaataataatgctgtaatgatagacattccttcaaattctccaagacccatatatasggatgtgtgtgtgttagagatagaatctccctatcttactcagactagcctcaaacgatcctccagcctcagcctccctagtagctgcgaagcatgcagctgcgcctgacttcctctaatttttaccgatgttcataggcacatttttatctagctataatataaattgatgatttgttttattttataaaaatctaattaattctgccattctagcaaagaccagcatgataatctggcaaggtaggactcattgatcaatttcaagtcagcacttttctccccattcacacagcagtatttcttaagaaggaattttatttctcggtggtattctcagtatttt

SEQ ID NO: 78750 - DNA, 1713 bp, Homo sapiens
aaaaaagcagctccctctcccctcagtgatttaaaacaagctgcaggaggcaaatatcatgactctcagaaactacacacagcagtgagtggtgacttgtagctttgataaagaaaagtgattaacacagccgagtatggctttcacttcaaactgcagggacccatttggcagagccctatgggccatagacaatcgaagacacaatgcaggttttcattatttgaaaaccattccggggggcacagactgggacaaaagtcattttgattgagtaaacaggatctatttgtaccaagggattcaaaaaaaaatcttttcttaaatgtgttccaggaagagagatagctagcattgagtattttttaaactattataataaagaggcacattttaaccaaagattgcatttaaaagagtagaatgtgcttttaccgtgagctacaaaaagctatttctggttgggaggaaagactttatgacctttcctcttcgcaatattacgccagttactttttaagaatatactggatataagataattgagaatttggctaaggttattgtgtattgggccaagtaactgtactttcttgttggggttgtttattgagcagtgaaaaatcagtattcatgagatgyaattgtactggtgaataggagctagtcaaacacctctgagtacaatatgtactagctaagtggagaaatggtcaggatcctagaactgatggcttccctgagacgatgatgtgttttgtacgcacccagtcttgccccttgtgatcatgtatgactaaaattcagggtgatgggacatcagaagccacgtcttggtatcaagacttccactgtgcctttaatgtgcaggctgttgttacccatcctgtataatttcttaaagctaactaaatttgttactgggtaaagcctattatgtctcgtaaatttaatcatcagactgaacccaagactgtgccactggctgagcaggctgagttttgtgctagtgaaatgatgtctacttgtgacttccacagtgccatctgctcttgaggagtagctatcagaatggtagacataagtgtcaggaggaagtaaggtaaacatagtcgagaacattttgctaatctaactcattttagttgtagcaaacttccctctatctccttgttactcatgcccatcttcccgaaacttttacttcctcttcactagaatattctcaaacttccttttccctttgctctcagttccagcaaaacaacagctaaatggagattaaaatgttaggtttttacaatactggacagtaaataaatttaacaattaaagtcaattaaataaaagaaaaaactactcaaaaatgttacttatcctttttactctgaagttgcccaacaatacattcattaatagattgtaatttcaacgattcggtttatttgattggctacttaaagattttggcaaataaggagacgcaaaacggggcagcatattgaaagaatctttggaatagattccttgaaagggagaaaagaagatcaatcagcatttacaaggacactagaagaaggagatagtggtgttcaattggcaggattgtctgaagccttacgcttacctgcagtatctcattcgtattctgggtgtcttggtactgtctttattcattgacttaaaaacactcacaagtaagcatcatttact

SEQ ID NO: 78751 - DNA, 1027 bp, Homo sapiens
acaataaatatgcaggagaagttaaatgggtatgtccgggagtcaaatattgattctcagaatgaaaacttcttcatttatttctcagtgatcttcataaccctttcccatactgggcagtgagaaaaaattatcatctcactctgaaatagtgatttcaccagtctctttttatgggttgggacctcatggataatgaccagtcttttagatttccttgctctcctcctgctcctctccaaaatggcagctgggttgacagatgaggaagcattatacatgacctgagatctctatgcaggtacttgcagtctcctctgaccctctgctctctggaacagtgcctcttgtctgcctgataagtctctaccctgctgaccttgtggctctgagcttgtattttcatcaggaaatacggttctctgctgactatatcagttactaaagggattcttaaatctctgagttactgctgaagaacacttagaattctaaatttgtaattatgatacctctaaaaacaagcgtgattatccattatgtataaggatgccttccaaaaagttggagcaacttgaagccacttgttacattgtcatttagtggaggagggagtgaacttggtgtttacaggtagaactctctatcaggtgctgtgaggaaaaacaaaagcaagataaactgtggccataatctttgttactttatttcccaatggggagaaaaagacaaatatatatatttgtcaaaactgaacagatgttatttgaacattatactgtatatgccattataactataatrtatataatacatatatataaattattgaacactaaaaagaacactttaagaattatctattttattttttttattatactttaagttttagcattaggagaagtatctattttaaataaagctatttcactcttcagtttccatctcaagaactcataccaatttaaacttccactcatatttgagagttgagaaaaattaccaaatgataataatatattat

SEQ ID NO: 78752 - DNA, 1027 bp, Homo sapiens
acaataaatatgcaggagaagttaaatgggtatgtccgggagtcaaatattgattctcagaatgaaaacttcttcatttatttctcagtgatcttcataaccctttcccatactgggcagtgagaaaaaattatcatctcactctgaaatagtgatttcaccagtctctttttatgggttgggacctcatggataatgaccagtcttttagatttccttgctctcctcctgctcctctccaaaatggcagctgggttgacagatgaggaagcattatacatgacctgagatctctatgcaggtacttgcagtctcctctgaccctctgctctctggaacagtgcctcttgtctgcctgataagtctctaccctgctgaccttgtggctctgagcttgtattttcatcaggaaatacggttctctgctgactatatcagttactaaagggattcttaaatctctgagttactgctgaagaacacttagaattctaaatttgtaattatgatacctctaaaaacaagcgtgattatccattatgtataaggatgccttccaaaaagttggagcaacttgaagccacttgttacattgtcatttagtggaggagggagtgaacttggtgtttacaggtagaactctctatcaggtgctgtgaggaaaaacaaaagcaagataaactgtggccataatctttgttactttatttcccaatggggagaaaaagacaaatatatatatttgtcaaaactgaacagatgttatttgaacattatactgtatatgccattataactataatgtatataatacatayatataaattattgaacactaaaaagaacactttaagaattatctattttattttttttattatactttaagttttagcattaggagaagtatctattttaaataaagctatttcactcttcagtttccatctcaagaactcataccaatttaaacttccactcatatttgagagttgagaaaaattaccaaatgataataatatattat

SEQ ID NO: 78753 - DNA, 1188 bp, Homo sapiens
gttctgagatactggaaaggcctttgcaaaaagattttgtctcttgatatttatgaagcacattcatccgaccacagaagatacatatcaactttgacagaaaatatgaacacattcaaatgatttatacctttgaaacatagatcgttgtggggttcataacccaagtataactttcccacagattcactcaatttccttcctctttctgtgcaatatattgtatattgcaagaagctcacctccactcaccttattcctcaggctttcttctcaactatcttctgtatagatttaaccagtgggaggcgttggcaggagattggagagcaggagaaggggagatttcagggtatttctttccctctttcactgctttgggcaacagctgatacagagtaagtggccaaaaaatactagctattattaggtcttctaataatgatcttctaaaatcactttttcagtggttacccccattgatttgccatgaatrtctcttcagacatctttgcaaagaattgagcctgactttagatactcattcaaaatcaaaatcagtaattttaggattgaggactctggtattatttaagaactcttaactgtaccaagcctcactcccatttctggctttcccctatatatcagttaagtaataactccaatagtgtaaaatttgcaatagtgttatgtaacaaatcaccctaaaacttattgacttaaaattatcaccatttataattgcacacagtctgtggggtcccgtgagctgttgtgttgttctggctcactcatacattttcagtcagctaatgggtgggctaggggctggcttatctagcataagcgcagctaggatgattcacctctgctccatatggtctctcatccttcggcaagcgctcctgggcttattctcatgcaagaaacaggattctaatagagaaggaaacaagacttcttgaagcttaagcttggagctggctcactcatttctaacacatttttttaaccaaagcaaatcacaaggcaggcccatattcagggattagggaaataggttacaactcctgatggtagcaactttaaaagtcacattgcaaaaagatgtgcatacagagaggtcaccagtgcaatctaccacaccttgcaatctattaagtttctcaccccctcacaagtaag

SEQ ID NO: 78754 - DNA, 618 bp, Homo sapiens
gctgccttccaaaaccatttcatcagaagggcacacatctttcctccatcacttgcaacatccctaattgtgctgagaaccctaaacagctcaggccaagggggtttttctcctgggacaatgatacttaactacctccagatcacagccttcagccatcaaccctctcattccctcccctcactgctcccagggattctctcagagaatgagcccatttggtgtccagtcttatcactcctaggggtcaagttggaattttcagaatacctggaaaagcatgcatctactgcctttactttgtatatcagccaaaaccagtgttgactttagtcacggcatytcttaaaagtcctctttcaaaagggacagactggtccacttacttgtctgtcacagcctgcatgaactcatccagcaagtcatcgtatgccttcccgtgcacgcgctggtgtttcaggccgatgtacagagggtctctgagcagctcctggaacagacagcacccattgactgagcctactcccggtgttcctgttttttttttttccaacaagtatccaggattattaggaagaaccagaaggtgggaggagaggggggagtaagaaggtaact

SEQ ID NO: 78755 - DNA, 618 bp, Homo sapiens
gctgccttccaaaaccatttcatcagaagggcacacatctttcctccatcacttgcaacatccctaattgtgctgagaaccctaaacagctcaggccaagggggtttttctcctgggacaatgatacttaactacctccagatcacagccttcagccatcaaccctctcattccctcccctcactgctcccagggattctctcagagaatgagcccatttggtgtccagtcttatcactcctaggggtcaagttggaattttcagaatacctggaaaagcatgcatctactgcctttactttgtatatcagccaaaaccagtgttgactttagtcacggcatttcttaaaagtcctctttcaaaagggacagactggtccacttacttgtctgtcacagcctgcatgaactcatccagcaagtcatcgtatgccttcccgtgcacgcgctggtgtttcaggccgatgtacagagggtctctgagcagctcctggaacagacagcacccattgactgagcctactcccggtgttcctgttttttttttttccaacaagtatccaggattattaggaagaaccagaaggtgggaggagaggggggrgtaagaaggtaact

SEQ ID NO: 78756 - DNA, 779 bp, Homo sapiens
taatggttgcagggtgggagtatgagtgaattttctatattctctgtttctagttttccaggtggcttatttttagctagctctrgggtgggccttctcctagatttatacttggctcagtggctgagatagggggtacagcaaacagttggtggccaataagtgcacattcatcattgtggacatcagaaggcgggactctatgcaggatcatacttctcagaagatggggtgcaggcacccctgtcttcacacagctgtggcctagagggagtgctgaactgttggcagtgtcacagagacagggctaaggatactgggacttcctaacatccttcccatggtctgcaaagtacacagtgtgcaccctctgagggcctacaaagtgacaggcaccatgctaggcactgtcgaagacagatgaatcaaacatgatccctgccatcagagaactcccagtttactaaaacttgggcacaaaacagtagaacacagtgggtagtcagagatcactggaaattgttacattcatttattttttgagcatcaattatgaaccaggctcaggtactgaggataccatggtaacaaaatagaccaagctcatttctgtttgtaaggaaagaaattactaaatgattacaagtgtgatggcttttataaaacagttgttcatgacatactttttgttagtttatgtacagaaaagtatgttatcagtatcaacctacctctgcagtgcctccccgtgtactccatgtaccagtagctttattcat

SEQ ID NO: 78757 - DNA, 1095 bp, Homo sapiens
gcatgctggacttaatacctaggtgatgggttgataggtgcagcaaaccaccatagcacatgtttacctatgtaacaaacctgcacatcctgcacatgtaccccagaacttaaaaaaaaaaaagtcagggtctcactgtgttgcccagtctgcagtgcagtggcgtgatacgtagctcacagtaaccttgaacccctgggctcaagagatcctcctgcctcagccccctgagtasctaggactacgggtgcacaccatcatgcctggctgatattttttattttattttttgtagagacagtgtcttcctgtgttgcccaggatggtcttaaacccttggcctcaagccatcctcccacctccgcctcccaaagtgttgggattacaggtgtgaaccactgtacctggccataaaaaatgaattacgtatttctatgttcctctaatgaacatttggcaaaattatgtagcatgctttatggtagtataaattatattgtatacctaaggataaatataatgaaatatgtaggatatgtagtaatgttttgaaaataacaaaactttgctgaaatattaaagattgaaataaatttaaagataatgtgttcatgggttagaagactcaatattgtaatctcaatatcctaccaggcatttatttattaatttatttaatttaaagatgggaggctggtcttgaactcctgagttcaagtgatactcccaccttggcctcccaaagtgctgagattacaggcttaagccaccatgcctagcccaggctttaaaaatatataatttggtaagctgattgaaaaatgtatatgggcctagagtagttaatatatggtatatcctagagaatgttctgtgcatttgaaaatcatatgtattctagtgctgttggatgggatgttttgtatgtctcttaggtccatttggtttattatgttgttcaagtccaccgttctcttactgatttttggtctggatggtctgtccattgttgaaagtggtgtattaaagttctctaccattattgtatttctgtctattctcccctttagatctgttaatatttgctttatgtgt

SEQ ID NO: 78758 - DNA, 1591 bp, Homo sapiens
tgcatgtaatcccagcactttgggaggctgaagtgggcggatcacttgaagccaggagttcgagaccagcctggccaacatagtgaaactccatctctactgaaaataccaaaaaattagccgggcatggtggcgcatgcctgtaatcccagctactcgggaggctgaggaaggagratcacttgaaccagggaggtggaggttgcagtgcgctgagattgcgccactgcactccagcttgaggaacagagtgagactccgtctcaatttaaaaaaaggaaacataaagacactttgttattagtatcaggtgcggacagaaagggaaaaaataaacactattctgtaggtgatttcacatactcaaaaaacccaagataatcaactagaaaaaaagctacaataagagtaaggtatatatacacacatacatatatacacacatacataaatatatggaatcaacagaaatacaatcattgaaaagatcccacttacaacaactacaaaaaggtaactacctaagaacaaactaagaaatgggcaagatctatataaaaaaagaaaaacaaaaaaactttaaaccaccactgaaagacaagtgcgtacactcagagattctacatgtccaacatctgtaactttatcttacaggtatatttgcacaagtgtaaatgaggatcggcaagtatatacaaggtcactcactgaagcactgtttctattagcaaaaaatgtacataatgcaaatatccattaatagagaactggttaaattatggcatatccatgtactagaacattattcagatttttaaaataaggactctccctatggactatattaaaagatctccaagaagtattaactagagggagaaattcgctgaacagtgaatatagcatgctacttttagtatcaaaagaaaaacaaaatgtaagaatatgcattaatatttgctagtattgtgaatgcacagagaaactccagaaaaatatataaggaacaaccgtggaaaaagtagagaactgaatgggcaagggaagcatcacagtggtgaataccctatcatgggatttttaagcctctattagttatgcaaatatataaataagatccaaatttaaaaaaagtcagaattagaaactaaaacagtttaacaggaataaatattaaaattcctaatttaggttccaaagatcaactacaaataaaaaaatcttaaaagtaattcatgtcaaaagcttgataagctttggcaaataaacataaacataaccaaaacataaaccgaaaattactacaccaaaaaaaaaataaatatatatatataattttttttaattttattattattatacttttaagtttttttttgagacggagtctcgctctgtcgcccaggctggagtgcagtggcgtgatctccgctcactgcaagctccacctcctgggttcacgccattctgctgcctcagcctcccaagtaactgggactacaggtgcctgccaccacacccagctgattttttgtattttttagtagagatggggtttcaccatgttagccaggatggtctcgatctcctg

SEQ ID NO: 78759 - DNA, 716 bp, Homo sapiens
aaaaaaaagggatctcatgatctagagagtagatgatgatttccataggctggacaaggtatgtggacgaatgggcaggtagtcactgggtccagacatatagctagacgcaagaaataagttctaccactggacagtaggacagcatagtagtaatatacaactagttgtatatttcagaagagctagaagataacagtgactttgtcttttatgacacagagtctcacgattttcgcacagactggagtgcaatggtgcgatctccgctcggtgcaacctccacctcctgggttcaagtgattctcctgcctcagcctcccaagtagctgggattagaggcacgcaccactacatctggctgatttcatatttttagtagagacgggggtttcaccatgttggccagactggtctcgaactcatgacctcaggtgatcttgcctgcctcagcctcctgctgggattacgggtgtgagccaccactcccttccagaaaaggatatttgaaatgtttccagcacaaagaaatgatcaatgtttggagtgatgaatatcttacatatcctaatttgctcagtaaacattgtatgcatgtatcaaaatatcacatgtattccaaaaatatgtacrattattatgtatcaataaaaaagaaaaagaaaaaatagagcaagatcagcttcagtagtagacttttgtctcccatggctagt

SEQ ID NO: 78760 - DNA, 1191 bp, Homo sapiens
gcttgatgccttcatgatgccttcttcatttcaaatgcccatctaacctcttctacttgcaaaatcctactgttttgaaggtctagctcaatgatcaatttctttgtaaagtttctccccatgctgtgatacagaattaattgcactatcttcattattctmtgagcactctgtccatccctctagcatagcaattaccacattatatgattgttgtttacattctctctcattcactgcactctattcttacttatcttttcactttttaaatttcaaatacccaatgcagaattaatacttgttggcttatattgaattgcagatttttctcttattattattaatggttgtctctgactgtacataagcaaagcaaggccataaactgaatggcttgtctttaaccttacctctatgaagccttctaggggagagcagtcattccaaccaccattcctggtgttttctaaaattgtgcaggagaaggttcctgcttttgtgtttctgcggagattattatttctccttacaaggacttgctataaaaagagtaaagactccattttgaaagatctttaagaataaatgagagagaaaatgtaaataatcttcaatgaaggtaagagttacggaggagagaggagactatgtctcttgccagaatttcccttagggcagaacttgtgttcaccattggctttgtattatttgttcattcatccatttactgaatatatatttagggagtgcctatggtgtgccagacattgcttcagtcctaaggaaaatgctaaatatggtagaagaggtctctgtctttatgtagtttacaatcccctgggcatttcaccaggttgccaagtgactcatgtggaagtcaacccagtggcatgtcaatagataattagtcaatggtgtttgtcaggtatttcttatgtgttcatatcagtgctaagctttgtaggtagatcctttctgtaaagaatttagaatgtaaaaattagtagagtcctgtacaaaatggcataaagagtcatcaaatcagatggttcataatacaaggacattagcagttcagagagtcttaggatcagtttgtctggaagtacgatagatgggcataccagaggcctttggatgatcccctgaagcccttttcccctgctccctctacctccagtgcctagc

SEQ ID NO: 78761 - DNA, 1191 bp, Homo sapiens
gcttgatgccttcatgatgccttcttcatttcaaatgcccatctaacctcttctacttgcaaaatcctactgttttgaaggtctagctcaatgatcaatttctttgtaaagtttctccccatgctgtgatacagaattaattgcactatcttcattattctctgagcactctgtccatccctctagcatagcaattaccacattatatgattgttgtttacattctctctcattcactgcactctattcttacttatcttttcactttttaaatttcaaatacccaatgcagaattaatacttgttggcttatattgaattgcagatttttctcttattattattaatggttgtctctgactgtacataagcaaarcaaggccataaactgaatggcttgtctttaaccttacctctatgaagccttctaggggagagcagtcattccaaccaccattcctggtgttttctaaaattgtgcaggagaaggttcctgcttttgtgtttctgcggagattattatttctccttacaaggacttgctataaaaagagtaaagactccattttgaaagatctttaagaataaatgagagagaaaatgtaaataatcttcaatgaaggtaagagttacggaggagagaggagactatgtctcttgccagaatttcccttagggcagaacttgtgttcaccattggctttgtattatttgttcattcatccatttactgaatatatatttagggagtgcctatggtgtgccagacattgcttcagtcctaaggaaaatgctaaatatggtagaagaggtctctgtctttatgtagtttacaatcccctgggcatttcaccaggttgccaagtgactcatgtggaagtcaacccagtggcatgtcaatagataattagtcaatggtgtttgtcaggtatttcttatgtgttcatatcagtgctaagctttgtaggtagatcctttctgtaaagaatttagaatgtaaaaattagtagagtcctgtacaaaatggcataaagagtcatcaaatcagatggttcataatacaaggacattagcagttcagagagtcttaggatcagtttgtctggaagtacgatagatgggcataccagaggcctttggatgatcccctgaagcccttttcccctgctccctctacctccagtgcctagc

SEQ ID NO: 78762 - DNA, 520 bp, Homo sapiens
cctacagctctgtgaggcatattttctcatttcagtttatagaccaagaaatgtgggctcaagcaggtatgtggacagcccattagagcagatgtagacagtgacaaggccakaaacaaatcaaggtctgaatcaaaatctaaggctgtttcccagaaacaacttctttttagcaatgagacactatttcacactttcagcagaaatgttatttattatgtctcttcttagggcaatgatgttcaaacttcaggatttaaaaaataattcctctgaaaaatctagtttagcaaggctgacaaaacaggcagcatctaaattaaatttactgtaaaggttaaaaaaatgtgtaagttatttgagtgatatggtgccctcatgtgctttgcagatgaaacttaggagatagcagggttgggggaagcagacaggaggatgtgaaggaggagggcaggacagggtgaggcaagagttagaattagagtccaagtattctcatcagggaaagagagagaaggag

SEQ ID NO: 78763 - DNA, 520 bp, Homo sapiens
cctacagctctgtgaggcatattttctcatttcagtttatagaccaagaaatgtgggctcaagcaggtatgtggacagcccattagagcagatgtagacagtgacaaggccataaacaaatcaaggtctgaatcaaaatctaaggctgtttcccagaaacaacttctttttagcaatgagacactatttcacactttcagcagaaatgttatttattatgtctcttcttagggcaatgatgttcaarcttcaggatttaaaaaataattcctctgaaaaatctagtttagcaaggctgacaaaacaggcagcatctaaattaaatttactgtaaaggttaaaaaaatgtgtaagttatttgagtgatatggtgccctcatgtgctttgcagatgaaacttaggagatagcagggttgggggaagcagacaggaggatgtgaaggaggagggcaggacagggtgaggcaagagttagaattagagtccaagtattctcatcagggaaagagagagaaggag

SEQ ID NO: 78764 - DNA, 856 bp, Homo sapiens
caagaatttctctgccctcaaagcaattttctgtttaatgctatgctgaggatactcttatttcatactaatgatttagaaccctcaccaccatatcagaattccaagccaaaactaaggtactatgaaaagttaactggtgtggaaagtcaatggtcatttcttatcttatttctctacttgaagagttattccttaccaagagctctccgcaccttcactatggggaaatatgcacccactttaaggaaatattatgggaattaaatgttgtgacatctttcaggcacccagcacagtggtgagatggagttccccctttaccttctcccatattctttcctgatcctatctgagtaattacaactcttccaaccaatccacttttacacagtttttttatagaataaacatccaaatgcagcatctgtgatatatctgaattaaatagtgggtgcaacaacatggctatttcaagcttaaatgtcagctmatttttttgaaagcaaagtcatgggagtgagtgtctgtttacacctaatgctgagaaatttaatctctgcaggctgtgacacattctgatatcagaggatcaaaatcccactggtggaagttaatttcctttgctctacaatccacacttaccattctgcactcaggtgggaaaataaaagttgtgttcttcatccaaagttactaaaaacacccaagcccaaatttaaacctcaaaactatgagctctgcttccttggaactcaaaagaataattctctttgctactcagagattaatcccactgcctttatcacctactatgcttgtgttattttactcttcttttgttatttaactgaga

SEQ ID NO: 78765 - DNA, 336 bp, Homo sapiens
tttaattgcagattagataccttgaagggcaatggttacagttaatgttgttgaacactgattcatgattaatattgctgaaagtctgattctcatgaaatgcactattgtaagacaatattaaattataaagtgttctttgacaagtgtcacaaggcacaaactttctgccacaagtgcagagagctgcagagaaatgttacgagccttgtaaaacaatgaatttctcccagagagatggacagacatgcaacaagatggacagcgaygatgtggggacaatgagagcgcacggctgtcctggcttctgtagtatctctaagggtgggcagtaca

SEQ ID NO: 78766 - DNA, 530 bp, Homo sapiens
aggtgatataggagctgaaggaaaactctatattggattataataatattaagactgggagtccaaactttagagcttaatgatgcttgatgtctttgttcatcttcccttgcttgtaacagaatacctgaaatggaataatttataaagaaaagtaatttattctttgtagttttgaaggctgagaagtccaagctcaaggtgctatatctggtgagggccttcttgctctaggtggtacagggcatcacatagttagggggctaagtgtgctagttcaaatctctcttcctcttcttcttcttttttttaatttataaagataagaggtttctttggcccacagttctgcaggmtgtacaagaagcatagcaccagcatctgcttctggcaagggcgtcaggctgcttccactcatggtggaaaggggaaggggagctggcatgtgcagaggtcacatggcaagagaggacgcaaaagccattaatcctgctcccataataacccattaattcattaacccattaatc

SEQ ID NO: 78767 - DNA, 944 bp, Homo sapiens
gcttatttttattctggtttacctagtttctaatctagcatttattttcttccccaggatcccatccaggagagcaagttacatttcttcttgtctcttaggctcctcttggctgctacaatttttcaggctttctttgcttctgatgaccctaatggtcttgaggggactgggcaggcattttacagaatgttcctcaatttttatttgcctgatgtttttctcatggttagattgcatttatgggtttggggaaggaagaccataaagcaacattttcatcacattatttacatawtcttcccccttgacatagaatgttgagaaaggagagaaactttttatctgaggagtgtgagcccctttaaattatcaggcccagacaggcattgaggccgcttgcttttgaggccgcttgctttgagggctctagagtgactgacaccaagcagtcataaaattaacccaacagtgccatatgctgaacatcgtaactcacaccgtatagtgagtgatatacaaccaaccactaatcaacgccatttctgtaaaccaacaagaattcctgacaaacgactttgtacagctcactccttgttcccttaggcctgtgaaaacctgcttctaacaaaacaccacagggaacgcttttgttcattctgatttgcatttactaatttgctaaaaatctgtttttataatgttctttaaatcagaactgttataaactctaagtagactgttccatcactagtctgaatttatgaggagcctatacatgggctggtcacaatattaatgacatatgctcaaagtgaactttcaaaataatagatgttatgaagttgccagtctctaaaaatggaatgggccaggtcatgacactatatcccagccacaaggaactccttctggttgacatatgcaagatactgttacctaaa

SEQ ID NO: 78768 - DNA, 675 bp, Homo sapiens
caaacaacaactttctagagtaaaaataaaacaactaagaccactttctgtaaactgtcctcagccacacccaactttgttgttctcatccaccattacacatgtcaaactcaaatccgctcacagtaccaggtaatctctggtacccccaaaagccaaagagtcaggtaatgcaatacaagaaagcagagctttaggcctaagaagaatctgcccaggaatctttttttttaatatatttttaaattatactttaagttctggggtacaygtgtacaacgtgcaggtgacctaaacaaaaaacacaacaccttcaaaagggagagtagcacttttgttctgagttctttaaagggtatgagtcattagaagccttctctagattttcttgatgccaaagatgacaaaggaggaaggatgaatagggtggaagaaaagtaaaaggaagaaaattgtttttctaaggaattaagtgaacatagaaactaaacacgattctttttttttttttttttttttttttttttgcagctcaaggaattgtagccagttcataggcctcgttcctcataatttgaaattctcatccagatttgaccaagtcagttaaagttggtcaaatctgataggagaaagaccaaaataacaacaacaataacaaatataattgctgag

SEQ ID NO: 78769 - DNA, 759 bp, Homo sapiens
acctcttgtgaacagaatagtgatatagtttgcatatttgtcctctccaaatctcatgttaaaatgtgataccaatgttggaagtggggcctggtggcaggtgtttgggtcatgggggcagatccctcatgaatagctttgtgcyattctcgggacagtgagtgagtagtttttgctttattagctcctgcaagaactgattgctaaaagcagcctgatacctccctcccctctctctcttgcttccttcctattaccatgtgatgcctgctcccctccaccttccaccacaattggaagctccctgaggcccttatcataagcagatgctggcactatgcctcattttatgtacagcctacagaattgtgaaccaaataaatctcttttgttagtaaatgacccaacctcaggtattcctttatagcaacacaaaacagactaggacaaatagtatctaacatcgagtaggcttactataaatatttgtgaagttaatgagtccttagactctaaaccattttctatagattgtgtccaagagatgtttgattaatacaagtttttgtacattggaaaactacttacttataataaatgacttagttgacctgaagaaactaaatcctagacccagcagtggggaaaactgagaaccaaactaattatactacaaaaccccaagaaggctcagaaattgatggcagtgaatacctttggaagtgagggcaaatgaggtggcactaaaataaagatgca

SEQ ID NO: 78770 - DNA, 759 bp, Homo sapiens
acctcttgtgaacagaatagtgatatagtttgcatatttgtcctctccaaatctcatgttaaaatgtgataccaatgttggaagtggggcctggtggcaggtgtttgggtcatgggggcagatccctcatgaatagctttgtgctattctcgggacagtgagtgagtagtttttgctttattagctcctgcaagaactgattgctaaaagcagcctgatacctccctcccctctctctcttgcttccttcctattaccatgtgatgcctgctcccctccaccttccaccacaattggaagctccctgagkcccttatcataagcagatgctggcactatgcctcattttatgtacagcctacagaattgtgaaccaaataaatctcttttgttagtaaatgacccaacctcaggtattcctttatagcaacacaaaacagactaggacaaatagtatctaacatcgagtaggcttactataaatatttgtgaagttaatgagtccttagactctaaaccattttctatagattgtgtccaagagatgtttgattaatacaagtttttgtacattggaaaactacttacttataataaatgacttagttgacctgaagaaactaaatcctagacccagcagtggggaaaactgagaaccaaactaattatactacaaaaccccaagaaggctcagaaattgatggcagtgaatacctttggaagtgagggcaaatgaggtggcactaaaataaagatgca

SEQ ID NO: 78771 - DNA, 498 bp, Homo sapiens
aagaagagagatgcacgcttcgctgcatctaatgggggacaaaggataattacaatacagtgaaataagtgatatgtcagtaaggcactttgggtgctctcagtggatggcatgagtgaggagggctggctgccttgaggaaaagatcctaggatgagtaggtgttatctaagcaaaagagttagggctaagggcatacagaaggagccagaggagtattttaggcaaaaggtttaacatgggcaaaggtgtgggaggtagagaggacttagcaagtggtccgatgggcagaactctgatgtgagctgargcgagttctccaaagataagctaacatggtgggctgagtagaccaggaggcctttgtgaagtagcttggaatttctctgaaaaggcaatgtaaagccaccgttaggaggatagatatcagactaagtgttcttagcacaaaacaaaatgcgcaaaagaacacaaggaaatttttggaggtggtggaca

SEQ ID NO: 78772 - DNA, 790 bp, Homo sapiens
tatctcattttcatacgacttctggttcaagtacaaaataccacgctgtggacccattcacaaagccataagggtgcctacccctgtcttcctctctccattcattcattttttgtttaacaacattcctttgttgaatacctgctatgtgctagacaccagcagagcagtttacaatttattctatttatctgttaacctacactcattgagatcttaagagacctatcagctataacaaaaaaaggagcactcagttcaaattcacattggttactttgtaggctatgtgttagatgtattgaaaatatgtatagctgttttaaggatattgttctttgctagttaattctttactagcatggaacacagtttttttaaaaaaaaaaaacaaaaaacctaaatgcacatgttgctatgtcatttatcatcagtagttggattacttaggaaccataatgatcttccttgctgctattgcttacattgcgacttttcttctttccccaggaaataggatcttattaaaaatattcagtcccatagcaaaatatcatttctctgtgtaagcttgatgttttcagtattcaaactattttatgtggtttgtaaagttgacaaaacagtggcttctggaatgaagcatgttttgagcctacacactgtgagacctatgactttaatatttagcagtgatagagaaaaccacccaaggaatgcttatttaatgggcaggaaattttcraggctatgagacctgacattttgtcttttttgtcagcgccgtccc

SEQ ID NO: 78773 - DNA, 720 bp, Homo sapiens
ccaaaaagcagcatcccaagacaatatacattaaagctaggttgycttttatgacctaacctgagaagtcacacagtgacaccactatagccacaagtccgcctgctgatatccaaagcaagggaacacagacaccacctgttgaagagaggagtgttaaagtgataaagtatttattccctcgcactccttttactttaaaagtttcatgatttaacaccaattaataattttaggcccattcccaactctcaaatccaagaggatgtggaaagccctgatcaagcagttctgcatcctcagaatgggtccgtctcagaggcctttagaaatgatgatgttagtgaaagaatatcatcctggaagttaggaaattcgagatctaattccaggagatttaaccaatttgttatataattaaagtccctacaagtctcacttccctcatctacgaagtgagggagttgacctcggcgatctccaaggcctctgagatttatgatcaaagtaacttatttcctacctattctcctgtacttatgtctcaaacttcatactctactgcccatccagaaacagaatttttctgcccctgaaaatacatctctgttagtaggcacctgctgctacaacttctcagaggacaacctgccttccagaatttccatcaagtgtacctctttcattcagctgccacacctgactagcgaggtagacact

SEQ ID NO: 78774 - DNA, 1231 bp, Homo sapiens
tcaggtaaaagcaattctgttgcagctcttcctgaatattttagaaaaagtaaaattaatgacttaggaattaattttctctgtttgctcttagagtttactcaaacattgattttttttcagttgccatcaccacattccttttactcttttgacgtttaaactcgaaatgtgtaactgtgttacttgcgagtatttgcaagaaatacattcaaataaacagatgtattttatgttttattctgctcttcaactgaaaccataaatctaacaaagatatcaggagactgattggtcataccattaatggaaaattaatcttcgagaaatcttttctgacagcggttagtgaatagagtaaacatttcagataacacatagacgctgaaaaatattttacttttattgtttttaatgttataataaattataaatttgttataattagcaattatgcctactctttcaactccatatccccatgatattgttattgttattattattgccattattattttttttttgagatggagtctccctctgtcacccaggctggattgcagtggcgtgatcttggctcactgcaacctccacctcctgggttcagacgattctgctgcctcagcctccagagtagctgggaccacaggtgtgtgacaccacacccagctaattttttgtatttttagtagagacagggtttcaccatgttagctaggatggtctcgatctcctaacctcataatctgcccccctcagccccccaaagtgctgggattacaggcgtgagccaccacgcccggcccccatgatattacttttgactgatcttattaatattaaagaaaaaatgaatcaacattaaatttgctgatagaaagtagtgttgattctaaaaatattattcattagtatatatcaatgcttgactaatattggctttccctaaatattaacatgtgttaaatctaaaaatatttttgaaattgaatatataaattgtgccattgcttatatctgctttctccatagtagtatagggataagaataatatttaaattataagaggtattaagacacaattaatagccctggctttatgcttgctacagaattgatgctctattaataagagtggtggtggtgttttttatttacyttctatcttattgggaaaatagtatcaatctggaagaaacctgtgtatgattctatgtatctatatgc

SEQ ID NO: 78775 - DNA, 861 bp, Homo sapiens
taaatgcaatgagaacaaagaaataaatttaaattctagctaatataattaatcaaagtgtacatttttatttatgcctcttctagtgtgtatattatacctaaatacaaaaagcagtctaagaaattattctagcccccaagctttgagcctgaaggctacacttgctttatttaaaagggagatgagcaattttcaagggttaaaaacacactagcaccaaaatgaaactttatccttgactgaatcagaaagacttgagaagaaattgaaaacgaaataattttcactctacrtgattcaatgttatgtaatgtcacgtccatatgccaccacctaaaatgttctcccccataccactagtcccacagtgccactcagtacctaagagacactggaaaaccaccattaacccgtttcaaataagtttacagaattcataaactgtcattttggagtgccaagtaaaggaccctaggcaatgggtgagaggaaaggtaagttctgagaggtctgtgaggaaggggagcccaagcatagagggacatcacagagaaagcagcctgggggaaaacaccaaagagagccagcaggagggccctgaactgccaggaagaggccacctaagtgacctgtgcatccgggaaggagatgtcctggggtgggtctgcaggaaaaggagacaattgaaggctaattagggagaatagaaaacaaatcttgccaactgagcaattctgacatcacaccagaattcccattgaaatgggcacctgtttatcacaactcttaacattgcccttccaccgagttaagatacagagggttctatgacaacacaggcaaatagtgtatacatag

SEQ ID NO: 78776 - DNA, 785 bp, Homo sapiens
ttccaaatatcgatgctctggccctggctgggaaaagtttgccaacccctggactcagttaaacacaaggcctaagtggggatttggcacgtcctcacagagcactgggaacctgaagtcagaaaacggggtttgtggccttctagtttcagttacacagataaggtatttttttcctccccttataaaacatacaggggttacaaataaagctaagtcctgttgaccccctcggagggctggccgcgaggaccgggtcatttccccactctgccctgttttcctatcaggatattcccactcttcctactttgctgtggtttgaaaggacggaatgaatgcgtgctttcattccttcagtgtgcatggggtgcctcctgtctcctctgcaccacgggagatgcagatttattcccctggcattcctctggcgttgatggagcctctctctgtaccaggtgcattgctcggcactgggaaggtggctgtgaacaaggcaaagttcctgccctygtggctcttatgttctaatggtggttggcagtaggggcagtaaacaaatgaacaaataaattccgtgacatggtggcatgagcgttctgaagacagttaaagcaagagttaggagggatgagaataagaccagtaccagtttctgtggctgccatgacaacatgccacaatgggggtcttaaacagcagacatgtattctcacagttccagaagccagaagtcccagttcaaggtgtgggcagggccatgctgcctccgaaggctgcagggg

SEQ ID NO: 78777 - DNA, 611 bp, Homo sapiens
ttaaataacagaaattaattttctcatgattctggaggctagaagtatgagatcaaggtattggcgagggtgattctttgaggtcccttctccttgacttgtagatggccatcttcaagttcatatgacattctccctttatgaatgtctgtgtcctaatctcctcttcttataaggaaaccagtcctattggattaagaaccatcccaataatcccatttaacttattaacctctttaaagacccttcctccaaatatagtcatattctgaaatactggggattagaacttcaaaatatgaattttgaggggtctcaaattagctcataagacatggtatttatatgtasataaaatttgtttcaaaatatggcaaaaatataagtcaatttaaaggaagaaacttttaataatacattcatatagcaaaattatgaaagtggtacaaaaatggcaatttctcttatctattgatgggtaacgagctgtctcaacatttggtggcttaaaacagccattttattttgcgcatggttttgtgggacaggaattcaggaagggctcagtgggtaatttctgtttgattcacttggggtccactagggcaaca

SEQ ID NO: 78778 - DNA, 1951 bp, Homo sapiens
agagtgcataatccttatgagaatctaatgcctgatgatctgtcactgtctcccatcacccacagatgggactgtctagttgacggaaaacaagctcagggctcccactgattctacattatggcgagttgtataattatttcattatatattacaatttaatagaaatgaagtgtaccatagtgtaatgcacttgaaccatcccaaaaccacccccccttcctccgagcctggaaaatgtgtcttctacaaaactggtccttggtaccaaaaaggttggggactgctgctgtaggtgacactggtgtgtgccagtaggaacacacccacacacgtgctcacacgcgtccatacagcatccccctcactggggccaggtcttccctgtttggaaggaaccatcccgccctcccctcgctcccttcccagccgcctgctcggggtctccgagcagaacaaccccaccaattcatcaggggacgacagcctctcagagctgtttgggggcataaatcaaatggccaggagaaaaggttttttttaaaaaaaaaggtagcggagagagaaaaatcaggaaaggggtggggagaaaaagcaacggcaggagagagaggggaaacgagatcaaagggaaaacttcagagataacagcattatttatttttcctgctcgcagtcactgggtctttgaggcctccacactgatgtatttggacgtcttggggccgtctgttaccagaggccaccctagcccctctgcacgggcccagcccccctataggcatgccagttccatcagcagcggctgctcctggagtcttttgaagtgggtcctggtggtgtttattcgccttcgtgtaagaaacgtgtgcacagtgctggcggctgcagctgccctgggtggaggtgggagagaagggggtcccccctcatcactcatgagcctgtttatttgggaaccagagcaggcctttctccagttattattcaacgtcctctacaggctacacccgccatcccccattccagaaggtggggcaggaataacaaacatgccgccacctctgccagaggtcccatcttgtctggccccatggtgtacttggctttcagagaagagatggagatgaagggcccgcgaggatgttcagctggtggtcccaagaagactcagaacaagatggttagaggcatggatccagcagccagaacaccagggctcaatagttctgcccctagttactatgactcatgtgcaagtgaacttactgaatcctcgaatcaactggtctttcccagatgggggaaactgaggccaaaagaagtcaacatatgcaaataactgagtattcaatacggcaaatccaaatgtcagtggttcaaaacttggcgaattgctgaagattaacatggttcatcttcaagtatcagctctctccatcctctaagtttttttttttttttttttgagacagtctcactctgtcgcccaggctggagtgcagtggcatgatcttggctcactgcaaactccacctcctgggttcacgccattctcctgcctcagcctcccgagtagctggaactataggcacccgccaccacgcccagctaatttttttgtattttttagtagagcgaggtttcaccatgttagccaggatggtctcgatctcctgacctyatgatctgcccacctcggcctcccaactccatcctctaatttttaactcaactggttgaaagcttaaggcattctctgttctaaaaaactagctaagttttgtgcttaagtttaaatggatagtattaaggttaatgaatagtgttggtacagaatgcaagattgtcatgttcaacggggaacaccactttcctcaagtcaccatcaaatcagttaggcataatattaaactgggtatatgagcaagactcaagtcagatggcagaa

SEQ ID NO: 78779 - DNA, 1951 bp, Homo sapiens
agagtgcataatccttatgagaatctaatgcctgatgatctgtcactgtctcccatcacccacagatgggactgtctagttgacggaaaacaagctcagggctcccactgattctacattatggcgagttgtataattatttcattatatattacaatttaatagaaatgaagtgtaccatagtgtaatgcacttgaaccatcccaaaaccacccccccttcctccgagcctggaaaatgtgtcttctacaaaactggtccttggtaccaaaaaggttggggactgctgctgtaggtgacactggtgtgtgccagtaggaacacacccacacacgtgctcacacgcgtccatacagcatccccctcactggggccaggtcttccctgtttggaaggaaccatcccgccctcccctcgctcccttcccagccgcctgctcggggtctccgagcagaacaaccccaccaattcatcaggggacgacagcctctcagagctgtttgggggcataaatcaaatggccaggagaaaaggttttttttaaaaaaaaaggtagcggagagagaaaaatcaggaaaggggtggggagaaaaagcaacggcaggagagagaggggaaacgagatcaaagggaaaacttcagagataacagcattatttatttttcctgctcgcagtcactgggtctttgaggcctccacactgatgtatttggacgtcttggggccgtctgttaccagaggccaccctagcccctctgcacgggcccagcccccctataggcatgccagttccatcagcagcggctgctcctggagtcttttgaagtgggtcctggtggtgtttattcgccttcgtgtaagaaacgtgtgcacagtgctggcggctgcagctgccctgggtggaggtgggagagaagggggtcccccctcatcactcatgagcctgtttatttgggaaccagagcaggcctttctccagttattattcaacgtcctctacaggctacacccgccatcccccattccagaaggtggggcaggaataacaaacatgccgccacctctgccagaggtcccatcttgtctggccccatggtgtacttggctttcagagaagagatggagatgaagggcccgcgaggatgttcagctggtggtcccaagaagactcagaacaagatggttagaggcatggatccagcagccagaacaccagggctcaatagttctgcccctagttactatgactcatgtgcaagtgaacttactgaatcctcgaatcaactggtctttcccagatgggggaaactgaggccaaaagaagtcaacatatgcaaataactgagtattcaatacggcaaatccaaatgtcagtggttcaaaacttggcgaattgctgaagattaacatggttcatcttcaagtatcagctctctccatcctctaagtttttttttttttttttttgagacagtctcactctgtcgcccaggctggagtgcagtggcatgatcttggctcactgcaaactccacctcctgggttcacgccattctcctgcctcagcctcccgagtagctggaactataggcacccgccaccacgcccagctaatttttttgtattttttagtagagcgaggtttcaccatgttagccaggatggtctcgatctcctgacctcatgatctgcccacctyggcctcccaactccatcctctaatttttaactcaactggttgaaagcttaaggcattctctgttctaaaaaactagctaagttttgtgcttaagtttaaatggatagtattaaggttaatgaatagtgttggtacagaatgcaagattgtcatgttcaacggggaacaccactttcctcaagtcaccatcaaatcagttaggcataatattaaactgggtatatgagcaagactcaagtcagatggcagaa

SEQ ID NO: 78780 - DNA, 1951 bp, Homo sapiens
agagtgcataatccttatgagaatctaatgcctgatgatctgtcactgtctcccatcacccacagatgggactgtctagttgacggaaaacaagctcagggctcccactgattctacattatggcgagttgtataattatttcattatatattacaatttaatagaaatgaagtgtaccatagtgtaatgcacttgaaccatcccaaaaccacccccccttcctccgagcctggaaaatgtgtcttctacaaaactggtccttggtaccaaaaaggttggggactgctgctgtaggtgacactggtgtgtgccagtaggaacacacccacacacgtgctcacacgcgtccatacagcatccccctcactggggccaggtcttccctgtttggaaggaaccatcccgccctcccctcgctcccttcccagccgcctgctcggggtctccgagcagaacaaccccaccaattcatcaggggacgacagcctctcagagctgtttgggggcataaatcaaatggccaggagaaaaggttttttttaaaaaaaaaggtagcggagagagaaaaatcaggaaaggggtggggagaaaaagcaacggcaggagagagaggggaaacgagatcaaagggaaaacttcagagataacagcattatttatttttcctgctcgcagtcactgggtctttgaggcctccacactgatgtatttggacgtcttggggccgtctgttaccagaggccaccctagcccctctgcacgggcccagcccccctataggcatgccagttccatcagcagcggctgctcctggagtcttttgaagtgggtcctggtggtgtttattcgccttcgtgtaagaaacgtgtgcacagtgctggcggctgcagctgccctgggtggaggtgggagagaagggggtcccccctcatcactcatgagcctgtttatttgggaaccagagcaggcctttctccagttattattcaacgtcctctacaggctacacccgccatcccccattccagaaggtggggcaggaataacaaacatgccgccacctctgccagaggtcccatcttgtctggccccatggtgtacttggctttcagagaagagatggagatgaagggcccgcgaggatgttcagctggtggtcccaagaagactcagaacaagatggttagaggcatggatccagcagccagaacaccagggctcaatagttctgcccctagttactatgactcatgtgcaagtgaacttactgaatcctcgaatcaactggtctttcccagatgggggaaactgaggccaaaagaagtcaacatatgcaaataactgagtattcaatacggcaaatccaaatgtcagtggttcaaaacttggcgaattgctgaagattaacatggttcatcttcaagtatcagctctctccatcctctaagtttttttttttttttttttgagacagtctcactctgtcgcccaggctggagtgcagtggcatgatcttggctcactgcaaactccacctcctgggttcacgccattctcctgcctcagcctcccgagtagctggaactataggcacccgccaccacgcccagctaatttttttgtattttttagtagagcgaggtttcaccatgttagccaggatggtctcgatctcctgacctcatgatctgcccacctcggcctcccaactccatcctytaatttttaactcaactggttgaaagcttaaggcattctctgttctaaaaaactagctaagttttgtgcttaagtttaaatggatagtattaaggttaatgaatagtgttggtacagaatgcaagattgtcatgttcaacggggaacaccactttcctcaagtcaccatcaaatcagttaggcataatattaaactgggtatatgagcaagactcaagtcagatggcagaa

SEQ ID NO: 78781 - DNA, 1951 bp, Homo sapiens
agagtgcataatccttatgagaatctaatgcctgatgatctgtcactgtctcccatcacccacagatgggactgtctagttgacggaaaacaagctcagggctcccactgattctacattatggcgagttgtataattatttcattatatattacaatttaatagaaatgaagtgtaccatagtgtaatgcacttgaaccatcccaaaaccacccccccttcctccgagcctggaaaatgtgtcttctacaaaactggtccttggtaccaaaaaggttggggactgctgctgtaggtgacactggtgtgtgccagtaggaacacacccacacacgtgctcacacgcgtccatacagcatccccctcactggggccaggtcttccctgtttggaaggaaccatcccgccctcccctcgctcccttcccagccgcctgctcggggtctccgagcagaacaaccccaccaattcatcaggggacgacagcctctcagagctgtttgggggcataaatcaaatggccaggagaaaaggttttttttaaaaaaaaaggtagcggagagagaaaaatcaggaaaggggtggggagaaaaagcaacggcaggagagagaggggaaacgagatcaaagggaaaacttcagagataacagcattatttatttttcctgctcgcagtcactgggtctttgaggcctccacactgatgtatttggacgtcttggggccgtctgttaccagaggccaccctagcccctctgcacgggcccagcccccctataggcatgccagttccatcagcagcggctgctcctggagtcttttgaagtgggtcctggtggtgtttattcgccttcgtgtaagaaacgtgtgcacagtgctggcggctgcagctgccctgggtggaggtgggagagaagggggtcccccctcatcactcatgagcctgtttatttgggaaccagagcaggcctttctccagttattattcaacgtcctctacaggctacacccgccatcccccattccagaaggtggggcaggaataacaaacatgccgccacctctgccagaggtcccatcttgtctggccccatggtgtacttggctttcagagaagagatggagatgaagggcccgcgaggatgttcagctggtggtcccaagaagactcagaacaagatggttagaggcatggatccagcagccagaacaccagggctcaatagttctgcccctagttactatgactcatgtgcaagtgaacttactgaatcctcgaatcaactggtctttcccagatgggggaaactgaggccaaaagaagtcaacatatgcaaataactgagtattcaatacggcaaatccaaatgtcagtggttcaaaacttggcgaattgctgaagattaacatggttcatcttcaagtatcagctctctccatcctctaagtttttttttttttttttttgagacagtctcactctgtcgcccaggctggagtgcagtggcatgatcttggctcactgcaaactccacctcctgggttcacgccattctcctgcctcagcctcccgagtagctggaactataggcacccgccaccacgcccagctaatttttttgtattttttagtagagcgaggtttcaccatgttagccaggatggtctcgatctcctgacctcatgatctgcccacctcggcctcccaactccatcctctaatttttaactcaactggttgaaagcttaaggcattctctgttctaaaaaactagctaagttttgkgcttaagtttaaatggatagtattaaggttaatgaatagtgttggtacagaatgcaagattgtcatgttcaacggggaacaccactttcctcaagtcaccatcaaatcagttaggcataatattaaactgggtatatgagcaagactcaagtcagatggcagaa

SEQ ID NO: 78782 - DNA, 753 bp, Homo sapiens
agatgaagacccgagacccctgacacaagctcacaggcagagggggaaggctcttgctggcgaggtgctcattgggtaaggggagcagtctggttttgatgtaggagtcatttactcmcatcaggaaaagggctcaggaaggcagttgttatgtgacccttggccagcctggaagccctgcagacccagaaaaccacgatgtagtcatcacatcgactttgtgcgatgcttctgacacagcagaagtcctcgctaaattcgtgtgatgttccaatgaaaacagacatacatttttattataggaccttattactcaggaaggtactgattgatcttcagaccaggtggatcactcagaacactgatgagccttctatcaatcacaaaaactgggacctaaaggcaaagattctagacttttctcaggttcaggtttgctattgctgcattatcttgaggttccacttagaagctaagtcagtaagaattacaactttctctcctcttttcctgtctcagccagagaacttctaagagtgtgtggttcaaggattttttttcctacttggtgtaacagtgatgaacatcagcaaatagtcttgaggctttaatttaaaggtcacttaaatcttacccaatctagagagaatcacattttacagatgagaaaacagaggctcagaccacctcatgcagcaggctttccccagattcatacagctaggaggtgttagaagtagggcacaggatcca

SEQ ID NO: 78783 - DNA, 753 bp, Homo sapiens
agatgaagacccgagacccctgacacaagctcacaggcagagggggaaggctcttgctggcgaggtgctcattgggtaaggggagcagtctggttttgatgtaggagtcatttactcacatcaggaaaagggctcaggaaggcagttgttatgtgacccttggccagcctggaagccctgcagacccagaaaaccacgatgtagtcatcacatcgactttgtgcgatgcttctgacacagcagaagtcctcgctaaattcgtgtgatgttccartgaaaacagacatacatttttattataggaccttattactcaggaaggtactgattgatcttcagaccaggtggatcactcagaacactgatgagccttctatcaatcacaaaaactgggacctaaaggcaaagattctagacttttctcaggttcaggtttgctattgctgcattatcttgaggttccacttagaagctaagtcagtaagaattacaactttctctcctcttttcctgtctcagccagagaacttctaagagtgtgtggttcaaggattttttttcctacttggtgtaacagtgatgaacatcagcaaatagtcttgaggctttaatttaaaggtcacttaaatcttacccaatctagagagaatcacattttacagatgagaaaacagaggctcagaccacctcatgcagcaggctttccccagattcatacagctaggaggtgttagaagtagggcacaggatcca

SEQ ID NO: 78784 - DNA, 1181 bp, Homo sapiens
aaactcttcctgctgttgttcatccttactttgattattggtcattctatgctttaaattagtccagaaattttgctactacccttgcctgtttttattttttattcacattacaaaaaactcgaccaacaatttatgaaagcttaaccttcaaaatataccycaacatctaagcacttatcatcaatacaccaatggggcacatctcttgcctggattataattagtcaccttgattcttcacttgtcccttcagcaagatgaagaaatcttaaatgataagtcatattatgttactagtattcaaaatctttcaaatgcttttccactctatccacattgttatattttctgtttaggtgaaagctaaaattctagcaagaacctatataaaactttaaattgtgattttccatcctccctttcttcatctcccttctattaattctcttgtttaatctaatctagccatattaaattctgagctatttcttgcaaatgcaggcataatattatgtcagattctgggtatttgatatttcatatgcctggaacctcttcctacaggtattttcatgatagactcccattagtctaatatggcttaaaatggctatcttaggtttggctgcattacaattcatctctatatcttcatgaactcctcagtgatctttgtcacatccagaattggattctcttaatacagagacacatgaaataaaatacaagttctatctcccctctccacacctaatttagaatagtgaaacagggacaggaggagcacattaaacactcccattcaaaaatgaaaagaaagggaggaatttagaagtcactagttcatggtaattctcaaatcccactggatcaattttgtgaggtcaccttacactgttcccagattttatgaggcctttcttcccttgattaaatccgtgttctgctcccttaacttctttccccagcctattaatttctttgacttgctctctatcttctggtgtcctttctttttttccattgtccccttttgccacatctggagagagtggtgggaaatgtgtcctcctgtggaactaagaagttctctgaagctgcttcatagacatgcaagtcttttaatatcttgaatagcctcaatgtcttttagtgcagattggtagtaagtaggccaa

SEQ ID NO: 78785 - DNA, 1181 bp, Homo sapiens
aaactcttcctgctgttgttcatccttactttgattattggtcattctatgctttaaattagtccagaaattttgctactacccttgcctgtttttattttttattcacattacaaaaaactcgaccaacaatttatgaaagcttaaccttcaaaatataccccaacatctaagcacttatcatcaatacaccaatggggcacatctcttgcctggattataattagtcaccttgattcttcacttgtcccttcagcaagatgaagaaatcttaaatgataagtcatattatgttactagtattcaaaatctttcaaatgcttttccactctatccacattgttatattttctgtttaggtgaaagctaaaattctagcaagaacctatataaaactttaaattgtgattttccatcctccctttcttcatcycccttctattaattctcttgtttaatctaatctagccatattaaattctgagctatttcttgcaaatgcaggcataatattatgtcagattctgggtatttgatatttcatatgcctggaacctcttcctacaggtattttcatgatagactcccattagtctaatatggcttaaaatggctatcttaggtttggctgcattacaattcatctctatatcttcatgaactcctcagtgatctttgtcacatccagaattggattctcttaatacagagacacatgaaataaaatacaagttctatctcccctctccacacctaatttagaatagtgaaacagggacaggaggagcacattaaacactcccattcaaaaatgaaaagaaagggaggaatttagaagtcactagttcatggtaattctcaaatcccactggatcaattttgtgaggtcaccttacactgttcccagattttatgaggcctttcttcccttgattaaatccgtgttctgctcccttaacttctttccccagcctattaatttctttgacttgctctctatcttctggtgtcctttctttttttccattgtccccttttgccacatctggagagagtggtgggaaatgtgtcctcctgtggaactaagaagttctctgaagctgcttcatagacatgcaagtcttttaatatcttgaatagcctcaatgtcttttagtgcagattggtagtaagtaggccaa

SEQ ID NO: 78786 - DNA, 648 bp, Homo sapiens
aatacttagaagaaatttaacaaaactataaacttacaaactagttaaagtggtaaccaataagatatacataagtggaacggtattccatcttcaaaaacaggaagacagtaatattcaaatgttcattatccctcaattgaccaagagattcaatgcaattccaatggaatatgtagcaggaattcataaagaacaaaaagcagaatataaaatatatgtggaaatgctaagtacctagaaatgcctttttaaaaaggatgttggatgttggccttatactgacttcaacactgttgtgcaaggggatgaaaagcaccatcatttagtgtgacatactgtggatacaacagagaagtactcaaggaaactcacacgtastgaaatagtggagtgcatgcagcaacctcaactcccattccacagcatagactgagcatcgtgctctctctacaccaaggctcagggctttcgcagtgagtgtctctgaatgtggactgacagctgactcagcacacttctgtgggaggagaagttccttcccacgctactttacatatatatatatatgctaacctaaaatgggctagggcacacctagtatatccaagtaaggcaagtgtatcaaaggatctccagacccaagaa

SEQ ID NO: 78787 - DNA, 861 bp, Homo sapiens
ctgttcatcccctccaccctgtgaggacttagcaagaagatgccattaattaaaaaagcatgaaatttgccatgccttgatcttgggtttctctgacttcagaactgtaagaaataaatttctgttgtttataagctaccagatctatggtgttttgttgtggcagcccacacagactaagataccgctgtaggttaaatttacttcatattgaatgaggaagggaataaaactaaggccagatgaaacaagcagggtgctttgtacgtctctggaatgataaggtcttgtaaagtgataaaatctctgtacctgaaaataattatttaaaaacataggaggaggagagagactaaaaaataaagaaagcaaattagaaaaaaagaatagactgaaggatgtggamagtggaaggtgggaaaaaatgaggaaaattattatctatttacaggagccgacaataatcattgcgaaattactatagtgatgttttttccttctctttccctcctagttgccctcccatccagtgatctaaatgttttaattaagcaagaaagtatttatgaactgtgtgggcatgaagagtttggacagcgagcattcttctttactaaaacaaatgctaatgataactaagattcattagttgacatgtggtatgcaaattatatttcacaccaatgttcagttcacaaataatatttcatgcccaataatcttgtatcgtaaaacatattattgtagcactgttttacaatggagaaacaaggctccctcagatttggttaattttctaatatcagcaagtaagtggcagagttacaaatcacagctaattctatgccataaaaaaatgca

SEQ ID NO: 78788 - DNA, 1480 bp, Homo sapiens
agaataatttataatgtaattgtgggtaatcatgagttatcaaacttccccacaggctaaattgacatatgtatgatggctgaaacaaaaaaaaatcagatgttttcctttaaaaaaagtaatttgtttctgctacctttgaggctaaataaataaaatcaggggtgacctttttataaagttatccataccatttatcttaaagatggtctccattgggagaaaaaaaaagattgaatccatcatatttttatctattgctttttctgtgcataagtcacacatttgtatatcragtgtatacatattggttgtaccttgaccttaacaacttctcatttagttgtataccatcgcccgccatgatagatgttacagctaagggtctagccgcaatttcattatagaccccactttgcagggtttcataaataagcagtcaaaatctgctgcaggctatgtaatgttttagtttgcatatctgtattatcattttagttccatattgcggtttccatccatcaactatagagtcatttttcattttcagaggcagttcttacaggaaatcatcttaatgaccatcaagtgaagaggaaatttgcaaagagtaggaaaaatattaaatttcattccaccccaccaaaataaataaataaacaaataagtatataaatggaatgactgaataatgcacattctactctgtgctatacggtacacacttgaggtttatagacgcttatatagaattaattaacaagcatgtaaatcgagtgtttgttaatggccaagaacaataaatatatgattaatgaataaatgacaagtaggttaaatattgtggaagataaaagttttaagaatatgcccacactctcaaccagcttgcaatctaagagagaagacaactcactcatatacaatacattcctattcataataatcctgcttttctcctgtcctgcttgaatcaaagtctctttccttgtatttaccacatatgcatattttagcaagtctttagttctctacgtttctggatctttatcgacacaatgtgaaacaattatgcatatttatatttatatattgtatatttatagtatatttatagagttgttatgaaaattcagtgagtacaatgtgcataagacttcctgtgtgtactctaaaataaaaagggatgcatctatacaaaataaaggtgatatatttggggtagtaataatagtaaaaaataacagtctgttgaacttatatggttaatataatattacaatgcttctattgataattgtagtgggttaaatagtgttcacccaaaattcattactacccagaacctcagaatttaatcctatttggaaatagggtctttggagatgtaattaataaagaatcttgaggtaaaaatctaattagttaaggatcttgtgttaaaatcatcctggatttaaagtgggccctacatttaatg

SEQ ID NO: 78789 - DNA, 1480 bp, Homo sapiens
agaataatttataatgtaattgtgggtaatcatgagttatcaaacttccccacaggctaaattgacatatgtatgatggctgaaacaaaaaaaaatcagatgttttcctttaaaaaaagtaatttgtttctgctacctttgaggctaaataaataaaatcaggggtgacctttttataaagttatccataccatttatcttaaagatggtctccattgggagaaaaaaaaagattgaatccatcatatttttatctattgctttttctgtgcataagtcacacatttgtatatcaagtgtatacatattggttgtaccttgaccttaacaacttctcatttagttgtataccatcgcccgccatgatagatgttacagctaagggtctagccgcaatttcattatagaccccactttgcagggtttcataaataagcagtcaaaatctgctgcaggctatgtaatgttttagtttgcatatctgtattatcattttagttccatattgcggtttccatccatcaactatagagtcatttttcattttcagaggcagttcttacaggaaatcatcttaatgaccatcaagtgaagaggaaatttgcaaagagtaggaaaaatattaaatttcattccaccccaccaaaataaataaataaacaaataagtatataaatggaatgactgaataatgcacattctactctgtgctatacggtacacacttgaggtttatagacgcttatatagaattaattaacaagcatgtaaatcgagtgtttgttaatggccaagaacaataaatatatgattaatgaataaatgacaagtaggttaaatattgtggaagataaaagttttaagaatatgcccacactctcaaccagcttgcaatctaagagagaagacaactcactcatatacaatacattcctattcataataatcctgcttttctcctgtcctgcttgaatcaaagtctctttccttgtatttaccacatatgcrtattttagcaagtctttagttctctacgtttctggatctttatcgacacaatgtgaaacaattatgcatatttatatttatatattgtatatttatagtatatttatagagttgttatgaaaattcagtgagtacaatgtgcataagacttcctgtgtgtactctaaaataaaaagggatgcatctatacaaaataaaggtgatatatttggggtagtaataatagtaaaaaataacagtctgttgaacttatatggttaatataatattacaatgcttctattgataattgtagtgggttaaatagtgttcacccaaaattcattactacccagaacctcagaatttaatcctatttggaaatagggtctttggagatgtaattaataaagaatcttgaggtaaaaatctaattagttaaggatcttgtgttaaaatcatcctggatttaaagtgggccctacatttaatg

SEQ ID NO: 78790 - DNA, 624 bp, Homo sapiens
agtacgtgtattattaaatcaatggttctatttaccccaaaggcagtagtgaagagatggaaaggtggctttatccaaaaccccaggaaatcaacctgaggcacccgtaaactagtaagaactcttcaaaggggctagcagctcactaccctgaaatggaggaagcctaaccaaagtggggtccagcagggcacactctatggtggaatgaagagcgcactgaggctgagggatggcaggaagagaaggcaagggaccaggtggtaagaagctcattcaggataaaaaaagaggaaacccacaagtgaacttgagtaattggtgacttttctgagcttcagtatcctcttctgtaaaaagagatgggtaaaccagaaggtctgaagcctccctttgatttcacaagtccatgtttttatgcttggggttgcatggaacacatgcagtagcaaagagcccaggggtcaggcccacctacaagccacccctgctccacactggggtgggcaggtctgcctttccaagtctcagcgtcctctggagcctgcaagcaaaraagtgtggcacacaggcagtcacctcctgggagaagcccaagggtagatacagtacttctaactactc

SEQ ID NO: 78791 - DNA, 1420 bp, Homo sapiens
gaagatgtaaagtttttcattttcagcaaatgagttcctttttttttttccttttactttgttttctttttggagacagagtctcgatctgtcacccaggctggagtgcagtggtctggtctcggctcactgcaacttccgcctcctgggttcaagtgattctcctgcctcagcctcctgagtagctgggactacaggtgcatgccatcatgcctggctagttttttgtattttaatagagatggggtttcatcgtgttgcccaggctggtcttgaactcctgagctcaggcaatctgcctgccttgtcctcccaaagtgctagggttacagacgtgagccaccgtgcctggccaaattagttccttttgttacctagcctcctttgtcagttatctatgcattaaacggttttcagtgcctggtcttcagcattggattggatgatggctgatggaagaaaaaaaaacagtggttataccttggaatttagttttcagttactggtgaattttagatccaaggagactactaaacctggctcagttatttttggacaccaaaacataattttattggaaagcgaacacactctatcaaccaattttaaataaaaaaggtcttttgaatcagccagaagttaaaatgtgagcattgtgttctgagctgaagatgtcaggttatgtgagtacttgttctctatagactaatatagtgagccttgaaatatagtattagacaactgctttctgattatcttagtaccctaaattgagagtttcagtttgcttgggtttcaaattacttaaatgagaaataatattaacactggcccaactaatgaaaaattatgcaattgccactaagccccatgagggtggagactttgtaggtctttgtcactgttgtatttctagatcctagaatagtttcctgacacataagagacaccaatatcaattactgaatgaatgaataggataatagattgagaaattatataaggtcttagtcttttttgcagtatttcccttgggaaataaaataaaactaaaaatttatttattctgtaggtaaagaactgggctcgctatggtaagacattatataagcataaataatatactttaaaaagatgcctcagccacattcatacttgccctcttctagatattctcatctttgataaaatacaaggattcctaaaaacataatttcctgaatctcaaaacaaagcaggtagggtgcaaagccaacatatttgagtgctatatactaaaagtttatatatgggtgtgtacatatgtatatacacacacacacacacacacacaaaagatctataacaactgtttcccatcktacaggtgagaaggtaagctcagttacttggagatgaaggctgattttgaatccaggtc

SEQ ID NO: 78792 - DNA, 981 bp, Homo sapiens
atgcacaagaggaggaggaaaaatgctcatgttctgagaactcctcaagagcagatttctttataaatgtatgatatttaggtgtgttcacttcctgcacttaagcaactctctggggtgacacagttatcattaggaaggaggggatctcatttttccttggtcatgccctttctccagaaaaaaaccttcattgtaaccattactcctctttttcctacttctgccttttcaagtaacatactgtataggacttaattttcttgaagaaataatttgtaagttatactgagagagtgaagtaagttattaattagagtctttctccaagctaggcaactttataaagggaattattagtttaggtcagcattttaaaaatgtttttgcctatgacaataaaaaatggatttttcatcagattctttgtatatacacatccatagataatagtgctcatatgtgtgcatgtgtgtatgtatgtgttagaagttaatgttttacaaagcagtatttaccctttctatattcagtgtaccctgcatttcttattctattaacaaagtgctgaatgaggctgactgaaatgatttcattacccttgtgttttgaagaacattgatttaggccactaaggcaccagattccaaatgatattttcatggctatatgtttctgaaaaatgcccatcatttcaaaattgtatacattatttattttaaggttgcaggtggattattcttttgaytaagtctatattataaccatatacatgtaattttacatcacagtttagtttctggtgtacctaatgctgatttctgttcccttcttatccttttacagtgacaaagatatggaaattaatgaagaagaactgactggttgtatcctgagaaaactaggtgagacaaatattttaaattgttttcttaagttttaagctgcaaggcatcagcaaataaagtgtctttgagggct

SEQ ID NO: 78793 - DNA, 1300 bp, Homo sapiens
tgcattcttcattaaaatggcttatctgaatcattttagagctgtatgcaataatttgcttatactcattaagataagtttggttatgttgattaaaaacaaagcttattttctgcattttccaataatattgtaaaaaatacttcatacccttcattgtttgggtttcatgtcttcattacattccttttacttcgtattatcttttaagattttgtagaagaatttcacttgggtaactgtaggcttaaatgatgcaatgctttctggaatccaggggtgactgacacacagaggtgactcagacatgaaatgttcaacaaaattctaagattgtcttttttttaaattgtaaattcttaaacattcataaaagtagtgagattagaataatgaaatcctgtgcttctaatgactgttaacacaagtgaatcttatttatcctatccactttattaaaaatttagttatctattatttaaaataatatattagcttattttaaagctaatcccagatattatgtttcattttgcatgtctgttgctgtcttggtaggaaaawttttaaaacataaattactatgacataatgatatctaacaaagttaattatttaagaaactttcaaaagttgctttttcatgccgtttccctagctacctataaacacctggaaattatatttattttatatttctaatgttattcaaatgataatatgctgatttctaaaattgcatttttttctgttgctctcaagaatatcctaaacatatccataggatgtgggatgacctatgaaaatagtctggacaaacatttatcttgtttatcttatgataagcagagttctgagaagtttggtaataaagagttaacttggtttaactaagattttcctaaattatttgacaccagaacctattttttatttaacatctgttagcaaaaatatatttgggggaatattgttctaggcaggagaatgctgcctctgaatagcaaaataatctttacttcatttttatttcaattaattaggtaattatttgtccatattacattatcatcataattaagtaatttttttttgtttttctgtaatctgcttaatattgataatgtggtgtgacaagtcatctttctcaggatcttattttatgaaaatctttcatcacacttattttatgaaaatcatttgctgtgtaagcaaattaagtataagcattttgtgtttccactagatagatatttgcacacaaaaaaatagacatcaaaatcccatatagaaagctaaa

SEQ ID NO: 78794 - DNA, 533 bp, Homo sapiens
acatagggaggggaacatcacatacgagggcctgtcagggggttgaggggtaaggggaaaaagagcattaggacaaaaacctagttgacgggttgataggtgtagcaaaccaccatggcacatgtatacttatgtaacctgtatgttctgcacatgtatcccagaacttaaagtataatgaaaaaattaaaatatcaaattttcattttcatatatgcctgaaaaaaagatgtagtttctaatttttcttaaaaattatctttgtgagtttttctgctagatattggctcatcctttgttttttctgaaatttgtcatacataaaatagagcatatattaatgcatgtgtacagtttaagaataacaraatgaacacccatgcatatgaccatccatttacgtgattaaatatcagtgtctttaagctgcctatgtgccttccccatcacaacacctacttttccttctaagggagcactatccaaaattttgtttattactcccttgctttcatctataatttaaaaccata

SEQ ID NO: 78795 - DNA, 660 bp, Homo sapiens
aataagaaaggaccttgatattttcagacattaaaatgcacttcaaaatcactcatgggacaaataagaaattataacaaaaaattaaaatactggccaggcatggtggctcatacctgtaatcccagcactttgaaaagccaaagcgggtggatcacctgaggtcaggagttcaagaccagcctggccaacatggtgaaacccttctctactaaaaatacaaaaattagctgagcgtggtggcaggtgcctgtaatcccagctactcgagaggctgaggcaggagaatcacttgaacctgggaggcagaggttgcagtgatccgagatcacgccattgcactccagcctgcgcgacaagrgcaaaactccgcctcaaaaaaaaaaaaaattaaaatacttaggcataaacaacaataataataaagcaaaacttttgaatgaagccaaaatgcctttttccagtctcttaagctgtaatattcaaggtcttcatgtttattcctgcctctacacctttgctagtgctaattactgccacccccgaaaagatcatttttttagttcaaattttctgaagttcacctgcagtttcactttgtttgtgaagacttagcatccacttgtttgctaattatttctcatattaattttggatccc

SEQ ID NO: 78796 - DNA, 660 bp, Homo sapiens
aataagaaaggaccttgatattttcagacattaaaatgcacttcaaaatcactcatgggacaaataagaaattataacaaaaaattaaaatactggccaggcatggtggctcatacctgtaatcccagcactttgaaaagccaaagcgggtggatcacctgaggtcaggagttcaagaccagcctggccaacatggtgaaacccttctctactaaaaatacaaaaattagctgagcgtggtggcaggtgcctgtaatcccagctactcgagaggctgaggcaggagaatcacttgaacctgggaggcagaggttgcagtgatccgagatcacgccattgcactccagcctgcgcgacaagggcaaaactccgcctcaaaaaaaaaaaaaattaaaatacttaggcataaacaacaataataataaagcaaaacttttgaatgaagccaaaatgcctttttccagtctcttaagctgtaatattcaaggtcttcatgtttattcctgcctcyacacctttgctagtgctaattactgccacccccgaaaagatcatttttttagttcaaattttctgaagttcacctgcagtttcactttgtttgtgaagacttagcatccacttgtttgctaattatttctcatattaattttggatccc

SEQ ID NO: 78797 - DNA, 1112 bp, Homo sapiens
ggactggtttgctggtatcaaggttttttgtgctgtttctcaggccagaaatgtgggtacattgagtgagttgaccaagtcagggaacggcttgctagggtcagggctgccaggctgttatgctggctgggggcacggaccatggctgatcaactggctcaggggctagtcctttttggttgggtccactggaccttttttctggttggaggcattggcctgtagcttctgagttggcttggggtttatctactgggtgctggtccactagtctgtttctctggccaggcgaatattttgcccataatttccaccttaaagattttatattcaaaaacagtcacattctgagttactgagggttagtacttcaacataaagttttgagggtaggcatttctggccataaccattggcatctgtattagtccgttctcacattgctatgaagaaatacccaaaactgggtaatttataaaggaaagaggtgtaactggctcacagttccacattgttggggaagcctcagaaaacttgcaatcataatggaagacaaaggagaagcatgcaccttctttacagggtgtcaggacagagtgagtgcaagcaggggaaatgacagatgcttataaaaccatcagaccttgtgagactcactcactatcatgagaacagcatggcggaaatcgcccccatgattcaattatcttcacctggccccccttgatacatggggattatggggattacaattcaaggtgagatttggrtggggacacagagccaagtcatatcagcatcatttggttgtcttttctcattcattttgagattttttttttgccttttccaacaactttaattctttatactcgatatttgcattctgaatcagatatattatacatatcatctaatttacccatttaaagtatacagtttaattgattttagtaaattcatgaacttgtccctccatcatcacgatcaacattataacatttttgttaccactaaaagagaccctacagttctcagcaagcattcctgaatccctgagtgtccctagctgaaggcaaccattaacttactttccatctctatagatttgc

SEQ ID NO: 78798 - DNA, 641 bp, Homo sapiens
ttgatgtttctgtgaagggatgaacactacatcttttctacatcttgctgatgtcactcctttcaatacaggctatttaatatttgctgttagtgttattttcactattctccctcatgggaaaatgagacctttacaaaaaagctaataaagggcaaatctgaatgatgctctaaaactcatatccttctccatttgatagctttacaatattgagctcagcaggtctaggttatctcccaagtctttctcattgcaacagggaactyttctaccagaaaacttccattgttgcacaggtgcattggtgtggtaataaatgagccctcaaaaaaaaaatccctgatttgtggtgtgccagttctgagatatccatcttctcgctgtggccaatatcaagctgacaatgtaaagtcactgaaagcactgctgggaagagacaaacataattggcttctctgatgcaatacaagactgctccagcaaactattgaaatagtcacatacatgttccctgccctgtacatataactacgtagagcatatgccaactcctcctctctcttttaggttgttgaccatgacgtctataaaaaaaaaaaaaaagctatatctggcccatgcattgggaaatcagagtt

SEQ ID NO: 78799 - DNA, 641 bp, Homo sapiens
ttgatgtttctgtgaagggatgaacactacatcttttctacatcttgctgatgtcactcctttcaatacaggctatttaatatttgctgttagtgttattttcactattctccctcatgggaaaatgagacctttacaaaaaagctaataaagggcaaatctgaatgatgctctaaaactcatatccttctccatttgatagctttacaatattgagctcagcaggtctaggttatctcccaagtctttctcattgcaacagggaactcttctaccagaaaacttccattgttrcacaggtgcattggtgtggtaataaatgagccctcaaaaaaaaaatccctgatttgtggtgtgccagttctgagatatccatcttctcgctgtggccaatatcaagctgacaatgtaaagtcactgaaagcactgctgggaagagacaaacataattggcttctctgatgcaatacaagactgctccagcaaactattgaaatagtcacatacatgttccctgccctgtacatataactacgtagagcatatgccaactcctcctctctcttttaggttgttgaccatgacgtctataaaaaaaaaaaaaaagctatatctggcccatgcattgggaaatcagagtt

SEQ ID NO: 78800 - DNA, 777 bp, Homo sapiens
gcatgcaaaaaaaaaaaggcaggagtcattatgtgtttgttatttggcctggtccacatacatagaaagagcagcaagtggtcttaggacacataagcctctctattgtgtgatcatcaagagstgagcatctactaaagccagacaattcgcttctttccagcaagttcttaaggaatccaagtttgctttctcaatagcctccatcattccagagattttaaaaatcactcttatttttttcagttattccaaggctacaaaaccaaaattcatctccaccagatttcatttgtagcagctataagttaatacttttctccttggtggttcccacatttcctaaattcctggcctgccaagaagggactgtccttttaccagatcagtttcctgggagcattttgcagacatttgttctacctatgaagttaggcctatttactgatatgcttatcatatcagaaaaaatgagattgattttcaaataacatattgcaggtttgcccttggttatacaatcaatttgtctaattatattctagtttaaaaataaaaataaggagacagctttttgttaagcttatgcaaataattacattgccatgcaatgtaaaaaagactcaggaaaatagttgattctgaattttgatatgtcaaagggaaaaagatatctttttttattttttagatgaagactcgctctgtcacccaggctggagtgcagtggtgccatcttggctcactgcaacttatgcttcccaggttcaagagatt

SEQ ID NO: 78801 - DNA, 848 bp, Homo sapiens
gtaaataatttttttaaaaagctgctgttaaggaggccaaaccatcaaaaacatgaaaatttatgtatgcaagagaggataacttggagtcagaagtgggtacagaattcaaggtctgcattcttaacactttagacccttgcttgaatattctcatgttctctatttcttacagttgatttttcctctctctgtagttggactttgtagcactttgaaatttctaacgtcaacaaaactatggtgcttttgatctaaagtgtgcaaggaaaaaggtctttgtggttccaacactgactggcattagaagtatttaaggcaaacataaaatttgaaagatcttcagtcttaaaatggaaagaggccccttcccagaagttctatccaccaacagagaagccctcactttaactttattgcttttatgtgtattgcgatttgcagtttatgggatgtttaaatgtgctggatttcatttgatccatatgctaattggtttggtgaaaatgagacttgccagaggtcacatagatgtaagcaactattttaggattaaaatcagttcacaatctagactacattattacactgcttggcaaygtcttctaacttgctaagaatataaggtagctaaaatcattctgggatctggaaataaggataaggtctacaaaaggctttctaatgttataaaaatagggattatatgccaatatatcatgatgcattatgtaattgagaaaaattaattctatgagtattaaggagcattaaaatcaggtttactgcattgcagtgtgagcatttgccaaattgcttatgacatgagacttcacacaatttcagga

SEQ ID NO: 78802 - DNA, 872 bp, Homo sapiens
tagatcccacaaataagtgagaacgtgcgatgtttgtctttctgtgcctggcttatttcacttaacataaggatctccagttccatgaatgttgttgcaaatgataagatctcattcttttttatggctgaatgtactccattgtgtatatgtaccacattttcttcattcatctgttgatggacacctagattgcttccgaatcttagctattgtgaacagagctgcaacaagcataggagtgcagatatctcttcaaaatactgatttccttttggtggggtatagacctaggagtgggatggctgcgtcatagggaagctctatttttagttttttgagaaaactccaaactgttctccatagtggttgtagtaatttacattctcaccaacagtgtacaagggttcccttttctccacatcctcaccagcgcttgttatcaaggggctgtgtcttgtctcacgtcttcatcaaaccatctaatttaggatagagccttttgcaattgttcagcaaacaactgataccaaaatcaattgaaacctattataagtcagcatagacaagaaaatgaactccccttgtgcacatgaatgatgagaacaagcgggagcttgggtggaaaggaaccctggagggtgagtgtttggggaaagaagccagtggtatattttggaaaagtaggcaattaaaaaaaaaatagttttaatggcatttgctttgctttctaagtagctctatattcacaaattcaaattcaaaacatacaaaagtatatgcatcaaaaatcttcttcccagatgggcaattttaaaatggaattttgaagacgaaaacatctattcacttactatcccctccctyctacc

SEQ ID NO: 78803 - DNA, 568 bp, Homo sapiens
tctattatttcaggaaaccttcaatactgctatccatttcttgtgactacatcacaaaggtagatgtttgagagatgcacctaagagctgggtgatacactcaggtgacacctgctcctcgaaagttgtgtgcagaagccccagggaactaaggattttcctctttgattggctaaatcatgttaataaacttttgtgattcaaagattttcctgctcaaagcatccacgtaaccccaaagatgctccaggaagaggcaatccagttctaacacaacctagctaaattatttgcatggataaggccaacctcaggtaatataaatccaatgcctttttcagtgatgaccaaggtaaggcaggccccaaaagagccctgggaagagaaagccagggcagatgtagtcttcaggagctcatggaatggtccagaattatgggcaattatcgctcaagaggtcagcatgccagaagccargcttcaaacaccaccctgtgccttcagaatctaacttcagccagattcaatacacatggtttcttacttatatccacaccagccgcagcta

SEQ ID NO: 78804 - DNA, 1826 bp, Homo sapiens
atctcagatttcccagcctctggaactgtgagaaataaatttctattgtttataaattacccagtttcagatattttgttacaacagtacaaatggactaagataattgccgtgtctccttagtatcctctggtctgtgatactttgttagagtcttttcttgtttttcctgacattgactgttttgaagagaactggtcacctagttgaagaatatatcttaatttgggctctctgatgcttttctcataattagactagaattatgaatttgagagaagaatactacaaaggctcagtgcccttctcatggcatcatatcaagaggtgcatattcctatgacatcactaattacattaacctcgatcacttttttaaggtagtatttttcaggtttctgaattataaggttagcatttctcactttccataatctattcttatgaagtgagttactatgtctagttcacacaaagagggatgagaaaaggtaagttccactacctgaaagaaaaagtatttacaaatattttgaagggcttttataaatgacatagttaaaataggctcatccctcagtagaagagatttcatcaagggactgaatatgtgatgctgacacgtgaagattctaaataaaaatctgtcgattcatgtttgagtatatttcaggtcacgttcatggtgacacatctgggttttatgcatagtaaaccattaaaggctacttttgcttcattaggagctgtttaatgttcctcagactgttgaaagataagaaagagaaatgtacactaaaatttaactcctgtattttgacagttaatttcaagggtgagatcggtccctttcatctcaatatttctttaaagtatggatctcccatccttgacaatggaaactagtaagaaatctcacaaatgcctaacacattatgaaagttattaaaagtcttaagtctagctatttgaaaacattatgttgtctttaaaagaaacatttctcattgttgtcatccctggattctgtttctttacagatttcattataactccttgcccaattcctattgtggctgagcaaatcgcatgttcccctatgttgtattgagcaactaattttttctcttgagatgaataaatcaatatatacatttgaactttatgattttgtcaccaacccacaaaacgcattttgtcttctaaccctagctttgaaaagtcagtcacatcactgaacaccattcactaaataataaaggtgaagaataaacaatgaattctacattaataataataaatttcatattgcattacagtctatagaaggtttttaaatatgtactctcatgatcatctgatctacccccaaaatctcagaaggaaaccatagatgaaaaatcataattttaaaatgaaaaaaacataagtctcatagaaggtaagtgttaacaattactggccgtgaaaattagggccacattaaaaactcaagttttctgaatatgtgtcaatcagattgartaagttgacattgcgtaccagcattccatgaccttagcatatgaaaagtttacttctcactcacaccaagtccactctgagtttgggtttatctcctggacttttgcccatttcatcattcagtattctgggatactggctgagtctcgtttcctcacctccaatataacaaacataatcttccataattactatggcaaggaaagagagaatagagaatgtcacaccagcccttaaatgctactacagagaagtggcacataggacttctgctggttttaatagagaagtcacattatgta

SEQ ID NO: 78805 - DNA, 607 bp, Homo sapiens
ggcctcaagtgatccacctgtctcagccccctcaaagtgctgggattaccgcctatcttaatcttaaatttataattttaaagtattttataaggtacctattttgctgcacaacaatcatcataataagtaatgtcaatgagtttttattctatgtcaggcaacattctaatagcttacatatatcatttcattgaacccccacaactctatgaggtaggtattattaattctactttccaggcacagaaaggtcaagctatccctctaagatcacatagtagacaggtggcagaactgggattcgaactccatggtctggctggaaagtttasattcataactactactctattctgtctgtcatatgtaagtataattttcacattttaagcaaatatatattggggtttcatgttcaagttgttcattgtggttggttttgttttagtttttttgtttggtttattgaagaaggtgttcagaagaaaacaaacaaaaaacaatgtttggagaatattggcaagttgagataaaattaaactatgttggccaggtgcagcgcctcacgcctgtaatcccagcactttgggatgttgaggcaggc

SEQ ID NO: 78806 - DNA, 607 bp, Homo sapiens
ggcctcaagtgatccacctgtctcagccccctcaaagtgctgggattaccgcctatcttaatcttaaatttataattttaaagtattttataaggtacctattttgctgcacaacaatcatcataataagtaatgtcaatgagtttttattctatgtcaggcaacattctaatagcttacatatatcatttcattgaacccccacaactctatgaggtaggtattattaattctactttccaggcacagaaaggtcaagctatccctctaagatcacatagtagacaggtggcagaactgggattcgaactccatggtctggctggaaagtttacattcataactactactctattctgtctgtcatatgtaagtataattttcacattttaagcaaatatatattggggtttcatgttcaagttgttcattgtggttggttttgttttagtttttttgtttggtttattgaagaaggtgttcagaagaaaacaaacaaaaaacaatgtttggagaatattggcaagttgagataaaattaaactatgttggccaggtgcagygcctcacgcctgtaatcccagcactttgggatgttgaggcaggc

SEQ ID NO: 78807 - DNA, 634 bp, Homo sapiens
ccgtcatcctcctttatactaccctggtattctctgaatgtgcacaataaacttcaataactgttctccccacgtcctgcttgtcctgcttcttaaagtctattctgtcctccacactgcagccagagggatctgattaggtcaaacccctgacaaagttcacttttctttttttttyttttttttgagacggagtcttgctctgtcacccaggctggagtgcagtggcatgatctctgctaactgtaagctccgcctcctgggttcacaccattctcctgcctcagcctaccgagtagctgggactataggaacctgccaccacgcccgtctaattttttgtatttttagcagagacggggtttcaccgtgttagccaggatggtctcgatctcctgacctcgtgatctgcccgcctcagcctcccaaagtgcttggattacaggcgtaagtcaccgtgcctggccaataaagttcacatttttagcttggcacttaaggtcctttgagatctggtcctatcctgctcactcagaaagcactgtaatactggcatatttgccctcccctaaacatgctcccagtcttcccatctccatgtctctgttcatgccatttcctctgtcacccttca

SEQ ID NO: 78808 - DNA, 569 bp, Homo sapiens
tgagactgcagaggtaaacaagattatatacaaccttgcatgctccactgaagagcttgcgttttatgtccagggaaatagggattttacagaaaggttttaaataaaatagtaagttataagccaggtcagtactagggtgggacaaaccaggagcctagcaaaacgtaaggcaccattcactctctggccatgtatatgcaggggcagcccccagttatgagcacccccttaaatgttgtctcccagtgcctcgcttgcctcaccctggcctgaccctggcaacaagctcccagctttagaaacgatgctctccacactttaccatgtgagagtagattcaaggagtgaaaatcagaggtaggaagatcgctagaaggtttattcatttattgtacatatttaagtactggctacgtgrtaaagataaagccacactttcatggagcctgcattctgacaagggcaggggaagatggataatgaacaccaatacataaattagataatttcaagtgtatgataagtgctaaaaacccgcaaactagtatattctgagaaatatattt

SEQ ID NO: 78809 - DNA, 666 bp, Homo sapiens
tttagctttccttcactgtagtgacaggtgttttaatctcacctaacaatatgcctgattaagcttcaacatacacagagagaggcctgaaaaacataacttggtctctatgtctaagtttatgttgttagtaatagttataagagccacagcgatggcaccatggcgttaccttctctgaaggctttcccagctttcctagcaaagctcttttctcttccctctggttaaaaaataaataaaaaaaaaataaaggtttttcctttattgttattcttatgtgtctgattttatcacatttattgttttgttttctgattgtataagtcatacatgctcatttagaaaacttggaaactatggaaaaagagaaataaaaaataaaatccactctaatctaccttgtttctatctctaaggtagcattcgycactttggtatgaagttgatgtgagtagatctgtctaatcaactaaatttggagcttctcctgagaagaacgcatgtattcagctctgtattccagctgtaggaagtgtgtgatgtattggaaacatcccataattttgaataagtaagtgaatgaaagtgtagtcataaacaatgacactgggattagtgaatttttacgtcaaattgtatttccctatttcatattagcatgca

SEQ ID NO: 78810 - DNA, 508 bp, Homo sapiens
tggaggaaaataagtgttttcctaatgtttaaactcagcaactgaccctaagacttgttttaattttgcgattgttttgaagctgctagtctgccaggcatatggtgcaggtaagctttgccaagtcgttcctccgaagcattttattaygataataatcacaaatgtgacctcagtccttttatcctgtttattctctaccgtttcctgtgataagtgctacttctgtactttgccaacctcctccacccgcatttgtttagggaaagaatattaattagtgatattaaggaggctatgggctgaaaatgaaattttcataatggaattccttagactatctttgccctccgaggcatcctctgtttaagcagttcaattgaatatcattattaacatacataataataataattagcattattgcctgcatcagttgttgttcatggaaaactgcaagctcttttctatctattggcctcagttaaaagtgcgaaatagattctca

SEQ ID NO: 78811 - DNA, 508 bp, Homo sapiens
tggaggaaaataagtgttttcctaatgtttaaactcagcaactgaccctaagacttgttttaattttgcgattgttttgaagctgctagtctgccaggcatatggtgcaggtaagctttgccaagtcgttcctccgaagcattttattacgataataatcacaaatgtgacctcagtccttttatcctgtttattctctaccgtttcctgtgataagtgctacttctgtactttgccaacctcctccacccgcatttgtttagggaaagaatattaattagtgatattaaggaggctatgggctgaaaatgaaattttcataatggaattccttagactatctttgccctccgaggcatcctctgtttaagcagttcaattgaatatcattattaacatacataataataataattagcattattgcctgcatcagttgttrttcatggaaaactgcaagctcttttctatctattggcctcagttaaaagtgcgaaatagattctca

SEQ ID NO: 78812 - DNA, 508 bp, Homo sapiens
tggaggaaaataagtgttttcctaatgtttaaactcagcaactgaccctaagacttgttttaattttgcgattgttttgaagctgctagtctgccaggcatatggtgcaggtaagctttgccaagtcgttcctccgaagcattttattacgataataatcacaaatgtgacctcagtccttttatcctgtttattctctaccgtttcctgtgataagtgctacttctgtactttgccaacctcctccacccgcatttgtttagggaaagaatattaattagtgatattaaggaggctatgggctgaaaatgaaattttcataatggaattccttagactatctttgccctccgaggcatcctctgtttaagcagttcaattgaatatcattattaacatacataataataataattagcattattgcctgcatcagttgttgttcatggaaaactgcaagctcttttctatctattggcctcrgttaaaagtgcgaaatagattctca

SEQ ID NO: 78813 - DNA, 738 bp, Homo sapiens
aaaaaaactacagaaggtggtagggctttgttgatgatcaattatactatttaagcaaacacatttggtgaaagcacgttttccccttctgctaaagctgctaaagtaatctcttcatttgtaagacaaaagaacattcacctagcaggacattatagagccaccataaatcctttgagtccaagccaatttggagtggaaaccatagataattacactgggttaaggggaaacaattaaatctagattaaaacttctttaaagcaagtttttttctttaaaaaaaggggaaaatgtgagaattgggcagtccccttgaagaaaagcagtgtgccaatatcctttgggagtgttttgtctcttctggatgctagcccaggaatcattaactagctgtgtgacaatgaacagtttgactattttgctgatctgagcctcagtttccttatcattaaattaaggggttgaggtgcaccatctatcatcccagttgtcaaattctgtgatattaactaggatttatgcaaggtgctatcctagggaatccagtagacagaaagaaaattcactggttttatttcacttgcaagaaagcacctctttattatccagtatttgcccctcagctaggtcacactgggctcatctcagagctctgttggtccagggttgactagttctctgctttgtttccaaragaactcaagcagatgggaactttccttgagagatgtggat

SEQ ID NO: 78814 - DNA, 943 bp, Homo sapiens
tgcatagacatgtctctatatcggggagacataaaggtggtcatgatcagactagaggtggtagttaacgccacagaagcatgtgtgatggcttaagaaaaacttacagactgatagaaggagttaggtgtgcatgccaagaatctaagatttaaagaaaggaggaggaggcagagcagatacaagatgccaaggagagaatgggccaggaaagsaaagacacagaagagagaaatttcaacatggaaggagatggtcatgactgtcaaacgctgctgagatatcaggcaaggtgaagactgaaaagagccattgggaagtggcagttgggaagtcacagatgaccttgagaagagtgactacaattgaatgtggtcagtttgagggagtcagttaataggagccctctttccagtctgtggtcagaaccaactgagaaattcagacacaaaaatcagatggaaagcaaaacgcagcttagatgtgtggtcaaataagcttgttaattttccctccccctcgaaacttcacccgcctcttccccaaatgtagtcctcttggtttgcagagaatatgcccaaataaatgtaaagcatggatgaacagataagcctgaaagactaggggaaaagaattcagcaagtagacttcagcctttttccaatcccatcaactagacaagtctatccatccagcaagaagaggaaagaagagtgaagtttccttcttagttaagctttatcccagtgaggtaagaaagagttactttctccctttgtgaaacaagaatgagagagaaaaatacttgtattttatttcttaaattttttaagttccagggtacatgtgcagaatgtgcaggtttgttacataggtaaacgtgtgccatggcgggtcgctgcacctattaaaccatcacctaggtatttaaacttggcatgca

SEQ ID NO: 78815 - DNA, 943 bp, Homo sapiens
tgcatagacatgtctctatatcggggagacataaaggtggtcatgatcagactagaggtggtagttaacgccacagaagcatgtgtgatggcttaagaaaaacttacagactgatagaaggagttaggtgtgcatgccaagaatctaagatttaaagaaaggaggaggaggcagagcagatacaagatgccaaggagagaatgggccaggaaagcaaagacacagaagagagaaatttcaacatggaaggagatggtcatgactgtcaaacgctgctgagatatcaggcaaggtgaagactgaaaagagccawtgggaagtggcagttgggaagtcacagatgaccttgagaagagtgactacaattgaatgtggtcagtttgagggagtcagttaataggagccctctttccagtctgtggtcagaaccaactgagaaattcagacacaaaaatcagatggaaagcaaaacgcagcttagatgtgtggtcaaataagcttgttaattttccctccccctcgaaacttcacccgcctcttccccaaatgtagtcctcttggtttgcagagaatatgcccaaataaatgtaaagcatggatgaacagataagcctgaaagactaggggaaaagaattcagcaagtagacttcagcctttttccaatcccatcaactagacaagtctatccatccagcaagaagaggaaagaagagtgaagtttccttcttagttaagctttatcccagtgaggtaagaaagagttactttctccctttgtgaaacaagaatgagagagaaaaatacttgtattttatttcttaaattttttaagttccagggtacatgtgcagaatgtgcaggtttgttacataggtaaacgtgtgccatggcgggtcgctgcacctattaaaccatcacctaggtatttaaacttggcatgca

SEQ ID NO: 78816 - DNA, 943 bp, Homo sapiens
tgcatagacatgtctctatatcggggagacataaaggtggtcatgatcagactagaggtggtagttaacgccacagaagcatgtgtgatggcttaagaaaaacttacagactgatagaaggagttaggtgtgcatgccaagaatctaagatttaaagaaaggaggaggaggcagagcagatacaagatgccaaggagagaatgggccaggaaagcaaagacacagaagagagaaatttcaacatggaaggagatggtcatgactgtcaaacgctgctgagatatcaggcaaggtgaagactgaaaagagccattgggaagtggcagttgggaagtcacagatgaccttgagaagagtgactacaattgaatgtggtcagtttgaggsagtcagttaataggagccctctttccagtctgtggtcagaaccaactgagaaattcagacacaaaaatcagatggaaagcaaaacgcagcttagatgtgtggtcaaataagcttgttaattttccctccccctcgaaacttcacccgcctcttccccaaatgtagtcctcttggtttgcagagaatatgcccaaataaatgtaaagcatggatgaacagataagcctgaaagactaggggaaaagaattcagcaagtagacttcagcctttttccaatcccatcaactagacaagtctatccatccagcaagaagaggaaagaagagtgaagtttccttcttagttaagctttatcccagtgaggtaagaaagagttactttctccctttgtgaaacaagaatgagagagaaaaatacttgtattttatttcttaaattttttaagttccagggtacatgtgcagaatgtgcaggtttgttacataggtaaacgtgtgccatggcgggtcgctgcacctattaaaccatcacctaggtatttaaacttggcatgca

SEQ ID NO: 78817 - DNA, 1026 bp, Homo sapiens
ctgagcctcggtttcttcatcttccaaatggggacgatgatatctacctcaggggaatgctgtgatgacgatagacgtgtccagcacacagtaactattcagtagatattatctttgttccttcagcaccaggggaaataagaaaaagcaaagaaagggaagtgctggtataaagggaaggaaggaaaccaagggcatcagtgtggatggggaaggcagaaaatgctctcctggggaatcacaacctttgtattatcaagtgctttttttgamttcaagccatgctatttcttgcagctctgactatgtttcaagttggaatatcaagcatctctgagccttcactacagcaattaagggctcataaagctattcttaggagtacaaaataaactgagatatatttgaggttgccagaaggttgccatgtggagaactgagtgctaaccactggaaaggtgacattaaagacagcaggtgtgcagaatgctgtggccataactctctccagctgagggcagaggccacaaaaaggaccctgctgaggggaggctgccaaggagctccacactctgccaagaggggcctgagttctggcgccatcagcaactgtcttgtctctgtgactcacatcttctcacataaaatgagtagttgaatgagttgattttgaatgttcatttctgttctaatgttgtgtgatccaatatgaattcaactaaagcctgcagattcttccactgctcccatggtggccatctgttgaggtgggagggaaacatgctggccctccccgtctcctaccctaaagaagacactgtgctggactagctctgcttccaatttccactaaggctattattcttcccactcgccatccactcctatagcattatgtctgccaggatgctctgtaagtgttccttggaaaaaaaaaaaaaggatggaaggagagaagaaagaagacaacgaggaaaggagggagagaaaaaagaaatgaaagagagaaggagggaagataatgca

SEQ ID NO: 78818 - DNA, 1026 bp, Homo sapiens
ctgagcctcggtttcttcatcttccaaatggggacgatgatatctacctcaggggaatgctgtgatgacgatagacgtgtccagcacacagtaactattcagtagatattatctttgttccttcagcaccaggggaaataagaaaaagcaaagaaagggaagtgctggtataaagggaaggaaggaaaccaagggcatcagtgtggatggggaaggcagaaaatgctctcctggggaatcacaacctttgtattatcaagtgctttttttgacttcaagccatgctatttcttgcagctctgactatgtttcaagttggaatatcaagcatctctgagccttcactacagcaattaagggctcataaagctattcttaggagtacaaaataaactgagatatatttgaggttgccagaaggttgccatgtggagaactgagtgctaaccactggaaaggtgacattaaagacagcaggtgtgcagaatgctgtggccataactctctccagctgagggcagaggccacaaaaaggaccctgctgaggggaggctgccaaggagctccacactctgccaagaggggcctgagttctggcgccatcagcaactgtcttgtctctgtgactcacatcttctcacataaaatgagtagttgaatgagttgattttgaatgttcatttctgttctaatgttgtgtgatccaatatgaattcaactaaagcctgcagattcttccactgcycccatggtggccatctgttgaggtgggagggaaacatgctggccctccccgtctcctaccctaaagaagacactgtgctggactagctctgcttccaatttccactaaggctattattcttcccactcgccatccactcctatagcattatgtctgccaggatgctctgtaagtgttccttggaaaaaaaaaaaaaggatggaaggagagaagaaagaagacaacgaggaaaggagggagagaaaaaagaaatgaaagagagaaggagggaagataatgca

SEQ ID NO: 78819 - DNA, 1026 bp, Homo sapiens
ctgagcctcggtttcttcatcttccaaatggggacgatgatatctacctcaggggaatgctgtgatgacgatagacgtgtccagcacacagtaactattcagtagatattatctttgttccttcagcaccaggggaaataagaaaaagcaaagaaagggaagtgctggtataaagggaaggaaggaaaccaagggcatcagtgtggatggggaaggcagaaaatgctctcctggggaatcacaacctttgtattatcaagtgctttttttgacttcaagccatgctatttcttgcagctctgactatgtttcaagttggaatatcaagcatctctgagccttcactacagcaattaagggctcataaagctattcttaggagtacaaaataaactgagatatatttgaggttgccagaaggttgccatgtggagaactgagtgctaaccactggaaaggtgacattaaagacagcaggtgtgcagaatgctgtggccataactctctccagctgagggcagaggccacaaaaaggaccctgctgaggggaggctgccaaggagctccacactctgccaagaggggcctgagttctggcgccatcagcaactgtcttgtctctgtgactcacatcttctcacataaaatgagtagttgaatgagttgattttgaatgttcatttctgttctaatgttgtgtgatccaatatgaattcaactaaagcctgcagattcttccactgctcccatggtggccatctgttgaggtgggagggaaacatgctggccctccccgtctcctaccctaaagaagacactgtgctggactagctctgcttccaatttccactaaggctattattcttcccactcgccatccactcctrtagcattatgtctgccaggatgctctgtaagtgttccttggaaaaaaaaaaaaaggatggaaggagagaagaaagaagacaacgaggaaaggagggagagaaaaaagaaatgaaagagagaaggagggaagataatgca

SEQ ID NO: 78820 - DNA, 584 bp, Homo sapiens
acttctttgcaatccaagagaaaagattctggggtcatgacattctcccccttaaaaatgtttttgggccaggcatggtggctcaacgcctgtaatcccagcactttgggaggccgaagcaggcggatcacctgaagtcaggagtttgagaccagcctggccagcatgatgaaaccccatctctactacaaatacataaaaattagccgggcatggtggcacgcacctgtaatcccagctactcgggaggctgaggcaggagaatcacttgaacccgggaggcagaggttgcagtgagccaagatagcaacactgcactccaacctaggtgacagagcaagactctgtctaaaaaaaaaaaaaaaaaaaaaaaaaaaggtttttaccccttccttacctacaacagtggttccttagctatatgagaattttttttaaaaagctcttctcaggaatacgtgtgtttgcaaactcattctctctytctctctctctctctctctctttacttataatttcagatctttaaacattttcacatgaaaaatcttgacctaaaagaaaaactcaaattccataagctt

SEQ ID NO: 78821 - DNA, 679 bp, Homo sapiens
taattttgtattttttgtagagaggggggttcgccatgttgcccaggttagtgtagaagtcctgggctccagcagtccacccaccttggcctcccaaaatgctgggattacaggtgtgagccaccatgcccagccaatttcaagattcttttctatagtatactgtactgcataatgtatgttttaagattgtttccttgcattggtcacatatttggtttcagtaggttttctgcagagcccatatgttcaggcatggtggggggaaaaaagcctgttctaaactctaatttatcctgagatctgagctatcaaacaattttttcttcatccctgttagattgcacttcaagctcttaacagtgcctctgagccatgagaaaaatttacacatgagaaatgttttgaagccattaaagtaagttcagagcttaagagttgctttcacatctcttgagtcagatgaaatgcrggcttacagagagtaataattaggtgatgggcagatgccaagctttgttttttgatacgattatctctgtctttcatttggcaccgttcaagtctgcaggttgggcattctgaaagagagggatcactgagaccacacaggggcacatcagatctgttcctttggtggacgtcaaggcagaattactcagaatataatctgaaatgc

SEQ ID NO: 78822 - DNA, 737 bp, Homo sapiens
acacctctgctgcatctcagtgtgactcagcgagttccagaatggtgctgcccatgccaaggctacatcaagactgtgcgctgaggatgtccgtgggcttggctctgctgggtcttctttttgctttttttgtcaaggtctataattagaatacaactaatggaaacatctataaagaagaatacatttctaattaaaatcttcaatgaacaggaaagcgacatctccattctccaagggcaataatttgtactggtcatgctgcctccttctcagccactcttcttaatgaggctccccctgtctcacattgagttgggcccattggttatttgacctaaaacctaatcacsgctaccatagcacatccttcaaattaaactgcttttggtttacttttagcaagaaatgcaagcggttgcatttttttctgtttgtttcaatctctaatctttaagtcagaacctaattgtacagtggctctggccatcttttcctcatgtggaagaattttctatctttaataaactttttctttgttttttttttccagatggagtttcgctcttgtcccccaggctggagtggtgcagtggcacgatctcaggtcactgcaacctctgcctcctgggttcaaacgattctcctgcctcagcctcccaagtagctgggattacaggcatgcgccaccaagcccagacaatttttttggtgttttcagtagagacggagtttca

SEQ ID NO: 78823 - DNA, 732 bp, Homo sapiens
cagtgtcatactcgtcattgataattgttgactgagtgaaaaggtaaagacatgtgaaggggaaatagtgcagtgaaaatgtgagtgtggaagagtggttcccaacacctgggttcaaatcatcacaggaaatcatggtcttctggaacctccctagtcccatcctgcagggataggtggctgggcttagatgacctttcaggttcygctgctgctgaaatatatctttggttctcctaaggaggctttttttccattcactgctttcatgataaagaatcccttttgctcttaagggatcccttttagatttgggaaaattatccataaaactttaaccacaggagtaattatgtcgcacaggtgagctagcatacctatacaagaccacttccctcacaccaatccctccctaccagggtcacaattgattagcagtattaccagaggaacagccaagaccaaaaacttctcgaagaccaagcccatattcattatttccatctctaagatttcattccgttcctggataataaacattgaaacatattataagaggccaggtgctacctgcatgttgcatatgtaagtaattcaggctcgggggcctggttcttttccttagcgcttagctagggaagtcggtccacgtctttgtcccaggctcactgctccttctgcctcctatcttgaacgtggacaaaggatggagaggtggggaaaatgcctgct

SEQ ID NO: 78824 - DNA, 915 bp, Homo sapiens
atgatgtacatactcttcctttttccatctcatttcaccattaaataaatgccctggctgggtcagaggaaccaggaaatagactgttattcagtgtgctattgatatggcccctaaagcctccaacaacttccctatagacatcacaaaatggaacagaaaattctagtggatcaccattgtccattcataggcactgcaaatgtgttatatgtctcactcaataaascaacacagttttgctgaattatgctaagtcaaagttttctttaaatcccattatccttatcattgttcttggtgaaactgcaaataaataaaacctctaatgagttatttttagatatctaaatggacacaggaaaatgttaattgactcctcaaatttacagaacaagttaataaaggtagaataaaagaagaactagtctaataactttcttctaagactacagtgaaatttattttatctcataacatcgaatgtcccagctaaggaacatcaaggagaaatttgatgcttttcattctttagaatttcactttgatgcagataatgttgcattagttattcttaattttactctcttcacttattaaaatgcctaatatgggccaggcatggtggctcacgcctctaaatcccagcactttggaaggctgaggcaggaggattgcttgagcccagaagtttgagatcagcatgggcaacacaggctgatcgacaaaaaataaaacaaagttccctgggtgtggtggtgagtgcctgtggtcccagatatttgggaggctatttgggaggatcacttgagccctggaggttgaggctgcagtgaggaaagatcatacctctgcactgcagcccacatgaaaaaaaaaaaaaaagcctaatgtgaactcgaattactgcttcta

SEQ ID NO: 78825 - DNA, 909 bp, Homo sapiens
tgtgtgtgtgctttttttctcaaggaacacagaatgcatgtgcacacatgcacgcacacaaacacgcacacacacacacatgcctaagagtaggactggataatagaatggcagaatgaacatagttaaagagaaaataggtgatttggaagtaacatctagaagtcacccagacatataaaattgaaagagataaaaatgtttttcctaccttggccagttttgatgaggatatggaaaactgggtactcctacactaatggtgggataacaaattggtacaatctttttggagggcaatttgggcatgtgtacatatatttgtrtgtattatgtatatgatatgcatacatatatacataattagaacatgggcatatatatatataaacaaatacatagctagaatatggatgtatatatacacatatacatacacacacaagcacacatactcttaatatgcatatatcctgtcattcagcaagcctaattttaggtatctgtccagtagaaattaagtatatatacaaagttattcattccatcattgcttatgacatcacataaaataggtataacataaatgcctattagtaggggaataataaaatcattgtacttccatctctgaaattagctgcagctgttcaatgagctaggctatatgtctaaaatggaaagatagccatgatatgctattaggaaaaagcaaggagcacaactatatgtagtgtataattccttttctattaaaaaagaagaaaagaagaaaaacaatgtgtgtgtccgtgtgcatatagatgctagaaaaattctgaaataattgaaacaataatattgaaaatgtggtttgaactatggggtttagggagcatattaaaacaatttataagcatatataattat

SEQ ID NO: 78826 - DNA, 1764 bp, Homo sapiens
atttattttcataatgggcttctttggaagttgagttgtggaatgtcataaatgttcagggaaagcatgccactgtggactcagaaattacattaaaaaagcttccagtacacatgttgaataaaaatgggtcctataaagtttattaactaagcaaattaaacaaacttggtaataggtgtttcacatgaaattcctgaagcagcataaatgtgctttgcaacctgagtcccttgttattctcacataacatgtggctttttctcttttcccaatttctcttctaagtgtagcaaatgtttctttctttccctgggatgagagaagtccttccaaggatggtgtggatttcaagactcaagcaattccagagtgttgaaaaagagtcagtaggtggatttgtaatgacaaaacaataatagtaaaggtggtgacatgcactcagtaaatggtagctactattttgtatcaggcactctgctacagacattacgaggctggaataagataaacgcctcatgacatagcttctaccattgttcccatatggcagatgaacaaactgaggctcaaagaggtcaagtaacttgtccaaaatcacaaaactgagtgtcagagccaggacttaagtctagctctgtgtaatcttacagcccaggttcttaacaatcatactaaactgtctttcaaaatgacaggcacaagacctgtccctttcactcctgctggtactcagtgacgtacagtcatgcatctttcaacatcaagaatatgttctgagaaatgtgtcatttggtgatttcatcattgtgggaatatgcgagtgtacttacatgtatccagctggtatagcctactacacacctaggctgtatgggatagcctaggctgcacacctgtacagcatgttattatgttattgtactgaatactggaggcaattgaaacacaatgggaagtatttctgtatctgaacacagaaaaggtacagtaaaaatatagtattataatttcatgggattactgtcatacatggggtctgaagttgactgaagcattattatgtggtgcatgactgtacactaacaagtcaagtgacctcttaggacttagtctattaatctaaaggatgagaagtacattctaacatcaggtgtcttttctcgagcacaatcaaattttcattttcccaatctcttataatgactcatgaccgggtgaaggaggaatcagtgcaaattgcttgttgggatggaaacaggtgctagaagtgaggaaaaagcaatgttcaaacgcaaaggaagggtggaggaggaaaggtatggagttgccacagggactcatagcaagcaamaataaaatccagtttggaaatccaccagaaaatccccctcaatctcggaggcttctttcgtgttctttacaggaaacacttgtgtgttcctttccctttgtcagggacatataatttagaaagcagagaatttgttctttctagtttttccttttttttttttttcagtaaacatgaaggattaaagggaaatagacaacagcacttttaaaggatgctttttcgtaagactttcagtggatgttatccagtaaataagagtttcacagtatgctatcaatgttagtttggagaaggaaaggtcaaaaagtcaaaccttgatatctttatcttttcacaaaggttatttctgaaggagctatatgtaaaaggaaaaacaaaaggcaaatatatacacacacctatatatg

SEQ ID NO: 78827 - DNA, 632 bp, Homo sapiens
ggggcaagagacacaaattcagctaggcaggtaatatcaatgcgtgaaccagactggctgtgatagcaacccggggacatagggagaattccatatgtccccccatcttatcaaatgaaaaataatagcacaagtacagttttaaaagtcatagacattcaaccccagcattaggcgtataattgggagtggaaagactacggcaagccagatggctcatgaaaaggacgcagctataattcaactcaagccaattgctccttccatcttttctgaaagtttgggtcaaattctaaagcaggataacagttgttcgcagttgaaaggagagaacgcagcaattgaaaagccattaaatacccggataggttttggagatgtgggacaattcctctaccttgtttatttcttgtaggtaatttggaactctcatgggttccaggagttgaggcgtgataataccaaagatgggactttaaatgactctgatgatgctatgtaaggtggcttggaataaggaaaccagtcctaagacattacggtagargtagactgcagaagagacataaatataggtattagcacaatagcattggaaacgaccagacagagggaaggctggtggagttgat

SEQ ID NO: 78828 - DNA, 825 bp, Homo sapiens
taactctataaaaaggtattcattaaatcctaactattcatatagcaagtgtcaaatgaaatttggagaaggaatttttttaacataytaaagttccattatcctcaattttccatgaccaaccaaacacttttgcctagcccctctattgaccaataggggcagatttcttagtctttggagatttggtacggcaattgcggcagtggaatggtataagtcagtcttcccagaggttatgatatttgcatttattgagcatcgtatatacagaatgccagccacactctactaatagctcagcacaaaccaatgaattagagaacagcattcctaattacagatgaaacatacgaggctctcgcaaaggctatgtaaaatgccctttaatcagtggccattctgtgattcagacccagggctgtttgtctctaaagctcgggctctcagttgttactccctactgccaactcaagccatcaagccgaccaggcagccctttgagggaccagtggaggagctcaaaatggcctcattcccagcatgagtgcatatgcaacactatcgtccatctgccacaattctactgtgcattgatgccattctagaagaaagcccaaaggccatttgggcaacctctcaacagttcaccacttaattgttaatctaatcgatctatctttttcttgggaaggaggcacctgcttgaacagctgggtctccctaccttattggatacagggtatgaataaatacaattgcttctgccagaagcacatacacaaactggaagtggcttggaggtatatatttttaaagtcatgc

SEQ ID NO: 78829 - DNA, 943 bp, Homo sapiens
attcataagaatgataaccacggtcattactgttgaaaaatggtgctacgtatctgcaaagagaaaagtctaggatcttttgtctgctgttggatatgaagtggaggtgactgaggaactaatggggcaaagctaccatctgtagtattatgactgaatgactctaagtaagactctcacccaggtggaatgatacagggatacagggaactcctcctgtctgactgctttgagctgggacactggcctttttccaatcttcagaatcaaacagaaacattagctcttcttgggtctctaacctgcaggtgttcaaactggaatttacaccattggttctcctggttcttaggtttttggacttggactggaactacaactacatattagttctcccatgggtctctacttgctgactataggtcttgggatatttcagcctccataatcatgtgagccaattctgtattatgaatcatataaacaaacacacacacacacacacatacacatagatacataaayacatatatatataaatacacacacacacatacacatagatacataaatacatatatatataaatacacacacacacatacacatagatacataaacatatatatataaatacacacacacacacacacacacacacacacaaaactattggctcggtttctctggagcaacttgattaatatggatttccaatttacctaagcctatgaattctacataaaaccaaaataggtccggcatttccaagtaactcactgtgggctgctttttggtccatgtttctgtaaacgaacgaaactactggagttttttataactcactgagctgtaatgttaaatatagaatctctgcttagtgaacccatatcaatataaatccatagctttagataaagagatatatcaataatagatacag

SEQ ID NO: 78830 - DNA, 943 bp, Homo sapiens
attcataagaatgataaccacggtcattactgttgaaaaatggtgctacgtatctgcaaagagaaaagtctaggatcttttgtctgctgttggatatgaagtggaggtgactgaggaactaatggggcaaagctaccatctgtagtattatgactgaatgactctaagtaagactctcacccaggtggaatgatacagggatacagggaactcctcctgtctgactgctttgagctgggacactggcctttttccaatcttcagaatcaaacagaaacattagctcttcttgggtctctaacctgcaggtgttcaaactggaatttacaccattggttctcctggttcttaggtttttggacttggactggaactacaactacatattagttctcccatgggtctctacttgctgactataggtcttgggatatttcagcctccataatcatgtgagccaattctgtattatgaatcatataaacaaacacacacacacacacacatacacatagatacataaatacatatatatataaatacacacacacacatacacatagatacataaatacatatatatataaatacacacacacacayacacatagatacataaacatatatatataaatacacacacacacacacacacacacacacacaaaactattggctcggtttctctggagcaacttgattaatatggatttccaatttacctaagcctatgaattctacataaaaccaaaataggtccggcatttccaagtaactcactgtgggctgctttttggtccatgtttctgtaaacgaacgaaactactggagttttttataactcactgagctgtaatgttaaatatagaatctctgcttagtgaacccatatcaatataaatccatagctttagataaagagatatatcaataatagatacag

SEQ ID NO: 78831 - DNA, 866 bp, Homo sapiens
aaatgtgaaagttctttaaagagactggctgttcctattgcagccttctagaattgaaggcactcattcattatgctccatataccatcttagctgcagcagttatatttgacataactactgggatgtgtccaaaccaaaatcttactgaggatgagaggagacacgggcaagaaaaaatgatgagatgcgaaggggacaaatgggcagttggacagagacagttgaattggtataactatgagagagagaaacagagagaaacagcatactttgttttacataattttcaaataatggcagtggcctagaaagaaacctcaatgcaccggtgatgaaacagaaattgactgatgagttaggaatttaggaccaaagacagaaaacttcttrcagtcttgatgtaagcaaaacatttctatgctggagaaaaacaaaacaccttttagggaaatgtagtacatatggaatgtcttttagtgatacttcctttcactaacacacttagacttcaattctacttcaattcttcaattcaatctaattctcctgttctataaaattatatgtgtggcaagaaaaagaattatgtgacatggatgccaaactagggaagataataagaaaaggcaaattgatttctaataaattaatggatttgtgcatctttaattaatggaaaattttataatgtgtctttggagatctaacagaatattattacacataggacatatgggacatacagtttttaacttcttttgctgaaagttaatggaaataaaactaatacaaatcatggagtttgcccctgtgaaattattccttatgtgtgggctggcacaagtttcagtaggagtctacat

SEQ ID NO: 78832 - DNA, 866 bp, Homo sapiens
aaatgtgaaagttctttaaagagactggctgttcctattgcagccttctagaattgaaggcactcattcattatgctccatataccatcttagctgcagcagttatatttgacataactactgggatgtgtccaaaccaaaatcttactgaggatgagaggagacacgggcaagaaaaaatgatgagatgcgaaggggacaaatgggcagttggacagagacagttgaattggtataactatgagagagagaaacagagagaaacagcatactttgttttacataattttcaaataatggcagtggcctagaaagaaacctcaatgcaccggtgatgaaacagaaattgactgatgagttaggaatttaggaccaaagacagaaaacttcttacagtcttgatgtaagcaaaacatttctatgctggagaaaaacaaaacaccttttagggaaatgtagtacatatggaatgtcttttagtgatacttcctttcactaacacacttagacttcaattctacttcaattcttcaattcaatctaattctcctgttctataaaattatatgtgtggcaagaaaaagaattatgtgacatggatgccaaactagggaagataataagaaaaggcaaattgatttctaataaattaatggatttgtgcatctttaattaatggaaaattttataatgtgtctttggagatctarcagaatattattacacataggacatatgggacatacagtttttaacttcttttgctgaaagttaatggaaataaaactaatacaaatcatggagtttgcccctgtgaaattattccttatgtgtgggctggcacaagtttcagtaggagtctacat

SEQ ID NO: 78833 - DNA, 1335 bp, Homo sapiens
ttaaagtgatcttacttggccaaaactaagctgaaatttgtagagagatactgtcatttcatgcagaggtgactggtctgataaaactctgaaaacttttttctctgagaaatggttgaaggaagtgaatatgtttaaccttgggaaagaggttgagggggagactcaggtggggacatggaaactttcttcaaacatttgaagaggcctaagataactatttttaaatgaaatgattaatcatcttctttgtattgctctgagatgtagaagttaacaggtatgcagatttaatctcaagataagaaagatcttctagtaatttccccaaagagaatgactctctaaaacataatgagtttctaatcactagaaatgctcaagcgagcctagatgattatcttcagaaagagattggactgatgatctcaaaggttgcttctaatctaagattttatgaattaagattaagtaatttttattcccttttgtaataggtcttccccctctcatgtgccatggccaaaggaatgcttccaaatgaagcaaagggctttcaaaagccacttgaaataagagagtaaaaataaaaccaacgtaagaagtatttgtttcatttaatttggctttagtattcatagatttccaagagttttgacaaaataataagatattcttctttaaaaaaaactgttcttatctctccgcctgaatattgcagttgtagactttatggaaacacatggctacataaaccctgtgcaaccttgtcttgtgagccaattcccataccacacacgcacttgatagcatctttctattgagaagctcacaaaaagcagacaaatgcagggtcaaaaccctgagatcacaggcaatcatttagaggsaagggattagggattccctgtcagatgtcagtcaactcagaaaaaccttcagagagtttgacttcttccaagtgaaatatgtcaaatgcttattattttgatatttactattatgcggaaaacaataataggtctccaatatggttgccacctaactagccctccaaagtgatatactgaattccataataagacgtttttaataaagtctctttggaggtcacttttttactcaggagcatttttattttatagaccctttgctataaaaaggagcactggttcttgttatatgcctgtcaggatttattcctctttgacaagaaggaatttttaaaaaccgaacttccagaataaacaacaatcacttttagagcttgatgttaagatgtaaagcaataatttgcagtttcaagaaaagacttcaaaagcatcagaaatgaaa

SEQ ID NO: 78834 - DNA, 1979 bp, Homo sapiens
aaaatcctaatatgcattaagctgtcagaaagcaggctataaatagtctatccagcatattctcatttttgaagaacaaaggggttaggatgggaccgggtgtccaggtaaaagaatattttggcaaatttacaactcagagttgatttacacatggttttgccatcatatactggagctttttctcctttgaaatgtctccactgtaatcaagcaattttctaaagcaacacaagacaattaacagttcctaccaactctccactccactgttgctttaggaagcatttcccaggcctattaaacaagaacgtgaacgctgctctcacgcagaataggcgtgtgttatactgaggggtcctcttttcttgtcccttattctttgaatcacatattgagaaactgctagcaaagaagaaattaaattccagagtaaaccagtagagccgtgagaagagaaaaagagacatgagagaaaagttgtctaaatcctgttcacttaataatgaaatagaaaagcgtaggtgtggaagaaggattatggagctgttagggagctggtcatcagagtggcaatgaaaccactggctaccaatggagaggaggaggagcaccatgcttagaaggaaaccagcaactagaaaatccaagaatgtagcttggaggccgctcataatgcagcctcctcaagcatgtgatttaatttcatcttgaaccacccaaatcctctcttgaatattaaattccactgaatggtattgtttgcggaactctcgtcttcatccacaaaagaggaacaaaattacaaaggctgaaagtaattacattttcaataacctgaagctactaattcttaaatgggtcttcttaatttcagggcacagttttagaaatatttaactattatctctccaaactgcatttcattttagcagttgaggattgagcaattgattggttattatttctgcgaatcaaaaatatgagaatatttaaaatacaatacccccacgctctaaatcaaacacaaatgcaagttaaatgtctgagagaaactatgtttcactttcccaacatcatggcagacctgagtgccatgtcctggcagtttaaggaaaggtctgaaggcctttcctcaaacgccagtgaagccgggatggttgaagggcgccagtcctgctggatcctaggctaagacatgcatgtcccccacgtggtgtcacctcgtcattcctgagaatcgatgataccttccctgtgtcagacacacaagaactgaccttccaccttctcaactggagcctgaactttctgcttttggaygtataagcacagcgtgacacagtagacaagaaagagggaggcttccttttgtagcctaatgaatcagtctcccaacgagaagacgattctctaagaaaaagccaccccaagggtcccacttaatagtaaattattgttttagtgcatcgaattgtaccctagaggcccaaaggaattacgattttacttttacaaagtgatttacatagtggagtgtaatctgtctccataaatctgaagcctctacaaaacaagccactcctaaggtaacacaaagcaaggcaatttcagttatatagttatttaccaccactcagctcagcttccctcagagtcaaagatagagaaaataaacacaggccttttcttcattctgccacatgaaagaccattttctcatgtaatgcaaaaaaggaaggggagttgctgtaagagaagaactcccttctctctctctttctccctcttctctttctttctctcttctctgtctctcttctcccctctttctttctctctctctcttctctttcttcctctctctctccccctccctccagcccttcctccctcttttcttctctctctccctaggcacaatcctgagatgctttcagtttggtatgttctcagacactgccaggaagatttgcaac

SEQ ID NO: 78835 - DNA, 1979 bp, Homo sapiens
aaaatcctaatatgcattaagctgtcagaaagcaggctataaatagtctatccagcatattctcatttttgaagaacaaaggggttaggatgggaccgggtgtccaggtaaaagaatattttggcaaatttacaactcagagttgatttacacatggttttgccatcatatactggagctttttctcctttgaaatgtctccactgtaatcaagcaattttctaaagcaacacaagacaattaacagttcctaccaactctccactccactgttgctttaggaagcatttcccaggcctattaaacaagaacgtgaacgctgctctcacgcagaataggcgtgtgttatactgaggggtcctcttttcttgtcccttattctttgaatcacatattgagaaactgctagcaaagaagaaattaaattccagagtaaaccagtagagccgtgagaagagaaaaagagacatgagagaaaagttgtctaaatcctgttcacttaataatgaaatagaaaagcgtaggtgtggaagaaggattatggagctgttagggagctggtcatcagagtggcaatgaaaccactggctaccaatggagaggaggaggagcaccatgcttagaaggaaaccagcaactagaaaatccaagaatgtagcttggaggccgctcataatgcagcctcctcaagcatgtgatttaatttcatcttgaaccacccaaatcctctcttgaatattaaattccactgaatggtattgtttgcggaactctcgtcttcatccacaaaagaggaacaaaattacaaaggctgaaagtaattacattttcaataacctgaagctactaattcttaaatgggtcttcttaatttcagggcacagttttagaaatatttaactattatctctccaaactgcatttcattttagcagttgaggattgagcaattgattggttattatttctgcgaatcaaaaatatgagaatatttaaaatacaatacccccacgctctaaatcaaacacaaatgcaagttaaatgtctgagagaaactatgtttcactttcccaacatcatggcagacctgagtgccatgtcctggcagtttaaggaaaggtctgaaggcctttcctcaaacgccagtgaagccgggatggttgaagggcgccagtcctgctggatcctaggctaagacatgcatgtcccccacgtggtgtcacctcgtcattcctgagaatcgatgataccttccctgtgtcagacacacaagaactgaccttccaccttctcaactggagcctgaactttctgcttttggacgtataagcacagcgtgacacagtagacaagaaagagggaggcttccttttgtagcctaatgaatcagtctcccaacgagaagacgattctctaagaaaaagccaccccaagggtcccacttaatagtaaattattgttttagtgcatcgaattgtaccctagaggcccaaaggaattacgattttacttttacaaagtgatttacatagtggagtgtaatctgtctccataaatctgaagcctctacaaaacaagccactcctaaggtaacacaaagcaaggcratttcagttatatagttatttaccaccactcagctcagcttccctcagagtcaaagatagagaaaataaacacaggccttttcttcattctgccacatgaaagaccattttctcatgtaatgcaaaaaaggaaggggagttgctgtaagagaagaactcccttctctctctctttctccctcttctctttctttctctcttctctgtctctcttctcccctctttctttctctctctctcttctctttcttcctctctctctccccctccctccagcccttcctccctcttttcttctctctctccctaggcacaatcctgagatgctttcagtttggtatgttctcagacactgccaggaagatttgcaac

SEQ ID NO: 78836 - DNA, 612 bp, Homo sapiens
tgcttctaagtgatggcagaagattgagatctgagyggtaaactagtaagtgctacaattgattactgcctgttcttctttctttttcaatcccattgtggaaaatgactctggatgggtttatgaagtgagtttagtgagaaacaggtttctaggatttgtactttctctgctttggcaaagtaactccaaataagccaaagatgcacagcaggataccttgtatagctaaaatacagtattttgagatagactgacacttaaaaaaatgttcaatccccttttcctgttaaaaaataatgcaaagaataaggtggaaacacgagaggaagtatgatcaaaaggatgaataaaaaggacccctcatcgatgatgacaaggtgagtcaaattacagtcactccatgctatccacagaagttggaattgccctctgatatctaccataggcccacttctggagacagagccctcattctttagcagatatgtactgagtgcttactccatactactcccctagacactactgctacacatttgtagccccagggaaatgaataagacagatagggccttgctttcctctacttacattctagtcacccaccag

SEQ ID NO: 78837 - DNA, 1383 bp, Homo sapiens
cgacagagccatgcctctgttccagaggcctctctgttccaggttcaggcccctgcaggttttaggggtaggtgaaggctcccgggagaggggggccatgtgcctgcaagcctgggcacgtgcccgcgggaggggtgagtactgaacgtgctttgagtcactcactgagtcatggctcggccgccacagaacattgttataataacagacatagagaagaaaaacctggcacaagaagataggaaattctgtcttcactccaaaccatgaccaagaatggagattccaacaccagcaagaatttgtgatcgcttaacttgggtcatgaccacaatttcagcatagaacatttgtaattcagtttgatcaatcttttcctaatttttattaagactgcaacgaaagtgtgccctcattattacatttttcacaaacctgttagcatacaaagggcctttgtttctcattaccacccggggctccttaaggcgttttatggagtgatgtgctttattaaaaagcgttttcaccaacttaaaagttggaataattgtccaaatggttacatgacccaggagttctatatttttattaattttctgatactgaaataatcgtgctaattaagataacagctgaatttatgctgatgaatgttggaattcttagaagccacctgaaaccttccaaatggtcaggacctggatcccactggccagtgccaacaggtgactctgggtggtgctgggggatacagggaacctagctgtgttctgcttggcaccaatggctgctgatgcatgtgtttcctccaccaggttccctaaggatgccacattgaagaacaaatacaccccaaactacctaggtcagctgactggcgatgttttatggatctctctttaaaagtgttctgtcggccaggcgcagtggctcacccctgtaatcccaacactttgggaggccgaggcaggcggatcatctgaggtcaggagtttgagaccagcctgcccaacatggcaaaaccccgtctctwctaaaaatacaaaaaattagccaggtgtggtggcgggcgcctctcatcccagctactcaggaggctgagacaggagaatcgcttgaacccgggaggcggaggttgcactgagtcgagatcgcgccactgcactccagcctgggtgacgagcaaaactccatctcaaaaaaaaaaaaaaaaaagtgttctctgtcttaattaaggatgatggtttatccaattccaaatgtttaccaaaaatctaagataaggatatcaccatgatgtttgaaagagaatttatgccctggttgtgatgttggggttttattgataagagtttcagttatctggatgatatgtgcacg

SEQ ID NO: 78838 - DNA, 801 bp, Homo sapiens
gtctaggtgatgttgctcagcagcaggggcgtgggagcagatgggaatctttgggtcagagagctctgaatggctgtagcagcctaggctgttataaccagaaggcactatcttaccaaagggcaatagccgtcagatgaggtctgtggggagggatgggatgggagagccacagactggagagccaattcatctacttaaaaagaaaaaaactgtgccccaaattataatagttcctttattaaaccttcctcaaattaccttaatttgtatgtgtcatctttatcatcctgggaccttgactgatataaaccccaaatgtgactttggttatggttaggaattctctgaagataattgtttctctgtcttgatttcacccatctctgaagctgagggaggtagctgttcatccttctctaacgaatagattttccctcagtttacctacaaggagtattacttttctgagggtcccggatcttgtagatttctgatctcaccaccaatttggtggaggcctgtatttcatcatgtagcctttggaattctatgaaataagacattaacttcagcatttgttgaattttctggattttyttcattctccaattttggaagtttctattctattccagccatctaaccatggatttttttagttttgctttgtgtttgcagttttgaacaatgctgaggtgctatgcatttccaccatgtttctggaaaatgaaaacccaacagcaattcaattttaccccctttttaacctaagttatctgggaattgcagatccttgtg

SEQ ID NO: 78839 - DNA, 987 bp, Homo sapiens
tttaaaacacacacacacacacacacacacacacacacacagggaattaacacaagggaaaataaaacagaaacaaagactttacttcctaatcaatttgtccaaggactacaaaggacattgctcatgactgtcagccttcctgggtatttgctgtcagtattcctggtatttagtgtctgttttggctgcagccttattcatcacttgttttctttatggttcctaactgaacaatgtctgtctgtaagtaaaattaaatgtagctggtagtcttctgtattcacagttaggaataactttgtttaatgggactgaagtgttcaccaaaaaatcagaaaacaaactgagtttctcaaatagaatgtgaaggaaaaaatgtgcttgcttttccaagcaagtaatcattaggaagatttgttataccctataggaagctgaaggaaggagctatctaattgctttggctcacctgggaaataaatgagcctcataatttttagctgtttacctgtttattattttcttcagaggatttaaatcaaactcattcctttcaataattgctcttttcttagccatggcaaggaaaatgtctcactatcattttaacgtcaggttaaaacaatgayctcaacatttattacagttgacattaatggtttcctgttattaggacaggatcatattaagaggtttataacatgattactcatttgctttgagtaaaaaaattattagtaaacacctcattgttccttccctctgagaatgtcttgattgcaatttatttctatcaaatagaggattcttcaaatcagtaatgttacctgtaggtcattgaaaataatcagatgaaacataggatattctaataataattatggacagcaaattaattcactgacttcccaagagttgaggagtgttgtttgattttattgtaatcaaacaagggaaggtctggtgagttaattattcagggaa

SEQ ID NO: 78840 - DNA, 1017 bp, Homo sapiens
taataatagtacttactcagagagttttaattaatacatgaaatcatttagattatttgttacatagtaaaagcatatgtagtggttattttctcattatttttactaataatgaacattatgctttacttttagagaagtgttcagaaacttacatgctggtagaggagatacaatgatcataaaacatgacaagtgtagtgtgtatatgataataagaatgctggtattgtgatcttaattacactacattctaaaatactggggtaagccaaacaacacaacaaactaaaatatgtctgagggtcattattaccagcagataccaattgattattcttggtgtgaaccataatcatttatttaggacagcaaataaaccaagctaacaaatgcagctctgagccttggatatcagaattttaaattccattaattacacacttataacatgtccacattaaaattaacattatttgaaatcccattattaaaatgtaagataattcaacaatgtatgtgagtatgtgtatataactatatatataattaaaaaacctacacacacacatacacacatatttacacacagtgcacacacacacacacacacgtgaacatctatagtcatccttctatattgtttgggttccacattcatggattcaacaaaccacagaccaaaaattttttttttttttaaatgaatggttgggaaggttgcatctgtactgaccacatacagatttttttcttgtcattatttcctaamtaatacagtatgacaactatttacatcacatttaaattacattaggtattataagtaacctagagataaagtatacaggaggacgtgcataggatatatgcaaatactatgccattttctataaagggcttgaacatccacagatttttggtatccatgggcctcctgaaacccatgtcccatgaataccaagagatgatttggtattgttttatgtgcgtgtgtgtgtgtctgtgtatgatatg

SEQ ID NO: 78841 - DNA, 948 bp, Homo sapiens
aatcttaagtatacagcttaatgaatttttacatatggatatgctcatgtaaccacctttatatcaagttatcacctgaatggcttagstcaattcttttttgtttgttttttgttttgagatagagactctcttcattgcccaggctggagtgcagtggcacaatctcagctcaccacaacctccacatcccaggtacaagtgatttttctgcctcagcctcccaagtagctgggactaaaggtgcccaccaccacatctggctaatttttgtattattattagtagtagtagagatggggtttcaccatcttggccaggctggtctcgaactcctgacctcaagagatctgcctgccttggcctcccaaagtgctgggaatacaggcttaagacaccacacctggccaggtcaattctttatggtcaaaaaattaatgaatctagaatggaagctgtacatagcaatggccatgtaggccccagatagcttctctccaattttggacaagtgtagtcatttttctttaaaccataaccacaattactgagatccaagtctatgttttacagtgctcgctgacagtcctattctataccctcccctctcttgagttctttattgctggattatgtcttcaagtacatatttttcttctaggaagggaactgggtgcagtattctttggacccttacatatctgacaatagccttcgcacataggtggcaatttggctggtttgtgtttccattgtaggaccgtactgaataattttgttgccgtaaaaatcctctgtgatttgcccattcatctcgctctccctcctaacctctggcaaccactgatctgtttactgtttccatagttttgccttttccagaatgttatatagttgcagtcatatagcatgtagccttttcagactggcttctttcacttaataata

SEQ ID NO: 78842 - DNA, 948 bp, Homo sapiens
aatcttaagtatacagcttaatgaatttttacatatggatatgctcatgtaaccacctttatatcaagttatcacctgaatggcttagctcaattcttttttgtttgttttttgttttgagatagagactctcttcattgcccaggctggagtgcagtggcacaatctcagctcaccacaacctccacatcccaggtacaagtgatttttctgcctcagcctcccaagtagctgggactaaaggtgcccrccaccacatctggctaatttttgtattattattagtagtagtagagatggggtttcaccatcttggccaggctggtctcgaactcctgacctcaagagatctgcctgccttggcctcccaaagtgctgggaatacaggcttaagacaccacacctggccaggtcaattctttatggtcaaaaaattaatgaatctagaatggaagctgtacatagcaatggccatgtaggccccagatagcttctctccaattttggacaagtgtagtcatttttctttaaaccataaccacaattactgagatccaagtctatgttttacagtgctcgctgacagtcctattctataccctcccctctcttgagttctttattgctggattatgtcttcaagtacatatttttcttctaggaagggaactgggtgcagtattctttggacccttacatatctgacaatagccttcgcacataggtggcaatttggctggtttgtgtttccattgtaggaccgtactgaataattttgttgccgtaaaaatcctctgtgatttgcccattcatctcgctctccctcctaacctctggcaaccactgatctgtttactgtttccatagttttgccttttccagaatgttatatagttgcagtcatatagcatgtagccttttcagactggcttctttcacttaataata

SEQ ID NO: 78843 - DNA, 948 bp, Homo sapiens
aatcttaagtatacagcttaatgaatttttacatatggatatgctcatgtaaccacctttatatcaagttatcacctgaatggcttagctcaattcttttttgtttgttttttgttttgagatagagactctcttcattgcccaggctggagtgcagtggcacaatctcagctcaccacaacctccacatcccaggtacaagtgatttttctgcctcagcctcccaagtagctgggactaaaggtgcccaccaccacatctggctaatttttgtattattaktagtagtagtagagatggggtttcaccatcttggccaggctggtctcgaactcctgacctcaagagatctgcctgccttggcctcccaaagtgctgggaatacaggcttaagacaccacacctggccaggtcaattctttatggtcaaaaaattaatgaatctagaatggaagctgtacatagcaatggccatgtaggccccagatagcttctctccaattttggacaagtgtagtcatttttctttaaaccataaccacaattactgagatccaagtctatgttttacagtgctcgctgacagtcctattctataccctcccctctcttgagttctttattgctggattatgtcttcaagtacatatttttcttctaggaagggaactgggtgcagtattctttggacccttacatatctgacaatagccttcgcacataggtggcaatttggctggtttgtgtttccattgtaggaccgtactgaataattttgttgccgtaaaaatcctctgtgatttgcccattcatctcgctctccctcctaacctctggcaaccactgatctgtttactgtttccatagttttgccttttccagaatgttatatagttgcagtcatatagcatgtagccttttcagactggcttctttcacttaataata

SEQ ID NO: 78844 - DNA, 948 bp, Homo sapiens
aatcttaagtatacagcttaatgaatttttacatatggatatgctcatgtaaccacctttatatcaagttatcacctgaatggcttagctcaattcttttttgtttgttttttgttttgagatagagactctcttcattgcccaggctggagtgcagtggcacaatctcagctcaccacaacctccacatcccaggtacaagtgatttttctgcctcagcctcccaagtagctgggactaaaggtgcccaccaccacatctggctaatttttgtattattattagtagtagtagagatggggtttcaccatcttggccaggctggtctygaactcctgacctcaagagatctgcctgccttggcctcccaaagtgctgggaatacaggcttaagacaccacacctggccaggtcaattctttatggtcaaaaaattaatgaatctagaatggaagctgtacatagcaatggccatgtaggccccagatagcttctctccaattttggacaagtgtagtcatttttctttaaaccataaccacaattactgagatccaagtctatgttttacagtgctcgctgacagtcctattctataccctcccctctcttgagttctttattgctggattatgtcttcaagtacatatttttcttctaggaagggaactgggtgcagtattctttggacccttacatatctgacaatagccttcgcacataggtggcaatttggctggtttgtgtttccattgtaggaccgtactgaataattttgttgccgtaaaaatcctctgtgatttgcccattcatctcgctctccctcctaacctctggcaaccactgatctgtttactgtttccatagttttgccttttccagaatgttatatagttgcagtcatatagcatgtagccttttcagactggcttctttcacttaataata

SEQ ID NO: 78845 - DNA, 551 bp, Homo sapiens
  misc_feature (1)...(551): n = A,T,C or G
tcctcccaagagaggagatgatttcccttccctttcatcttggctgatcttgwgacttgatttaaccaatagaattagtggaactaatgttttagaagacttctgatcctggatttggcactttctactttctcacttgggggatccagctgccatataaagaaactcaagtcacatgacagaaagggggtcccaaaattctctagctaccaggtgccagatgtgcacgtgaagccttctgagacattccagccacagcccagttctcaactgctaccaccccttggagcaggccatggggagcagaattgcaaatgaccctgtcctaattctttcccacagaattgtgagcaaacaaaatggtatgttttaagccactacattttagggccactcattacatcacaataggtaacttgacacacctttatatctttcctagttccctttnnnnnnnnnnnnnnnnnnnnnnnnnnnnnnnnnnnnnnnnnnnnnnnnnnnnnnnnnnnnnnnnnnnnnnnnnnnnnnnnnnnnnnnnnnnnnnnnnnnnt

SEQ ID NO: 78846 - DNA, 551 bp, Homo sapiens
  misc_feature (1)...(551): n = A,T,C or G
tcctcccaagagaggagatgatttcccttccctttcatcttggctgatcttgagacttgatttaaccaatagaattagtggaactaatgttttagaagacttctgatcctggatttggcactttctactttctcacttgggggatccagctgccatataaagaaactcaagtcacatgacagaaagggggtcccaaaattctctagctaccaggtgccagatgtgcacgtgaagccwtctgagacattccagccacagcccagttctcaactgctaccaccccttggagcaggccatggggagcagaattgcaaatgaccctgtcctaattctttcccacagaattgtgagcaaacaaaatggtatgttttaagccactacattttagggccactcattacatcacaataggtaacttgacacacctttatatctttcctagttccctttnnnnnnnnnnnnnnnnnnnnnnnnnnnnnnnnnnnnnnnnnnnnnnnnnnnnnnnnnnnnnnnnnnnnnnnnnnnnnnnnnnnnnnnnnnnnnnnnnnnnt

SEQ ID NO: 78847 - DNA, 330 bp, Homo sapiens
agctgaattgtatgctgaatagattatttgtaggcataactcttccatactgatttaaatcacaagttctttgtctctctgttttggcttgaggaacagagattcataattgcctactaatatttatctttaccctttcttttctttytttttttttttgagacggagtcttgctcagttgcccaggctggagtgcagtgcgtgtgagcgatctcggctcactgcaagctctgcctcctgggttcacgccattctcctgcctcagcctcccgagtagctgggactacaggcacccaccaccacgcccggctaagtttttttttttttttt

SEQ ID NO: 78848 - DNA, 752 bp, Homo sapiens
aagcttctcttctttctgtaaactcaagacaatatataagcttctgaaccacactgggggagcagggagtatggataattactctgtggttcttccccatgtgcatgttaataaatttctgtgcctcttctcttatcaatctgcctttgtagttgatttctcagcaaacattcagggtacaaaaakaaagtttttcccttggcccctatggtagcaatagaatctagccaatgtttttaaaaatcaaaaaagagtgaatattaattgctcatgccttagaccagagatttactgctggttagtcgctaaaggattttccgctcttcaaaacattttctcttttccattttattcaggaagccaagggaaataagaaaataaaattattaagggcctatttatcactagttgtgaaaattgggtagggtcctgcagtgagtgtgaaagcaaggaaaagattcagattctattcagagtcttagtgagttgagctagtcttactgtcctctaattagaaccatataaatcacctatttatgaaaaaccaaccaactaatagacattccacacctgctcatgaaaacctagtggattcatgggtgaacaacataaaacaacaatgcagtatttctgtgtttttaaaatacctctcccattgttagcagtggtaaatttgtatgggtctgcaacaacctcaattcttgcatccttagaagaaataattcgaccgagggggcataaggcaaagtgag

SEQ ID NO: 78849 - DNA, 1055 bp, Homo sapiens
tggcagctcatttcctaaagtggcgcaacagtggctacttcttgggtggaggaggggtatgcagccacgtcttcctktctggaattccccagcaggaatagctgttggttacctcagtggctaaagatttcagtgtcatctgaggagcaggccactggcaaacacagtgattccagcactgtagcccttactgatagcccctgcctttgtcctttcttctttgctcctgtctctgttttgttgttttgtttgttttatctactgtgttgctgcagaccttttaataggcccttgtaccctctctgggttattttggtttgtgaatagctgtctatatttgtgtttttgtagggccataaaggctggtatctcctactccaccatcttggtgatgccactgtctagattttcatatatatatatatatatacttttaaagagtcatttgcatttctctaattgttcctcttcctgctttgaagcatacactatcttttactatatctctgaatattctaattttatagctttttcttgaaagttattttctactctttagttgtttatgactacaccagaatcagtttcttcaattcagacactgtcttttctgttgcgagtgtttaaactgaagtgatgaatcctggtgttgactcacttactagaatgaataattaggtggaatttcacaataatattaaagggagtgtccttttctgcattatacataaaaaaatgtttcaccaaaacttcttctccttgggagggaaactgtataaggacaaaaccagggtgtgatagccctgctgttttatttgaatgtatccaggcagggagctgttttaactgctccactcccacaaagtaagaattctaagtgttaggtaaatatgagatattttatatagcaggcattgtgtatagaaagccttcattagcccttctttttcagttccatacctcatttgtcacctatatcctcaacatcaacctaagcatcctataagacttgagcaaagaatattcactaccccttccattgcttccattgccac

SEQ ID NO: 78850 - DNA, 1055 bp, Homo sapiens
tggcagctcatttcctaaagtggcgcaacagtggctacttcttgggtggaggaggggtatgcagccacgtcttcctttctggaattccccagcaggaatagctgttggttacctcagtggctaaagatttcagtgtcatctgaggagcaggccactggcaaacacagtgattccagcactgtagcccttactgatagcccctgcctttstcctttcttctttgctcctgtctctgttttgttgttttgtttgttttatctactgtgttgctgcagaccttttaataggcccttgtaccctctctgggttattttggtttgtgaatagctgtctatatttgtgtttttgtagggccataaaggctggtatctcctactccaccatcttggtgatgccactgtctagattttcatatatatatatatatatacttttaaagagtcatttgcatttctctaattgttcctcttcctgctttgaagcatacactatcttttactatatctctgaatattctaattttatagctttttcttgaaagttattttctactctttagttgtttatgactacaccagaatcagtttcttcaattcagacactgtcttttctgttgcgagtgtttaaactgaagtgatgaatcctggtgttgactcacttactagaatgaataattaggtggaatttcacaataatattaaagggagtgtccttttctgcattatacataaaaaaatgtttcaccaaaacttcttctccttgggagggaaactgtataaggacaaaaccagggtgtgatagccctgctgttttatttgaatgtatccaggcagggagctgttttaactgctccactcccacaaagtaagaattctaagtgttaggtaaatatgagatattttatatagcaggcattgtgtatagaaagccttcattagcccttctttttcagttccatacctcatttgtcacctatatcctcaacatcaacctaagcatcctataagacttgagcaaagaatattcactaccccttccattgcttccattgccac

SEQ ID NO: 78851 - DNA, 872 bp, Homo sapiens
cttcccactatcatttttacttggaaatcaatatggctaactcttaataaaaatttttaacgttaaattagattaaatatggaaaaataccggtcattattttcttattgacagatactatttttgtcagcttcctagtaatggttgatatagatcttacatttaatatataacctactatttttagaatttaaaatgtgtcatatttcacttataaaattatgaatcactggattaaaattttatgtcaraagagtactttctgaaatattcactgagtcatacacattgacagattaatacattatgcttcattttaaaagacgaaaggaaaattagaaagaaaagacaaaggccaggaatggtggctcacgcctgtaatcacagcactttcggaagccgaggcaggtggatcacctgaggtcaggagttcaagatcagcctggccaacacggtgaaaccctatctctactaaaaatacaaaaaagtagcagggcctggtgatggatgcctgtaatcccagctactcaggaggctgaagcaggtgaataccttgaaccagaggggcagaggctgcagtgaactgagatcacaccactgcactccagcctgggcaacaagagtgaaactccatctcaaaaaataaataaataaatacatacatacatacatacatacatacatatatacatacatacatacataaaaagacagagttaatttatagttttaaccaagcaaaatttgaaaaagatctaattgggacagaaacttctgattcattttcagtattcattgtgtctttctttttttggtgaaaagatatcaacccatttctccaacatgttttaggacaagatggctgcacaagg

SEQ ID NO: 78852 - DNA, 766 bp, Homo sapiens
ccaatctgttccatcctttacctgttacccagttccaaagtcactgccacattttcaggtatctttatagaagcacatcacccttttagttccaatttactgtattagtctgatctcgtgttgctatgcagaaatacccgagactgggtaatttaaagggaaagaattttaatggactcacagttccacattgctggggaggcttcatgaaatttacaataatggtggaagggaaagcaaacacatccttcttcacatggaggcaggaaagagaagtgccaagtgatggaggagttcccttataaaatcatcagatcttgtgagaacttactcactatcatgagaacagcatgtgggaaactgtcgctatgattcaattatctccacctagtcccacccttgacacatgggaattattacaacttaaggtgagatttgggtggggacacagagcccaaatcacaatgactagtctaggatatgactgattattctatcacaatctggattaycccagtctgtaagtcctagactttcctaaaactgtctttcctagtaataccagaaaagtcatttgtcaagttggacataataggccacaagaccatatctgtgaacaaaacacgaggaatcctgttatcctagttcattttctttatgacatgcaatgccacatgaggctttaattttcatagtcttcttgggactttcaggagttgatcccccttggaatggaaaatttaccaaagtagcacacttccatgca

SEQ ID NO: 78853 - DNA, 865 bp, Homo sapiens
gggtttcactgcattagccaggatggtctcgatctcctgacctcatgatccacccgcctcaacctcccaaagtgctgggattacagacgtgagccaccgtgcctggcactttttttttccctttttaaggaacagaaagtagacagacacctgttggtaaatgctaactgtccatattcacatagacacaagtttattctctaaacccagaagaagctgctggaggctcagagtcatttccacaaggtggagaacaacttcctgaccttctccaaaaaggcttctgccttcaacagctggtttgaaaacacagaggaggacctgctgcaactccctggaagaaatcaaagtgatgcactttgatatacasggagaggagagcttctggagagacacttggctgcaggttttaaaggaagtggctggtcccctcagccaaccaacactcttccctacctttaaattccttcacccttctggctcttctttacctaacagtttgtgacaatccttatatctctgttttccctagcttaacttttcccacaagcttaatggactgccgaaggtcacctagtctagtctgtcactaattatgtgctggagaaaaagggatgatttgagcagtaagtctgtcagactctagacagctccccaaagggagaagagtcccagatttatcccaagacgtaggagggacattggagactaactgggactccctagatggccccacacacctgtctggaggtcatttaggcaactgacacaggtgggcccagcagcggccaacacttaagggtgaggggtggtcagcacagaggctcatgcctgcaatccagcactttgggacactgaggtagga

SEQ ID NO: 78854 - DNA, 506 bp, Homo sapiens
acttgcataaagcctgtgagccaacacgtcatattacagatccaggaccctgacgtgatccaggattatattctttttcttccaaaccatgttgtggtgccatccgtaaatagagcaggaataactgtgagaagcttgtatgagctatttctatcactgaatctgaaaatagcatgatcgaagtgacctacaaactatctataagcctggctctggctggattccaaacatcagggcataaggcagagagaaatgacaccaggcagtgagagtgagcctggccagagaggctgygggctgagtaacccactgctttccatcctcttattgttgtagtcatttaggaaactcccagagagagaggctgttggagatgatgcacacttttaaattaccagttcatttccgaagctggtgtgttctctctctctcgcctcttgcctttcgccttttccacctttcctacatgtattaccatggtactcaagtcctgtaagggtggatca

SEQ ID NO: 78855 - DNA, 730 bp, Homo sapiens
tgcatccctgaggcctcagccctatcccagtgctctggaatctgtcttaccacctatgagcctatatgccaagtgccaggggagaaccttggcttctcaaatccacagatacctcaatgcacatgattctctactcttccaatgtgtgtggctgaacttctgcctctcttaccctagtcaggaatttaattcccaccacaactagttgtgtgcccagatcctcaacttgctggcttccccctggtgctctcaattcttgtgggctttgcagttgtgtgttgcttcctgcaaaccacaacaatgactggaattatgctattgccaaacatcccaggtatttgatgggttggactctcctctctgcctgctcagtgcacagagcccactgagtggagccagaacttggcatgctggtgagaacaacactgaacctcccctacccagcccctgtgatggttaatactgagtgtcaacttgactggatgaaaggatgcaaagtattgtccctgggkgtgtctgtgagggtgttgccaaaggagattaacatttgcatcagtggatcgggaaaggcatacccacctttaatctgggtggggacaactctgccagctcagcctgaataaaaatatgcggtaggatgcaaaaagcctagactggtttagcctcccagcctacatctttctcccgtgctggatacttcctgcccttgaacatctgactccaagttctt

SEQ ID NO: 78856 - DNA, 724 bp, Homo sapiens
accttcaggaccacatgatttgctgggtctccttcccagtatgttgtgatgctaccaacatacttccagtgcccttaagaaatggcactcagttcctcctacttgaggctgcttcatggaaagatccacaggccacttaayacactgtggcaactctcataagggcatctgagttgaagggcttgtggatatttctgtcttcattaaagactttccctgggctccttttatcctttttgttgacaccagagtttggaccatctctggagcacatagatgtgctggatgcttgtcgtctctttgcaagatgagatgcaagaacactttcctgcaggaaggagaaagcagagggtcttttggaggcaaaggactctctagcgatgctctgaggcattccatgtagtgacttcctcttgcagatggatttcccctttgacagcctgagagtgtgtcttacttgcggggaacaagcatagaaaaggagatgcaagtctgcttcgttctcccataggaatctacagcttttgagcctatttcgttgtgtctgcctctcatatcttctttgttggaagtgaaaggaaagaggaacctcatgactatttattgaacagataactgttgaaagaactaaaattgatagtaaagatgaaaatacagtacaattggagaaatggctgatactaggattagggcaaggaataatacataatgagcctgtgacgtt

SEQ ID NO: 78857 - DNA, 724 bp, Homo sapiens
accttcaggaccacatgatttgctgggtctccttcccagtatgttgtgatgctaccaacatacttccagtgcccttaagaaatggcactcagttcctcctacttgaggctgcttcatggaaagatccacaggccacttaacacactgtggcaactctcataagggcatctgagttgaagggcttgtggatatttctgtcttcattaaagactttccctgggctccttttatcctttttgttgacaccagagtttggaccatctctggagcayatagatgtgctggatgcttgtcgtctctttgcaagatgagatgcaagaacactttcctgcaggaaggagaaagcagagggtcttttggaggcaaaggactctctagcgatgctctgaggcattccatgtagtgacttcctcttgcagatggatttcccctttgacagcctgagagtgtgtcttacttgcggggaacaagcatagaaaaggagatgcaagtctgcttcgttctcccataggaatctacagcttttgagcctatttcgttgtgtctgcctctcatatcttctttgttggaagtgaaaggaaagaggaacctcatgactatttattgaacagataactgttgaaagaactaaaattgatagtaaagatgaaaatacagtacaattggagaaatggctgatactaggattagggcaaggaataatacataatgagcctgtgacgtt

SEQ ID NO: 78858 - DNA, 2250 bp, Homo sapiens
ctatgagggcatagtgaatggattaatgctattatcaagggagtggattctttatagcaggagtgagttcattataaaaggatgagtttggcccccttttactcacttgccttctctttgcctttccactgtggggccatgtaacaagaaggcccttgttagatgccagcaccctgatcttggactttctaggccctagaaccatgagcaataaatgtctgctcttcatataaattacccagtcagcggtattccattacagcagcacaaaatagactaagacaccatgtctatttagtccctattccatcactgtgcgtgtgtgtctgtgtgtgtgtgtgtgagagagagagagagagagagaagagagatcgcgagtgagagagatctggggagaataccttatctttttagttgtctataacaagagaagctttatccagttccaatatggagactaccaaccatcacccagagatgccagactttgagattaatgcctttactgaacagaacttttggattgtctcactttgtgataggagtaaatctattttgtagtgtgaagaaagtgaactgtaaactggtgactagaaggatagatcacagtaatccttgatactatttaccaataaattctggttatcttctttttgcacatataataggatcgcacttccctgctccctttaagatagatacgcccgaataattcgctttggtcaatgaaatgtgagaactgacttgtatcacttttaggaagaaccagttcgccattcttcatcttccttttgcctatcacccaaggggggacgttgcagagattccagcctctttaaggatccagttgcttagtgagaccacatggaatgaagccccctcctcctgccacccagagatgaacatgtagataatcaggaaatagttttttgttgttgttttaagccactaagattcttggatcatttattactgcaccataatttttcccatcctaactaatgtagattactataaaagtgatcaggaaaactgcaaaggctgatcatcgtggcaattgtgagtggaagtggttaactaaaaccatccactgacaattccaaaatcaccttcactagtgatttcacctgcactccaattgtgaccgttctagaaaaggtgattatgcgttcaaactttattatttttaacttatgaagatgcaaaattacatcttcactactgaagtcataatgagcaaagaaatactttctcataggaagaaaaagaaggtggataaggataagccacaaaacagggaaggtggtactgaattcagagtttatgagatttccaagaagaattaaacatatttcccacagacttgtgaataaatttccagaaatacacagtacttcttagcaaacgttgggtagcttagcttcggcttgataaactgcacttatacggaaacaaacgcacaatcgctctggtgcaaaagtaaaaactgtgattggagtctgtatttaaacgtaagattcctctctagctctctctgaagaagttwttttctctagcacgtggtagaattcattccattaacctttgtaaagtgcttaatcccgtgtcacgcactgtactagggtctagcgagtgacagatgtcacggtacagagatctcagtgggtcgctgccctccaggagcttataaagaaaattttccttctgcagttttcagccggctacacccagtcccctgcaagtaattttcagtgaaaaaaacccgcatctttttcctagtccttgcaaatattctggctttccgagatctcttcgccttgaataccgaagtcactccgggatctctctctggacgtttggcagttattccagatgtagccgaatgaccggcttgccctttccctgcggagtgacaggaagacagcgaccccggaaagtttccagcacttaaaacgcaaagcgcagcctgaacccacaaggagccgacaactcttgcggcttccaccacccttctatcgcggagcctaaggaagctaaagcagtcgggtcagacccggccaccgggcagcgcatggttccgggcgcagggagcgacagactcagccccccagcggcgcggcgcagagaagttgcaggccagcctgcatacccaagtgcgggggggaagaaaaacaaacaaacaaaaaaaatcctttcttctggactacaatgaccggcaagcaacgcgccacggcgccaagttcagcttcg

SEQ ID NO: 78859 - DNA, 588 bp, Homo sapiens
ttgtaatttaactctcactgtccgtggtcaaacatgctttaccacaggtcttccactaacattgttttgttcaacgttgttttgtcataatgttgataagaaaataaaaaaaataataataataaaaaaatggctttctagccagagccactgtctgtgtggacgctgcattttctccttacatcctcatgggttttctcctaggattctggtttcctgccacatcccaaagctgtgtatgtttggttcactggtgtgtgtacattgtcccagtgtgagtgagtgtgggtgactgtgaatcaccctgctgtgggatgataccctggactgaaataagcaggtaaataattatcttacttgttttgattaatcccttttaaatgtatgtatatagcacacatgtatttcaatgtttcatattagaagtattttggtgtttgtttgtttgtttagaagtttggtaatgtttttgtgaccaggaactttagtccatatcaattaacctatgggaaaattggtttctttatagycattttgcttgaagtctcagtttccaagaactgaccggcaatgttgagtgagcactta

SEQ ID NO: 78860 - DNA, 2026 bp, Homo sapiens
gcatttggctcagggctgggccagtttctttcagtgttttggacaacaacctagatggctttattggtgcctgggaatattcagggcctagtatgggatccagcctgctaggaaaacatcagcttgctgtgccactctgtgatttttttaaagcactgtacgatttttttttttttttatctcaggacacagaaggaaagtgaccttacaggggagagattcacagaattagttacaactttcctttatcacttaacattggagttcatactgctatattgatattctattgaaactaaatattgaagtcacatggtcatgatgaatagcaaacatttatacatcacctactatgtcagaatatttcaaatatttttctattttaacttatttaattctctccataagcctaaagttgggttcttttactaccagcattttacggataagaaaactaagacacagaaaggttaagtaaaattcctaatgttaaacagccggttagtcttcgactcaagtatttatccaagtatactatctctaaattccacataatccactactatcgaactgcctctaatgtaatcaaaatcatattatgagwgcaaggcatctaaaaactagtctgtttcagcagggcgtggtggctcacacctgtaatcccaggactttgggagactcaggtgggcagatcaattgaggtcaggagtacaagaccagcctggccaacatggtgaaaccccatctctactaaaaatacaaaaattagccaggtgtggtggcaggtgcctgtagtcccagctcctcgggaggccgaagcaggagaattgcttgaatctgttaggcggaggttgcagtgagccgagatcttgccactgccctccatactgggcgacacagtgagactctgtctcaaaaacaaacaaacaaacaaacaaacagaccagtctatttcaagttccttaccatacggttgaggtacaaaattaaatagcaagctaatgaagataggtacagtgtagcaataccattattttttttaacaccaatcttctgactctttttacaatgtccttttgattgattattttagaaacttttatcttcctttgttttaattccagggaacctttctttaaattgaatctcctgtggaatctgctgcataaaactgaaaagtcccactgagctgaagtgggaattcagagctttgcttgctccccaccacctgttcttgtcttgtttgacatctctgtgctatttcatgcatctctttttagagttacatttcccttagcatctgtgacacaagacccctctaattctcatgctacttcataatgtcttattttttaaccttatttaacagggggtggggacagggaactgcaaatcttcatctgctcacagtttaaatgtaaatatatgacaaattttctggtgacagtactgtatagataaaaatttgagaaaagcaagtagtgttcaacaagagacttgaaagataagaagtaatttcacaatgagaaggaaatggataatggattacctcagaagaaggaggaaagtaccggttaattcaagttatgatattattgaattgaaaaagtgcagacagaaaatgtatcttttgagttaaatagcatatacctttcttattagttaaaatagtcttcactgtctttaacctaaagagttacagtgttcccagtgggatttaaagttactttttaatgagataaggaatcatagaacctaattaacttatcattaagaaaactagagagatttaaaaatatacataattcttggggcagggagagaaaggagaaacaatatattataccattcactcttggagtaggtacagtgtgaaaactagaaatagaatagaacaacatttatacacagcccttttccagtatgactttcccttattgggcatatttgaagtgggtatcattcagaatgtaatcaatagattaaaatttgggagatgatggtcaaagttattttttttcccttt

SEQ ID NO: 78861 - DNA, 644 bp, Homo sapiens
gcataattatacatttgccacacctttatctacagtttaaacagcagcctaaataaaattatagatttttaaagaaagtttatttcaattgagaaataattcaggttaaatacttgacttttttaagtacacaatttttctgtagattaaaaaaatcacagaaactaacacaattcttcattttttgtagctaatgcccaagagagtaaataagaatgctatttttttggtgtaggtgggcctaaaagactgagtttttctttgtaaaattttgaaaaagtccagtgaaatagtataaaatatatagtttctatatgaatgaactgctataagcagcattttattcaaccatttttacgaggattaaaatatttctgtgcattgaaatttgccttgtctataacttctaaacattatctctggttttctttattttttgtttctgtattttttttaatttgagacagagttttattctgtcacctaggctggagcgcaatgtggctcawtctcagctcactgcaacctccgcctcctgggtttaagggattctcatgcttcaaccttccaagtacctgggagtacaggtgcctgccaccacacccggctaacttctgtattttcagttgagacgaggatttgcc

SEQ ID NO: 78862 - DNA, 582 bp, Homo sapiens
ttcttatgggctaattactacctataattcaatagtcattattgtaatgactttattagttttagtcttctaattatatcattatttcaatatctttagaataaacagaccaagtaatgaaatttcagaaatgatttagtgatgtaagtgtgggatctaaacaaaaacaactttctaggaggtttcagatttgattataatcatctcctaacatggaaaggatgtagaaatcctttttctactcttttcttgtagggattaagtatcrttgattcttaagaaggatattgaaaaaaggcaataagaaatacaataacatccctatagacagtgagagcataccagaaagacatacccacaaaatagatcaactgattagatgagtgagggccacccacattatggaggggaatctacttcacttaaattccactgggttaaatttccatctcatccataaacaccttcacagaaatacccaaaataatatttggccaaatatctgggtactgtggcccagcaaagttgacacaaaattaatcaccacaatgatgaaatttttaaaaaactcctaaacaaatg

SEQ ID NO: 78863 - DNA, 582 bp, Homo sapiens
ttcttatgggctaattactacctataattcaatagtcattattgtaatgactttattagttttagtcttctaattatatcattatttcaatatctttagaataaacagaccaagtaatgaaatttcagaaatgatttagtgatgtaagtgtgggatctaaacaaaaacaactttctaggaggtttcagatttgattataatcatctcctaacatggaaaggatgtagaaatcctttttctactcttttcttgtagggattaagtatcgttgattcttaagaaggatattgaaaaaaggcaataagaaatacaataacatccctatagacagtgagagcataccagaaagayatacccacaaaatagatcaactgattagatgagtgagggccacccacattatggaggggaatctacttcacttaaattccactgggttaaatttccatctcatccataaacaccttcacagaaatacccaaaataatatttggccaaatatctgggtactgtggcccagcaaagttgacacaaaattaatcaccacaatgatgaaatttttaaaaaactcctaaacaaatg

SEQ ID NO: 78864 - DNA, 582 bp, Homo sapiens
ttcttatgggctaattactacctataattcaatagtcattattgtaatgactttattagttttagtcttctaattatatcattatttcaatatctttagaataaacagaccaagtaatgaaatttcagaaatgatttagtgatgtaagtgtgggatctaaacaaaaacaactttctaggaggtttcagatttgattataatcatctcctaacatggaaaggatgtagaaatcctttttctactcttttcttgtagggattaagtatcgttgattcttaagaaggatattgaaaaaaggcaataagaaatacaataacatccctatagacagtgagagcataccagaaagacatacccacaaaatagatcaactgattagatgagtgagggccacccacattatggaggggaatctacttcacttaaattccactgggttaaatttccatctcatccataaacaccttcacagaaatacccaaaataatatttggccaaatatctgggtactgtggcccagcaaagttgacacaaaattaatcaccacaatgatgaaatttttwaaaaactcctaaacaaatg

SEQ ID NO: 78865 - DNA, 926 bp, Homo sapiens
actgctgaagaaacccaaaccccagagtaagtgacttaccaaacttctctacttatttagtacaagttaagagaagcagtcaaacctcctccatcccagtcccagacctaagctttctctataaaaaggccggtggatttcacacatattttttaatagaatccttcttttcaaataaaatctgacattgatgctcaatatataaaacagatgataagaatgttacttatattgaggtcagaggaccaagaaattcagcctcatgattgcaactcctgagtgttcttgcaaaaggcctattgaaatattgtttgagaaccacagaactagcccaagtaaccatcccctctgaaccacgtaactagcccaggttatcatctcctcctctctattccaatattgctgagcacagctgctcaattgggatgccacagatgttttaaatttgtgytaaaatgttgaacccctcagccaccaggatggcccgagaagcctaaaccctctggggttgatctttacccagtaacagccttctctgtttactccaatgtgttatacaaatataatttatatgtacaaatggaattttcactgtagaaaatttagaagggcgcagaacacggaatgctattttcctcactagattcaaattaacatcagtgatatttcttgtaatgagctctcccttacctgaataagatcatcttttctacttttatttgttattgattgaatgaatctttccatttgtctaaagcagatgttctcaacaaagagagaggtttccataaaattcctacgtggccttttgtctgatgtccaattaattaatctcttggctgatattcattgagggtgatctcagttgccactatgtttttagtagttctttatattgcttctctagttgtttttatcacaccgat

SEQ ID NO: 78866 - DNA, 789 bp, Homo sapiens
tattttaaagaaaaattcagaaggtggatggttataagataaatatacaaaaaataacttttgtccattctagcaataaacaccttgaaattaaatatgaagaatagttaattgacaataatggcaaaacctgtaaaccacaaataaatttaataaaaaacactctcgatgtaaatgaactataaaatcttactgaaagacataaaatgtctgtttttaaaatttgtttttaaaaattgtattgcaatttttcattgtgttttttgggactatttcctatctgaacaaaaagaaaatcactactatgattttggatgcaaatattttacattatgaatatatcaatgctatataaatgataaattactatataaatataatggaaaagtaagcagttttttttgagtggataaaataatctaaaagtttctatggaggactaaattctagagaatagccacaaatatatgagagaccaagcctgctgagrggaaactgtcctggtctcagaccatactgttaaggcactgcagtaaaaccaataagatgtttgtataagactaggtaaacagtttagtggaacacaagagtctgaaattagatccaggagagagaatttaatatggcaaaaattgatggtttggtgggaaaataaacaaaaactgctcttttgattttgtttttgttttgtcttactttttctgctattcacaacttgaccatagagcgcatctcccgtgcttactttgtccttcattacttattgtccagttcacacagggatgtgct

SEQ ID NO: 78867 - DNA, 582 bp, Homo sapiens
gtcctgagaggtctttgtaatttagctactgtttctctagagctcaggcaaccaatrttcatgtcctaccctcatgcagggcttgggttttgcagtgaggcttttgctgctccaacttttcagcatctgacattcaagtccatcctgatcttaccaatgatactttgccttaatggattttgaccattttactctcagattttttttctttctagaccagagaggccccaaactagcagcctgtcctcctcagtagccccagcatcccttcatcattttgttgcccttctatgggcctagtttaggtctgagaggcatagttttaaaatttttattgttatttatttattctagagataaggtcttgctatgtttcccaggctggtcttgaactcctggcctcaagcaatcctcctgcagcagcctcccaaagtgctgggattacaggcatgagccaccacgtctggtcggacaggcatagttttacaaatatgtgggtggataaatgctgtccagtcttacttcatcacttctatcaattgaatgcttttggttggaaataacagaaaatccaactaaaag

SEQ ID NO: 78868 - DNA, 582 bp, Homo sapiens
gtcctgagaggtctttgtaatttagctactgtttctctagagctcaggcaaccaatgttcatgtcctaccctcatgcagggcttgggttttgcagtgaggcttttgctgctccaacttttcagcatctgacattcaagtccatcctgatcttaccaatgatactttgccttaatggattttgaccattttactctcagattttttttctttctagaccagagaggccccaaactagcagcctgtcctcctcagtagccccagcatcccttcatcattttgttgcccttctatgggcctagtttaggtctgagaggcatagttttaaaatttttattgttatttatttattctagagataaggtcttgctatgtttcccaggctggtcttgaactcctggcctcaagcaatcctcctgcagcagcctcccaaagtgctgggattacaggcatgagccaccacgtctggtcrgacaggcatagttttacaaatatgtgggtggataaatgctgtccagtcttacttcatcacttctatcaattgaatgcttttggttggaaataacagaaaatccaactaaaag

SEQ ID NO: 78869 - DNA, 518 bp, Homo sapiens
gcagtgttcctagcaatagatgatggtgactttaaacagggcgacgatggtggaggtggtcagatggcattagattctggacatgtatatttttaatatcttacaaaatgtttatgaaccttttgaaatacagaggaggtagtctttaaaaaattttcttttctcttgaaaataggttgtatttttctgactgttttgtttgttgagtaatcttggattgtatttttttttttaattaagacagagtctggctctgttgcacaggctggagtgcagtggcacgatctcggctcactgcaacatctgcctcccgggttcaagcgattctcctgccttagcctcccaagtagctgggattacaggtgcacaccaccacatctggctaatttttgtatttttagtagagacagcgtttcaccatgttggccaggctgrtctcgaactcctgacctcaggtgatccacccacttcagcctcccaaagtgctaggattacaggcgtgagccaccactctcagc

SEQ ID NO: 78870 - DNA, 1045 bp, Homo sapiens
gcatttctgtcctccctcttcgccttcccaccttcctttccactcattctcagccaaggaaacctaagcataaatctgccttcaatggcccacagaacaggtcatctcaacacatttgagaagacttggtggctggcctggtgaattgtttgggaatttttgagttatgagttcctgacatagacatatatatcaataaattatcaaacaagcaagaagtactcaggattgattgcttgcaggtatatttgtttataaacaattagattcaacacaactacagaaagatattttcatcctcttctagcgaatgtaacaatgaagttttgtggatggagaagttcttgctccatataaaaatacaaaagttcaggccaggcacagtggctcatgcctgtaatcctagcactttgggaggcctcggcaggaggatcacctatgatcaggagttcaagaccagcctggccagcatggcaaaaccccgtctctactaaaaatacaaaaattagccggaaatggtggtgtgcacatgtaatctcagggaacaacctactcaggaggctgaggcaggagaatgatgtgaacccatgaggctgaggttgcagtgagctgagactgcccactgcactccaccccggcaacagagtgagactctgtctcaaagacaaaacagaacaaaacaaaacaaaacaaaaaaaagctcagtgcatcacagcaatatgttcttctgaacaggattcctgggtttgtattatttatgaaaataatctgctgctctcagttcacttgtaaagttgactgaccagtggccatgagaaaaatatttacatacagaatttcaagactgagtttcttttgtggaarataagtgagtgttgttgaatatcagagaccaaaaacaacagatgaattacgtggcacatacagttgagatggtaaatatccaaggaattgggattatgtggtgaaacctaaaggctcttctggccaatctcttcctctcacctccatagtcttcttaacagaacttggtaacttaaataac

SEQ ID NO: 78871 - DNA, 1045 bp, Homo sapiens
gcatttctgtcctccctcttcgccttcccaccttcctttccactcattctcagccaaggaaacctaagcataaatctgccttcaatggcccacagaacaggtcatctcaacacatttgagaagacttggtggctggcctggtgaattgtttgggaatttttgagttatgagttcctgacatagacatatatatcaataaattatcaaacaagcaagaagtactcaggattgattgcttgcaggtatatttgtttataaacaattagattcaacacaactacagaaagatattttcatcctcttctagcgaatgtaacaatgaagttttgtggatggagaagttcttgctccatataaaaatacaaaagttcaggccaggcacagtggctcatgcctgtaatcctagcactttgggaggcctcggcaggaggatcacctatgatcaggagttcaagaccagcctggccagcatggcaaaaccccgtctctactaaaaatacaaaaattagccggaaatggtggtgtgcacatgtaatctcagggaacaacctactcaggaggctgaggcaggagaatgatgtgaacccatgaggctgaggttgcagtgagctgagactgcccactgcactccaccccggcaacagagtgagactctgtctcaaagacaaaacagaacaaaacaaaacaaaacaaaaaaaagctcagtgcatcacagcaatatgttcttctgaacaggattcctgggtttgtattatttatgaaaataatctgctgctctcagttcacttgtaaagttgactgaccagtggccatgagaaaaatatttacatacagaatttcaagactgagtttcttttgtggaagataagtgrgtgttgttgaatatcagagaccaaaaacaacagatgaattacgtggcacatacagttgagatggtaaatatccaaggaattgggattatgtggtgaaacctaaaggctcttctggccaatctcttcctctcacctccatagtcttcttaacagaacttggtaacttaaataac

SEQ ID NO: 78872 - DNA, 538 bp, Homo sapiens
agaactcgcctccctcctcgccagcctcctctcacctcccactctcccctccccaccgcctcctccacacacacttcaagctttatttcacccacttaatgcactctgctctgtgctcaggtacttaaaatctcccattactatcagtctggctcttttacggctttttttatttgctctatcatttcacagtccagttgttctttttggtcaggtggactataaaatrctccgataacaagttcacactaggagccgatggcggcctcaatctgtaatgaccacagacccttctgttactggtgtgtcccaaatcaacacattcaccatgctgcccaccctgttcctaccccaagaacagattttccttactcttctgatggctgctccgagaagatctttcatcctcacgatttttcttttaaataatcaagcctttttcacccttgctccttaattacctgccttctctaagagtattttaatctattgctatggatttaatattatttctctctacattagcatccataaatat

SEQ ID NO: 78873 - DNA, 1120 bp, Homo sapiens
tggacgaaattcacccactttgcagtgcaaatggaggccctggagttgcaccatgtggtggcatgcctcactttctaaaccgccctgctagaggtagggtatgtgcagcccccatttcctggcctctaggacccgccttgcagctccttgcctccactgaccccatggtattaagggtccttcctggttcccagccctagagccctttgcacctgggatgaactctggattcctgcagctcctgagccactgcaccctttcccccagtcactttggttggcccagggtctttcatctggcttctcagttttccctactttgttgcagtttgttcctcccactaggatggaaggaagccccacccatttgcctcatctagctcttgctaaactccttccacagggtttgcatcctgcccggatcctccctggggcttatggtcagatattctggaaaaatgactgctccccaccagacgtctgatttgtctctgctggttcccgtcaccctggccagatactcaaagctcccagaatctgagctggggtggttgcccccccagccatgttgtttggggttgccagaaggttctctttaagaaacatctctctcccccaatgatgactgggcgcctttgaccgggcttctaactcattcaaggaagccagtgcacctccagccartctggtatgctgtcccatctctgacaagtgtcccttgagaaatatttcaggaaagaatttttttgatcactacaggcaatgatcaaagaaaactaattccactgtgtttgttacaacatcagtgaaagaagtcaagaatatagtctcagaaggagtataaagcatgcaataaaggccgatgcataattaatgaagagcatgtctctaacatagtgctcttcaaaaccaagcacacaatgtgtaattattcctcacatcatcacagggagtgggcagatgctagttgcctcttataaataaggaaatgggagaaaagccagactctctttccaaaggaaaccaccactagaaagtagaatgaataattctgaaagtcagttacgatgcagttaaaatgtcaatataaatctccatttcaaattttcactcatctgaaa

SEQ ID NO: 78874 - DNA, 938 bp, Homo sapiens
tttgtgagcttttctattgggtatagagctagaagtggaatcgctgggtcttaggggattgcacatggttagctccgacctctgctgctatttggtctctgtttttgtgctcagtttaacaaaaatttagtcagttaaatccactggtatttgtttggtccctcctgtattcagacaccttacataaactatcttactaaataccatggccctgaggtgtcagagctgttattgcccctagtttatagccaaagaacctgagcagcatcacactctctcagttgagaagtttcaccggtgaatctgtaaaatgctgaagctatcatatttaataaagctacttatcttctcaacaatttgagtttcactctgttttttttaaaacaggctttaaaacaggaatggactttatttatggatacaagaagaaattgctaagcactaaaagagtgagtgatgtgactgattcaagtcaacatatattattcttaagttgtcrtttaaattatggtgggtttttatgtctacagaagctggaataagaaatatcaaatacatcagatgtaatgagagtccatttattgattcgtttactcattagtatttctcaacaaatattcctgagcccctactcaggactagaatgtcagggctggagcacagttcaggtaaagtgataaagtaagatgggaaaatattacaaatgtcctagatgttgaaagctaagacgctacagcttccactgaaaccaaagcaaaaaactccaaagcattctgacaagtagcatcaaggaccatgtacaacaaagagctattagaacaaaagagggagttgggaaggcttctcagagataagatatttgggctgggttttgaaggataaataggagttctctagacagaggagcagaggaaagaactcatgaaaaaaaaacacaa

SEQ ID NO: 78875 - DNA, 938 bp, Homo sapiens
tttgtgagcttttctattgggtatagagctagaagtggaatcgctgggtcttaggggattgcacatggttagctccgacctctgctgctatttggtctctgtttttgtgctcagtttaacaaaaatttagtcagttaaatccactggtatttgtttggtccctcctgtattcagacaccttacataaactatcttactaaataccatggccctgaggtgtcagagctgttattgcccctagtttatagccaaagaacctgagcagcatcacactctctcagttgagaagtttcaccggtgaatctgtaaaatgctgaagctatcatatttaataaagctacttatcttctcaacaatttgagtttcactctgttttttttaaaacaggctttaaaacaggaatggactttatttatggatacaagaagaaattgctaagcactaaaagagtgagtgatgtgactgattcaagtcaacatatattattcttaagttgtcgtttaaattatgrtgggtttttatgtctacagaagctggaataagaaatatcaaatacatcagatgtaatgagagtccatttattgattcgtttactcattagtatttctcaacaaatattcctgagcccctactcaggactagaatgtcagggctggagcacagttcaggtaaagtgataaagtaagatgggaaaatattacaaatgtcctagatgttgaaagctaagacgctacagcttccactgaaaccaaagcaaaaaactccaaagcattctgacaagtagcatcaaggaccatgtacaacaaagagctattagaacaaaagagggagttgggaaggcttctcagagataagatatttgggctgggttttgaaggataaataggagttctctagacagaggagcagaggaaagaactcatgaaaaaaaaacacaa

SEQ ID NO: 78876 - DNA, 938 bp, Homo sapiens
tttgtgagcttttctattgggtatagagctagaagtggaatcgctgggtcttaggggattgcacatggttagctccgacctctgctgctatttggtctctgtttttgtgctcagtttaacaaaaatttagtcagttaaatccactggtatttgtttggtccctcctgtattcagacaccttacataaactatcttactaaataccatggccctgaggtgtcagagctgttattgcccctagtttatagccaaagaacctgagcagcatcacactctctcagttgagaagtttcaccggtgaatctgtaaaatgctgaagctatcatatttaataaagctacttatcttctcaacaatttgagtttcactctgttttttttaaaacaggctttaaaacaggaatggactttatttatggatacaagaagaaattgctaagcactaaaagagtgagtgatgtgactgattcaagtcaacatatattattcttaagttgtcgtttaaattatggtgggtttttatgtctacagaagctggaataagaaatatcaaatacatcagatgtaatgagagtccatttattgattcgtttactcattagtatttctcaacaaatattcctgagcccctactcaggactagaatgtcagggctggagcacagttcaggtaaagtgataaagtaagatgggmaaatattacaaatgtcctagatgttgaaagctaagacgctacagcttccactgaaaccaaagcaaaaaactccaaagcattctgacaagtagcatcaaggaccatgtacaacaaagagctattagaacaaaagagggagttgggaaggcttctcagagataagatatttgggctgggttttgaaggataaataggagttctctagacagaggagcagaggaaagaactcatgaaaaaaaaacacaa

SEQ ID NO: 78877 - DNA, 938 bp, Homo sapiens
tttgtgagcttttctattgggtatagagctagaagtggaatcgctgggtcttaggggattgcacatggttagctccgacctctgctgctatttggtctctgtttttgtgctcagtttaacaaaaatttagtcagttaaatccactggtatttgtttggtccctcctgtattcagacaccttacataaactatcttactaaataccatggccctgaggtgtcagagctgttattgcccctagtttatagccaaagaacctgagcagcatcacactctctcagttgagaagtttcaccggtgaatctgtaaaatgctgaagctatcatatttaataaagctacttatcttctcaacaatttgagtttcactctgttttttttaaaacaggctttaaaacaggaatggactttatttatggatacaagaagaaattgctaagcactaaaagagtgagtgatgtgactgattcaagtcaacatatattattcttaagttgtcgtttaaattatggtgggtttttatgtctacagaagctggaataagaaatatcaaatacatcagatgtaatgagagtccatttattgattcgtttactcattagtatttctcaacaaatattcctgagcccctactcaggactagaatgtcagggctggagcacagttcaggtaaagtgataaagtaagatgggaaaatattacaaatgtcctagatgttgaaagctaagacgctacagcttccactgaaaccaaagcaaaaaactccaaagcattctgacaagtagcatcaaggaccatgtacaayaaagagctattagaacaaaagagggagttgggaaggcttctcagagataagatatttgggctgggttttgaaggataaataggagttctctagacagaggagcagaggaaagaactcatgaaaaaaaaacacaa

SEQ ID NO: 78878 - DNA, 656 bp, Homo sapiens
actgcacatgtatcttttaaaaagtaaaaaaataaaaataactacatacttattgtcactaattcagtgtttaatcagcagctttaacttaaattttccaaaaccacactagtactgttcttccttcaacacctatctcctcccacatccttttacatcttattgatggaaactttattctgtattgctcagttgaaaacattatcatttttcttgaatgctgtttctcctgcagcataaattcaatctaagagtgaatttcatctgctctatttttctctrtttctaaatagtactgaccttttcttctcatccattttatttatttattttttgctgacgcatttaagaattcattaaagataccgtggcacttcattgtgaaatgcttcatcaaacatctcctaagaacaagggcattcatcatatgtaaccatgaaataaatatctgattcaggaaattgaatcttaattcaatggtgttatgtaacatacagtgcatatttcaactttcctaattgttccaataatattctttgttgctttttgctttgttttgtttttcaaattcaggatccataaaaaaagggaaaaaaatcatacctaagagtcaattgttgtgtctcatccaatcttttctcagactttatatcttg

SEQ ID NO: 78879 - DNA, 971 bp, Homo sapiens
ctcatgcctgtaatcccagcactataggaggctaaggcgggtggatcacctgaggtcaggagttcgagaccagcctggccaacatgaaaaaaccccgtctctaataaaaatacaaaaattagccaggtatggtggcacgtgcctgtaatcccagctactcctgggactgaggcaggagaatcgcttgaacccgggaggtggagattgcagggagccgagatcgtcccactgcactccagcctaggcgaaagagcaaaactccatctcaataataataataataatttatagcatccggagattaagtccgtattggctctacatccatcatgtgctgtcatgcaactagatatcttctctaattattgagacttgatgatgagtcttatggttcttttcaatccaggagccatctacagtcaatgtaatgtttatttaactcttatccttaaagggacttatgaattacagtctgaaaactttttttcctaggaggcactattctcctttttatgaatttgtgaatgcaaataaataygtttgttaatgggcactgttaattctgctaggtcacatccagtcaattgctagaaaatgagcatctattttctccctccaacagatccaaacctcttctctttcctaacaaagtaacctatcataatgattcttcagttttaaaatgtgttgtattttatcaccattgtgaactatagtctggtcagttttaggtgcttacattatatcaggagcaaactttataacatctttaccattatggagttcatattcttaagaagaaaacaaaggaatataaatatataatatatagtagtaactgataaaaatgaaaatgagcaaaaaaaaagtgattacaagcttcaggaatgcaatttttcaaagaacttaaaacaaaattatcacccgacccagaaatcccattattgggtatatactcaaaggaatataaa

SEQ ID NO: 78880 - DNA, 1222 bp, Homo sapiens
atgtactatgctaacaataacaacaaaaatgaagaaaatataaatacatataggtggatgtgtgcttatatgaatataagtgtatggggaaagttctggaaagatatactacaagcttctaaggggttacctctgaggaagggagtgaaattgggggagggagtcattaaatctcactgttacttttattttatttacgtccgaattgtttcacttatttgcaacaagaacatatatagatcacgcgtgtattttcaaaccaaaaagtgcttaaagccacaataacaaaatattggcgaaagggacaaggactgagtctctagggatggttctgagctctgctcatactcccaatgatgttgccaacctttctctcttctccagtgggatggcacggataaaaacagaacaacacaaaacagtatttccacttctttttcaaaaactttttcaaaaactamgttttctttttggtgttaccttttattgttctggtagattctgaagattttgcacatgagcagaagcatgaatttagtttttataattaacttttaactcttagaagtataacttgctagctctgctagaaaatccttttggctcccaaaagctgccttcattaggatttttagaagacaaaggctactacattctgcaatatctagaaattaccactggaaggcaacattcagaattagagaatatttaagatggaaagagttagatataatctagcccgattacctcactttgctatgaggaaacaagttcagggaagagaagtggcttgacaactgacccctgtcagaccgaaaccaaaactgagatttccttcctccttggccagtatccttcccataacacatcgccatcactctctttttgaaactttaaaaacttgcaagtctgggaggcatctaagcatgttctgatgtgagatagcacaaggcagggcatttaaaactcactcttggctatagcataaaattttagaaagttcttgtatgtcaacaggtcatattattttaataaccacagccaaagaaaacaggtgcagcttaaggtcatcccacaaaatctacttcaatcccatgtgctttttttcccttgttgtctgtctatctcttcctggttttgtgaaagtgttctctccttgtcccatgactgcctttgtatgatgtatctcgaggtgtgtctgtttccagacctctcagtagat

SEQ ID NO: 78881 - DNA, 2131 bp, Homo sapiens
actaccttttgcattacatgtttcatttgtgttatttttttctgtctcctatggggatttgaggggactcctaggcctataagcatagatctcaaagttaaagctaactccagtcttttcttaaactgagttaattactgacacagctggaatggcagcctcttgaggagttgggggtgctttcctgtaggatgaaatgagtaaccagtgaccagtgatgttaagtcctactctatgtcttggccagggactgtgtacattgagaactgaaacactgtcagtaatcatgatgaaggaatagaaagcccccatagcccgaaaatgacataattccacacgaagcctagcccaacctactagagtaataacaagggagaaagctggcttcctctactctcagtagccaattgaaggagattgttctcagtatcagaaatgtcttagacaattaggaggttgtcttagtcagcttgggttgccataacaaaataccatagaatgggtagcttaaacaacagacacttacttctcacagttctggaggctgggaagtccaagatcaaggtactggcagatttggtgtctggtgagggctctcttcctggcttgcagactgttgccttcttgcctggtgaggagagaaagagagagagagctcttcttataaggatactaataccatcatgggattgggaccccaccctcatgtcctcatttaaaccgaattacctcccaaaagctccatctctaaatatcatcacattggaagttagggcttcaacatatgaatttggaggggacacaaacatttaatccatataatagaaatgttagctttcaccaaccattgcctaataagtgatgcgtggaaggatgggaagaaagagtttcagtgttttcactcgtatatctggaatatagaaatatatctgtgatatttagagcttttagtgacatgaattaatgacaggaaaaacactgtcacctcaatctattccattttccttgtgctttgtgtatgaacaaatgcatacactttcttcagccattaagaggtgaaatacacattctaaactgtgtattagtatggatttgtcttgctttgacatattgtcctgttagtctccacgattgcattatgaattgatttattctgatagtacatcattttcagaatccattctcaattttcagtatatgaagcaaaaccttaggattatttcaaacagctttgaatgattctaagcttgctkgatcactttattctgttctttagaaaaatgtacagggtttagaaacacgtctattatagctcaactgatagagaaaaaaattattacaaccttttgagagtgttaataccatgtataccaacaatttaccatattgcaagaatctcaattagctcttttgagtgcattataaagaatttaatctgtattcgtctcttcaattaacttaccatttagttggaaaatgggttatacacatgaaacacctgaagaggcttctgcaccacactcgactatcccactaataatgtatgtacatgtgaaaagagcatacacatgatttagagctgcagtcatctcataaaaggagcccacttcagccagttgtttcctgtcactacctactcaggccccttttaacacccccgtctctgctcccataaccctcaatggtttcctaattttactgacgtatggcaagttctgactgagccaagagctgacagtgctgctgaggtgggagcagagctgagctggcctgagagaggggacacatgggaagagcctttagaatgaagtctaggtgagggaagtgaagagattacgtcagatggctggaggagttatctgggccaggtgatgaaggtcacaagcagtatattaatctccctgctctggaacttccgtagcagttagcctatgtgtgattccacagttaattgtaattggctttgtgtttttacattgaattctaaggtagttgaagatgttctacaaaacgaaagttagttattatgaaacagagataagactgatggtattcagaccaactggccagctattatctattagtatttacctaactcgatctaagaagcaagccctaggaataatccatt

SEQ ID NO: 78882 - DNA, 2131 bp, Homo sapiens
actaccttttgcattacatgtttcatttgtgttatttttttctgtctcctatggggatttgaggggactcctaggcctataagcatagatctcaaagttaaagctaactccagtcttttcttaaactgagttaattactgacacagctggaatggcagcctcttgaggagttgggggtgctttcctgtaggatgaaatgagtaaccagtgaccagtgatgttaagtcctactctatgtcttggccagggactgtgtacattgagaactgaaacactgtcagtaatcatgatgaaggaatagaaagcccccatagcccgaaaatgacataattccacacgaagcctagcccaacctactagagtaataacaagggagaaagctggcttcctctactctcagtagccaattgaaggagattgttctcagtatcagaaatgtcttagacaattaggaggttgtcttagtcagcttgggttgccataacaaaataccatagaatgggtagcttaaacaacagacacttacttctcacagttctggaggctgggaagtccaagatcaaggtactggcagatttggtgtctggtgagggctctcttcctggcttgcagactgttgccttcttgcctggtgaggagagaaagagagagagagctcttcttataaggatactaataccatcatgggattgggaccccaccctcatgtcctcatttaaaccgaattacctcccaaaagctccatctctaaatatcatcacattggaagttagggcttcaacatatgaatttggaggggacacaaacatttaatccatataatagaaatgttagctttcaccaaccattgcctaataagtgatgcgtggaaggatgggaagaaagagtttcagtgttttcactcgtatatctggaatatagaaatatatctgtgatatttagagcttttagtgacatgaattaatgacaggaaaaacactgtcacctcaatctattccattttccttgtgctttgtgtatgaacaaatgcatacactttcttcagccattaagaggtgaaatacacattctaaactgtgtattagtatggatttgtcttgctttgacatattgtcctgttagtctccacgattgcattatgaattgatttattctgatagtacatcattttcagaatccattctcaattttcagtatatgaagcaaaaccttaggattatttcaaacagctttgaatgattctaagcttgctggatcactttattctgttctttagaaaaatgtacagggtttagaaacacgtctattatagctcaactgatagagaaaaaaattattacaaccttttgagagtgttaataccatgtataccaacaatttaccatattgcaagaatctcarttagctcttttgagtgcattataaagaatttaatctgtattcgtctcttcaattaacttaccatttagttggaaaatgggttatacacatgaaacacctgaagaggcttctgcaccacactcgactatcccactaataatgtatgtacatgtgaaaagagcatacacatgatttagagctgcagtcatctcataaaaggagcccacttcagccagttgtttcctgtcactacctactcaggccccttttaacacccccgtctctgctcccataaccctcaatggtttcctaattttactgacgtatggcaagttctgactgagccaagagctgacagtgctgctgaggtgggagcagagctgagctggcctgagagaggggacacatgggaagagcctttagaatgaagtctaggtgagggaagtgaagagattacgtcagatggctggaggagttatctgggccaggtgatgaaggtcacaagcagtatattaatctccctgctctggaacttccgtagcagttagcctatgtgtgattccacagttaattgtaattggctttgtgtttttacattgaattctaaggtagttgaagatgttctacaaaacgaaagttagttattatgaaacagagataagactgatggtattcagaccaactggccagctattatctattagtatttacctaactcgatctaagaagcaagccctaggaataatccatt

SEQ ID NO: 78883 - DNA, 2131 bp, Homo sapiens
actaccttttgcattacatgtttcatttgtgttatttttttctgtctcctatggggatttgaggggactcctaggcctataagcatagatctcaaagttaaagctaactccagtcttttcttaaactgagttaattactgacacagctggaatggcagcctcttgaggagttgggggtgctttcctgtaggatgaaatgagtaaccagtgaccagtgatgttaagtcctactctatgtcttggccagggactgtgtacattgagaactgaaacactgtcagtaatcatgatgaaggaatagaaagcccccatagcccgaaaatgacataattccacacgaagcctagcccaacctactagagtaataacaagggagaaagctggcttcctctactctcagtagccaattgaaggagattgttctcagtatcagaaatgtcttagacaattaggaggttgtcttagtcagcttgggttgccataacaaaataccatagaatgggtagcttaaacaacagacacttacttctcacagttctggaggctgggaagtccaagatcaaggtactggcagatttggtgtctggtgagggctctcttcctggcttgcagactgttgccttcttgcctggtgaggagagaaagagagagagagctcttcttataaggatactaataccatcatgggattgggaccccaccctcatgtcctcatttaaaccgaattacctcccaaaagctccatctctaaatatcatcacattggaagttagggcttcaacatatgaatttggaggggacacaaacatttaatccatataatagaaatgttagctttcaccaaccattgcctaataagtgatgcgtggaaggatgggaagaaagagtttcagtgttttcactcgtatatctggaatatagaaatatatctgtgatatttagagcttttagtgacatgaattaatgacaggaaaaacactgtcacctcaatctattccattttccttgtgctttgtgtatgaacaaatgcatacactttcttcagccattaagaggtgaaatacacattctaaactgtgtattagtatggatttgtcttgctttgacatattgtcctgttagtctccacgattgcattatgaattgatttattctgatagtacatcattttcagaatccattctcaattttcagtatatgaagcaaaaccttaggattatttcaaacagctttgaatgattctaagcttgctggatcactttattctgttctttagaaaaatgtacagggtttagaaacacgtctattatagctcaactgatagagaaaaaaattattacaaccttttgagagtgttaataccatgtataccaacaatttaccatattgcaagaatctcaattagctcttttgagtgcattataaagaatttaatctgtattcgtctcttcaattaacttaccatttagttggaaaatgggktatacacatgaaacacctgaagaggcttctgcaccacactcgactatcccactaataatgtatgtacatgtgaaaagagcatacacatgatttagagctgcagtcatctcataaaaggagcccacttcagccagttgtttcctgtcactacctactcaggccccttttaacacccccgtctctgctcccataaccctcaatggtttcctaattttactgacgtatggcaagttctgactgagccaagagctgacagtgctgctgaggtgggagcagagctgagctggcctgagagaggggacacatgggaagagcctttagaatgaagtctaggtgagggaagtgaagagattacgtcagatggctggaggagttatctgggccaggtgatgaaggtcacaagcagtatattaatctccctgctctggaacttccgtagcagttagcctatgtgtgattccacagttaattgtaattggctttgtgtttttacattgaattctaaggtagttgaagatgttctacaaaacgaaagttagttattatgaaacagagataagactgatggtattcagaccaactggccagctattatctattagtatttacctaactcgatctaagaagcaagccctaggaataatccatt

SEQ ID NO: 78884 - DNA, 1011 bp, Homo sapiens
gggaataaataatacaacttcaacacattttttattggaaatttttaaaaattattttagagacagggtctcactctgttgcccaggctggtttcaaactcctgagctcaagcaatcctactgcctcggcctccccaagtgctgggattacaggcatgagacaccatgccaggccagattggagattttaatgaaacatattatamtacatatataaacttatggataaatttaatatggctaggttggccagttctcagcatggccaaatttaagccatttctttgaggctaagtaaatcattcaaaatgaaattttactgattcagatttgttgtgctgatcaaccatgacttgatgtattagtccattctcacactgctgtgaagaaatacacaaaactgggtaatttataaaggaaagaggtttaattgactcacagttctgcttttgctgggaaggcctcagaaaacttacaatcatggcagaaggcgaagcaaacatgtccttcttcacatggtggcaggagagagaagtgccaagcaaagggggaaaagccccttataaaaccatcagatcttatgagaactcattcactgtcataagaacagcatggggtaaccgcccccatgattcatttacctcccacaggtccatcccacaacacgtggggattatgggaactacaattcaagatgagatttgggtgggaacacacccaaaccgtatcacttgatcattcattaataaggtgagaaagccaatttgagtgcttactgaccagttctgtggcaatatacagaaatacactttttttgtaatctgctgctttgctggccttagaatggtgaccacaattaaagaaagaaaatcagattaatgagataattttccaaataccgtaacaaaataggacatatattttctatatgtagcactttcttggcccagatactcttcagtaactgttgggaaattgctataaaatacataaagaattggtcctattgta

SEQ ID NO: 78885 - DNA, 1011 bp, Homo sapiens
gggaataaataatacaacttcaacacattttttattggaaatttttaaaaattattttagagacagggtctcactctgttgcccaggctggtttcaaactcctgagctcaagcaatcctactgcctcggcctccccaagtgctgggattacaggcatgagacaccatgccaggccagattggagattttaatgaaacatattataatacatatataaacttatggataaatttaatatggctaggttggccagttctcagcatggccaaatttaagccatttctttgaggctaagtaaatcattcaaaatgaaattttactgattcagatttgttgtgctgatcaaccatgacttgatgtattagtccattctcacactgctgtgaagaaatacacaaaactgggtaatttataaaggaaagaggtttaattgactcacagttctgcttttgctgggaaggcctcagaaaacttacaatcatggcagaaggcgaagcaaacatgtccttcttcacatggtggcaggagagagaagtgccaagcaaagggggaaaagccccttataaaaccatcagatcttatgagaactcattcactgtcataagaacagcatggggtaacygcccccatgattcatttacctcccacaggtccatcccacaacacgtggggattatgggaactacaattcaagatgagatttgggtgggaacacacccaaaccgtatcacttgatcattcattaataaggtgagaaagccaatttgagtgcttactgaccagttctgtggcaatatacagaaatacactttttttgtaatctgctgctttgctggccttagaatggtgaccacaattaaagaaagaaaatcagattaatgagataattttccaaataccgtaacaaaataggacatatattttctatatgtagcactttcttggcccagatactcttcagtaactgttgggaaattgctataaaatacataaagaattggtcctattgta

SEQ ID NO: 78886 - DNA, 840 bp, Homo sapiens
tttatttgaacaattttcttctacttgaagactgtaaaaaatttcaaaacattttacccgtgtgccagtttcatggttttagtgcaagtaaataactttcagtttttatgtttgtggaaacaaagcacacatgcagaaaaatgctaaagtataaatgtacaatgtaatgagttactacactatgaacacttatatatctgatagccaggaacgagagaaaaactattactagtcctttaaaaggtccccaaatgccccttactggtgacaacaccctttctccctcccaaggttaacctacatttatctttatacttttaacmcttaatgatatatctctaaataatatggtttatttttgcctgttttgaactttatgtgaataaaatcacagagtatgtttccttttgtgtataaattattttgctgaaaactgtttttaatacctatccatgttattgttgtgtatctatttttaactcattttcgtatctgtgttctgatttataaatatgtcttatttttaaaccattctcccgcgatataaaacatttccagtatgggactactacagaaaaagattctataaacattcttctacatgcattctagtgaaactaaatactcatttctggaatgcataaaatgagaaaaactactagtcaaagggtaagactatcttcaacattggtaggtaacatcaaactggttcagagtaagtaacttatatttcaccagtatgtttaacagaatttctgttgttcagcacttgatattcttgctaacacttgataatatctaactttttaaattttaaccatattaattgggtgtataaaa

SEQ ID NO: 78887 - DNA, 1028 bp, Homo sapiens
taagaattgaaaaagcatttgccttaaagtttttgggcaagggagattcgttgtgctggtagttctagctaagctttgaggtagaaaattcaaaagataatcctccaaatagtctagcacttattaaggctctttgagttttgaattatcaacagcctatcataaaatttactaactttttaggctaagcctgaaaaattgtggtgtttgaaagagagcaaaatcctaatagtcctcctcactggtatttaaaagtttaggctagcaaagcttacaactactctatgtatgtgttgcatacatggagaaaaaatgattaaaatattccagagaggctaggtgcagcggctcacacctgtaatcccagcactttgggaggccaagatgggtggatcacctgaggtcaggagttcaagaccagcctgggcaacatggtgaaaccctatctctactaaaactacaaaaattagccaggcgtggtggtatgtgcctgtaatcccagctactcaggaagctgaggcatgagaatcccttgaacctgggaggcggaggttgcagtgagctgagatcgcaccactgcactccagcctgggccacaaagtgagactctgtctaaaaaataaayaaataaataaaagccagggaaacatatccaatttgcagtgctagggtcacattaagtaaaatgtagcatttttttgtttaattttttttatgttattggataaaactttccacaaactgtactagattaaaagacattttcttcccacaatatgtgtgttttgaggtttcaatatgtgtgatttaaacagtgccagcttaatcaattaaagcagcaagctaatacctccctaggttgtgagattgtgtactgttaaatggtcatcagtcttccccagagtactgatgcaaattctctttctaccactgccaatccattcttaccattatttgctcagggaactcagtaggagtatgatgattcaacaaaaacccaccaagtactaccaagaaatgactcaatg

SEQ ID NO: 78888 - DNA, 1359 bp, Homo sapiens
ccctgtgagaagaaatagggttccttcttcatagtaggaactgtgtctttgcattaccaaatagttaatgtgagattaattcttctaataaatgaagatggaatgaaagaaataggaaaccactgttttgtatggatgtttcatgatacacctactggttaagttaacataaaaaattgacagtcaagcattataggtctcctgatggaagcatacaataccacctacaaagcatccatgccccaaatattaaaactgaatccaatcacggctttagatttaaatacctgtttatagcaaatgcatggaagaaaggagcttgttaaataacaccatgggattgcatccaccaaaatccaaatagagaaaaactgttataggacaaatgacctgatttctttaacaaataaatggcaaaagaaaaaagaaatagaaaaaaaaggagagagggagaaaaagagaagaagaaaamgtaataagaatgtttctaacataaaaaagacaaatatttcagttgatagatatcccagttacactgatttgacctttacaaattatataaatgtattaatttgcctcatgtacccccccacacaaaaaagaaagataatatttacaaattaaatgggacttgagttatatcagccaaaagcaatgggtggaccttgtttggatcctgacaaatcaagttaagaaaaaaaatcactcatgaaacactaaaggaaatttgtacactaatattaagaaattattgaatgttttagatgtaaatgataatgtttcatagctatgctgttataaaaactaaaaggatacctatttttagagcttataccaaagtattagattaaatgtattaatttagattaaatatacattaaattagtcggtcacatgatgtgacttggtttgaaataatccagtgacgggagagtgggtaggaagtgggttgcggtagaatggaagcaggatcagccatgtgtgcaacatttctggagctgggttatgggtacattgtgggaagaagagaggcttatactattctctacttttgcatgtgttttattttccacaaggaagagttaaaatatgtgtaagaaatatgttggttaatatatgaataagaaaaccatctcagatattgctttccctgtttctcacatttcactggccaaaaagaagtgaaattacaatttaaagcccaatatatttctgtccatttgcttgccataggagatactattcttggaacataacatttaacagatttcttagtgttcctttttataaccagacattatcattaaaatgtactaaaactaggctgatatgcaaagtacgacataagggtaaaggccg

SEQ ID NO: 78889 - DNA, 1359 bp, Homo sapiens
ccctgtgagaagaaatagggttccttcttcatagtaggaactgtgtctttgcattaccaaatagttaatgtgagattaattcttctaataaatgaagatggaatgaaagaaataggaaaccactgttttgtatggatgtttcatgatacacctactggttaagttaacataaaaaattgacagtcaagcattataggtctcctgatggaagcatacaataccacctacaaagcatccatgccccaaatattaaaactgaatccaatcacggctttagatttaaatacctgtttatagcaaatgcatggaagaaaggagcttgttaaataacaccatgggattgcatccaccaaaatccaaatagagaaaaactgttataggacaaatgacctgatttctttaacaaataaatggcaaaagaaaaaagaaatagaaaaaaaaggagagagggagaaaaagagaagaagaaaaagtaataagaatgtttctaacataaaaaagacaaatatttcagttgrtagatatcccagttacactgatttgacctttacaaattatataaatgtattaatttgcctcatgtacccccccacacaaaaaagaaagataatatttacaaattaaatgggacttgagttatatcagccaaaagcaatgggtggaccttgtttggatcctgacaaatcaagttaagaaaaaaaatcactcatgaaacactaaaggaaatttgtacactaatattaagaaattattgaatgttttagatgtaaatgataatgtttcatagctatgctgttataaaaactaaaaggatacctatttttagagcttataccaaagtattagattaaatgtattaatttagattaaatatacattaaattagtcggtcacatgatgtgacttggtttgaaataatccagtgacgggagagtgggtaggaagtgggttgcggtagaatggaagcaggatcagccatgtgtgcaacatttctggagctgggttatgggtacattgtgggaagaagagaggcttatactattctctacttttgcatgtgttttattttccacaaggaagagttaaaatatgtgtaagaaatatgttggttaatatatgaataagaaaaccatctcagatattgctttccctgtttctcacatttcactggccaaaaagaagtgaaattacaatttaaagcccaatatatttctgtccatttgcttgccataggagatactattcttggaacataacatttaacagatttcttagtgttcctttttataaccagacattatcattaaaatgtactaaaactaggctgatatgcaaagtacgacataagggtaaaggccg

SEQ ID NO: 78890 - DNA, 1359 bp, Homo sapiens
ccctgtgagaagaaatagggttccttcttcatagtaggaactgtgtctttgcattaccaaatagttaatgtgagattaattcttctaataaatgaagatggaatgaaagaaataggaaaccactgttttgtatggatgtttcatgatacacctactggttaagttaacataaaaaattgacagtcaagcattataggtctcctgatggaagcatacaataccacctacaaagcatccatgccccaaatattaaaactgaatccaatcacggctttagatttaaatacctgtttatagcaaatgcatggaagaaaggagcttgttaaataacaccatgggattgcatccaccaaaatccaaatagagaaaaactgttataggacaaatgacctgatttctttaacaaataaatggcaaaagaaaaaagaaatagaaaaaaaaggagagagggagaaaaagagaagaagaaaaagtaataagaatgtttctaacataaaaaagacaaatatttcagttgatagatatcccagttacactgatttgacctttacaaattatataaatgtattaatttgcctcatgtacccccccmcacaaaaaagaaagataatatttacaaattaaatgggacttgagttatatcagccaaaagcaatgggtggaccttgtttggatcctgacaaatcaagttaagaaaaaaaatcactcatgaaacactaaaggaaatttgtacactaatattaagaaattattgaatgttttagatgtaaatgataatgtttcatagctatgctgttataaaaactaaaaggatacctatttttagagcttataccaaagtattagattaaatgtattaatttagattaaatatacattaaattagtcggtcacatgatgtgacttggtttgaaataatccagtgacgggagagtgggtaggaagtgggttgcggtagaatggaagcaggatcagccatgtgtgcaacatttctggagctgggttatgggtacattgtgggaagaagagaggcttatactattctctacttttgcatgtgttttattttccacaaggaagagttaaaatatgtgtaagaaatatgttggttaatatatgaataagaaaaccatctcagatattgctttccctgtttctcacatttcactggccaaaaagaagtgaaattacaatttaaagcccaatatatttctgtccatttgcttgccataggagatactattcttggaacataacatttaacagatttcttagtgttcctttttataaccagacattatcattaaaatgtactaaaactaggctgatatgcaaagtacgacataagggtaaaggccg

SEQ ID NO: 78891 - DNA, 1359 bp, Homo sapiens
ccctgtgagaagaaatagggttccttcttcatagtaggaactgtgtctttgcattaccaaatagttaatgtgagattaattcttctaataaatgaagatggaatgaaagaaataggaaaccactgttttgtatggatgtttcatgatacacctactggttaagttaacataaaaaattgacagtcaagcattataggtctcctgatggaagcatacaataccacctacaaagcatccatgccccaaatattaaaactgaatccaatcacggctttagatttaaatacctgtttatagcaaatgcatggaagaaaggagcttgttaaataacaccatgggattgcatccaccaaaatccaaatagagaaaaactgttataggacaaatgacctgatttctttaacaaataaatggcaaaagaaaaaagaaatagaaaaaaaaggagagagggagaaaaagagaagaagaaaaagtaataagaatgtttctaacataaaaaagacaaatatttcagttgatagatatcccagttacactgatttgacctttacaaattatataaatgtattaatttgcctcatgtacccccccacacaaaaaagaaagakaatatttacaaattaaatgggacttgagttatatcagccaaaagcaatgggtggaccttgtttggatcctgacaaatcaagttaagaaaaaaaatcactcatgaaacactaaaggaaatttgtacactaatattaagaaattattgaatgttttagatgtaaatgataatgtttcatagctatgctgttataaaaactaaaaggatacctatttttagagcttataccaaagtattagattaaatgtattaatttagattaaatatacattaaattagtcggtcacatgatgtgacttggtttgaaataatccagtgacgggagagtgggtaggaagtgggttgcggtagaatggaagcaggatcagccatgtgtgcaacatttctggagctgggttatgggtacattgtgggaagaagagaggcttatactattctctacttttgcatgtgttttattttccacaaggaagagttaaaatatgtgtaagaaatatgttggttaatatatgaataagaaaaccatctcagatattgctttccctgtttctcacatttcactggccaaaaagaagtgaaattacaatttaaagcccaatatatttctgtccatttgcttgccataggagatactattcttggaacataacatttaacagatttcttagtgttcctttttataaccagacattatcattaaaatgtactaaaactaggctgatatgcaaagtacgacataagggtaaaggccg

SEQ ID NO: 78892 - DNA, 1359 bp, Homo sapiens
ccctgtgagaagaaatagggttccttcttcatagtaggaactgtgtctttgcattaccaaatagttaatgtgagattaattcttctaataaatgaagatggaatgaaagaaataggaaaccactgttttgtatggatgtttcatgatacacctactggttaagttaacataaaaaattgacagtcaagcattataggtctcctgatggaagcatacaataccacctacaaagcatccatgccccaaatattaaaactgaatccaatcacggctttagatttaaatacctgtttatagcaaatgcatggaagaaaggagcttgttaaataacaccatgggattgcatccaccaaaatccaaatagagaaaaactgttataggacaaatgacctgatttctttaacaaataaatggcaaaagaaaaaagaaatagaaaaaaaaggagagagggagaaaaagagaagaagaaaaagtaataagaatgtttctaacataaaaaagacaaatatttcagttgatagatatcccagttacactgatttgacctttacaaattatataaatgtattaatttgcctcatgtacccccccacacaaaaaagaaagataatatttacaaattaaatgggacttgagttatatcagccaaaagcaatgggtggaccttgtttggatcctgacaaatcaagttaagaaaaaaaatcactcatgaaayactaaaggaaatttgtacactaatattaagaaattattgaatgttttagatgtaaatgataatgtttcatagctatgctgttataaaaactaaaaggatacctatttttagagcttataccaaagtattagattaaatgtattaatttagattaaatatacattaaattagtcggtcacatgatgtgacttggtttgaaataatccagtgacgggagagtgggtaggaagtgggttgcggtagaatggaagcaggatcagccatgtgtgcaacatttctggagctgggttatgggtacattgtgggaagaagagaggcttatactattctctacttttgcatgtgttttattttccacaaggaagagttaaaatatgtgtaagaaatatgttggttaatatatgaataagaaaaccatctcagatattgctttccctgtttctcacatttcactggccaaaaagaagtgaaattacaatttaaagcccaatatatttctgtccatttgcttgccataggagatactattcttggaacataacatttaacagatttcttagtgttcctttttataaccagacattatcattaaaatgtactaaaactaggctgatatgcaaagtacgacataagggtaaaggccg

SEQ ID NO: 78893 - DNA, 1359 bp, Homo sapiens
ccctgtgagaagaaatagggttccttcttcatagtaggaactgtgtctttgcattaccaaatagttaatgtgagattaattcttctaataaatgaagatggaatgaaagaaataggaaaccactgttttgtatggatgtttcatgatacacctactggttaagttaacataaaaaattgacagtcaagcattataggtctcctgatggaagcatacaataccacctacaaagcatccatgccccaaatattaaaactgaatccaatcacggctttagatttaaatacctgtttatagcaaatgcatggaagaaaggagcttgttaaataacaccatgggattgcatccaccaaaatccaaatagagaaaaactgttataggacaaatgacctgatttctttaacaaataaatggcaaaagaaaaaagaaatagaaaaaaaaggagagagggagaaaaagagaagaagaaaaagtaataagaatgtttctaacataaaaaagacaaatatttcagttgatagatatcccagttacactgatttgacctttacaaattatataaatgtattaatttgcctcatgtacccccccacacaaaaaagaaagataatatttacaaattaaatgggacttgagttatatcagccaaaagcaatgggtggaccttgtttggatcctgacaaatcaagttaagaaaaaaaatcactcatgaaacactaaaggaaatttgtacactaatattaagaaattattgartgttttagatgtaaatgataatgtttcatagctatgctgttataaaaactaaaaggatacctatttttagagcttataccaaagtattagattaaatgtattaatttagattaaatatacattaaattagtcggtcacatgatgtgacttggtttgaaataatccagtgacgggagagtgggtaggaagtgggttgcggtagaatggaagcaggatcagccatgtgtgcaacatttctggagctgggttatgggtacattgtgggaagaagagaggcttatactattctctacttttgcatgtgttttattttccacaaggaagagttaaaatatgtgtaagaaatatgttggttaatatatgaataagaaaaccatctcagatattgctttccctgtttctcacatttcactggccaaaaagaagtgaaattacaatttaaagcccaatatatttctgtccatttgcttgccataggagatactattcttggaacataacatttaacagatttcttagtgttcctttttataaccagacattatcattaaaatgtactaaaactaggctgatatgcaaagtacgacataagggtaaaggccg

SEQ ID NO: 78894 - DNA, 1783 bp, Homo sapiens
actgacttgagaaggaagaaattaaaactatcactatagataatgtgattatagtaaggtaaatgcaaagaatcagtggaaaaattagtaaatataatgagaatttaggataagagaatataaaaattacatttagggattaataattatcttatgtacaaacaataaccatttagaataaataatgtaacagaagacctcattttaatagcatcaaaacttatcttgacataaacttaagaaatgaagaaatgaatataaacattatttttaaacattactgaaaaactagggaggcttgaaaaaatggaaaacatattctttgtgaaaaataatcatcatacaattgtcaattcttcacaagttaatttataaataaaatacaatgtcttaaaaatgtcaataagctttcttcttggagcatgacaagttgatcataaagtaaatatgaatgaatacataagccataatatcgaggaaagccttgagataacagagcaatgggtaaggaattctagctctatagcctcacaaaatggggaaatacacaaaaaagccacaggattaaacagtaaaatattaacccatgaataaatagatccaccagtggaaccaaaaataaatatatagaaatatacccagatgcaggctggacgtggtggttcatgcctgtaatcccagcaccttgggaggccgaggtgggtggatcacctaaggttaggagttcaagaccagcctggtccaacatggtgaaaccccatctctactaaaatatacaaaaattagccaggtgtggtggtgggtgcctgctatcccagctactcaggaggctgaggcaggagaatctcttgaacctggaaggagggggttgctgtaagccaggatcgtgccactgcactgcactccagcctgcatgacagagcaagactccatctcaaaaaaaaaaaaaraaaagaaaagaaagaaagagaggaaaagaaagaaatatatccagatgcatataaaactttaaaggttatatggtcatataggaggcagaatttgcacaattgaataaacatttagaaaagaataaatttaaatctctgcttacaaatgtcagataaattacaggacatccaattaaatttgaatttcaaataagcaacaaatacctttttaattagtatgtacctaaagattattcatttttatctgaaattcaatactttaaaaaaattacattgattcataataattgtacacatttatgtggtgcttgtgatattttgatacttaacaatgtgtaatgatcaaatcaggttaattaggatctccatcacctctaacataattccaaatctcttctccctatttgaatttatttcttctgtctaactgtatttttgtgtccattaaccaaactttcttcatgccctcttccatgttatttccagcctctggtaaccaccattctactctcaaattccataagatcaattttattttttagctgtatattttagctatatagttagctgtattttttttgacacgtgctatttttttttctgtgcctggcttacttcacgtaacatgtcttccaggctcaacaccactgatttccagggacatgcaaatcaaaaccacatgaggcattatctcacctcagtttatcaaaaagaccaaaaaataacaaacgctattgagaatgtggagaaatgagaaaggagatctctatctagtgtactactggtagaaatgtaaattagttcatccactatggaaagcagtatggagattc

SEQ ID NO: 78895 - DNA, 1783 bp, Homo sapiens
actgacttgagaaggaagaaattaaaactatcactatagataatgtgattatagtaaggtaaatgcaaagaatcagtggaaaaattagtaaatataatgagaatttaggataagagaatataaaaattacatttagggattaataattatcttatgtacaaacaataaccatttagaataaataatgtaacagaagacctcattttaatagcatcaaaacttatcttgacataaacttaagaaatgaagaaatgaatataaacattatttttaaacattactgaaaaactagggaggcttgaaaaaatggaaaacatattctttgtgaaaaataatcatcatacaattgtcaattcttcacaagttaatttataaataaaatacaatgtcttaaaaatgtcaataagctttcttcttggagcatgacaagttgatcataaagtaaatatgaatgaatacataagccataatatcgaggaaagccttgagataacagagcaatgggtaaggaattctagctctatagcctcacaaaatggggaaatacacaaaaaagccacaggattaaacagtaaaatattaacccatgaataaatagatccaccagtggaaccaaaaataaatatatagaaatatacccagatgcaggctggacgtggtggttcatgcctgtaatcccagcaccttgggaggccgaggtgggtggatcacctaaggttaggagttcaagaccagcctggtccaacatggtgaaaccccatctctactaaaatatacaaaaattagccaggtgtggtggtgggtgcctgctatcccagctactcaggaggctgaggcaggagaatctcttgaacctggaaggagggggttgctgtaagccaggatcgtgccactgcactgcactccagcctgcatgacagagcaagactccatctcaaaaaaaaaaaaagaaaagaaaagaaagaaagagaggaaaagaaagaaatatatccagatgcatataaaactttaaaggttatatggtcatataggaggcagaatttgcacaattgaataaacatttagaaaagaataaatttaaatctctgcttacaaatgtcagataaattacaggacatccaattaaatttgaatttcaaataagcaacaaatacctttttaattagtatgtacctaaagattattcatttttatctgaaattcaatactttaaaaaaattacattgattcataataattgtacacatttatgtggtgcttgtgatattttgatacttaacaatgtgtaatgatcaaatcaggttaattaggatctccatcacctctaacataattccaaatctcttctccctatttgaatttatttcttctgtctaackgtatttttgtgtccattaaccaaactttcttcatgccctcttccatgttatttccagcctctggtaaccaccattctactctcaaattccataagatcaattttattttttagctgtatattttagctatatagttagctgtattttttttgacacgtgctatttttttttctgtgcctggcttacttcacgtaacatgtcttccaggctcaacaccactgatttccagggacatgcaaatcaaaaccacatgaggcattatctcacctcagtttatcaaaaagaccaaaaaataacaaacgctattgagaatgtggagaaatgagaaaggagatctctatctagtgtactactggtagaaatgtaaattagttcatccactatggaaagcagtatggagattc

SEQ ID NO: 78896 - DNA, 2421 bp, Homo sapiens
tataacaatggttgtaattaagtggatattatacctttgtgttttaaatgtttattacattataattttagaggcatttattcaagcatattttattttatatttttaaattcaacttttaaatttagggggtacatgtgcaggtttgttacatgggtatattgcgtgatgctaaggtttggggtackattgatcccatcacccaggtagtgagcatagcgcccaataggtagtttttcagccctttctcccttcttttcctctacccttttggggtccacagtgtctatgggtcccatctttgtgcccatgtgtacctaatgtttagctactactaagtgagaacatgtggtgtttggttttccatttctgcattaatttgattaggataatgacctccagctgcatccatattcaagcatattttaaagtggattatatcctatttttgagttaaaacaggagacttataactggcaattattgtgtaatctagcatgcatgagtagctaactcttgtgtttcatttactcattcatttattttcttcaccaagtattcatcaactctgtttatgtagcaaatattgtgccaggcattaaatatataaaaatgaaaaaatgatggtcagttattgaggtagccagacacacacatagataattgcaattcggagtgatgggccatgctatggggaaaacatgtagcagtttacaacactgtttctactctaaggttacttacgatctgattgaagaattaagatggaacaacactaaaaattagccattcacatgagaatggcacgcaacaagaaacaagtaagtgggatagacgtcaggtgtgattatttttcagagagagtagagattgctacctactagagtgctcaacttgacggcagaaagcaagatttccaaatagagacggtgatatagaatttgcaaaatatatttgtgggatatttaaggacgagcctagctgaagtgagagacatctgggtagctcatagacaatagggttggaggggtgttttggggctatttgcctgggcctttaatgccattctaagtttagactttaccctcaagaggaagcatgtgagggttaagagggcaagctgtagattcagataggttcgagtttgaatcaagtttcctgactgttacatactctactaatccaggcaacttacttaacttctctgtgctttagttgtctcacttgtaggtcttcctatccctacttttttactatataggatctgtggaagattacataagataatagacataaagtgcttagaatggtacataacacatagtaagcactcaaaaatattagttagtaatacagaatgtattacttctctgtattatgatcatttaggtctcagtctatgacagcagaatctttgttggattaccctttgattatagcctatcacaagtcttaaacttttcacatatattcattggaaatattcatttgtcattataacaatctcaccagacttcattattttcttttaaaaaagtaaaaaggctcaggtgagtggacataattagcgcaaagccacaaaattgatgaacagagagaagatctaaaattttccatagttggtgataattaatccagtatttctttcagtccatcaggctgccttctgatgtcaggaaataatgagataagcctgtagatgcatagaattccacattactgaattattatgagccttatgcagagggaagtgcaaatgacttcttgtactcaaagggtttgcctcagagaagacttgtcaaaaacatatctaactgctgaccaaatagctgaataaattctccctaactctagcttagagaaatggacacataaaaatttgtgttttgacagaggaaaacttggttaccatttgaatttattttaatttctgaattgggcttttgtgcacagaatggtttagagtttctggagttttaattgatatccagtaatgaaattgttaaaaatagtttaaactgtacttatatatctaattctcttaaactttctaaatgcccaacagagcagatttgcaaacataattagcaaaacctttctttgagtaagcttatcagctttactcttctttgtattctttcctgagactagtgatggaggagcagatttactgcttgggtggatgaaggttcctgggtctaaagtttgggaccatgatatgtgtcaaaggctgagaaccagtcattgatatgttaaacttaatgtcatacaattagatgtgtttcttgcgggaaagtatagagcaaaaggaccagcatacaactttggtaatgattgtccatttaggagtgaggaaaagaaatacttgcagagcacagaaagtataaagtgtgaggacaggcaggatagtgtcatagccct

SEQ ID NO: 78897 - DNA, 2421 bp, Homo sapiens
tataacaatggttgtaattaagtggatattatacctttgtgttttaaatgtttattacattataattttagaggcatttattcaagcatattttattttatatttttaaattcaacttttaaatttagggggtacatgtgcaggtttgttacatgggtatattgcgtgatgctaaggtttggggtacgattgatcccatcacccaggtagtgagcatagcgcccaataggtagtttttcagccctttctcccttcttttcctctacccttttggggtccacagtgtctatggktcccatctttgtgcccatgtgtacctaatgtttagctactactaagtgagaacatgtggtgtttggttttccatttctgcattaatttgattaggataatgacctccagctgcatccatattcaagcatattttaaagtggattatatcctatttttgagttaaaacaggagacttataactggcaattattgtgtaatctagcatgcatgagtagctaactcttgtgtttcatttactcattcatttattttcttcaccaagtattcatcaactctgtttatgtagcaaatattgtgccaggcattaaatatataaaaatgaaaaaatgatggtcagttattgaggtagccagacacacacatagataattgcaattcggagtgatgggccatgctatggggaaaacatgtagcagtttacaacactgtttctactctaaggttacttacgatctgattgaagaattaagatggaacaacactaaaaattagccattcacatgagaatggcacgcaacaagaaacaagtaagtgggatagacgtcaggtgtgattatttttcagagagagtagagattgctacctactagagtgctcaacttgacggcagaaagcaagatttccaaatagagacggtgatatagaatttgcaaaatatatttgtgggatatttaaggacgagcctagctgaagtgagagacatctgggtagctcatagacaatagggttggaggggtgttttggggctatttgcctgggcctttaatgccattctaagtttagactttaccctcaagaggaagcatgtgagggttaagagggcaagctgtagattcagataggttcgagtttgaatcaagtttcctgactgttacatactctactaatccaggcaacttacttaacttctctgtgctttagttgtctcacttgtaggtcttcctatccctacttttttactatataggatctgtggaagattacataagataatagacataaagtgcttagaatggtacataacacatagtaagcactcaaaaatattagttagtaatacagaatgtattacttctctgtattatgatcatttaggtctcagtctatgacagcagaatctttgttggattaccctttgattatagcctatcacaagtcttaaacttttcacatatattcattggaaatattcatttgtcattataacaatctcaccagacttcattattttcttttaaaaaagtaaaaaggctcaggtgagtggacataattagcgcaaagccacaaaattgatgaacagagagaagatctaaaattttccatagttggtgataattaatccagtatttctttcagtccatcaggctgccttctgatgtcaggaaataatgagataagcctgtagatgcatagaattccacattactgaattattatgagccttatgcagagggaagtgcaaatgacttcttgtactcaaagggtttgcctcagagaagacttgtcaaaaacatatctaactgctgaccaaatagctgaataaattctccctaactctagcttagagaaatggacacataaaaatttgtgttttgacagaggaaaacttggttaccatttgaatttattttaatttctgaattgggcttttgtgcacagaatggtttagagtttctggagttttaattgatatccagtaatgaaattgttaaaaatagtttaaactgtacttatatatctaattctcttaaactttctaaatgcccaacagagcagatttgcaaacataattagcaaaacctttctttgagtaagcttatcagctttactcttctttgtattctttcctgagactagtgatggaggagcagatttactgcttgggtggatgaaggttcctgggtctaaagtttgggaccatgatatgtgtcaaaggctgagaaccagtcattgatatgttaaacttaatgtcatacaattagatgtgtttcttgcgggaaagtatagagcaaaaggaccagcatacaactttggtaatgattgtccatttaggagtgaggaaaagaaatacttgcagagcacagaaagtataaagtgtgaggacaggcaggatagtgtcatagccct

SEQ ID NO: 78898 - DNA, 2421 bp, Homo sapiens
tataacaatggttgtaattaagtggatattatacctttgtgttttaaatgtttattacattataattttagaggcatttattcaagcatattttattttatatttttaaattcaacttttaaatttagggggtacatgtgcaggtttgttacatgggtatattgcgtgatgctaaggtttggggtacgattgatcccatcacccaggtagtgagcatagcgcccaataggtagtttttcagccctttctcccttcttttcctctacccttttggggtccacagtgtctatgggtcccatctttgtgcccatgtgtacctaatgtttagctactactaagtgagaacatgtggtgtttggttttccatttctgcattaatttgattaggataatgacctccagctgcatccatattcaagcatattttaaagtggattatatcctatttttgagttaaaacaggagacttataactggcaattattgtgtaatctagcatgcatgagtagctaactcttgtgtttcatttactcattcatttattttcttcaccaagtattcatcaactctgtttatgtagcaaatattgtgccaggcattaaatatataaaaatgaaaaaatgatggtcagttattgaggtagccagacacacacatagataattgcaattcggagtgatgggccatgctatggggaaaacatgtagcagtttacaacactgtttctactctaaggttacttacsatctgattgaagaattaagatggaacaacactaaaaattagccattcacatgagaatggcacgcaacaagaaacaagtaagtgggatagacgtcaggtgtgattatttttcagagagagtagagattgctacctactagagtgctcaacttgacggcagaaagcaagatttccaaatagagacggtgatatagaatttgcaaaatatatttgtgggatatttaaggacgagcctagctgaagtgagagacatctgggtagctcatagacaatagggttggaggggtgttttggggctatttgcctgggcctttaatgccattctaagtttagactttaccctcaagaggaagcatgtgagggttaagagggcaagctgtagattcagataggttcgagtttgaatcaagtttcctgactgttacatactctactaatccaggcaacttacttaacttctctgtgctttagttgtctcacttgtaggtcttcctatccctacttttttactatataggatctgtggaagattacataagataatagacataaagtgcttagaatggtacataacacatagtaagcactcaaaaatattagttagtaatacagaatgtattacttctctgtattatgatcatttaggtctcagtctatgacagcagaatctttgttggattaccctttgattatagcctatcacaagtcttaaacttttcacatatattcattggaaatattcatttgtcattataacaatctcaccagacttcattattttcttttaaaaaagtaaaaaggctcaggtgagtggacataattagcgcaaagccacaaaattgatgaacagagagaagatctaaaattttccatagttggtgataattaatccagtatttctttcagtccatcaggctgccttctgatgtcaggaaataatgagataagcctgtagatgcatagaattccacattactgaattattatgagccttatgcagagggaagtgcaaatgacttcttgtactcaaagggtttgcctcagagaagacttgtcaaaaacatatctaactgctgaccaaatagctgaataaattctccctaactctagcttagagaaatggacacataaaaatttgtgttttgacagaggaaaacttggttaccatttgaatttattttaatttctgaattgggcttttgtgcacagaatggtttagagtttctggagttttaattgatatccagtaatgaaattgttaaaaatagtttaaactgtacttatatatctaattctcttaaactttctaaatgcccaacagagcagatttgcaaacataattagcaaaacctttctttgagtaagcttatcagctttactcttctttgtattctttcctgagactagtgatggaggagcagatttactgcttgggtggatgaaggttcctgggtctaaagtttgggaccatgatatgtgtcaaaggctgagaaccagtcattgatatgttaaacttaatgtcatacaattagatgtgtttcttgcgggaaagtatagagcaaaaggaccagcatacaactttggtaatgattgtccatttaggagtgaggaaaagaaatacttgcagagcacagaaagtataaagtgtgaggacaggcaggatagtgtcatagccct

SEQ ID NO: 78899 - DNA, 2421 bp, Homo sapiens
tataacaatggttgtaattaagtggatattatacctttgtgttttaaatgtttattacattataattttagaggcatttattcaagcatattttattttatatttttaaattcaacttttaaatttagggggtacatgtgcaggtttgttacatgggtatattgcgtgatgctaaggtttggggtacgattgatcccatcacccaggtagtgagcatagcgcccaataggtagtttttcagccctttctcccttcttttcctctacccttttggggtccacagtgtctatgggtcccatctttgtgcccatgtgtacctaatgtttagctactactaagtgagaacatgtggtgtttggttttccatttctgcattaatttgattaggataatgacctccagctgcatccatattcaagcatattttaaagtggattatatcctatttttgagttaaaacaggagacttataactggcaattattgtgtaatctagcatgcatgagtagctaactcttgtgtttcatttactcattcatttattttcttcaccaagtattcatcaactctgtttatgtagcaaatattgtgccaggcattaaatatataaaaatgaaaaaatgatggtcagttattgaggtagccagacacacacatagataattgcaattcggagtgatgggccatgctatggggaaaacatgtagcagtttacaacactgtttctactctaaggttacttacgatctgattgaagaattaagatggaacaacactaaaaattagccattcacatgagaatggcacgcaacaagaaacaagtaagtgggatagacgtcaggtgtgattatttttcagagagagtagagattgctacctactagagtgctcaacttgacggcagaaagcaagatttccaaatagagacggtgatatagaatttgcaaaatatatttgtgggatatttaaggacgagcctagctgaagtgagagacatctgggtagctcatagacaatagggttggaggggtgttttggggctatttgcctgggcctttaatgccattctaagtttagactttaccctcaagaggaagcatgtgagggttaagagggcaagctgtagattcagataggttcgagtttgaatcaagtttcctgactgttacatactctactaatccaggcaacttacttaacttctctgtgctttagtygtctcacttgtaggtcttcctatccctacttttttactatataggatctgtggaagattacataagataatagacataaagtgcttagaatggtacataacacatagtaagcactcaaaaatattagttagtaatacagaatgtattacttctctgtattatgatcatttaggtctcagtctatgacagcagaatctttgttggattaccctttgattatagcctatcacaagtcttaaacttttcacatatattcattggaaatattcatttgtcattataacaatctcaccagacttcattattttcttttaaaaaagtaaaaaggctcaggtgagtggacataattagcgcaaagccacaaaattgatgaacagagagaagatctaaaattttccatagttggtgataattaatccagtatttctttcagtccatcaggctgccttctgatgtcaggaaataatgagataagcctgtagatgcatagaattccacattactgaattattatgagccttatgcagagggaagtgcaaatgacttcttgtactcaaagggtttgcctcagagaagacttgtcaaaaacatatctaactgctgaccaaatagctgaataaattctccctaactctagcttagagaaatggacacataaaaatttgtgttttgacagaggaaaacttggttaccatttgaatttattttaatttctgaattgggcttttgtgcacagaatggtttagagtttctggagttttaattgatatccagtaatgaaattgttaaaaatagtttaaactgtacttatatatctaattctcttaaactttctaaatgcccaacagagcagatttgcaaacataattagcaaaacctttctttgagtaagcttatcagctttactcttctttgtattctttcctgagactagtgatggaggagcagatttactgcttgggtggatgaaggttcctgggtctaaagtttgggaccatgatatgtgtcaaaggctgagaaccagtcattgatatgttaaacttaatgtcatacaattagatgtgtttcttgcgggaaagtatagagcaaaaggaccagcatacaactttggtaatgattgtccatttaggagtgaggaaaagaaatacttgcagagcacagaaagtataaagtgtgaggacaggcaggatagtgtcatagccct

SEQ ID NO: 78900 - DNA, 2421 bp, Homo sapiens
tataacaatggttgtaattaagtggatattatacctttgtgttttaaatgtttattacattataattttagaggcatttattcaagcatattttattttatatttttaaattcaacttttaaatttagggggtacatgtgcaggtttgttacatgggtatattgcgtgatgctaaggtttggggtacgattgatcccatcacccaggtagtgagcatagcgcccaataggtagtttttcagccctttctcccttcttttcctctacccttttggggtccacagtgtctatgggtcccatctttgtgcccatgtgtacctaatgtttagctactactaagtgagaacatgtggtgtttggttttccatttctgcattaatttgattaggataatgacctccagctgcatccatattcaagcatattttaaagtggattatatcctatttttgagttaaaacaggagacttataactggcaattattgtgtaatctagcatgcatgagtagctaactcttgtgtttcatttactcattcatttattttcttcaccaagtattcatcaactctgtttatgtagcaaatattgtgccaggcattaaatatataaaaatgaaaaaatgatggtcagttattgaggtagccagacacacacatagataattgcaattcggagtgatgggccatgctatggggaaaacatgtagcagtttacaacactgtttctactctaaggttacttacgatctgattgaagaattaagatggaacaacactaaaaattagccattcacatgagaatggcacgcaacaagaaacaagtaagtgggatagacgtcaggtgtgattatttttcagagagagtagagattgctacctactagagtgctcaacttgacggcagaaagcaagatttccaaatagagacggtgatatagaatttgcaaaatatatttgtgggatatttaaggacgagcctagctgaagtgagagacatctgggtagctcatagacaatagggttggaggggtgttttggggctatttgcctgggcctttaatgccattctaagtttagactttaccctcaagaggaagcatgtgagggttaagagggcaagctgtagattcagataggttcgagtttgaatcaagtttcctgactgttacatactctactaatccaggcaacttacttaacttctctgtgctttagttgtctcacttgtaggtcttcctatccctacttttttactatataggatctgtggaagattacataagataatagacataaagtgcttagaatggtacataacacatagtaagcactcaaaaatattagttagtaatacagaatgtattacttctctgtattatgatcatttaggtctcagtctatgacagcagaatctttgttggattaccctttgattatagcctatcacaagtcttaaacttttcacayatattcattggaaatattcatttgtcattataacaatctcaccagacttcattattttcttttaaaaaagtaaaaaggctcaggtgagtggacataattagcgcaaagccacaaaattgatgaacagagagaagatctaaaattttccatagttggtgataattaatccagtatttctttcagtccatcaggctgccttctgatgtcaggaaataatgagataagcctgtagatgcatagaattccacattactgaattattatgagccttatgcagagggaagtgcaaatgacttcttgtactcaaagggtttgcctcagagaagacttgtcaaaaacatatctaactgctgaccaaatagctgaataaattctccctaactctagcttagagaaatggacacataaaaatttgtgttttgacagaggaaaacttggttaccatttgaatttattttaatttctgaattgggcttttgtgcacagaatggtttagagtttctggagttttaattgatatccagtaatgaaattgttaaaaatagtttaaactgtacttatatatctaattctcttaaactttctaaatgcccaacagagcagatttgcaaacataattagcaaaacctttctttgagtaagcttatcagctttactcttctttgtattctttcctgagactagtgatggaggagcagatttactgcttgggtggatgaaggttcctgggtctaaagtttgggaccatgatatgtgtcaaaggctgagaaccagtcattgatatgttaaacttaatgtcatacaattagatgtgtttcttgcgggaaagtatagagcaaaaggaccagcatacaactttggtaatgattgtccatttaggagtgaggaaaagaaatacttgcagagcacagaaagtataaagtgtgaggacaggcaggatagtgtcatagccct

SEQ ID NO: 78901 - DNA, 2421 bp, Homo sapiens
tataacaatggttgtaattaagtggatattatacctttgtgttttaaatgtttattacattataattttagaggcatttattcaagcatattttattttatatttttaaattcaacttttaaatttagggggtacatgtgcaggtttgttacatgggtatattgcgtgatgctaaggtttggggtacgattgatcccatcacccaggtagtgagcatagcgcccaataggtagtttttcagccctttctcccttcttttcctctacccttttggggtccacagtgtctatgggtcccatctttgtgcccatgtgtacctaatgtttagctactactaagtgagaacatgtggtgtttggttttccatttctgcattaatttgattaggataatgacctccagctgcatccatattcaagcatattttaaagtggattatatcctatttttgagttaaaacaggagacttataactggcaattattgtgtaatctagcatgcatgagtagctaactcttgtgtttcatttactcattcatttattttcttcaccaagtattcatcaactctgtttatgtagcaaatattgtgccaggcattaaatatataaaaatgaaaaaatgatggtcagttattgaggtagccagacacacacatagataattgcaattcggagtgatgggccatgctatggggaaaacatgtagcagtttacaacactgtttctactctaaggttacttacgatctgattgaagaattaagatggaacaacactaaaaattagccattcacatgagaatggcacgcaacaagaaacaagtaagtgggatagacgtcaggtgtgattatttttcagagagagtagagattgctacctactagagtgctcaacttgacggcagaaagcaagatttccaaatagagacggtgatatagaatttgcaaaatatatttgtgggatatttaaggacgagcctagctgaagtgagagacatctgggtagctcatagacaatagggttggaggggtgttttggggctatttgcctgggcctttaatgccattctaagtttagactttaccctcaagaggaagcatgtgagggttaagagggcaagctgtagattcagataggttcgagtttgaatcaagtttcctgactgttacatactctactaatccaggcaacttacttaacttctctgtgctttagttgtctcacttgtaggtcttcctatccctacttttttactatataggatctgtggaagattacataagataatagacataaagtgcttagaatggtacataacacatagtaagcactcaaaaatattagttagtaatacagaatgtattacttctctgtattatgatcatttaggtctcagtctatgacagcagaatctttgttggattaccctttgattatagcctatcacaagtcttaaacttttcacatatattcattggaaatattcatttgtcattataacaatctcaccagacttcattattttcttttaaaaaagtaaaaaggctcaggtgagtggacataattagcgcaaagccacaaaattgatgaacagagagaagatctaaaattttccatagttggtgataattaatccagtatttctttcagtccatcaggctgccttctgatgtcaggaaataatgagataagcctgtagatgcatagaattccacattactgaattattatgagccttatgcagagggaagtgcaaatgacttcttgtactcaaagggtttgcctcagagaagacttgtcaaaaacatatctaactgctgaccaaatagctgaataaattctccctaactctagcttagagaaatggacacataaaaatttgtgttttgacagaggaaaacttggttaccatttgaatttattttaatttctgaattgggcttttgtgcacagaatggtttagagtttctggagttttaatkgatatccagtaatgaaattgttaaaaatagtttaaactgtacttatatatctaattctcttaaactttctaaatgcccaacagagcagatttgcaaacataattagcaaaacctttctttgagtaagcttatcagctttactcttctttgtattctttcctgagactagtgatggaggagcagatttactgcttgggtggatgaaggttcctgggtctaaagtttgggaccatgatatgtgtcaaaggctgagaaccagtcattgatatgttaaacttaatgtcatacaattagatgtgtttcttgcgggaaagtatagagcaaaaggaccagcatacaactttggtaatgattgtccatttaggagtgaggaaaagaaatacttgcagagcacagaaagtataaagtgtgaggacaggcaggatagtgtcatagccct

SEQ ID NO: 78902 - DNA, 2421 bp, Homo sapiens
tataacaatggttgtaattaagtggatattatacctttgtgttttaaatgtttattacattataattttagaggcatttattcaagcatattttattttatatttttaaattcaacttttaaatttagggggtacatgtgcaggtttgttacatgggtatattgcgtgatgctaaggtttggggtacgattgatcccatcacccaggtagtgagcatagcgcccaataggtagtttttcagccctttctcccttcttttcctctacccttttggggtccacagtgtctatgggtcccatctttgtgcccatgtgtacctaatgtttagctactactaagtgagaacatgtggtgtttggttttccatttctgcattaatttgattaggataatgacctccagctgcatccatattcaagcatattttaaagtggattatatcctatttttgagttaaaacaggagacttataactggcaattattgtgtaatctagcatgcatgagtagctaactcttgtgtttcatttactcattcatttattttcttcaccaagtattcatcaactctgtttatgtagcaaatattgtgccaggcattaaatatataaaaatgaaaaaatgatggtcagttattgaggtagccagacacacacatagataattgcaattcggagtgatgggccatgctatggggaaaacatgtagcagtttacaacactgtttctactctaaggttacttacgatctgattgaagaattaagatggaacaacactaaaaattagccattcacatgagaatggcacgcaacaagaaacaagtaagtgggatagacgtcaggtgtgattatttttcagagagagtagagattgctacctactagagtgctcaacttgacggcagaaagcaagatttccaaatagagacggtgatatagaatttgcaaaatatatttgtgggatatttaaggacgagcctagctgaagtgagagacatctgggtagctcatagacaatagggttggaggggtgttttggggctatttgcctgggcctttaatgccattctaagtttagactttaccctcaagaggaagcatgtgagggttaagagggcaagctgtagattcagataggttcgagtttgaatcaagtttcctgactgttacatactctactaatccaggcaacttacttaacttctctgtgctttagttgtctcacttgtaggtcttcctatccctacttttttactatataggatctgtggaagattacataagataatagacataaagtgcttagaatggtacataacacatagtaagcactcaaaaatattagttagtaatacagaatgtattacttctctgtattatgatcatttaggtctcagtctatgacagcagaatctttgttggattaccctttgattatagcctatcacaagtcttaaacttttcacatatattcattggaaatattcatttgtcattataacaatctcaccagacttcattattttcttttaaaaaagtaaaaaggctcaggtgagtggacataattagcgcaaagccacaaaattgatgaacagagagaagatctaaaattttccatagttggtgataattaatccagtatttctttcagtccatcaggctgccttctgatgtcaggaaataatgagataagcctgtagatgcatagaattccacattactgaattattatgagccttatgcagagggaagtgcaaatgacttcttgtactcaaagggtttgcctcagagaagacttgtcaaaaacatatctaactgctgaccaaatagctgaataaattctccctaactctagcttagagaaatggacacataaaaatttgtgttttgacagaggaaaacttggttaccatttgaatttattttaatttctgaattgggcttttgtgcacagaatggtttagagtttctggagttttaattgatatccagtaatgaaattgttaaaaatagtttaaactgtacttatatatctaattctcttaaactttctaaatgcccaacagagcagatttgcaaacataattagcaaaacctttctttgrgtaagcttatcagctttactcttctttgtattctttcctgagactagtgatggaggagcagatttactgcttgggtggatgaaggttcctgggtctaaagtttgggaccatgatatgtgtcaaaggctgagaaccagtcattgatatgttaaacttaatgtcatacaattagatgtgtttcttgcgggaaagtatagagcaaaaggaccagcatacaactttggtaatgattgtccatttaggagtgaggaaaagaaatacttgcagagcacagaaagtataaagtgtgaggacaggcaggatagtgtcatagccct

SEQ ID NO: 78903 - DNA, 2421 bp, Homo sapiens
tataacaatggttgtaattaagtggatattatacctttgtgttttaaatgtttattacattataattttagaggcatttattcaagcatattttattttatatttttaaattcaacttttaaatttagggggtacatgtgcaggtttgttacatgggtatattgcgtgatgctaaggtttggggtacgattgatcccatcacccaggtagtgagcatagcgcccaataggtagtttttcagccctttctcccttcttttcctctacccttttggggtccacagtgtctatgggtcccatctttgtgcccatgtgtacctaatgtttagctactactaagtgagaacatgtggtgtttggttttccatttctgcattaatttgattaggataatgacctccagctgcatccatattcaagcatattttaaagtggattatatcctatttttgagttaaaacaggagacttataactggcaattattgtgtaatctagcatgcatgagtagctaactcttgtgtttcatttactcattcatttattttcttcaccaagtattcatcaactctgtttatgtagcaaatattgtgccaggcattaaatatataaaaatgaaaaaatgatggtcagttattgaggtagccagacacacacatagataattgcaattcggagtgatgggccatgctatggggaaaacatgtagcagtttacaacactgtttctactctaaggttacttacgatctgattgaagaattaagatggaacaacactaaaaattagccattcacatgagaatggcacgcaacaagaaacaagtaagtgggatagacgtcaggtgtgattatttttcagagagagtagagattgctacctactagagtgctcaacttgacggcagaaagcaagatttccaaatagagacggtgatatagaatttgcaaaatatatttgtgggatatttaaggacgagcctagctgaagtgagagacatctgggtagctcatagacaatagggttggaggggtgttttggggctatttgcctgggcctttaatgccattctaagtttagactttaccctcaagaggaagcatgtgagggttaagagggcaagctgtagattcagataggttcgagtttgaatcaagtttcctgactgttacatactctactaatccaggcaacttacttaacttctctgtgctttagttgtctcacttgtaggtcttcctatccctacttttttactatataggatctgtggaagattacataagataatagacataaagtgcttagaatggtacataacacatagtaagcactcaaaaatattagttagtaatacagaatgtattacttctctgtattatgatcatttaggtctcagtctatgacagcagaatctttgttggattaccctttgattatagcctatcacaagtcttaaacttttcacatatattcattggaaatattcatttgtcattataacaatctcaccagacttcattattttcttttaaaaaagtaaaaaggctcaggtgagtggacataattagcgcaaagccacaaaattgatgaacagagagaagatctaaaattttccatagttggtgataattaatccagtatttctttcagtccatcaggctgccttctgatgtcaggaaataatgagataagcctgtagatgcatagaattccacattactgaattattatgagccttatgcagagggaagtgcaaatgacttcttgtactcaaagggtttgcctcagagaagacttgtcaaaaacatatctaactgctgaccaaatagctgaataaattctccctaactctagcttagagaaatggacacataaaaatttgtgttttgacagaggaaaacttggttaccatttgaatttattttaatttctgaattgggcttttgtgcacagaatggtttagagtttctggagttttaattgatatccagtaatgaaattgttaaaaatagtttaaactgtacttatatatctaattctcttaaactttctaaatgcccaacagagcagatttgcaaacataattagcaaaacctttctttgagtaagcttatcagctttactcttctttgtattctttcctgagactagtgatggaggagcagatttactgcttgggtggatgaaggttcctgggtctaaagtttgggaccatgatatgtgtcaaaggctgagaaccagtcattgatatgttaaacttaatgtcatacaattagatgtgtttcttgcgggaaagtatagagcaaaaggaccagcatacaactttggtaatgattgtccatttaggagtgaggaaaagaaatacttgcagagcacaraaagtataaagtgtgaggacaggcaggatagtgtcatagccct

SEQ ID NO: 78904 - DNA, 690 bp, Homo sapiens
cattattttatgtgttaaaatcaggaacaaaggaagtattttcaaaaaactgtggagaaatttttgtaaataatttgtaaaatgtttagtctttcctaggcttctggagtcaatttctttggtttaataaaatttgtaaactctgagaagctgtatttagttttcatccatagttcaatagaaattccttatccatagacaatagaacacaatataaaatarcaaatttaactacacatatacaatataggaaattgactaatagcacaaacatcaaatcagagtctcaaattgatttcctttcctgtttttgatttaaaagtctccaaatacagagtgaaacagtaagagagggaaggggagaagaccaatttgacaataaaaaaaaaaaaagacaggtgcttcacgaaagacagaagattgaaactccagctttcttactggtgacaaggggtgaagattgctgtatcacccactgctcagtgttgtttggggctgttaacaaagcagaataaagccaacatggaggcttttctctgtgtggttcatggagccaagcgttactaaatagcaccatgtgctggcaatggaggtgggcgacttggaacttgtttctttttgtcaattttctttaaatctggattgtcaactgagtaaatatttgacctgtgaggcaaatcattgaacatg

SEQ ID NO: 78905 - DNA, 562 bp, Homo sapiens
tgagtggcttggtctaggcaaaatattttttccagcagcatttctcattgctttatcttgttaaataaaatttaaaacatataataatgattacacacatcttagcaaaatattggtataaacattctgaattatgtggacacttgtgactcacattcctttcctaagtttttataaaattttaactaggatttgggattcaaaatatatatatatatatatatgagagcacttaagctacttagagtcaactgaagtccaataagatggagaatgacatgttcatcaaataatttatcagtggatttgcatctgtacaatacttctggagatgattcatgagcaagtgtggcacagtataaagaagagtgaaacaagagtcaaaagtaaggtttgaaccatgacttctaacattctaaacttcagttttctcatctatataatagtgatattgctttgtggtctaygggattgttctaaacattaattaacattaatttagtaaaataaatagaaatgcgtaaataatgtcttatatgtggcaagcatatttgaagttctc

SEQ ID NO: 78906 - DNA, 558 bp, Homo sapiens
tccccaaaatggatgttgctccagtggttggaggccaagccagtggcctgtgctggagtcagcctggccctggccccggtggcctcctgggttcctctcccaggccctgctttgtggagcacagaccagcccttcctaggctcaactttgccaggccctagaattggtatcttatggaagcagtgggtgacccatcctgccctgtcccctctcccttctggcccagacatatgttcagtgacgcccaaactatcccttgagcctcaccagcacagagtagagcagyggctgtcttcccctcatcccctgcttgatccttatgtccatctcagaccagtgtgtggagagccccctggctgctccttcctgttgtggctgggctttggcccccatgaataccaacggctcctactcagccaacgacctggacaagatggggcgggacagtgtccagaagacagacaagtacctggaggcggccctggagtacctgcaccagatattcccggtacaaactatggggcctgccccacagccatcagcgtccccttcttcaaa

SEQ ID NO: 78907 - DNA, 196 bp, Homo sapiens
catgtgtcaaccatggattaagagaatgataacactttgcagcagattttagacacacactgcttgcttatggcraaattcctagaaagttacctgtggagcttaataacttctagtcacttcctagttacctggaacctttttaaaggaagagatcatgtattacttgtttgacttcctaacatgcagcacaaca

SEQ ID NO: 78908 - DNA, 2168 bp, Homo sapiens
  misc_feature (1)...(2168): n = A,T,C or G
actgtcatcccccaccccaaccccagtgatttcctttggggacattttatacagagacttggaagataaacttgtcacttttagggaaatactcattgtagtaagttatcttcccaaccacacttccttaacggatgtgtcaacttttagtactacaaagtaactaaatattttaagtagcagtcatccacactgcagcatgagtatgtcatttccaaaactagatgctgtttaaaggtttaaattagcatcttcgaggtttttttttgtttgtttgtttgttttttagacagagcctcactttgttgcccaagctggaatgcagtgacatgatctcagctcactgcaacctccacctaccgggttcaagcgattcccctacctcagcctcccaagtagctgggactacaggcacccaccaccacacccggctaatttacgtattttttaatagagatggggtttcgccatgttggccaggctggtctcaaactcctgacctcaggtgatccacccatcttggcctcccaaagtgctgggattacaggtgtgagccaccgcacccagccccttcaaggtttttaatacatctggctttaaaatctcagaagcctagcaagactacctcctagaaacattgatatttattgacattttagggtattttctattgttgctctcttaaaggcaaagaaaacctatttttctagttagaattaccccttaatgcattgacaactctgaaagaagaaattctagccttttctttcctaatcagtgaaaggccctttcccccatattgccctctccgccccccatatttgggtatttctagcctactttttcatctgtatgccctgttactatggtgacaggcaccatagaaatagagaacaaagcagatgtaataagcatctcctacatggtttacaatgctaaaaagagatctaggattttcaggcgttgctttttcttcactgatgatagaactggaccagcccaacattgtgggggtatagggactggggttatgggctgannnnnnnnnnnnnnnnnnnnnnnnnnnnnnnnnnnnnnnnnnnnnnnnnnnnnnnnnnnnnnnnnnnnnnnnnnnnnnnnnnnnnnnnnnnnnnnnnnnncaaaatagatggttctgtatcagtggatattcagacatctgggcctcttggactctaagagcgtttcctttacatttatcgcatatggcagttcagaagcagtaagtacatgatctttgttttttttttaataaactttatttttagagcagttttaggttcacagcagtactgagcagaaggtaccaagatttcccatgtacccactgctcccacacaagtataacctcccccactattcatatcctcctctagagtggcacttgtgtgacaatttatggacctccattggcacatcattatcacacaaagtkcgtagtttgcatagggctacccttggtgttgtgcattctatggggaaatgcataatgtcaggtatccatcattatagcatcatacagaatagtatcactgccttgataatcctctgtactctgcctgttcgtgcctcccttcctttaacccctagaaatcattattcttttactgtctgcatggttttgtactttccacaatgtcatatagttagaatcatatatatccagccttctcaagttggcttctttcacttagtaatatgcgggttctggtggattcagatttccttacctctttcttctactgcctttggcttatctgccctgaatctcttcctataaactttcacctttgtaaactttttttctccaggcaaaatctttcacctctggaagcacagtgtgttgcctcttggaaatccagtcttattccacaaaagagaagtatgtaaacatagctgtttattaattctctctctttttctctttttgtcttcctcctccctccctctctctgtctccctctgtacctctgtgtttctctctgtcagttctgtaaggatcagttcaactctcttaaaatacccctgctgtcctcatgtggacatctgctgagaagcatgatgtcttcgaaattgatggccaagtggttaaagaggaattggtggaattatcacctggctcccaccagtgggctcctggtgagttgcct

SEQ ID NO: 78909 - DNA, 2168 bp, Homo sapiens
  misc_feature (1)...(2168): n = A,T,C or G
actgtcatcccccaccccaaccccagtgatttcctttggggacattttatacagagacttggaagataaacttgtcacttttagggaaatactcattgtagtaagttatcttcccaaccacacttccttaacggatgtgtcaacttttagtactacaaagtaactaaatattttaagtagcagtcatccacactgcagcatgagtatgtcatttccaaaactagatgctgtttaaaggtttaaattagcatcttcgaggtttttttttgtttgtttgtttgttttttagacagagcctcactttgttgcccaagctggaatgcagtgacatgatctcagctcactgcaacctccacctaccgggttcaagcgattcccctacctcagcctcccaagtagctgggactacaggcacccaccaccacacccggctaatttacgtattttttaatagagatggggtttcgccatgttggccaggctggtctcaaactcctgacctcaggtgatccacccatcttggcctcccaaagtgctgggattacaggtgtgagccaccgcacccagccccttcaaggtttttaatacatctggctttaaaatctcagaagcctagcaagactacctcctagaaacattgatatttattgacattttagggtattttctattgttgctctcttaaaggcaaagaaaacctatttttctagttagaattaccccttaatgcattgacaactctgaaagaagaaattctagccttttctttcctaatcagtgaaaggccctttcccccatattgccctctccgccccccatatttgggtatttctagcctactttttcatctgtatgccctgttactatggtgacaggcaccatagaaatagagaacaaagcagatgtaataagcatctcctacatggtttacaatgctaaaaagagatctaggattttcaggcgttgctttttcttcactgatgatagaactggaccagcccaacattgtgggggtatagggactggggttatgggctgannnnnnnnnnnnnnnnnnnnnnnnnnnnnnnnnnnnnnnnnnnnnnnnnnnnnnnnnnnnnnnnnnnnnnnnnnnnnnnnnnnnnnnnnnnnnnnnnnnncaaaatagatggttctgtatcagtggatattcagacatctgggcctcttggactctaagagcgtttcctttacatttatcgcatatggcagttcagaagcagtaagtacatgatctttgttttttttttaataaactttatttttagagcagttttaggttcacagcagtactgagcagaaggtaccaagatttcccatgtacccactgctcccacacaagtataacctcccccactattcatatcctcctctagagtggcacttgtgtgacaatttatggacctccattggcacatcattatcacacaaagtgcrtagtttgcatagggctacccttggtgttgtgcattctatggggaaatgcataatgtcaggtatccatcattatagcatcatacagaatagtatcactgccttgataatcctctgtactctgcctgttcgtgcctcccttcctttaacccctagaaatcattattcttttactgtctgcatggttttgtactttccacaatgtcatatagttagaatcatatatatccagccttctcaagttggcttctttcacttagtaatatgcgggttctggtggattcagatttccttacctctttcttctactgcctttggcttatctgccctgaatctcttcctataaactttcacctttgtaaactttttttctccaggcaaaatctttcacctctggaagcacagtgtgttgcctcttggaaatccagtcttattccacaaaagagaagtatgtaaacatagctgtttattaattctctctctttttctctttttgtcttcctcctccctccctctctctgtctccctctgtacctctgtgtttctctctgtcagttctgtaaggatcagttcaactctcttaaaatacccctgctgtcctcatgtggacatctgctgagaagcatgatgtcttcgaaattgatggccaagtggttaaagaggaattggtggaattatcacctggctcccaccagtgggctcctggtgagttgcct

SEQ ID NO: 78910 - DNA, 668 bp, Homo sapiens
tagtggagtaaaggttttttctgctgctggataaaagcccaamggaacttgacaaaaaaaatcccatggttggtttaagttgtaaaacagaatttgattcagaaattataaattctagtccaaattttaatctttatttaaaggtaaacttccttcctctctcctgcccccttctatcccttgctgctttataaactgccttggcagggagagcagtgggctgcttttcccacgtaagcaccgtcaggtctctccaagtatagagctcagggaaggacaaaaggaaaggagagggactagaaagttcttacttgactgatgctttaattctgccattttactctctgagcctgactgacgtttaaaggtaaatttttctctgtgcggccagtctggattctctgacagctcgcctgctgggcccctctgaccatacctgacacagcgttggcagtgtcctcattctactgatcaccaccactccccacttagcttctggattttacacagcccatgccaagcccagactctgctagaatcctcctgccatctacccaaagctctggttaacctggcaggctcactgccataatgattccaggtagagatcctcccagatcccatttcctgtaaaaccagcaaatgtcttggatgtctctctctggatc

SEQ ID NO: 78911 - DNA, 754 bp, Homo sapiens
acaatttgtgtgattcactttatttgtttaattgcagttgcctggaattgatcctgcaatatctctgaggcacgcctatataaaaccccagatgactccctcattccctttctcagtcagcacagtccaccatccacctccttgccacagatgtaaccactagttttgttactgaaaatggctcacagtccagaccccaaaagagggttcctggatctcacgcaagaaagaatttgaagtgaatccatacrgtaaagtgaaagcaagtttattaagacagtaaaggaataggccgggctcagtggctcatgcctgtaatcctagcactttaggaggcagaggtggttggtttgcctgagctcaggagttcaagactagcctgggaaacatggcgaaaccctgtatctactgaaatacaaaagaaattagccgggcatggcagtgtgtgcctgtagacccagctactcgggaggctgaggcaggagagttgtttgaacctgggaagtagaggttgcagtgagctgagatggcaccactgcaccccagtctgggcaacagagtgagactttgtctcaaaaaaaaaaagaaaagaaaaagaaaaaaagatcggtcacggtggctcacgcctgtaatcccagcactttgggaggctaacgtgggtggatcacgaggtcaagagatcgagaccatcctggccaacatggtgaaaccccacctctactaaaaatagaaaaaaattagctgggcatggtgg

SEQ ID NO: 78912 - DNA, 2088 bp, Homo sapiens
tttgtccttactactttctagaatctcttctttagagatacttggggtcaccaatgaacttttctcctcttctttttctggcttcttccagctgaatttcccaaaagaagatgatgttggtgattccttctttacctcttcttttaactggagtttgatgccagtgttccttttattttcagctttttcaggggagttcctaccctcagagagttggtcttctaatttctcagagaccttgtcatcctcctttacttctttcacagcctttgcctttttttctttcttctcctcctttggtttctcactaagtttgcgctttagctcactctgccgtcgccgttctgtctctaggaccacagccaagccagcttggcggtccagattccgccgctcctcatataatgggttttcatccacatatttctgggaagaaaaaagataaagactcaaaaactggtgaaaatacaagagaaaaaaatcttggccccgctactgttagaattcatttagtagaaatccccagaattatcttcctcaaggacataygggatgctatctgctgagcatctcccactaggattgaggagaacttagaggttatatggaatttgaagtgtcaatggctttttctggctcggacgccatttgacaaagtcaaaataattacttcagaaaagttggaaactccacagcctactacaaagaccaaccttgtatttctcattgtgttggtgacccttcacatgttgctccccagaaattggatcccccaaaaattcctcacagagctggcaataaaatccactgatgggaaccagaaactcagagcctggaagaagtagaaaaaagtcaaggaaataagtcgattccacccagaatgacagcaaccaatggaaatcccaccacccctttgcagtaaaatggttacagtatagagggccttacccactttgaagtcagaagcagtatttagatgaatcccaatggcacagtctttccaacctaaggcttgaactacagtcctctatttcttctacctcttgggaacattatactggttaatttaggagtttcctgtgccagattaattcctgttgctgagtctcctcaaaccctaactagcaccaagcatctcaggaaatataaaaactatactcccaaatagcccattaccattttatgatgatctctcatgttggtattaattactgaggaaactatcttctgtaaatctcaagggtatagtagcagcactagctacttgtgaaggtaagaaattgaaaagtttatgggctgagcacagtggctcatgcctgtaatcccagcactttgggaggcagaggtgggcagatcacgaggtcaggagatcgagaccatcctggctaacacagtgaaaccccgtctctactaaaaatacaaaaaatacaaggcatggtggcaggcgcctgtagtcccagctacttgggaggctgaggcaggagaatggggtgaacccgggaggcggggcttgcagtgagcagagatagcaccactgcactccagcctgggcaacagagagagaccccatctcagaggaaaaaaaaaaaaaaaaaagaaattgagaagtttaaagacaaaggaagtttctgcttctccacttaccccttaataacaatgactcaaaatattgtatagttcttagttgaaaaggcagttaaattactgcatctcctgtcctttttaacctggattccaaacaagtaagattttgggcccataagccaatgacaaagacaattctgttttaagtgacatgtctatgtttaacatctgtgaatagatttttggccatatgggtagagatcatggtcttatagatctctttatagcttcaggacctagtacactgttttgtacacagaaggcattcctacggctttgttaaaaggaatggctgtctcatgctatgctgcttcctacaatgttagttcagggacacctcttcctcaactgaatgtaaggaaaccacaaaggtggcaaaaaggaaacataccttttgcaggaacagttatcttgtcagtgcgctttatggcatcttgcttggcc

SEQ ID NO: 78913 - DNA, 2322 bp, Homo sapiens
ttttagggatattcgttgaaaatgaggatttatcttcactcaattttaacataaaatctaaagattacttagaattataaaacataatttaaataaaataaaaatatatataaaataaacattaaaatcaatataaaaggcaactaggaaagtttaacaatttctaacatttcaaagacttcttttttcccttattgytttttccttattgtttgtcaatttctaatttaaatacattaagaattagggccaggcatgctgactcatgcctgtaatcccagcactttgggaggccgtcacggccagatcacgaggtctagagatcgagaccaccccggacaacatggttaaaccccgtctctactgaaaatataaaaaattagctgggcgtgatggcacacacctgtagtcccagctactcgagaggctgaggcaggaaaatcacttgaacctgggaggtggaggttgcaatgagctgagattgtgtcactgcactccagcctgggccacaagagagagactctgtctcaaaaaaaaaaaaaaaaaaaaaattagaaaatcacacatatctcaaattctacattacagatcaaactgtctttcaataattctttggtttatctttatcttagccaataattcctcttttatctattgttattaaattccatttgattttcttatcttttgtatccaatagaattagtttctactgtatataatatactaacaaaaagtagcacagcttaaacaaaatagaagtctatttccctgcaatgtgaaaaaatccgcatatagctagtcgttattttcttagagagggtacaaaaaattatcatagttcctgatgacttctgtctcacagctctgtcaattttatatttgtttttcaagatagcttccaggactctgacatatgtgaatattctgttgactgtatagctacaaaatagaaagtttcctaagagttttaaaaatatagtaatctgtacgttcctggtgctgtatgccctaaagtcaaaaagacctttctttttatttacttatttttatttttttatttttgcgggtacataatatgtgtatatatttatggggcacatgatatattttggtacaggcatgaaaaacagctttcttcaaaacaatttataacctatttctatatgcatatcattgctaatattatattgctcttcttagattgctttccgggtaatgcaggataaagcaaagagactgattggtcttttgcttatgatagtttgattttctcatggtattttgattatagcgtctgtaacatacctaagaactgggattctctgtgcgggataaagaaaatatacagttcagatggactaggttacgtatacactgataattgtgaatttgaattagaattaaaagtacaaattcttaatgtgttttgtgtttaaaatatatattataatatataatacatatatattttatatgtatacatatatgaatttttaatacatatatgtatttttaatacatatattttaatacatatattaaatccatatttaatacatatattttaatacatatatttttaatacatatatacttaataactctgaagctgcctagaaaaaaatggcccacctggtagcaataactacctctatcgtgccaggcatggtggctcatgactgtaatctcagcactttgggaggctgaggcaggaggatcacttgagctccggtgttcgagatcagcctgggcaacatagcaagatcccatctctacaaaaaattaaaaaataattaaaaacacctctatcatggtctacagataccatttcctacaggctgattccagacctggggcagaaaacgtacaagatgagcctggatactgtaccataccatagaacaagaacactattatatatgactagggtctcatcaagaggatttaggagctgacttaaaaggactcccactggccaaagattgttatgtaaaagaataaaaacggcaaatgattcaaacatattaaatatgtttgttcatgagttcataatgatgcaaaaatacgtacatacacatgcacagagagagagaaccagagggagggaggacagaaaacatctattgtgtcatcctcaccagattctagggaaataatttattattttgggaaccagtaaataaagaaaagaaacaaggcatttgtttgccttgtctacatcaactataccactggataatctaataaaagatcaggagatgtttttctttatacagatagtctaactaacaaaaaacaaatgaatgatagattagaaat

SEQ ID NO: 78914 - DNA, 1234 bp, Homo sapiens
  misc_feature (1)...(1234): n = A,T,C or G
tgctgcagttactgatactttaactatgtttgaaaaaataaatattccgttgcagcaatgacaaagacctttttagattccattgtggtaacacatcaattaagagaacaagctgtagagctacatcgttcaacaccagagctaccagtcacgtacagctacaaagcacttgaatgtagcgagtctggattgaaataggctgctaagtataaaatacacaccagattttgaagacttagtactaaaaaaagaatgtgaaatacctcattaatatctttgtatatgatcacatgttgaaatgaaaatatttggatatattaagttataattttaaaaaccttgctttttaatgtggttcttggttagaattacgtatatggatcatggtgtatatttatgctggacactgctgctctagagccagattctataaagtgtattcctggccctgcctctccttggaaaatttatttaacccctctattcttccttaaaatgtggttattatcgacacctagaacataagattattgtgaaaattggttgaattaagccatggaaaacagagaagtgctnagtatataataagaattcaacacatgttaactgctaacattattaatatgccagaggagtttagaatttataattagcaggatttgatctgatagttgtcattttatagttatggaacccctaaactggtcttcattggacttctacaaaatagtgtatttttaacaggaaatgtaaaatattctgctcgaatggtttagaaaaatcttctcagaactccagaatggaaaatccaggaggcaaatttgtcatttacttttttttttttttttaaccacactgtgataattactgaagcatagactgcatagactgtgcaaaatgccccttttcctttgaataaggttttcttttgcttaattttctttaaataatttgatatgcttttacttattgttctagcgatattactaatgtttttcactgtaatagccttttctccatacatgtaagggttctgctttcgatgtggtggtgtgtgatttaagcagaacgtatcataatttggtgagccaggttctrtagaactacattaaaaattttttcaaaacagtaaaaaaaaaataaaaaggtgctatggtaaggatatggtttacgtgattaaaatttaaacagctgtttccatggttggaaaaaaaaggtctttgtatgcaaaaaa

SEQ ID NO: 78915 - DNA, 1261 bp, Homo sapiens
tgacattcttgtttagggggaaaatcattggtttggctttttttttagctatcagatgttttatagacgttctaatggctcatttggtgtgaaattaattatcaaagattcgcagagagttttaaattacattttctctgctcttcaaggcaaacaactggtactgtttttgtcactaatataaggttctcattgctgccttttttctgtacaatgaaatgataaaaacaaatcttcaacttattttaatgtgctaattgggggttattacagctcattttatttacactgagataaaaaagcactaattcattttccttgcacaaactacttagaaaagattgtaattgcctcctatacaaacatgtatttgtaaagagaaatgacataaagctaaaagcctagaaagaaaattgtttgggcaatgggctaagccaaacccttggttttctagatagagacctgttgcctgaacacatttccctttcaggttgctgaatcatacgaatggtgctacgtactctgcaagaaataaatgctggtaggacgcagaaaagttcagaaagagaaactaatacaagattatttcagagcatttaccttgccctacacagatttttagaattattctgtattaggtaaatacacaacagttagatataaaaagtagttgctttccagtgttactgggcctcatatctttggccacaaaaagatgcagacatccagtgttttacactgctgtggtgggtgttctctggccagcattcctgttcattttacacattgactcttgtcaatttcccttctggtgcttcaagtttcaaaatattcttagggttttaaacgtgtcatagctaattactgtgtaggatgacaggtataaagacatatcattagaaaataatcagataatgcttatgtttaatagttcaaattaagcaaatacttccatgaaacaattacaaatggcttcgttgtggaattacattttctaatttttaggcttatctttatctctcctttaggatcttcacagagttagaatctttttggaggctgagagagtaccagtagctttgctgtgttttgcttgcctgtatatggggagaaaatagcagtaacaaaggaactcactcaccmtccaggttcccttgagacgacagtgttgaatgggagatggatacacttggagtgagaactgtctgttgttgctaccacctgccagccactgtgcaaggaataatatcccatttcctca

SEQ ID NO: 78916 - DNA, 700 bp, Homo sapiens
gactcaaattctttgctgctctgtgcatatccatgaatgcaagtgaaagtattgagttttggaattacaaagaaattttagtgagttgacaatttgcaaataagaaattygtgaatgatgaagatcagctttatgctcagtttttgtagatcctgagagagtttcttaaaatggttatacaaatgtagtttttgagaagtgcatgggtaaaaataatatattattttaatttgcattttactaaggactattctaattaagtcagtatgtgagagatctggttgtgccatactgatacttggttattttttgcctttttctttttagccagtgtggtgggtggagttggctgcccaatagaataagtttgtttgtttgttttattctgacatccaaattctctttttgattgtaattctatgtatattgtatttttactgtatctctttcattgtttcatttctttgaagatggtgaaattcatggtagtttgaagactagagatgattcaacaaatggcatcacttagtgctgttaaaattcctccctgaggcacatcctcttcccccaaggtgggatagggccattaggaaatgaatcttcctagtgatgtggagctaacctcctaaatataaaagaagccaaagccttttgagtgtatctacaaggctttcatcaaaagatgttgatgaaaaggggg

SEQ ID NO: 78917 - DNA, 851 bp, Homo sapiens
ctcttttgtttataaattacccagtcccaggtatttcttcacagcagctggagaacagactaatgcactaagaatatagttactccaattgatgctaaaaatactctggtaacataatagataatgtcacagagtaggaagacatgctagggtttsagtgaattacccaatgcctttggttgcatttgctctactgcttctgaaatgtgcacttgcaatgctattaaagagtctttgagaaagagtttctcattgttgctaacatatttctttctctctgctcactaaggagagatttctatttcctttgtgggtcagttcacaaacctgaaaaactaataagctcagagcagaactccagtgaagaactgtttactttttgctcctaggccatatgagctggttttattaacacagccctcgtaatttctacatctgcaaaagctttgtaccttaatgtgcagaaaagatcagacccagcacacagcttgccatgctccataaaaaatttaatggaaaataaaatgcagtgttcagaagatcaatactgttattctctttcagcaaactgtgaattattgttttcataaaataataataatgccagcatattgatgttgaatggaggctaggtctgttgtctaacataaattcatatttaatcttttaatgccttcctgcataaacccccatgcctagatcctgagcatctgtcactctctaaagacaatgtaaaccaatgataattttgctgccatgttctttgttatttcagtagaaccattgagccagatacccacatttttcagaatgggcagaagttgaagatgtattctggccatccaacagcc

SEQ ID NO: 78918 - DNA, 558 bp, Homo sapiens
tgaggtgtggggaagcraagttcctcctaacttgttgctctatatgatctacacgatacaaaatggactctccaccatgtctgtgttccagtccattggaaggaggacaagcggaagtggagcctcctatttctacttcaggcacaactgggcagttgcatgcattgcttccactcacatcccatggagaactttgtcttacggtcctgcctacccagtggtgtgctggagccctgtcctagggttgtgtgagagtggattgtgagtcatgtgatagcctgaaatctgccatgggagaattaacaccatagaattggcaagtgctacatcttatttttcttccatgagagctggttgttaaacatctatcagcaatccacttcacctagctgcaaaataagttgaaacatagagttgttgttgtttttttcggatagctacatgtctagctaacaattctgtatttaggagcaacaggttgtacttctatagaagaagctaaggatggatatttgcaaacaattagaagtctctataaacatgacattatttggaaac

SEQ ID NO: 78919 - DNA, 775 bp, Homo sapiens
ttctcaacatagagagacctcttctcttggtccaggtactatgaaacatgacccacgtatgttcacatccctgtgccttgacttctgcatctgaaaatagggaaaaataatatcaactcacttcttttgcctggggacactaaaaaaagcacgtaaggcagagttgatcatattggcattttccatttgtctaatattaccacttaaaagtgcttcatgtttgttatctcatctgatcccccaatcaacctggtcacacactattatcctcgtgaggaaactgtgactcagagaggttaaaagttcttccaagggtcacacagcaagtcagtggtggcctgtttcttgattccccrttcattactttcccctagattctgctaacttctcatctgtgaaatgcagaccattcaagagaaagatgactcccagttgtgtctttcttttttttaagacaaggtctcgctttgtcacccaggctggagtgcagtggcgcaatctcagctcactgcagccatgatctccctgggctcaaacgatcctcccactttagcctccaaagtagctgggactacatgcgtgccaccacacctggctaatttttgtattttttgtatagacagggtttcgccatgttgcccaggctagtcttgagctcctgggctcaagtgatccacctgcctcggcctcccagagtgctgggattacagccgtgagccactgtgcctgactgttgtgtcatttttgttccctgttgctctaaacacttgcaacc

SEQ ID NO: 78920 - DNA, 1056 bp, Homo sapiens
catatccaccttgatttattacagaatattggatagttattggataatgagattatttcctaccacttgaagattcagctgttgccaagtaaactctaagtatttcatcaatggatttgtaatttgtggttgatggcaatgtaatactttgtaaacttgtacttccaagttggtctgattcatacatacagatatagcattttcaggctcataaatgagtcacaactttaaaatgggccctttcaagttataaaagtcggcagtttgaaagcattcatcctgcatctgtgacttgcaaaacatcaatgctaagtataatgtttgccaaataaattggtcattaaagtcttttatggaaagaaaaaccagtactccctcaaattcaattttctcttctttcttatgtagatatgcttcttgttttgttttgttttgttttttgtagttttattttttgagttggagtcttgctcttgtcactcaggctggagtgcagtggcrcaatcttggctcactgcaacctctgcctcctgcgttcaagcgattctcctgcctcagcctcccaagtagctgggactacaggtgcccgccaccatgcctggctaattttttatgtatttttagtagaaatggggtttcaccatgttggccaggctggtcttgaattcttgacctcaggtgatttgcccactaggcctctcaaagtgctgggattacaggcgtgagccaccacacctggccttgtttttattttttaactctttttggtctacctcctgagagaataatgaggaatagtatttgttggcaaggggctttgagatcctggtttaaagaatgcagattgaaaataccagcactgttaaattcacgtagaaaaaacatgaaaagctcagcagctcaggaatccaacctcaatgatctcatagccagttcattatggtcctcctcatcctgtcatccatgctgatgtacagatttcatggaatagaggtcctaagtgttttctgactttgaaaatccctgtaattatccatatatacattagcagcatgc

SEQ ID NO: 78921 - DNA, 2508 bp, Homo sapiens
accctagaagaatttgctctagatgcacattctgtgtggtcatggggcagagaggccctgctctggtttctatgacagtcaggccccagactctggtcactagaagacttccttacttttcacccaccattggaaaggaccatcactccttcccatctctcagataccactcagagggctttcctttcctcatttcttgctctgcaaaatatactgataattgcgcggtactcatcatctcctgcttcgctcactcagtcctgcctttcaactcaattccccatctgtgtctgtgctgccagggctgtggtggcaaggaggctgctcctagccagagccccaggattagccctatatgcaacctacactggaccatggcattcgctatgctttttttttttttcctgtccctcatcccatgccaagcttcctgcttcaaaaataaaaaatgcagatttatcttacagggtataagcttttctccacaatatcagcagatcttacactctatctttggacatacaagagacccattcttatcacatttgtccctttgccttcttccaaagaatagagaagctaagaaattctgtttcctgctactgtggactaaggaaacaggctccgggctggagtgagtggaaccccagagaaagggcaatcactgatctcctggaatcaaagggaagggcatgtgaacaggcagccagcctgattaggagcatcctgcaagtttctgtggcagaggtgcagaaatcaccaccgttcctcacccctaaacaacctccatgacctagctgtaaagtcccctctccccagaaggtcttggtgtagaggctgtcattgtcaaaaggaaagtcatatgtattcctagcattccaggaaggcagctgagtgcatttcccctgagaatctttgttacctaatatatacctaggaagatgctatgtgatcagtgctatgctcagccacaatatgagctaagcaggattctgtggactgctctgggagcctgctatgcgtatgtaacagagcttcaatgggaggacgtggttttcctttcaaaataaaacccctagaaataaactctggattataatctattaataatattggggctctctagtaagtattcctcaccaagcaatttcctaaaacaggaaatacattaccctatcgtaagaatggtctgtaaagagaggggaggcaaaagagttcatttcctattcagtttttaattgtgagacaaagctgcttcttagcacaattcatacactgatgtgatacacttaagagctaatggctctggttccatgatgcatatgtatgtacataccatacttactgagtgttcactatgtactcagagaacttaacttgcattttctaatttgacgtatgttgtaatgcatggacaatctttggctgaaacagttatattcttgactgtctctatatcagcaaagtgtccttagatacttagtttctagacacttagaaaatgtgcctgggtcccagtgaaatcttcaagttgttttttcactgccacagtgagtgaccagaacactattattaatawctagctaggccagccaggtgtggtggctcacacctggaatcctaccactttgggagaccaaagtaggtggatctcctgaggtcaggagttcgggaccagcttgggccaacacagtgaaaccccatctctactaaaaatgcaaaagttagccaggtatggtagtgtaagccgatagtcccacctacttgggaggctgagggaggggaatcacttgaacctgggaggcagaggttgcagtgagccaagactgcactgccactgcactccagcctggatgacagagtgagactccttgtcaaaaaacaacaaacaaacaaacaaaaaaacaaccttcctaggcatgtggttttcacagagcaggtaactacgaagagaagtaagagatttcatacgataaacaaagatttctagggggtaccttcatggccgttgcctgcagggaaatttcaactttggcatgggtgtgaaggtctttctaatctcctgctcctgcagcactttttattaaaaatgtttttcagagttgggggcagtaaatgactgaaaactgcaatgaaaagcatacactggaacatttaggcaagctaactcattagacgcttacctttaacaaatgctcaaatcttagatagacaaatttcttccatccttatttgccaaatactctcaggaaatacatcattaaatcactcaattaatatttactatatgctgttcgcattacattgcatcagagattgtcatcctgtattgaagagctttaaatagaaacatgcatctttctaggagttggcattttagggcttgggattcaatgataaattatcctttttgcttacaaaataataaacctgccctaaaaatagctcagaatagaaaaatgacatctcatactaatgtttatgttgcactcagacatacatgattgt

SEQ ID NO: 78922 - DNA, 2508 bp, Homo sapiens
accctagaagaatttgctctagatgcacattctgtgtggtcatggggcagagaggccctgctctggtttctatgacagtcaggccccagactctggtcactagaagacttccttacttttcacccaccattggaaaggaccatcactccttcccatctctcagataccactcagagggctttcctttcctcatttcttgctctgcaaaatatactgataattgcgcggtactcatcatctcctgcttcgctcactcagtcctgcctttcaactcaattccccatctgtgtctgtgctgccagggctgtggtggcaaggaggctgctcctagccagagccccaggattagccctatatgcaacctacactggaccatggcattcgctatgctttttttttttttcctgtccctcatcccatgccaagcttcctgcttcaaaaataaaaaatgcagatttatcttacagggtataagcttttctccacaatatcagcagatcttacactctatctttggacatacaagagacccattcttatcacatttgtccctttgccttcttccaaagaatagagaagctaagaaattctgtttcctgctactgtggactaaggaaacaggctccgggctggagtgagtggaaccccagagaaagggcaatcactgatctcctggaatcaaagggaagggcatgtgaacaggcagccagcctgattaggagcatcctgcaagtttctgtggcagaggtgcagaaatcaccaccgttcctcacccctaaacaacctccatgacctagctgtaaagtcccctctccccagaaggtcttggtgtagaggctgtcattgtcaaaaggaaagtcatatgtattcctagcattccaggaaggcagctgagtgcatttcccctgagaatctttgttacctaatatatacctaggaagatgctatgtgatcagtgctatgctcagccacaatatgagctaagcaggattctgtggactgctctgggagcctgctatgcgtatgtaacagagcttcaatgggaggacgtggttttcctttcaaaataaaacccctagaaataaactctggattataatctattaataatattggggctctctagtaagtattcctcaccaagcaatttcctaaaacaggaaatacattaccctatcgtaagaatggtctgtaaagagaggggaggcaaaagagttcatttcctattcagtttttaattgtgagacaaagctgcttcttagcacaattcatacactgatgtgatacacttaagagctaatggctctggttccatgatgcatatgtatgtacataccatacttactgagtgttcactatgtactcagagaacttaacttgcattttctaatttgacgtatgttgtaatgcatggacaatctttggctgaaacagttatattcttgactgtctctatatcagcaaagtgtccttagatacttagtttctagacacttagaaaatgtgcctgggtcccagtgaaatcttcaagttgttttttcactgccacagtgagtgaccagaacactattattaataactagctaggccagccaggtgtggtggctcacacctggaatcctaccactttgggagaccaaagtaggtggatctcctgaggtcaggagttcgggaccagcttgggccaacacagtgaaaccccatctctactaaaaatgcaaaagttagccaggtatggtagtgtaagccgatagtcccacctacttgggaggctgagggaggggaatcacttgaacctgggaggcagaggttgcagtgagccaagactgcactgccactgcactccagcctggatgacagagtgagactccttgtcaaaaaacaacaaacaaacaaacaaaaaaacaaccttcctaggcatgtggttttcacagagcaggtaactacgaagagaagtaagagatttcatacgataaacaaagatttctagggggtaccttcatggccgttgcctgcagggaaatttcaactttggcatgggtgtgaaggtctttctaatctcctgctcctgcagcactttttattaaaaatgtttttcagagttgggggcagtaaatgactgaaaactgcaatgaaaagcatacactggaacatttaggcaagctaactcattagacgcttacctttaacaaatgctcaaatcttagatagacaaatttcttccatccttatttgccaaatactctcaggaaatacatcattaaatcactcaattaatatttactatatgctgttcgcattacattgcatcagarattgtcatcctgtattgaagagctttaaatagaaacatgcatctttctaggagttggcattttagggcttgggattcaatgataaattatcctttttgcttacaaaataataaacctgccctaaaaatagctcagaatagaaaaatgacatctcatactaatgtttatgttgcactcagacatacatgattgt

SEQ ID NO: 78923 - DNA, 1145 bp, Homo sapiens
ttttttttcaatcaagactacaatgatggtgaatgaaataacatgagaaaacaaaacttgacatagagtggacatcaaaaaatgctatttgctctttctctttcctttaaggaatgagacaatggtatagttcacataygaatttggagtacttttcaggttttgaaaattgtgttattcttttacatgttttaaaataaagtagctgatagtaacacctacttgtggtatggaatactatttggaaaagggatggcaagtaaatttatatcctacagctgcaaattcattgtcctcaaatggagataaaactcaaattagctgatgtcttttcaaatatagtacaatttgtatcctcaagaattttattttattttgtttattattatttttttgagatggaatctcactctgttacccaggctggagtgcagtggctcactgcaacctctgcctcctgggttcaagcgattctcctgcctcagcctcctgagtagctgggattacaggcgtgtgccaccatgcccagctaatttttttgtatttttagtagagacagggtttcaccatgttggtcaggctggtcttaaactcctgaccttgtgatccacccgcctcagcctcacaaagtgctgggattacaggtgtgagccaccacgcctggcctttttttttttttttttttttaatggacaagaggtttttaatgttgcccatgttggccttgaacacgtagccttgcctccttatgcgccaggacaacgggcctcagccaccagggctcctatcctggagaattttatagtctttgattacgtaaacctttatcagccaataggaagactggtatttcatatacatggtctccagtattctacatatggaataacaattcttgtcttactgtatatgaggaaattggtggctttctttacatggctgtattatctgctttcacaccttagagagaaagccatcagctgaaccatttacttttcactttcttgaactgccgcgtgggagtacatttaaaacaatttgaactttatacatgatgagcatgatccaattttagtcttgtcctacatttccaaaaaatgtggcttattttcataaattacttttacatatgtttctgaccctct

SEQ ID NO: 78924 - DNA, 591 bp, Homo sapiens
taaatccccagtggaaaaaaatgattcttaggcagagtttttatcaggtgaagacatcraaaactgacagttggcttccaaatcaaaaggtgagagaaggcaatgtgtatatgctggcctatagcaatagtgagaaacacttatgccagcccatgtagacacttatgccagcccatgtagacagcctcacgaggggtgcttcaagtttctcacatgaaacctagcctagcctgacaaattcctgtgaaagccacagcccacgtaatctacaactgctgctcacaacatagctgcctcatccatcctgtcacaaagacagcacttcattgaaccgcaggcttattgagggctgcacctcagcactgagacaagtgatgccttcaccatccattccttcaacaagctgtcgtagtgaatatctggcttcatgtttatccataaaaaagtcagaagggtaatttcaaatcaaataccacgcttacatgaaagaaattagaagtgggtggtgagaaataaggcatttaatagcatttaagtctaattcttacccctattccctgcccaagacctctccctccgtggtaatgccca

SEQ ID NO: 78925 - DNA, 1057 bp, Homo sapiens
gacaatgcaaagccatcaaagatattcagcagggagtggacatgtttggatttgtgttttaaaaatatcatactaaaagaaaaataattctggcttctttgtgaagaacaaaatggacatgamcataaaagatgtaggaagaggaattaggaagaaattacagtagagtgaataagagagaatagtaatggattgggagaaataaagagaagtggtccgaggttattgattgttggattagcgtagaattttatgtttaaaaataatattattttggattttcaattatgtgtcactatcaacctataatattcaattttgctattgagaagttattcacattcctttgaatttaactttgatagttttagatattctcttaattataatgtttgaaacatgataatgtgctttaagggtgtatatttgcatatgtgtatgtgtgtgtgtgtgtttcattcattatactcagcatttgatggacattttcaatctggaaacttatgtgcctttgagttatagaaaatggtctctgctgattaatcacttcaccatcactatttttcaaagataattaaaatctattgtctgctggtatcttctctttttttctctttgttttcaggtatttatgcctttaatatttttaatattccttttagtgaggcttagagaagaaaggcattaacagcatgtggacaattcaacatgcttaatagcaattctcatgatattgattttaccactttttgcttcttgccagtattgcgtccagcaattatgaagagacatgactattttgttttataagacattattcttttcaggataagattttaaaaagctatacgcaaaatctcgttagaactctattaaaacagaacaatgaaattgcaagatttaaaagaagcacaaaaaggagaaaatttataatttatcagggattgacttaccttcttctactaaatactcctctcttaccaacaattggcttcctgcacatagtagaaaacatgacaactgaaagtgccaacattttatatcttatgactatcat

SEQ ID NO: 78926 - DNA, 570 bp, Homo sapiens
cctcttctgtgcttccaatgtgtcttttatcatagtggttcctgtacaagtactaaggaaagaagacagcacggtatgaagtatgagaatgaacaaagtatgcacatggacaatcctttctttttttttagagacaagatcttgctgttttgctcaggctcttttgcagtgacaccatcactgcaacctcgtactcctgggctcaagggattctcccacctcagcctgagtagctagtactacaggtgtgygccaccacacccagctaatttttatagttttttgtagagacgaggtctcactatattgtccaggctggtcatgaactcctgggctcaatcctttttcaaaagacagctttgttgaggtataaatcacataccatacagttacccagttaaaatacacaattcaatggtttttagtatattcacagatatgtgcaaccattgccacaattagaacattttcatcacttcagaaagaatactcttcccctttagtgaaccaccccttgcctccagcaactactaatcaatctactttttgtctctatgcattttcctgctc

SEQ ID NO: 78927 - DNA, 570 bp, Homo sapiens
cctcttctgtgcttccaatgtgtcttttatcatagtggttcctgtacaagtactaaggaaagaagacagcacggtatgaagtatgagaatgaacaaagtatgcacatggacaatcctttctttttttttagagacaagatcttgctgttttgctcaggctcttttgcagtgacaccatcactgcaacctcgtactcctgggctcaagggattctcccacctcagcctgagtagctagtactacaggtgtgcgccaccacacccagctaatttttatagttttttgtagagacgaggtctcactatattgtccaggctggtcatgaactcctgggctcaatcctttttcaaaagacagctttgttgaggtataaatcacataccatacagttacccagttaaaatacacaattcaatggtttttagtatattcacagatatgtgcaaccattgccacaattagaacattttcatcacttcagaaagaatacycttcccctttagtgaaccaccccttgcctccagcaactactaatcaatctactttttgtctctatgcattttcctgctc

SEQ ID NO: 78928 - DNA, 1080 bp, Homo sapiens
attagcaattttaatttcaccgtggtcctgtggtcctgtgatctcaccctgcctccatttacsttgtgatatcttattaccttgtgaagcatgtgatctctgtgactcacaccctattcgtacactccctccccttttgaaaatcactaataaaaacttgctggttttacagctcagggggcatcacagaacctgccaacatgtgatgtctcccctggacacccagctttaaaatttctctcttttgtactctgtccctttatttctcagaccagccaacacttagagaaaatagaaaaaaacctacatgaaatatcaggggtgaatttcacctgatatctggctgaatttcccccgatactgagacattgctgaagctgcttatcagcttaaggagattctaggctgagacaatggggttttctaaatatacaatcatgtcacctgcaaacagagacaatttgacttcttctctttctatttgaatacgctttatttctttctcttgcctgattgccctggccagaatttccaatactatgttgaataggagtggtgagaaagggcatccttgtcttgtgccagttttcaaatggaatgcttaaggctgatatcttcatcctgcttgtgatagctcttgagtcagaagaccagttaagatttctgacccatggaaacagagataatccatgttgttgttttatgccaccaagttgtgggctaatttgtaacacagagatagataactaatacatctttactggcactgaagttatattatatattatatatgtaatatgatattaatatattatatataatattatatattgagagcagaggcagaatgtgctgttgtctcaagacatgaaaacaatttccacaggaattggcaaatggcctcattgcacctctgttctaaatgtggtgataacataagtaaggatgtgtcttccctttttatcttaaatacataggattaacaaaactgaccaaactttaaggtgatttggaatgacttttaattacatgagatatttctgactgcttggaaatggttcgctatggactagagaatat

SEQ ID NO: 78929 - DNA, 1080 bp, Homo sapiens
attagcaattttaatttcaccgtggtcctgtggtcctgtgatctcaccctgcctccatttaccttgtgatatcttattaccttgtgaagcatgtgatctctgtgactcacaccctattcgtacactccctccccttttgaaaatcactaataaaaacttgctggttttacagctcagggggcatcacagaacctgccaacatgtgatgtctcccctggacacccagctttaaaatttctctcttttgtactctgtccctttatttctcagaccagccaacacttagagaaaatagaaaaaaacctacatgaaatatcaggggtgaatttcacctgatatctggctgaatttcccccgatactgagacattgctgaagctgcttatcagcttaaggagattctaggctgagacaatggggttttctaaatatacaatcatrtcacctgcaaacagagacaatttgacttcttctctttctatttgaatacgctttatttctttctcttgcctgattgccctggccagaatttccaatactatgttgaataggagtggtgagaaagggcatccttgtcttgtgccagttttcaaatggaatgcttaaggctgatatcttcatcctgcttgtgatagctcttgagtcagaagaccagttaagatttctgacccatggaaacagagataatccatgttgttgttttatgccaccaagttgtgggctaatttgtaacacagagatagataactaatacatctttactggcactgaagttatattatatattatatatgtaatatgatattaatatattatatataatattatatattgagagcagaggcagaatgtgctgttgtctcaagacatgaaaacaatttccacaggaattggcaaatggcctcattgcacctctgttctaaatgtggtgataacataagtaaggatgtgtcttccctttttatcttaaatacataggattaacaaaactgaccaaactttaaggtgatttggaatgacttttaattacatgagatatttctgactgcttggaaatggttcgctatggactagagaatat

SEQ ID NO: 78930 - DNA, 1080 bp, Homo sapiens
attagcaattttaatttcaccgtggtcctgtggtcctgtgatctcaccctgcctccatttaccttgtgatatcttattaccttgtgaagcatgtgatctctgtgactcacaccctattcgtacactccctccccttttgaaaatcactaataaaaacttgctggttttacagctcagggggcatcacagaacctgccaacatgtgatgtctcccctggacacccagctttaaaatttctctcttttgtactctgtccctttatttctcagaccagccaacacttagagaaaatagaaaaaaacctacatgaaatatcaggggtgaatttcacctgatatctggctgaatttcccccgatactgagacattgctgaagctgcttatcagcttaaggagattctaggctgagacaatggggttttctaaatatacaatcatgtcacctgcaaacagagacaatttgacttcttctctttctatttgaatacsctttatttctttctcttgcctgattgccctggccagaatttccaatactatgttgaataggagtggtgagaaagggcatccttgtcttgtgccagttttcaaatggaatgcttaaggctgatatcttcatcctgcttgtgatagctcttgagtcagaagaccagttaagatttctgacccatggaaacagagataatccatgttgttgttttatgccaccaagttgtgggctaatttgtaacacagagatagataactaatacatctttactggcactgaagttatattatatattatatatgtaatatgatattaatatattatatataatattatatattgagagcagaggcagaatgtgctgttgtctcaagacatgaaaacaatttccacaggaattggcaaatggcctcattgcacctctgttctaaatgtggtgataacataagtaaggatgtgtcttccctttttatcttaaatacataggattaacaaaactgaccaaactttaaggtgatttggaatgacttttaattacatgagatatttctgactgcttggaaatggttcgctatggactagagaatat

SEQ ID NO: 78931 - DNA, 958 bp, Homo sapiens
cctttcagcagagccctaggagcagccgagacctagtctcctaaatttttacaactctccataggcatatttacaaggtgttacctgaaaataccaacaagccaccagacacatttgtgtccaattcattaaaaagaatttatattcattccactagtaaaaatgatttattcctctggctctgatttgaaaggatgtaataggtttgagtaaacaataaccatctctggccttttttccccttctttgtaggcgttagccactctacaggtctaaacccttgttatagcaaaagatcttagtgcataaagtggataagatctaaagcacacaaatttagttttgactataatgtacctcttgggattatgtaaaagccacagccaaccagctcagctcctgggtattattaatagtagtaatgaagtaaaacattttgaaactggactcaaattgtgttcagtgtgctaaaccagggatgctgtgaaatgaatgtaaattttaacaagcctgttctgagctttagacttctyattagtgcccctttcccaagtgtaatgtgcagaatgagccactagagggcaatcattttctttaggaaaaagatgctgtttgaaagcactgtacattcatttaaccacaatgacaccatgtctcacacccaggagaatggatataatcaaaggaaaaggcaatatcaagtgttggaggggacaaggagcaactggaaatctcatatgttgctgatggaaacatatggtactgccacttggataacagtttgcagtttcttaaaaagttaaaatcatgttacaataaaacccagcaattccacgtatatgaaactacccaagataaatgaaagcatatggtcaattaagatatgttcatgaacattcatggcatcacacataatagacaaaaattggaaacaatccaaacaaccattagtggtgaa

SEQ ID NO: 78932 - DNA, 1023 bp, Homo sapiens
cgtttccttttatcctttttattttatttatattggcattttcttttattgtaactcttttttttcacttttcacatatgttcagctaactacagaacatttccatttcaattcagtgtgtataaaaataaacacaccattttctccaagaaaaaatgttatatgtttttggtaaccaatttctaggccctaaaaatgcaaatctttgggcgattttagctcatgtctgtactttagtcttaataccctatcaggcatgacatatttcttaaaaataactctagcatctgttctttccttcatatttccactgttcccataatataaaaagcttctaccactgaaaatggtttcctaactggtagctttcattttaattgttcatatctaatattctttgtgcacacctatgatacagcttattttttctttcatggattttatcatgtcttagcttcaaacatattgtctacaaagaaaacactcaggtgtgttgcttggctttcaagaacacacacacaaacacacacacacacacacacacccctcactctcaagcacacacactcacacacatatgcacaccatgacactttatcagacctacttcttatcttctcactctccatcttgaattaaccacacaagtcaaaatggtctcacaactagcctttgggtttatcattgtactaacagagactaactaacccaagccctagaacatactctggactcagtccaagtttattacacagagctccatgtgtttctcaaatgccatgcttagggaacctctatacattttcacccttagaatgcttagaatgaactcattttatatcctgcttgcctaaattctactcagattttaaagctcactaatctccaacttatcactaacacttttgcatactgttatacatarctatcttttcttttttctacagtattttggcatttagaagatagtattatgacctttagttgtttctagaagtagattataaccttcctaaaaaggat

SEQ ID NO: 78933 - DNA, 1065 bp, Homo sapiens
cctttgtgtggtgaatgataagcagatgattaagtaaagtttttcttcactgaaacagcactttaaaaggatgcttaacaaacaatatttaaaaggatttactgtatttcctttctaaatgtttgtataagagagggtggcatttatttccacattcaacaaacattctgtttctacaacagaatcacagatgtcaatcaacggagcaacaaatattctgccttcactttgtagggtaaggcacatgactagcgaaatgaaaatgaaagcatggcaaataaaggcaggtttcacctggagggtttactttgtgactatgaaactctgggcttctaagggataggacttgaaaattttctaatgccttccagtagtttccaagggacgtgaagaaccaattacctatctaggttcctctccttctctcatcttcctcctcataaatcacacaagtccaggagagtgtaaagacatttatatttctgtgcactgagcaaacctttctttccgtaaacaggagtttgttaaggaagtattctcctcttaagaaaattggaacaacacagttttttacatttttatagctttctaagatttttcacaaggtggatcccaaatttttaggtttcacagactagtaaaattatcaaaaaatgtctgactttgtattttgccagataatggtatttgagagagaaaaagttatatgtaacatcaccattatttatgaaaataaaaggtcatgatcatggtcaagggggtcattttacataaaaggtcttttaaatagcccaaaattgactctttggaaaactctgctgtccaaaattttcgccttctgcagagttgtagacactttctcaaaaactttcataatcaccctctagagtaggcaaagcatatattgtkctcatcttgcctgttaagaaatgtgtgctaagaggtacgaagtaactagttgaaaatcacaactatgttgtggtagacctcaaagttgaatggagccattggactcctatcttcctcattctgcaatactgcctcctggaatgctatttcaattgt

SEQ ID NO: 78934 - DNA, 1065 bp, Homo sapiens
cctttgtgtggtgaatgataagcagatgattaagtaaagtttttcttcactgaaacagcactttaaaaggatgcttaacaaacaatatttaaaaggatttactgtatttcctttctaaatgtttgtataagagagggtggcatttatttccacattcaacaaacattctgtttctacaacagaatcacagatgtcaatcaacggagcaacaaatattctgccttcactttgtagggtaaggcacatgactagcgaaatgaaaatgaaagcatggcaaataaaggcaggtttcacctggagggtttactttgtgactatgaaactctgggcttctaagggataggacttgaaaattttctaatgccttccagtagtttccaagggacgtgaagaaccaattacctatctaggttcctctccttctctcatcttcctcctcataaatcacacaagtccaggagagtgtaaagacatttatatttctgtgcactgagcaaacctttctttccgtaaacaggagtttgttaaggaagtattctcctcttaagaaaattggaacaacacagttttttacatttttatagctttctaagatttttcacaaggtggatcccaaatttttaggtttcacagactagtaaaattatcaaaaaatgtctgactttgtattttgccagataatggtatttgagagagaaaaagttatatgtaacatcaccattatttatgaaaataaaaggtcatgatcatggtcaagggggtcattttacataaaaggtcttttaaatagcccaaaattgactctttggaaaactctgctgtccaaaattttcgccttctgcagagttgtagacactttctcaaaaactttcataatcaccctctagagtaggcaaagcatatattgttcwcatcttgcctgttaagaaatgtgtgctaagaggtacgaagtaactagttgaaaatcacaactatgttgtggtagacctcaaagttgaatggagccattggactcctatcttcctcattctgcaatactgcctcctggaatgctatttcaattgt

SEQ ID NO: 78935 - DNA, 1065 bp, Homo sapiens
cctttgtgtggtgaatgataagcagatgattaagtaaagtttttcttcactgaaacagcactttaaaaggatgcttaacaaacaatatttaaaaggatttactgtatttcctttctaaatgtttgtataagagagggtggcatttatttccacattcaacaaacattctgtttctacaacagaatcacagatgtcaatcaacggagcaacaaatattctgccttcactttgtagggtaaggcacatgactagcgaaatgaaaatgaaagcatggcaaataaaggcaggtttcacctggagggtttactttgtgactatgaaactctgggcttctaagggataggacttgaaaattttctaatgccttccagtagtttccaagggacgtgaagaaccaattacctatctaggttcctctccttctctcatcttcctcctcataaatcacacaagtccaggagagtgtaaagacatttatatttctgtgcactgagcaaacctttctttccgtaaacaggagtttgttaaggaagtattctcctcttaagaaaattggaacaacacagttttttacatttttatagctttctaagatttttcacaaggtggatcccaaatttttaggtttcacagactagtaaaattatcaaaaaatgtctgactttgtattttgccagataatggtatttgagagagaaaaagttatatgtaacatcaccattatttatgaaaataaaaggtcatgatcatggtcaagggggtcattttacataaaaggtcttttaaatagcccaaaattgactctttggaaaactctgctgtccaaaattttcgccttctgcagagttgtagacactttctcaaaaactttcataatcaccctctagagtaggcaaagcatatattgttctyatcttgcctgttaagaaatgtgtgctaagaggtacgaagtaactagttgaaaatcacaactatgttgtggtagacctcaaagttgaatggagccattggactcctatcttcctcattctgcaatactgcctcctggaatgctatttcaattgt

SEQ ID NO: 78936 - DNA, 1065 bp, Homo sapiens
cctttgtgtggtgaatgataagcagatgattaagtaaagtttttcttcactgaaacagcactttaaaaggatgcttaacaaacaatatttaaaaggatttactgtatttcctttctaaatgtttgtataagagagggtggcatttatttccacattcaacaaacattctgtttctacaacagaatcacagatgtcaatcaacggagcaacaaatattctgccttcactttgtagggtaaggcacatgactagcgaaatgaaaatgaaagcatggcaaataaaggcaggtttcacctggagggtttactttgtgactatgaaactctgggcttctaagggataggacttgaaaattttctaatgccttccagtagtttccaagggacgtgaagaaccaattacctatctaggttcctctccttctctcatcttcctcctcataaatcacacaagtccaggagagtgtaaagacatttatatttctgtgcactgagcaaacctttctttccgtaaacaggagtttgttaaggaagtattctcctcttaagaaaattggaacaacacagttttttacatttttatagctttctaagatttttcacaaggtggatcccaaatttttaggtttcacagactagtaaaattatcaaaaaatgtctgactttgtattttgccagataatggtatttgagagagaaaaagttatatgtaacatcaccattatttatgaaaataaaaggtcatgatcatggtcaagggggtcattttacataaaaggtcttttaaatagcccaaaattgactctttggaaaactctgctgtccaaaattttcgccttctgcagagttgtagacactttctcaaaaactttcataatcaccctctagagtaggcaaagcatatattgttctcatmttgcctgttaagaaatgtgtgctaagaggtacgaagtaactagttgaaaatcacaactatgttgtggtagacctcaaagttgaatggagccattggactcctatcttcctcattctgcaatactgcctcctggaatgctatttcaattgt

SEQ ID NO: 78937 - DNA, 655 bp, Homo sapiens
ctgtgtggttgctgagtctaccccataaggtagttgtttaccttttatggtttatgttcttggattgtgcactgggtttgatgactcaactgggtaagggccagatggttttctaatgtatcttttgtctccagaaggacagaaatttgagctttaaggcatcttgagttaccttgaaatgtaattttttcttgttttttttgttttattttttatgctttgttattgaggcataatttacattaaacgacatgcacaagccagacatggtggctcacacctgtaatcccaacactttgggaggctgaggcaggaggattgcttgagttcaggagttcgagamcagcctgaacaacatagtaagacctcgtctctacaaaataaataaaaaaataaataattagctagtgtgatcgtgcatgcctgtagtcccagacacttaggaggctaaagtagaagaatggcttgagcccaaggagatcaaggctgcagtgagctatgatcatgccattgcactctagcctgggtggcagagcaacaccctgtctcaaaaaaaaaaatgacatgcacagatcataaatgcacagtttggtgaatgctgacataggcatatccacataactcacactgcaaacaagatagagaatatttacat

SEQ ID NO: 78938 - DNA, 1219 bp, Homo sapiens
taaagtttgcagtgttatgtttggacgtaaagaaaaatatyttgaatgggatacaaaaggaagctatgaagagtacattactggaaattctttaaaagtagccaatggcatgattcacttggattgggaggtgaatgcaggaacatcaattttacttttcatctttgtcattaattgtatgattttggatacttaatccatcagcattttacaatcctcttttataaaaccataataataaagtagaatgccttaaaatgtgtaatactagaagtagttatttaaacaaaaggtcagaattaactaatcttgggtgggagctatactaggaacccttgaagaaaacaccactgcatttcttaggtgtttgaacatctgcctcccaggactaaacacttagaacttattaggtcaatttcagctttccaaaagctgggcttggacaaaatctatttatataatattctttatataaccattatgttttccatcacttttccagatatgcattctatagtttgtcaaatgtgtatgtagagtttctttctaaaacgtgatatttacataaacgtatttctaaaattattgttcaatgcaaagagttctcttaaaatagctacatacattgcaacttagaatctctgggttttcttattttgtggcatgaacattccctggagtcaataatttaagtcagtaggatagctaaaaatctccagtttatgcctcaaaattttgcctgtttaatttctaagccagtagttatataaaatccataggagtctagactaaattaacaaaaactgaaataatatccaatgtgtgggaactatctgatatggcccaatagtctgatcaagtttttgaaacccccacacattctcgtttgtcttgaacctggagaaaattcagtacctgattcacattgaagagtaagctcaaacctcttccagagacactcacttttctctttgcttggagagtttcaccatgattaaaagtaaaacaatttccatattcagtgaagacatgtgcaaaatcctccaatatgtaaatgaaccaaaaaaaaccatcaatttgatatttttgtcacttctcaagtttgccataacctttttttttaaagcacaaatacctaacaagactgcagaaatatcagagagaatagtctgatttatatgtgtattcagtgatagttttttttttttggtaatatgca

SEQ ID NO: 78939 - DNA, 870 bp, Homo sapiens
agggactgtggattctgcttgtaccttgtttatttatgggttactagagattggtgagtgtttcaaataaacagagtttattacagaaatttatgtgatttgatttattccaattggragaaacagaatggtgaaacatgaataaatttctacttattgtatctttaattagaatattctgtcagagtctccaaaattttaatctatagatcagtgttgtttcaaaataaaatgttaatagcaaaatgacaaaacataaggtatccatatccgtcaaactatttatcccattcctaggaatttgttctgtttttacatagaagtgtaagaagctataaagatattcataacattttttatacttgtggaaaaaataaaaacatctaactacctaccaagacttcaatatgtctacaatgcaattttatgcagccatggtatagaagtataattatgatatgaaaagatatccatcaaatattcactcaaatgggttttaaagcagtatgttctatatataagtatattcaagcatgaacaacttgaaaattataatagcagtgattatctcaggatagtggaggcttattttctctttttagtttttcctttcctgtactttatatatatttttacaattagaaattagaatgcagaaaatatatagtagcatttatcagaggataagacaatgtttgtatattacgttttcataattttttgatatctcactgacttttggtattaaaaagacttgaggtcttcgaagagttgtgttgcttttgtttaacagctgtttatgtttggaaaaagggagaagaatttaatattttatgtacagtgctataattgtttgagtagacatgggga

SEQ ID NO: 78940 - DNA, 870 bp, Homo sapiens
agggactgtggattctgcttgtaccttgtttatttatgggttactagagattggtgagtgtttcaaataaacagagtttattacagaaatttatgtgatttgatttattccaattggaagaaacagaatggtgaaacatgaataaatttctacttattgtatctttaattagaatattctgtcagagtctccaaaattttaatctatagatcagtgttgtttcaaaataaaatgttaatagcaaaatgacaaaacataagktatccatatccgtcaaactatttatcccattcctaggaatttgttctgtttttacatagaagtgtaagaagctataaagatattcataacattttttatacttgtggaaaaaataaaaacatctaactacctaccaagacttcaatatgtctacaatgcaattttatgcagccatggtatagaagtataattatgatatgaaaagatatccatcaaatattcactcaaatgggttttaaagcagtatgttctatatataagtatattcaagcatgaacaacttgaaaattataatagcagtgattatctcaggatagtggaggcttattttctctttttagtttttcctttcctgtactttatatatatttttacaattagaaattagaatgcagaaaatatatagtagcatttatcagaggataagacaatgtttgtatattacgttttcataattttttgatatctcactgacttttggtattaaaaagacttgaggtcttcgaagagttgtgttgcttttgtttaacagctgtttatgtttggaaaaagggagaagaatttaatattttatgtacagtgctataattgtttgagtagacatgggga

SEQ ID NO: 78941 - DNA, 632 bp, Homo sapiens
cacctcactaatttaaagcctgaggcaagatcatgatagtaggaaaaaatatcactgtgccttactgacatgatattatcctttaaaggaatatattcaaaatacttaaaatctgctaattctgaaagaataggtcatagaracttgaactcacttttccctttctttctccctgttcaaggcctcaagctactgtggaaaaaccatatcgcattcaaaagtgtctttcaactataaaaagaataccccagagaatcttctccaaaaacatttcttccagctgtctgtggggccttgtgaaatcaaaggtaacttttagctcatgagtcggcaaacaaaactttgaaattcatatatcttttccagtgggttggtttgggaaaatttatggttttcctgcccttgggataatcctagccctgaaaatattctgtatcatagtggagaagataaagaaagaaaagaatagtgaaagggatcacatgttgttaacaccttttgtaagccatgccctcttgtgctttcacttttaaatacatcatctcatgaaatatttatgcttacactgccatgtaggttatactagctctagtttaaaatggagtaatctgagtgtttgagagtcaaattta

SEQ ID NO: 78942 - DNA, 1660 bp, Homo sapiens
accactctctgtcactgtgaacccagctgtattagtctaggttctccagagaaatagaaccaataagagatacaactatagatatagatttactataaggaattggcttgcatgattacggagactgaaaattcaaagatctgcaataggcaagttggagacccaagaccaaaagcaacaggagactgatgttccagtttgaaaacagacagagaaggagaattttttctgctgcagccttttattttattaggccttctcaacagatttgatgaagcctgcccacactaatgagggcaatctgctttactcagtccaccaattcaaatgtcagtatcatctagaaataccctcacagatacaccaagaaataatatttcaccaaatatctgggcacctcgtagcccagtcaagtggacacataaaattaaccatcactctcactaaacattgctaactcatcaactaaaccttcactaccatcccactcaacctcacctcacctcactaccaaccatcaagtcaacctcacctcactaactcatcaacttcaaccttcatcccacatggaaaccaggttcaccaaagggacatgcatcccttctctgaatcacgagctccaaccattcctggtagcagaggctgtgtctaaccatcagtctttctctgaaggagaaaagaatgccataaaaacacagcatttcccaaagttgattctatggaacaccagtcccataagatactctggggaaaaaaagaaagatttcttgaaaacaaaatgttatatccccatatgagttttctatgctgcataacatatcaccacaaacttagcagcttaaagcaaccattttttatctaggtcaggagtccaagcttggcttggctgggtcctctgctcagagtctaacaggggtgaaatcatggtgttagctatgttctttcctggaattcagggtcctccttcaagctcatatggtagaattcagctcctggtagaggctgaactgaggcccccagcagagagagatgtactctctccacaggcagtcgcacttagctgtctgttcttcaaggtcagtgcgaagagcccagtccctcttatttagtcaggcccacacaggagattctcctttttgactaatgtaaagtcaactgatttgtgatccttcacttttgctacatcatatcgcctactcacaggagtgctatcccatcagtttcacaaatcccaccctcactcagtggaagatcagataggacaggtaggctagggggttagaatcctaggagcctgccataactcagatttagtttgtgaattagcatattatgggctctgagaaatcctatagtaaagaaatacggttaactttgttccacctattgttaaccaaattcatttggcccatataaaaacgtaattttcacatagcaccaattatcatctttgtagttactggtttgtgtcatccatgttttgggatatgctgaaacagaaaaggcctgcactgtgaagttagactgtccatgattaaaattcccacaccggaccaggtgcggwagctcataactgtaatcccagcactttgggaggctgaggcagattgtttgagctcagaagttcaagaccagcctgggcaacatggcaaaaccctgt

SEQ ID NO: 78943 - DNA, 849 bp, Homo sapiens
caagagttctagctcgccagtggccttatattatgaaaggatgagggactttactgccctgtgggatacaagtcttgccttccagctcttccttcctacacagcagagtgctttgttgtgctttgttaaacagcctctcaggagagaagcctgggcacctcagtcagccttggctgctgtggctcaggaaggggccacagttatttctgtggtatgtggctggagtagaccagttattttctaaaagctttccccttgctgggcagcccatttgctagcctttagctgaagagcagaatttgtggggatacttttgtctgtgcctattagcatttctggatttctggcttcttcagtggcaagtctgaaatatgtgaagtgaaaaagcaaagacccaaaaccccaaaccaaacaaacccagggaacgttccactatgttgttctttgggggttaagttgcctagctcatctgtcttccctctacctttcagactctcctaatgtttgttttatgtataatgcccagggtttgtagttctacttagcaggtggaataggaaaaagtatgtctacatcttccctgatgtggaagtcccctgaattctatcatttaactgctcatgattttgcaattattccaatgtggattttggctgttctagatttgacacagacagtttttcttttcacatgcacatcacctgagccaagagagcaccctaggccacgtgtcaaacaccctgtggcaataagttaacattgtcaagtctccctaatgaagcatgttgacaaatatgttatacawacaattcggtgctggctttatatttctgcatttatatctatgca

SEQ ID NO: 78944 - DNA, 1311 bp, Homo sapiens
tgcattgtgttatcttaataattaaccatcacacaaaatcaccaagatgtggatattattatctttttgaatacatgaaaaaaagtgaggctcaaagatttaagccactttttctaggccacacagatattaagtaacagaccctggtttgtgtgactctcaatcctgggttctttccataactccattaacttcatactgcctgtcatttccaagctcccaatgacacccaatgtcattttcttaatttctgcaacactgtaacctaagacagatggcttagggagtagtgctgctttcctagaggacagccaaggaccatagcagcatgttgtcttggaggtttctctcccttcatcgctactattctccttcctccacttcaagtcacctttctggaactcatttaccaatcaggaccaattcacttgctaggttagtgtcccagcaggaaacagataaaatattcaaatgagataattgagttaagtttaatgaaggagacattagataggtatgggcagtgttaagagagactcacaaacagtggtgtaggactccatggctagtgacatcagggaatatttgctgccaccaaacagcagctgtggtcttggaaaaaggcagccactgcagcctgacagcctggccaggaagtagctagggatcaaaactgtgatgtccctcccatatatgaaaggaagaaagaaggaaagaaggaaggaaggaaggaaggacagacagacatggagggagggagggaagaaggaaggaaggaaggaaggaaggaaggaaagaaggaagagacaaagtagaaaatggaaatggaggtgcaaacaaagaatactctgattatttccttcacttttctgcaagctgctgccacctaagcagacatgagccttgttctgaaggacacctctgctagaaaagatcagatacttccctctcattctgagcttcactgctgtgtccctggctggaatcccagccagcttgcatccagacacacctttggctctgcactggcatacgtgagactcgctaccatctgggtcaggcaaccaacatttttcaagctcatgctataggataccgagtggaaaagmcaccttctttcccaagcacatctgcacggttaacatctgcacatttctgctctttctggaaacttgacctgtgtttttacttcactttcttgctttctctggccctgctcttttacttgaattcctaataatattttgctccccctctacccctctgcctccaggaccagagtgccagcaaatcaagttattttcattttat

SEQ ID NO: 78945 - DNA, 666 bp, Homo sapiens
ggtgcgggtgcactggggcatggctggctgcaggtcccccgagccctgcccggcggggagacggctgaagcccagtgagatttcaagcgccgtgcaggcaggccggcagtgctggcagacctggcactctgtccacagctgctggcccgggtgctaagctcctcagtgcccagggccagtggcaccgaccgggtgctctgagtggggggcctkctgagcgtgcgcccacccagaactcgcggtggcccaggagcgcccagcgccgccccagttcccgtccacggctctccttccacacctcctggcaagcagagggagccagctccggccttggccttcccagagaggggctcccacagtgcagctgtgggctaaagggctcttcaagcgcagccagagtgggcgctgaggccgaggaggcactgagagtgagtgagggctgccagcatgctgtcacctctcaatatcagtgctttacactcagtagttctacagtaagttttaaggtgtctttaactttgtcttgcttgaaatgttcacccagcttttgctcaagctttaatagctgggaaattctcaagacatctttaattaatcctttctactaattcattttttactggtattttttgtaactttcacactcttctgttaggcgtaatctct

SEQ ID NO: 78946 - DNA, 666 bp, Homo sapiens
ggtgcgggtgcactggggcatggctggctgcaggtcccccgagccctgcccggcggggagacggctgaagcccagtgagatttcaagcgccgtgcaggcaggccggcagtgctggcagacctggcactctgtccacagctgctggcccgggtgctaagctcctcagtgcccagggccagtggcaccgaccgggtgctctgagtggggggccttctgagcgtgcgcccacccagaactcgcggtggcccaggagcgcccagcgccgccccagttcccrtccacggctctccttccacacctcctggcaagcagagggagccagctccggccttggccttcccagagaggggctcccacagtgcagctgtgggctaaagggctcttcaagcgcagccagagtgggcgctgaggccgaggaggcactgagagtgagtgagggctgccagcatgctgtcacctctcaatatcagtgctttacactcagtagttctacagtaagttttaaggtgtctttaactttgtcttgcttgaaatgttcacccagcttttgctcaagctttaatagctgggaaattctcaagacatctttaattaatcctttctactaattcattttttactggtattttttgtaactttcacactcttctgttaggcgtaatctct

SEQ ID NO: 78947 - DNA, 666 bp, Homo sapiens
ggtgcgggtgcactggggcatggctggctgcaggtcccccgagccctgcccggcggggagacggctgaagcccagtgagatttcaagcgccgtgcaggcaggccggcagtgctggcagacctggcactctgtccacagctgctggcccgggtgctaagctcctcagtgcccagggccagtggcaccgaccgggtgctctgagtggggggccttctgagcgtgcgcccacccagaactcgcggtggcccaggagcgcccagcgccgccccagttcccgtccacrgctctccttccacacctcctggcaagcagagggagccagctccggccttggccttcccagagaggggctcccacagtgcagctgtgggctaaagggctcttcaagcgcagccagagtgggcgctgaggccgaggaggcactgagagtgagtgagggctgccagcatgctgtcacctctcaatatcagtgctttacactcagtagttctacagtaagttttaaggtgtctttaactttgtcttgcttgaaatgttcacccagcttttgctcaagctttaatagctgggaaattctcaagacatctttaattaatcctttctactaattcattttttactggtattttttgtaactttcacactcttctgttaggcgtaatctct

SEQ ID NO: 78948 - DNA, 1705 bp, Homo sapiens
gtggaatttcacattttaaaatataatacattcatgctaggtagctttatttcagatattaagcagagaacatccaacttaagatatcttggcataaatcttataaaaccttactgtaaaaactaaatgcacatatgagcatgtatttgttcagttgtttgtattacaaccttctgataactaaatagaaatgcttgcatgtgcccaatcacagagatagaagtaattgttatgtggagtcaagacagattagaataagattcagtcataggaaaatacttttgtactttcagtgctgtcaactgaactaagggcaaatgtcttcattctgatgggaggactcatgaagggtaataaacaaactctgctcttttcatgcagctgagtcttaagaaaggattctcagcctcgaaagcagattaaaaacttgagtgaggggaaggaaagaaaaaatggagagagacagagtagctagaaacagatagataaagtaaatgtaatgccattgccagacactgtaattggttcctaaaaactggacagacaagttggggtagtagcaaaggcagtggcttaaatcatggctctgtcccttagtaaccatgtgaccttaaattaagctacctcaacttctgattactcatgcatgcgcaaaattagattgataatatctcttttgtggtggctttgaggattaaaggaaatactacatgtaaagtgatttaaaaaattgacatttcaataaatatcatattttttgttattgttatttttaatgagactgattccacaattcacttgctaaaatctctcttctggattcctgttttggtcaaaaggaaatctaaactcacactgggtgctctggcctcctcataggccacctctcctgtaatctctctatccttacgttctcctagactaccgtgtgtcacactgacttactttcagaccctctaacagcatatttcagaaccttgtaatttttatctgatagggacattctccagtaaagtctacatatagataacttctcctagttctcaggtcttttattgaatgttacctccacaaagggcctttgctggccacacactaaagtggtatctgccctggtaaacacatatttactcatcattcattatgcttgcaatatgatactttctatcttggtactttcaagctttaactacatttgtttgtttacttgcatattctctgcctcctagctacattttaatcaccttgataacagagaacacgtttctttccttaggtgctcaagaaatatttgttgcatgcagttaggaggaagagacatgaagaacagtctcagttaggtagttacatcctactccttttttcgaagacctgctgagaaagaccttagacttgcaataggaactttgggaaatcagagcaaagacaaccagcatcatwttatcttactagagagaaagaaaaattgaatgaagaactgtgtgacatatatacaaaggaaaggtaatggcaaataaagtacaccagagagcatcaattcaaggaaaatatttttacagaactttgataagacatctgccaatttaatagtaaagacagaatgaaatttgtaacagaactctatgctgtttgcaaatgctgtcagctcttaaggagaactagctaccttgagtggacatgtaattattttaggcaagatctcaat

SEQ ID NO: 78949 - DNA, 707 bp, Homo sapiens
tctaatcccatcccggttagtgtaagcaggaattgtgacgtgccttgaaacaacagaatagtgcaaaggtggataaatgtgacttggattcttatatacaattatgatattggttttgctagaaatatctcttgcttgatggattttatgaagccatgtgagagaagtccccttggcaaggcactttattcagccaatggccaatagccagaaaagtaatgggctttttatgcaatagactgtcctacagttggtaatattatatttaacactgactcatactkcccaaagacatttacagattcaatgctattcctatcaaactacaaatgacattctttaagaagtagaaaaaactatttttttttttgaggcagtctcactctgtcacccaggctgaagtgcagtggtgcgatcttggctcacagcaagatccgccgcctggattcacaccattctcctgcctcagcctcccgagtatctgggactacaggcatgtgccaccacacctggctaattttttgtatttttagtagagatggggtatcagcatgttagccaggatggtctcgatctcctgacctcgtgatctgcccacatcggcctcccaaagtgctgggattacaggcatgagccaccgcaaggcccggcctagaagaaactattttgaaattcatatgaaatcacaaaagagcccagacagacaa

SEQ ID NO: 78950 - DNA, 549 bp, Homo sapiens
tgggttttatctttgtggaagtcaatttacacttcttttgcagtccgttattctggcatagggccatgaagtactgcwttttgcttttggcaaaagctgtcttcttaagagattttcccactttctgaaatgaaaatatgttataaatattttcagagtagttgttaactgcacatccactgggttgaatctgtataatgccatcaatgccatggaccagtgtgataccttgtgaaaggggaaggtgatcagcttctctgcaaattgtgacttagtgaaggagagttgatacacctttgaggtaggacagagaaggtatattactggcattgttgctgaaattgaactgcttctgatggaccttatggagagaaacagagaaacagcattcactagatcaataggagtatacaaggtaccagggtatgtgttaattttctcaagcaataatataatgtctgatatagtagctgcaattagagggaacacttggtttaccttatgggaatccactgtcactctccaggatccatctgtcttttgcacagg

SEQ ID NO: 78951 - DNA, 549 bp, Homo sapiens
tgggttttatctttgtggaagtcaatttacacttcttttgcagtccgttattctggcatagggccatgaagtactgcattttgcttttggcaaaagctgtcttcttaagagattttcccactttctgaaatgaaaatatgttataaatattttcagagtagttgttaactgcacatccactgggttgaatctgtataatgccatcaatgccatggaccagtgtgataccttgtgaaaggggaaggtgatcagcttctctgcaaattgtgacttagtgaaggagagttgatacacctttgaggtaggacagagaaggtatattackggcattgttgctgaaattgaactgcttctgatggaccttatggagagaaacagagaaacagcattcactagatcaataggagtatacaaggtaccagggtatgtgttaattttctcaagcaataatataatgtctgatatagtagctgcaattagagggaacacttggtttaccttatgggaatccactgtcactctccaggatccatctgtcttttgcacagg

SEQ ID NO: 78952 - DNA, 1328 bp, Homo sapiens
tttccctgaagggtctgtgggggtgaaataagtgttgtgtccagctgtcctacgtggaatagtcacctggagagcattttataaggacaaatatggaattaccacattgaggaaattggaagagggcacaaactggaaactatcatggatttctaaaccctatttctggtatgagcaaatcaaacctatatccaaaataaatgcccaagtaatatgaaatttaaataattcacagcaacatttaaaataggagttcttgtagtgcagtaataactctaactctaatccttaggtagcaggtaaacccagttgttcaactaatttgaaactagttgagcatgtttcttcaataatagaccagaatacatcagatgagccaccatgattttatgctgagaaggaggcagtcatagagaaaaagagcgtgttccatttatattaaagggcatattttttacatatttcaagtagagatggatcataaaattaatattgtaagaacactgttaatcagaagacagtcataatgtgattgcctttgtgtgcacacacatgaacttggtgtaaaaaactcattttcacattctggtgatactgttaatataactcatagtgggatatcagtagttaagaaagataatctaacagaaggttttatggtactcacaataattgtggcatcaacaaagcttctaattagtagtgatgatgcaatgttgggaaaattcatggacaacctaagttgaaaagtgatttagaagagttttatctaaatattacctatttgtctgttttcatgctgctgataaagacatacctgagmctgggcaatttacaaaagaaaaaggtttattggacttagagctccatgtggctggggaggcctcacaatcttggtggaaggcaaggaggagcaagtcatgtcttacatggatggcagcaggccaagagagagcttgtgcaggggaactcctctttttaaaaccatcagatctcatgagacattggctatggtgagaacagcatgagaaagatgaaaccagtgaaagatgattcaattatctctgaccagctccctcccatgacacggaattatgggagctacaagatgagatttgggtggggacacaaagccaaaccatatcatctattttactcttattttctatctcatgtgatcataggagttacataagacatatatgtaagttcaaaagtattattttcactatatatgagataaaatttttaagtggtaagaagagttacagttttccatagttttatgcttttattgagacataaaataacaatgtattttacaattg

SEQ ID NO: 78953 - DNA, 1855 bp, Homo sapiens
actttatctaaaacctttcattgacatcttatgatgctatcatcagcttcaaaacctgcagagtggctgtcaggaggttggaaagataatctcctggagagtgacttaggaatctcacaagaaatgtggcatagccaaagctgctgattgacacagatgatgataatatggggaaggtcatggagaggatgagctgcaaagttacgtagaagagttttacccaaatgagagaaatttagaaatatctttgtggatatattgtacttaactttttttttccatcccacataatcatggaagtaatctgaaacaaatatccatatttttacaaattataaaaagttttctcaatatttataacatattataaatgataagtattatccgagtcatagtttgtcagtgattttattctttgtgatcagtaaaataatgatgtattttacaattgatgtgattgatacatcatacaatttttagaaaatgcttttrgtattaacaaatgatcattcagtggtttgtatacacctggtattattctacatgcttgatgtattattaattcattcaatcttcacagcatctcaggagggagacagtaacaccactcccgtgatccaattctgaatctaagcccaagtcctacaagaaataaacagaaaaacctgagcttgactcagcctgtttccagaatgcttgctcacatcaaatatgttagagtatcttttatcttatatagtaaatactttataggtttagtttaagaattgttactcttcaccacagtcatgaagctatctttttaagttctaaataatgtattaaattgtttttatatttaggtctgtgatccatttggaataggttatgtgtgtaatgtgagacggtagattttatttccaatgacgcatattcacatccctacatttattgaaaatttatttccccactaatttatcttatatattatttgcctatatatgcatgtgttcgtttttaagctctctttaatttttttccattgatattctccatctttgtgcaaatactgagttagtcccttcatttaatgcaagaattttcctccagtgccctttctgttgtccactgtactgttctataatgaagtaaaagaagggtgaaaatttgcacaccttacacctacaccaggattcccagctgtatcttgaaggaagcggaggttagaactttcaagattaatgtcgacactaatgtctctaatgtccttgtgaatcttaggcaattctcccgagatactttctgctttattgtgtgtgcgtgtgtttaacgttctcagtgaattccatttgctgtcaggactcctgattttctttccctgcttttaggatactcagtgactttctactcccctagcaacagccagcagtggtaggaacctgcacagacaaccccagtaccttgtgcgcgggcgcagacacgccaagggtggtgggttgcttcctccagaccacgcccaccgatgccggcagcagctggtgcagcggagctcagatcctctctgtggggtctgcaccggcaagggcagctgctccctgcctttcctcaggagtcagtggaggtaataacttgttttcatataaagaacaagtttgttcaacagtgattttgcctgttgaccaaagacaggactcgttaccccttagggccttgcttggtaatatgtgcttttgctttttttaggtgggggtgggtgggcagagaggcgctcacgaatgtttttaaaacttttgtataaattttcattttattcgtaacataaacatcatctacaagcaaatccacattctgttttctatattaaggcctttcatac

SEQ ID NO: 78954 - DNA, 1594 bp, Homo sapiens
gcaaatgtggcagcaataattccactccctgtatccaatccactgggttgttctctcccacactgactctgggtctggccaagttcattgctttggtcagttcattgcttaggaacaatagcaaatgtgacccatctatagatgtagaaaaaaatgcttacacgtttgggcttgtcttctcctgctacttttgaactctgaggttatatgaagcagactgggcaagcctgcttaagaataacagacataatgccaaatcatccctaagctgccaccaagccaacgttcacatatatgaggccattccagacaatctagggccagatgagatggcccagatcagaagaaccactaagatgacccacaggatcattagaaatgtagctgttgttttaaaccactgatttggggagataaattgatatgcaccacacagctatgggacaaatacatagatacctagaagtggggcaccactgtaaaatatatattttttatatatatatatataatatatatatataatatatatattttatatatatatattatatatatatatatataaaatatatattttatatatatatattatatatatatatatatatataatatatatatatatataaaacgcttgtggcactggctctgagatgcagcagccggtataaaggaaaagcacagtgaggaaatctgtcaggaaaaggtgagcaaacctcctgtgggcatggatgggctggaaaatggaaaattggtaaaactatcaccagctgaaggatctacctatgattcatggaccttggcaagattattttcaggtacaatgtttcaagcatcaattgactttagttaatcataagataaaacaacaacaaaaaatgatgagctaaagaaatagttgctyaggacataggcaaaatttagaggaaacacagaggaaccagaatgtgctgggtgggaaaataaaactatttctcatgcacaatctcaagtaggcacagagaatttaaataacaaattattaatactttaagccactgattttggggatggggaaaaccaacacatacatcatggctttaaatattcaggcatgtgactgactcccatgttttgttatctctaatacaaacttcttctaagctttgcacatacaaatcttacagctaacttgaaacctacttgaattttcagatttctttcatgcatcaaaagtcagaaatggcactctgatttttccttcttgaaagctactcccactccaccattctacatctcaataaatggcattgcctttagaataagtatcgcaggtccaacacctagtttattctccatacttctgaataacccactccctccacctactctcctatttcaaattctatctaccttgaaaagaataacaaatttatgtgcttttcatcactaaagtaattcaagcaactatcatctcttgcctaagtgactgcaaaaacctaccaaatgatgtagcacgaacatacttggggatataactttattttgttccacctcgtatttttctcttcatttcccccattcaaggacacagtcacatctctgctcatta

SEQ ID NO: 78955 - DNA, 712 bp, Homo sapiens
taatgtatttagcttataggacatatagaacttgccttacgtattctcggtagtaataagagttttgtaattgtccttatagagaaaatgtgatggaggatatttgtagtaaactgcaagagattaggaacccaatccatgcaattggactacttatacgggaaatggattatgaaacagaagtggaaatggaaaagggattcaatccaggtaaatgacagaacaacaaatgtgcctctttgattaaaacaatgatgcattcaactccatttttcttctttttacagctcagcctttgaatattcgaatgaatcttacccagctctatggtagtaacacagcagggtatattgtgtgcagaggggtgcataaaatcgccagtactcgtttcctgatctgcagagatcttttgatcttacagcagctgttaatgaggcttggagatgctgtaagtactgcttgagggaaaacttgtaaaatctaaaacctgttataggcctacaagcacttaggagcaaaatgtcagccctactagcacagatacttttgtcttggttcactgctttattctcccaagcttggccttatgagatgctctataaatatttttgaattaagaatgaataagcattgtaatccttgtgagagtatagattaagagcatawatggaggggacggtggggagggagaacatcagaaagaatagctaat

SEQ ID NO: 78956 - DNA, 703 bp, Homo sapiens
agaattagaatggtggttgctaggggctggagacaggggaatatggggagatgttggtcaaagaatacaaactttcagttataaaataaattttggggctgggtgtggtggctcacacctgtaatcccagcactttgggaggctgaggcaggtggatcacaaggtcaatagatagagaccatcctcgccaacatcgtgaaaccccacctctactaaaaatacaaaaattaggtgaggatggtggtgcacacctgtagtcccagctactcgggaggctgaggcagaagaattgcttgaacctgggaggtggaggttgcagtgagccaagattgtgccactgcaatccagcctggtgacagagcaagactccatcaccccaacaccccccccccmaaaaaaaaaggaaatctaaagcacagcatggtgactacagttaacaatacctgaaatttgttaagagtatagatctgatgtatcatccccacatacaaacacaagacaactctccaaggtaacgtgatatgtaagttactttacctggtttgtgataatcatatcataatatatacatataacaaattatgacatagtacatgcaagatatatgtatagtcaactacagctcaacaaagctggaaaaaatagatcctgaatgatataaataccaatattgtcaaattgccatttatccattaattgctta

SEQ ID NO: 78957 - DNA, 703 bp, Homo sapiens
agaattagaatggtggttgctaggggctggagacaggggaatatggggagatgttggtcaaagaatacaaactttcagttataaaataaattttggggctgggtgtggtggctcacacctgtaatcccagcactttgggaggctgaggcaggtggatcacaaggtcaatagatagagaccatcctcgccaacatcgtgaaaccccacctctactaaaaatacaaaaattaggtgaggatggtggtgcacacctgtagtcccagctactcgggaggctgaggcagaagaattgcttgaacctgggaggtggaggttgcagtgagccaagattgtgccactgcaatccagcctggtgacagagcaagactccatcaccccaacacccccccccccaaaaaaaaaggaaatctaaagcacagyatggtgactacagttaacaatacctgaaatttgttaagagtatagatctgatgtatcatccccacatacaaacacaagacaactctccaaggtaacgtgatatgtaagttactttacctggtttgtgataatcatatcataatatatacatataacaaattatgacatagtacatgcaagatatatgtatagtcaactacagctcaacaaagctggaaaaaatagatcctgaatgatataaataccaatattgtcaaattgccatttatccattaattgctta

SEQ ID NO: 78958 - DNA, 659 bp, Homo sapiens
ttcacaaagctattatattaatgtctttgaaaagttcttcaagaaagaaatatgtttaactttatttatcatcatttcccacacttgtttaaaccaccaaattcttctttcaaggagtagctatcaagttggttatgaaaatctgcttaaagttcaattaacagtattgttcagctgagcgcagtggctcacacctgtaatcccagcactttgggaggccaaagtgggtggatcacgaggtcaggagttcaagaccagcctggccaagatggtgaaaccctgtttctactaaaaataaaacaattagccgggcgtggtgtcgggcacctgtaatcccaggtactcaggaggctgaggcaggataatcacttgaactcagcaggcagagattgcagtcagctgagatcatgccccactgcactctagcccgggcaacagagcgaaactccgtctcaaaaaaaaaaaaataaagaaaaagtccgggcgyggtggctcacgccttcgggaatcccagcactttgggaggccgaggcgggcggatcacgaggtcggatgttcaagaccagcctcaccaacatggtgaaaccccatctctactaaaagtacaaaaattagccaggtgtggtggtgcgtgcctggaatcccagctactcaggaga

SEQ ID NO: 78959 - DNA, 836 bp, Homo sapiens
gaatttgttttaatgtgtattagttttwaaaaatgtaactagtacatcaaattcatgaattcttggtcattgcttaggatgaagcgtaagcataagtaacagcattgttactacagtagtctccccatatcctgggcttccctttcggcagtttcaggtgcccacagtgcagtacaataaatagtttcagagagatcatatttacacaacttttattacagtatcttgttataattgtcctattttattgttagttgttgttgttaatctcttactgtgcctaatttatgaattaaactttatcaaagctctctctatatataggaaaaaacgtagtatatatagggtttgatgcgctctgtggtttcaggtgtccactgggagtcttggaacttatcccctgccgataagtggtgactactgtattgacacaatgttgtagagagtgtctccttttatttttcttatcacagtcctgtgaggaagacaggccaaacaatgaaaaagagaggtggggaaactggctggagccccacagaaagtataggcacaccaaactcccggctcccagaccctttcctctaaaacatactgcatcgcaggatgagtcctggcaagctgccccttccttggggatagaaagtaatgtgcccctagggaacaaaggttccaccttagtttaatattgccatcagcttctccctactgggaagcagggtctggaagcagtggcctggactcttcccaggacagcagcagcattggctctgaatctacactagcctcttctgagcaaagagctcaataattctgtctacacaaatacacacacatat

SEQ ID NO: 78960 - DNA, 836 bp, Homo sapiens
gaatttgttttaatgtgtattagttttaaaaaatgtaactagtacatcaaattcatgaattcttggtcattgcttaggatgaagcgtaagcataagtaacagcattgttactacagtagtctccccatatcctgggcttccctttyggcagtttcaggtgcccacagtgcagtacaataaatagtttcagagagatcatatttacacaacttttattacagtatcttgttataattgtcctattttattgttagttgttgttgttaatctcttactgtgcctaatttatgaattaaactttatcaaagctctctctatatataggaaaaaacgtagtatatatagggtttgatgcgctctgtggtttcaggtgtccactgggagtcttggaacttatcccctgccgataagtggtgactactgtattgacacaatgttgtagagagtgtctccttttatttttcttatcacagtcctgtgaggaagacaggccaaacaatgaaaaagagaggtggggaaactggctggagccccacagaaagtataggcacaccaaactcccggctcccagaccctttcctctaaaacatactgcatcgcaggatgagtcctggcaagctgccccttccttggggatagaaagtaatgtgcccctagggaacaaaggttccaccttagtttaatattgccatcagcttctccctactgggaagcagggtctggaagcagtggcctggactcttcccaggacagcagcagcattggctctgaatctacactagcctcttctgagcaaagagctcaataattctgtctacacaaatacacacacatat

SEQ ID NO: 78961 - DNA, 836 bp, Homo sapiens
gaatttgttttaatgtgtattagttttaaaaaatgtaactagtacatcaaattcatgaattcttggtcattgcttaggatgaagcgtaagcataagtaacagcattgttactacagtagtctccccatatcctgggcttccctttcggcagtttcaggtgcccacagtgcagtacaataaatagtttcagagagatcatatttacacaacttttattacagtatcttgttataattgtcctattttattgttagttgttgttgttaatctcttactgtgcctaatttatgaattaaactttatcaaagctctctctatatataggaaaaaacgtagtatatatagggtttgatgcgctctgtggtttcaggtgtccactgggagtcttggaacttatcccctgccgataagtggtgactactgtattgacacaatgttgtagagagtgtctccttttatttttcttatcacagtcctgtgaggaagacaggccaaacaatgaaaaagagaggtggggaaactggctggagccccacagaaagtataggcacaccaaactcccggctcccagaccctttcctctaaaacatactgcatcgcaggatgagtcctggcaagctgccccttccttggggatagaaagtaatgtgcccctagggaacaaaggttccaccttagtttaatattgccatcagcttctccctactgggaagyagggtctggaagcagtggcctggactcttcccaggacagcagcagcattggctctgaatctacactagcctcttctgagcaaagagctcaataattctgtctacacaaatacacacacatat

SEQ ID NO: 78962 - DNA, 513 bp, Homo sapiens
tggttttttggttttccactcctgtgttacttcacttggaataatggcctccagctccatccaatttgctgcgaaagacattatttcattccttttaatggctgagtagtattccatrgatatatggatgtattccatggagatatatgtaatattcagaaagaaaagtattaaacattaatcttttaggttaaaaattctcaattttaaatttgaggcatgaaagtgattgatacgtgcacacacacacacatctttatatatgtaagttttatagtcttgaactaagaggcatagtgtatagtgtataaaatacagatttcatgcaccagttttttctttcatactttcagaaagagtgatttatctctgagcctcagttttctcatccgaaaaaaaaaaggttgtccacaataaccttgtcaggtaattgtatgtagatttaatggataagatgatacatgaattcatagaaagcacttttaaaattagagctgtcatcataaaaatggt

SEQ ID NO: 78963 - DNA, 513 bp, Homo sapiens
tggttttttggttttccactcctgtgttacttcacttggaataatggcctccagctccatccaatttgctgcgaaagacattatttcattccttttaatggctgagtagtattccatggatatatggatgtattccatggagatatatgtaatattcagaaagaaaagtattaaacattaatcttttaggttaaaaattctcaattttaaatttgaggcatgaaagtgattgatacgtgcacacacacacacatctttatatatgtaagttttatagtcttgaactaagaggcatagtgtatagtgtataaaatacagatttcatgcaccagttttttctttcatactttcagaaagagtgatttatctctgagccwcagttttctcatccgaaaaaaaaaaggttgtccacaataaccttgtcaggtaattgtatgtagatttaatggataagatgatacatgaattcatagaaagcacttttaaaattagagctgtcatcataaaaatggt

SEQ ID NO: 78964 - DNA, 226 bp, Homo sapiens
atgtatctcctgaccaacagtgagtgtggcttttcctccttggcatccccacgactctcagaacaaccaggcacagggtaggccagggacaaatgcctgtaaaactaaacatggaactcttgtctattgwacagagaccactgcatctgcacagctggaaaatcccagggctcctgggtccacggttcccaaggcaggggaacagtctgaaaatatcggtaggggg

SEQ ID NO: 78965 - DNA, 677 bp, Homo sapiens
ttttcctggagacagagtttcactcttgttgcccaggctggagtgcaacggcgccatctyggctcactgcaacctccgcctcccgggttcaagcgattctcctgcctcagcctcccaagtagctgggattacaggcatgcgccaccacgcctggctaattttttttgtatttttggtagagacagggtttctccatgttaatcaggctggtgttgaactcccaacctcaggtgatccgtccgcctcggcctcccaaagtgctgggattacaggcgtgagccaccgtgcccggcccacaatatttttatttatttaagccagggtgttgctaagttatacaggccttgaactcctgcactcaaggcctcctccctcttcagccacccaagttgcttggtctacaggtccatgccaccatgtccggctaacactgttctttttatgtctcaattatttcacttagcataatgctggttttcttttttgttttttgggtttttctttttctttttcttttcttttcttttttttttttttttttttttagaagcagggtcttgctctgtctcccaggctggagtgcagtggtgtgatactggctcactgcaacctctgcctcctgggctcaagcgattctcctgcctcatccacccgcgtagctgggtctacaggtgcag

SEQ ID NO: 78966 - DNA, 982 bp, Homo sapiens
gagccacagctgagtgtgtgcttcaccattccaaagctctaagaccattgatcggtaaaatccaagctctctcagctgaagccagcctcaaggagacatctggtttaggcccctaccttctaatggctcaaataccattayctctattcattttacagtgagtgatggaggaggaactagaacccaggtctcctgactcagggaagggctgaattaaggatcactggaagacaggtggccatttttctcagggccctccactagagtcagtgggtcaaagatggacttccatgaattgctgacaaatttttctgtgtacatgtagatgtaacatttctggagagagggcactttagatttaataagatactgaaataggtccaaaacccagaaaggtcaagaactactgcattaaagggtgcgggaatcatacagctgcaggattcgagactacagctgggagttgccaagggaaacagagccacccacaacaatttgagggtctgccagcgaggtttagatcgaagaacattcaccatctctacacctaaatggaacccagatttatgtatatagacatttcctttaacatagggaaaatgaagtgaattcccagtgttttcatttgcaaagcaaagcctcctatgtcggctcttaaccttcaagctttcagcccatcaaaacctccaagctttctggaatttcactgcaatcccccgtatcatccatgggtctctggctcctgagagccacattagagctcactcaaccagtcaacaacacctgtcccaccaccacgtgcccagcgaaggcagtggattcagccaagtgccatgagaaacctaatctaaagctcttctcttctttaatcttgggtagattagaatcacccatcctgttccattgctcttttatgcctctgccccaattcctcaacctctctgaccctaccatgcacacatgcaaatacaggggctgtgtt

SEQ ID NO: 78967 - DNA, 556 bp, Homo sapiens
gaatgggggaaggatcaacaccagaaacaacctaaaaatgtttctctttccaagcagcaaaatgtaaaatccccttcttatccttcctccaccaacctttttcccatagtgtgttacctgtggcaagactaaaagaaacatggggaaayagcaacaaaaaagcaaggtatacatttgggtctagacttgagttgtcaactagtgacaaatccatccctattaacctaagagtggaatatcaagtcttctttaatagtcctccattaatactaatctgtgtggaaattaagctgttttccatttgcttctttttaagaaaacaatgacaatattatttttatattcaacaaataattttagatagcctatgggtctgtctttgggattgcagagaggtgttgagtcagggaaagcagtgcaagactattttgaataactttgtgtctccagagagatttgatggcagggagaaaggcacacagaggcatttatctcatccttttcaaggtagggagaggataagatcaaattatccccttcccttcttaagttccaa

SEQ ID NO: 78968 - DNA, 1126 bp, Homo sapiens
gcatatatataattttaaatagttttcagcagtaagggtagatatttgttgtaaaacaataaaatcaattcaaactaagttctataaatatgcttagtgtcacactcaccctacacacactacagtaactcctgcatattggacctcttacatcttttatagtgttgattttgttctttttattttatcttatcatcttgccaattacaaacttactgtttttaaattatccacttgggtacgtgtacaccatgaaatactatgcagccataaaaaggaacaagatcatgtcctttccagggacatggatggagctggaagccattatcctcagcaaatggacgcattagcagaaaaccaaacagcgcatgttctcactgtaagtgggagctgaacgacgagagcacatggacacattgggggaaacaacacacactggagcctgttgggggtgggggagggagagcatcagaaagaatagctaatggatgctgaagttaatacccaggtgatgggaggttctgtgtagcaaaccaccacagcacatgtttacctatgtaacaaaactgcacgtactgcacatgtaccctggaacttaaaatttgaagggaggaaaaaaaggaaacagcacattgaaaaatctttaaaacattaaaaaaataagttatccacttggttcagccctttaaaagagaggaaatgaacttacttttataaagtaaaagttaaaatatttattgcttccaratcaccagtttaaattaaaaacaggcagtggggatattttttaatcaaatgctttgttctatttattttacctgtttcatgttcaatactggatgcaacatagattctaatattccaagttacaagtgaacaatgagtatagaactgaacctctaatgagctacgtaattcttttcccagaatgttagactaccggtttgcccagcaagccataaagaagatttttccgaaatctttccaattcaatactttctttgtatcaattgtagtttcttatttccattccagttggagaattaagtttgaaagactgtccagagtattctttctcaaagtgtgatatgctatcttgtttgatgaatgtcaggagcatattaaa

SEQ ID NO: 78969 - DNA, 395 bp, Homo sapiens
atgaacgtctttggtatttacccagaacagttaatgtgccacaaaatgtttaaacataactattgggttcacaaatataaaatataatctttaaactrttgagtcttaatttgtacacattttataaacacagtcaaaacatccctttgtctggggaataaagacactaaaaccactacacatcatttattgtttttagactttgatctctgagagcaggacctacttcatgttggtatcctcagctcccagactatgcctttctcacattaaatgctcaataagtgtttggttaaattgaagttttgaggccaggtcagtgtggctcacacctgtaatcacagcactttgggaggccaaggtgggaggataatttgagctcaggggtttgagac

SEQ ID NO: 78970 - DNA, 569 bp, Homo sapiens
agaacttgcacaaaaaccgagaaatcttccattcattcactaggttattcctgggtgtctacatggcgcgttatgggaacacaggcattagtgaagacatcgcggccacggggagttccagtccaataggggagagatgtagataggtccacatgttagtaaaaaatgaagtgtatctcaaggaagtttatgttaagtgctacagacgttcagagagacttttttctagataaaaggggggctacagaaatggaataggaaaagactttctggaagaacaaagcattctgagcaaaattaacaaagggaggggaaatagaatttttrtaaaaagggaagagcaatatgtagttcactttaattgtagcagtgtagagagttaaaggagagaaatctagaaagcagtagactgtaaatggacatgtgaaaacagccctacttccagagaagagactctaagcactgatgggtgtgtgggtgacaaacaagcagccacaagtagtgaattttgtggggtctgcatggctgaaatgtactgtggaggcaggataaataagggcaggataaag

SEQ ID NO: 78971 - DNA, 759 bp, Homo sapiens
atagtactataggatgaccatagtaagcagtaatatacagttttaaaaagcatgaaggaggttgttgaatattcygaacatgaggaaatgatgtttgagatgagagatatgctaattaccctgatctgatcactatatatgtattccaatatcattatgccctgtatacaccacatctataattactatgtgtcaattaaaaaatttttaaaatagtattaccaagcataagtaagtcataagagcaacaaccagaagacccttaaagactgcagatattaacatagtcagatacaaaatatataatatctatgtattcatttttattgctgctgtgactaactaccacaaacagtggtttgaaacaacacaaatttattatcttagagttattggggtcacatatcttaaaatcagggccatgttcctttctagaacttaaggaatgggtctgttaccttgccttttccagcttcttgaggacacatgttccttggatctgacgccctttattggtcttcaaatctagcaatgctgtatctccctgacatgcctttttgttttttggtcatatctctttctctaacccacttcttctgtctccctttcccacttttaatgattcttgtgatcatattggggcccacatggaaaatccaggataatcttcctatctgctgattaaaatcgtaattccatctgcaagcctaattcccctttgccatgtatgccaacatatgcacaagttctgggaattag

SEQ ID NO: 78972 - DNA, 576 bp, Homo sapiens
agtttatttatttccaaggatttttttaaacattagattatatccagtctagaagtttagtagtatttttagtcattaagattacagaacaaatcaataaatgccatgctatcagccttgaaatccatagtttggtagtcattttataacaattaatctgctatagtttcccaatattcttgtttcttataaaataaaataagatggagttatgctgcatgaatattccgaaaaggaacacgattgattatggaaactccattttaaataaatcaaaatrcatatctttcaaaataagtacatctttaataagaattaaaaaatgaaaaatattaattacaaaattattttttaataattataaactaagaagaaatgtagtatccactagcatacttacaagaaaaattattgttatcaatgtaatattttatatgaatgtaaagggagtaggttgataaaaaacgaaaaaatagtgctttagtccaacaaataaatgttctctagacttaccctattgtttacaaaaagttaaatatatctaatatacataagtaatgggtttttaaattcaaa

SEQ ID NO: 78973 - DNA, 694 bp, Homo sapiens
atcagtgggacccgaaaagttaccaataccttagagaaatggaggtcatgaaattcactcattaaaatgcctagggcaagaggtcaaaataaaataggctcaggaaacacgtgaacaccacttctaaatgacaggcactgtaccaggagccagaaaaatgtccccactatggtacctgtcatttagtctgttggtgtggggggraggtgtgtggagggggaagttttgaatgtacacacagagaatttctcaagagtcacaaaagtagtaactgacaagagcgattctctatcttcagccctcccatcaggccacccctgccttttcacaacggattccagggggaaaaaaagcactttgctatatattatcactattatatatttttatgcaataggcaaatgtgtatttgaaaataaattttatgtttctgaagagaacactttatattcagaaacatttttaaaaacacaaattttaggatgattcccataagcctgaccctttgaggaaccgtcacctattaaatgtttgcttgcagtatccccaacacccttgtgcatttaaatggaagccttgcctgtgctgcccctgggctccggctgtctgctgccagaatcgcttcccctctgtcaccggccgtgccaggcagaacatccctttgtcgtgccacaggtatcctccctcttgacca

SEQ ID NO: 78974 - DNA, 986 bp, Homo sapiens
tgcttcatattagaagtcatttaaaaatgaattgctctgcagcttcaattgtttgatgagtctataatctagaggtagactgggtgactgcggtgctttggtcactcaaygagccaaggaacacactgggtggaagcagtatgcccagattctaggcccagcctctcaacccatgagttaattctatgacgttgaacagatctgtcagacgtccctggcccagggcctctggaaaatgaagctaatgatttaaagttctctctgattaactagtgctttacaaattactgtacaaattcaagatattatcattactgctcatggatcgctacgcgatgtgtttggttttgttatttactactatatactgacaaatataaccccacttcccccaaataaaacattacctctttatctccactaggaaatcaagtggctctaggccgttatcatgaatgtaaatttgccagtgttgggtcttatttcattccagcaacaaaaatggatgttatctgttatctgctagttattcacagaagccttacttctcaccaatcaaaaagccaaaagacgtggcataactctgagttcagaaattctgtgatcaaatccctattcttcctcagaatgaagaagcactactcttggaacacaaacagcctctgtaggtccacggatacagtgtttgacacgcctgtcagaagcattttgctaacatttaacctaaaaaaaaatactcactgtgatttctcgaaccttttaccttggatccttctcacagtggctcctgtttaccagagacccttgctctgcccccacctccccggcgatgtctcagtatgttcattctgctcttgtgactacagtctttttggctttccctagaaggtaattttttccccactcagatccttttactgtgagcctatgcatttctccaaagtttcctaatagtctgcaatttatgttactcaaactgatggctg

SEQ ID NO: 78975 - DNA, 986 bp, Homo sapiens
tgcttcatattagaagtcatttaaaaatgaattgctctgcagcttcaattgtttgatgagtctataatctagaggtagactgggtgactgcggtgctttggtcactcaacgarccaaggaacacactgggtggaagcagtatgcccagattctaggcccagcctctcaacccatgagttaattctatgacgttgaacagatctgtcagacgtccctggcccagggcctctggaaaatgaagctaatgatttaaagttctctctgattaactagtgctttacaaattactgtacaaattcaagatattatcattactgctcatggatcgctacgcgatgtgtttggttttgttatttactactatatactgacaaatataaccccacttcccccaaataaaacattacctctttatctccactaggaaatcaagtggctctaggccgttatcatgaatgtaaatttgccagtgttgggtcttatttcattccagcaacaaaaatggatgttatctgttatctgctagttattcacagaagccttacttctcaccaatcaaaaagccaaaagacgtggcataactctgagttcagaaattctgtgatcaaatccctattcttcctcagaatgaagaagcactactcttggaacacaaacagcctctgtaggtccacggatacagtgtttgacacgcctgtcagaagcattttgctaacatttaacctaaaaaaaaatactcactgtgatttctcgaaccttttaccttggatccttctcacagtggctcctgtttaccagagacccttgctctgcccccacctccccggcgatgtctcagtatgttcattctgctcttgtgactacagtctttttggctttccctagaaggtaattttttccccactcagatccttttactgtgagcctatgcatttctccaaagtttcctaatagtctgcaatttatgttactcaaactgatggctg

SEQ ID NO: 78976 - DNA, 986 bp, Homo sapiens
tgcttcatattagaagtcatttaaaaatgaattgctctgcagcttcaattgtttgatgagtctataatctagaggtagactgggtgactgcggtgctttggtcactcaacgagccaaggaacacactgggtggaagcagtatgcccagattctaggcccagcctctcaacccatgagttaattctatgacgttgaacagatctgtcagacgtccctggcccagggcctctggaaaatgaagctaatgatttaaagttctctctgattaactagtgctttacaaattactgtacaaattcaagatattatcattactgctcatggatcgctacrcgatgtgtttggttttgttatttactactatatactgacaaatataaccccacttcccccaaataaaacattacctctttatctccactaggaaatcaagtggctctaggccgttatcatgaatgtaaatttgccagtgttgggtcttatttcattccagcaacaaaaatggatgttatctgttatctgctagttattcacagaagccttacttctcaccaatcaaaaagccaaaagacgtggcataactctgagttcagaaattctgtgatcaaatccctattcttcctcagaatgaagaagcactactcttggaacacaaacagcctctgtaggtccacggatacagtgtttgacacgcctgtcagaagcattttgctaacatttaacctaaaaaaaaatactcactgtgatttctcgaaccttttaccttggatccttctcacagtggctcctgtttaccagagacccttgctctgcccccacctccccggcgatgtctcagtatgttcattctgctcttgtgactacagtctttttggctttccctagaaggtaattttttccccactcagatccttttactgtgagcctatgcatttctccaaagtttcctaatagtctgcaatttatgttactcaaactgatggctg

SEQ ID NO: 78977 - DNA, 1736 bp, Homo sapiens
  misc_feature (1)...(1736): n = A,T,C or G
ttccaggacccacataatgccttctcaacctcaatcmtactttcatgtgaccctaaagaggcaatactggataaaggacattgaatttttcattagcatggtgagacaaggtacacggttagatttaatttgatttagaaaagtacaaggacttttctacatctgtatatgatgaaataaaattgctatttttgcagtgtgatatctttcatttaaaaaaaaggcagtgacatattggccacagcacttcatgagagaccaaagagcacaaggagagagtgtggtaagtaaagctgattgccttcagtatgnnnnnnnnnnnnnnnnnnnnnnnnnnnnnnnnnnnnnnnnnnnnnnnnnnnnnnnnnnnnnnnnnnnnnnnnnnnnnnnnnnnnnnnnnnnnnnnnnnnnctgcttttctacaagatgcatattcaatgaataaccaaggagctgtatgctttcatagaaagtgtggaaagacgtgatttcaacttttgataattatttccttgttaataacaaaggctttggagtatcatggctctaagcatcaaaaagcaagagagatatatcagatcgaatacaagacaaaaaaagatctagcccattaaaaaaaaaaaagacacaaaagcattatcatctccttccagagtttctctccctgatcctaaactctgcatcctcacacaacttcaagcttcaagggtagagaagatgagaaaaatgaagtgatgggggagaggacaggaaaatgggaagaaagtgggataaggaagctggagggaggatgctcaggagtggttagaatcacaaagaaatggggaagggaataaaacctgctataagcaccagagacaaacaaggtgaattgaagatgtttgtgtcatgtgtgatgttctacacctgctactcctgctactacgatctagtggatgccatgtgccaggcatggttctaagcattttacatatattaaatcactgaagctcatggcacacctactgagtgaaagtcacagaaagcctgacccaaacagtgtcaaacaaaacaaaaaaggaaataggttgggtctagaacagaggcatccttcagtctgggatttattcaaggcttacatagtgtatccctttttccatttcttttcctcaactggtgctatattgactccagatcctagcaagctccccactcctagtcccaaaatggttgcctacagctatgagctaggtacatatttcctgttcaattaaaatggaaatttctattgtgcttggaaaaaatatgcaaaaatttcaagatcgtccaacagaaaaaaacttgcttatctcttcaacttcctctcaggcccattgtaccacttgcactctacacttccatcacatgggcctctttaaggtctcaaatccatcaggcctctttggtggaagtggaggtgggtagaaataaaggttaaataaaagtcctggaatttgttgccctgattgggcagatttgctcttgtgatcaatcctgtgaaccaatcctactttgaggaatgtgggaattgatggttgttttaagccaattatatagatcacccctgaagccaagtgggaccaattctatccaaactggattgatgaaaaattcaaggaacccttagaaagagggcaagaagagaatcctcataataatagactggcgaaaatgaacataaaagtagatggctaaacgtaaaaaaagcaaagaataaa

SEQ ID NO: 78978 - DNA, 521 bp, Homo sapiens
atttggagacccccccagtgcatgtgctgaaaccatggataataccaaatmccatatatactatgttttgtcctatgcatacatacccatggtaaagttgaatttataaactaggctcagtaaaagataaataacagaataattataacatactgtaataaaagttatatgaatgtagctctttttctctcaaaatatcttattgtaccgtaccataggtaactcacactgtggataaagggggactactgtacaacaatctcaccatttgccaatattcccgaaccggttttagcttttctcctcctcccttgtttgtttcttttggttcaatgctgctgattattctctaagaggctcttctagctccaatcacattcttatatcaacagataggaggttcttcaactgacagctacacatccacccctgctactttcttcattgcctccacagtttctataaggaaaaggcaaaatcttcatacctgcagaattagcgccacatagatgctgccaaag

SEQ ID NO: 78979 - DNA, 452 bp, Homo sapiens
atcccaggatgctggtatcctgcatagatttcaggtacatcactgatgtcctgactgaggaggatgccctaggtgagtttggaagctttctgggatacacgaygtgcacacacagtagtggcatgctttgtttcctaaaagagtgagtgatgctttttatttcttccagaaatactgcagaaaggtcaaattggtaaaaaagaaagaggtgggttgtaagaaaattttcttcattgtttttgctaacattgtccacttttgagtgcccctgtccttttggggtacacattgtcttcccaaatgccctgtgctgagcagctaggccctcaaatcaacattcaagtctgcatggtgaagcctgctgggtatgacctctgactgcagagtttgcttcagccactgctgaaaggaagtttggctttaggattacactgtagggagagccctggggg

SEQ ID NO: 78980 - DNA, 627 bp, Homo sapiens
accgttctgatactattaattaaaagcagtggcctcaggcagagggctcaggaagtagggagggcgcgggcccgcgcgcacaacctcagggaaaaggtctttatgatttcagcatccagagaccctatttctgaggacaactccgcacccatgtcctggtacatgaaaccatcaccaaacgcgaacgggaagtgtcctcttcctgcctaggtgctgctggggcgctgccactcctgctgaccgggttcagaacccgatttttcgcaaccgcggtggcacccacgccggagtccttacctccccgcgcgggctcaatcagtggggattaccgcccacccttaccccagtttacacgcaggaaggggggaaaaagggaagaaaattaaaagctcatgcagttctcctcccattcttttctagatttgggcacagctcggtgacaccttcaaagcyactcgtatagaaaggaccgcgggcgggacgcggccaccggggctcaggttaaatttaatctatagctgagctactcgctcctccaactcacccagtggaccagtgtttgacccagggggcgaaacaacggataaagcagcctccgccagaatttcaaaaactccctggaggcca

SEQ ID NO: 78981 - DNA, 674 bp, Homo sapiens
ttcagtgctaaaatatttattagaatcacactatggggaatgagaaatgttagactttatcaatatcgttgtctattggatcctctacatttacagtcaaattcttcaagtctcatcatatgtacagaaattgaagaacagttaatttctaggtgactaaatttggaaacacatgtaaagagagcagaagggcaatggaaatttacgcaagagagaactacctattttctgaatttgttaatatttaaaataggacccctacccaaactaaatgaaactaaaaattcagttcttgtttttctgctagaccttgcatttctttgtattactatttgcaccattaaaaatatatatataaatatatattttaaaaagttctctgccgggcgtggtggctcacacctgtaaacccagcactttgggaggccgaagtgggcagatcacctgaggttgggagtttaagaccagtctgaccgatatggagaaaccccgtctctactaaaaatacaaaattagtcggatgtggtggcacatgcctgtaatcccagctacttggaaggctgaggcaggagaatcgcttgaacccaggagggggaggctgcagtgagccgagatcgtgctattgcactccagcttgggcaacaagagcgaaactcygttcaaaaaaagaaaaa

SEQ ID NO: 78982 - DNA, 1274 bp, Homo sapiens
cagtataaaaaataagcatataagttacttatatgtatttttgtgaattcttagtaatttaaataattagggtttttttttatgttttatggctatcagacctataagctaagaatgaaaaatagatttcatttaaggcagtattgatgaaaaccaaataattgcttcaaaatatattttatctaatggaacctgacaatgtgggagatatagcaatatctggagatttcattgtagtgaggctgccatcttttgatcctcagtatcagagaaactaagcttccacttgctgagatgagagcagaaatgaatcatgccagaggctgatattatagaaatcgcttccaatccttctggtcacttcactgggtaaagtgtcaccatgagcagaaagccaatcccctgtaatgatgatttacagttggaaagtggctttaggacagatttactgttgccctactcacaccactctgtttctatcaccaaaagatatttttcctgtaaaaagtaatgttaggaaaggacatatacatcagagcattttaataaagccccttccttttctccctcaaatacagtgagcagttagaaaagaaagaggaaaatatgtactaaggggctgaataaaatattgaaggcattcaaatcttgtacagcagaaaacaaacatttcagcaaatattcaagtcactagacatgttttcttattttaaaatcttagggtatgctaacaattacaagaatgacacatcttcagagggtgtatgtaaaaatgcatatttttcttcatctcaaatataatgtttccacaaataataaataataatagctctcatgtattggtcacttactatgaaacaggccttgttctaagtactatacataaatattatcattaatcttccaaacaaaaagagtacaaggctggagtttggaagttaactaatttgattaaagttatatagcttactctctttgcttactatactgatacaaaaagatgttaaaatgttaaatatcagctatggctcaaagataatccctccacaagaaggattagatgaagtgaaaattttccaacagagattgctttggtctaagtgtgtcctcatcacccccgcaacccccaaaattcttaggttgaaacaatcttcagtacagwggtgttggaaagctggaaggtgttggaaggtggggcctttgcgagggattagtgtcattatgtaagaagtctgaggaagcttgttcacccctctgccatgtgagaaggcagc

SEQ ID NO: 78983 - DNA, 2112 bp, Homo sapiens
aaatactttggttaccttgggtccccaagggtcaacataggccaggctggtgctcccctcataggacagtgaaggaggtaaaagaagtcaaaacagtctgctgagatttgagtgttcttcacaagtcaaatcctaggctcatcaaaagtttggccaaacatggaaggacacaataaataccacataattatcaatcaatttatcaacaaatattgactggcctatgttgaagcatgttatgggagataaaggacagataaaacgtcwtccttacattaaaagatatggccttattttacaacccagttaaaaagaaaattctaaaaattcttacagaatttcaagtggggagagagtcctgtggctggaaccctgaagatgtgagctttggctgggatgtgatttgaaaagatgaatgccattgagaaaggtattaaaggtggggaaacataagtacaatcgcagaatcaggaaaatcgtggtaaattttggtcagagtcaagtagtctcagtagtttctctaaagaatagagtaaaaatcaatccagctagtataaaatgttctaacaaatcaaaggagtgcctcgaatgccagactggggcatttggacttggtcttgccagccttggacccctgaccgatttagagtgaagggttcacttgaactacatccagactgaaagctcctgagggcaggggctgtgttccttgaacctaagcactcacagcatctctcagagaaagaggcacacagaggtacacgaaatcgtgatgcatgaataacagcatatgaatgaacacatggatgattgaatggggtttacaaagattaatggtgtggcagtagacattctaattggggtaggcacaaactcatggcaagaaaaaccagacattgttggaagagtctagaggtgaatttataagtccctcacaggaattgacaaatgctcagatactgtctgtctcagttcagtgagctcctggctaaagatgggtgatatttaaaattgcaactcaatattccttctagttcaatgtcagtgcaacttgttataaagacacagaacaggatttgaagaaataacttgtaaaaataaaattatatcatcagaattactaataccttgactacctgcacaatagtaaccttgaatcccaacactgtattcagtctaataaaaacatttattgagtaatgttaaattcacaggccttatagttgaactctttttaaatctgtgatatcaatgtaggtactttctcaagaaacccaaaatacatttttgatattcaggaatactaaaatcaagttaatgtttgagtggtatgttaatgtgtagttgcttacttgcaagaacaaaaatacaactgaaactagcctagggaaggtatgtgctcatataaacaagctgaagtcagggcaagggtgcagttaaataaagttgcatgcagaggtttgaggatgtgagacctagaactcaaacgccaccagctcctcttgttctcttccaccaaacctccttgttctgtatgttaactccattccttcatgctacagaccagcttcttgcactctaaggaaaacctggcagccaaaaatcctaggcttttacatctccagccctgggaggaacaccatcacttctccacgctctaattggctaacaggccaacattccaactcctgtggccaatcatctgttacctggagatgtaaaggaatatgattggcagtggtcattgaagccacagggttgaggcttttgggtgatgagcagaaacctttctcaggagaagagccatggctgtcttccgccatctcactgtgctgtagaccaacaggaggctgctgctgtccttatttgctctgcagagatttctgtttttaaccccatgtcttgataagagaatgcaggtgcattagtttcctaggccgccataactgactaccactgggggacttaaacaagtgaaatttatgcctcttggttctagaagttggaagtctgagatcaaggcaggattagttccttcccagggatatgagagagaagctcttccaggcctttctctgagtttctcgtgggctcccggcaatctttggtgcc

SEQ ID NO: 78984 - DNA, 619 bp, Homo sapiens
ttttaggagaattgtgtggaaagggtggatatgcctagaaacgtgggaactgagcttatgttgagtcttagccaactaaggatttaaaaatttatgttaagtctaagtagtgatgaaacactttcataaattattttgattaatggatatgcagttaccctttatttgtgttccaaaaatacatccaacttactgttggtttactaccttgccccatcaattatgagatcatttaagacaaattggctagatactttcccatcaccagcaaataggactcatcctagaataaagtaaatgattatacaaaaatatgtattaaatgaatagtatttatattccctctagaaaacaaagaaccattttgttttcttaattttcttgtcatatttgtataaggatgaaactttggaaaataacatttaaccatgtaaatatgttaaataaacagaacaatattcaacatgtaaaaagcagcagtacaatctccatccacatttttaagaatcttaktatttcgacacattttttaagaatatggacagaaaatgtaacatatggtgccttagtttattaccccttccatcattggttatgtgaatccctacctaacactaat

SEQ ID NO: 78985 - DNA, 643 bp, Homo sapiens
acagactattctgcaggactggaagtgtcaaggctttgaaatgtttgcttccatcccctggagccttttrtagcttgagtaacttagatttgaagacaagtgctgctggggaacaggccatgacttttggcatatgaccagtctgggtggatatggggtggtgtatctagaaagcttgatataaaggctcacagtggagatttgagtacagatttatttttttctgagaaaggtaaacatgaagtttgagaagcaaggggaggaaatggaactttaggaagcatttcgtttgggttatgagaaaactcatactgaacatacagttatgagggttccccctgtgttatcgtttcagtctcattggaaagactggttttttttaaaaaaagcttgaatgaatgaggtaagtgcagaatgtgatcctaagagagtgtatgcacaagagaaactgacttcgatttgaggcaggtgggcaagcatcagagtggacctccccaagaagtgaggaagatccgaaggatgggacaggaggagaggagatgggaaatcattccaggcagtggggccacaaaaacaaagcatgtggcaggaagaaacgtggggcatcccaggacctggcaggagatcggagcaggtaatagat

SEQ ID NO: 78986 - DNA, 643 bp, Homo sapiens
acagactattctgcaggactggaagtgtcaaggctttgaaatgtttgcttccatcccctggagccttttatagcttgagtaacttagatttgaagacaagtgctgctggggaacaggccatgacttttggcatatgaccagtctgggtggatatggggtggtgtatctagaaagcttgatataaaggctcacagtggagatttgagtacagatttatttttttctgagaaaggtaaacatgaagtttgagaagcaaggggaggaaatggaactttaggaagcatttcgtttgggttatgagaaaactcatactgaacatacagttatgagggttccccctgtgttatcgtttcagtctcattggaaagactgkttttttttaaaaaaagcttgaatgaatgaggtaagtgcagaatgtgatcctaagagagtgtatgcacaagagaaactgacttcgatttgaggcaggtgggcaagcatcagagtggacctccccaagaagtgaggaagatccgaaggatgggacaggaggagaggagatgggaaatcattccaggcagtggggccacaaaaacaaagcatgtggcaggaagaaacgtggggcatcccaggacctggcaggagatcggagcaggtaatagat

SEQ ID NO: 78987 - DNA, 864 bp, Homo sapiens
ttatggtggatttattgggatgttacctcatagtaaataaaggagcatctgtattggacttcctcaaaygctcatttaaaaacttgttatgtattgttgtgatgtcactatgtcaggcacagagctgggtacagttagatagatgtgtagctagatagagagatgagtaaattaaattactaatctcaaaagtttacatttttggtgggatttgcataacccagatatgccagatattgcttgtcatagcaggggtgggatgaagtaaaagtcttacctgaaaaataatcacagcacagtggaaatacagataagaaattacacattacaaaatgaaatctatgagatacatagtgattacagaagtatagatgaagggcacctagaccaggctggggaaggacagtggggaaaagggaacacttcctggaggaggtaatatctgagttgattcttcaaaatttataaggttatttaaaaagtactaaacagagtgataataaaatgccatgaggaaattatctttgtaaattaggcaaataatggtttttacacatatcatggatttcatagaatttattttctaaataaattagcattaatataaactattaattattgagattagtgtagtagtcagtaattaataattaattgtactttctgctattctttggagaaaataggaaaaagctattgggtatgtacaatgataaggtaaagaattatgaggaggcatcaaatatgtggcattttaccttaatagaaaaggtaagacacaactcattgctattgttgaaacaaaacccacaggcaaattaaattagtatggcatgatattaaaaaatgtcatcctgccatgca

SEQ ID NO: 78988 - DNA, 864 bp, Homo sapiens
ttatggtggatttattgggatgttacctcatagtaaataaaggagcatctgtattggacttcctcaaatgctcatttaaaaacttgttatgtattgttgtgatgtcactatgtcaggcacagagctgggtacrgttagatagatgtgtagctagatagagagatgagtaaattaaattactaatctcaaaagtttacatttttggtgggatttgcataacccagatatgccagatattgcttgtcatagcaggggtgggatgaagtaaaagtcttacctgaaaaataatcacagcacagtggaaatacagataagaaattacacattacaaaatgaaatctatgagatacatagtgattacagaagtatagatgaagggcacctagaccaggctggggaaggacagtggggaaaagggaacacttcctggaggaggtaatatctgagttgattcttcaaaatttataaggttatttaaaaagtactaaacagagtgataataaaatgccatgaggaaattatctttgtaaattaggcaaataatggtttttacacatatcatggatttcatagaatttattttctaaataaattagcattaatataaactattaattattgagattagtgtagtagtcagtaattaataattaattgtactttctgctattctttggagaaaataggaaaaagctattgggtatgtacaatgataaggtaaagaattatgaggaggcatcaaatatgtggcattttaccttaatagaaaaggtaagacacaactcattgctattgttgaaacaaaacccacaggcaaattaaattagtatggcatgatattaaaaaatgtcatcctgccatgca

SEQ ID NO: 78989 - DNA, 620 bp, Homo sapiens
aacttatttacctcctttctccaaccgaccttttgcgaatctttgtctccagccaaacagtgcattctcctctccacccaaatgttctctctcaattcattattggagaaatacttagaaaaatgtggcatactgcccaaatgtacacatctaagaaacttttaaatacatattcaatgttttctaccaaatgacaaaatcaatacatgtttccagcaagacaggtatgtatacaaggtaaaagctgacattcctcttctcaaggccagtttctcacagtaaggagtactaactgatgaatcctcrcacacctttctctagacaaacatggacattcttgttttttctttcccttttaaaatttctctgccacttggttttccactcaacatgccataaatactttaatgaatagcagagatatttaactcatttttggaaaatactccatggcacagatgtgtcaattacaacgggttggataattaggtggacacacaagacttcacaggatgtattcacagaagactttactcaaggcaaaggatatggtacagcaggaaaatgaaagaccagaaaagcatcagaggcctgagagactgacaggcatggctccccag

SEQ ID NO: 78990 - DNA, 620 bp, Homo sapiens
aacttatttacctcctttctccaaccgaccttttgcgaatctttgtctccagccaaacagtgcattctcctctccacccaaatgttctctctcaattcattattggagaaatacttagaaaaatgtggcatactgcccaaatgtacacatctaagaaacttttaaatacatattcaatgttttctaccaaatgacaaaatcaatacatgtttccagcaagacaggtatgtatacaaggtaaaagctgacattcctcttctcaaggccagtttctcacagtaaggagtactaactgatgaatcctcgcacacctttctctagacaaacatggacattcttgttttttctttcccttttaaaatttctctgccacttggttttccactcaacatgccataaatactttaatgaawagcagagatatttaactcatttttggaaaatactccatggcacagatgtgtcaattacaacgggttggataattaggtggacacacaagacttcacaggatgtattcacagaagactttactcaaggcaaaggatatggtacagcaggaaaatgaaagaccagaaaagcatcagaggcctgagagactgacaggcatggctccccag

SEQ ID NO: 78991 - DNA, 2011 bp, Homo sapiens
gaaaggtgttgtaaaaaacgttagagaccactcgatttttccccctttcatctgggacacaaagaattgatgagatgagcctgctgcctagaatagatgatacaatgttgttaacagataataaaaggcagaacttctcagctccaacatctactttgcttcaatcgtctatcaaggataatcatcttaagactggaaaggttagaatgaacattagttcgaagaactaaaccaaaagacaaggtaggggattattttaagagggaaaaaaagaaaaatcagcacctaactgctctaaatgaattcctagcctatagtaaatacatatatgtatgtgtaggtatatataattattttctaacctacagaactgtgagaacctgcaaaatagttaagtgaactgttactaatcagagaagaactatggtgaatgagagaggaactaaaagatgaagacaatttagtcatcgttcagtatgcatgggggattggttccaagaccccttaccaaatctgcagatgctcaattatcttatataaagtgatgtagtatttyaaataacctacacacatcctcttgtatattttaaatcatctctcgattacttataatacctaacacaatgcctacacgtcatttgcatggattcaacatagtacttggtgtgtggcaaattgaagttttgctttttgaaactctatggaattttttctgaatacttttgatccatgattggctgaatccatggacgtgaaactcagggataaggagggccacctgcactctcccagtgttctaaaaagaagatggatcataaagatcataaaccactgttttttaaaatgggagtctacagatgtgctttcaaagttcacagatttacaaaatgagatccactgcttctaaaggatttttgggaaagatctgaaaattcagaagttaaaagaacatttctgagaattcagttaaacatggaactgagcttaattattttgaaagcagtgtttctcatacaaagaatatattctcaaagaccaaaaagaaatgtttcctctaaaaaaggtcctttacattagataagtctgaataataatgctattggccaatgagtttgaggccaatgctagtcaaacattaagtgcagctgattaacagactgcttaaaagggaggtggtgactggtggggatcagtaagcctccactgactaaatcccttttctttcttttcaaaaatagaaccctcagcatctggatttcaagaaggcttttgtgtaggccctattgttataaatgaagacacacgattccatgattatgaaacaatgtggattcacaactatgtagctgacaaacatacatggaggggtctcacatactaaagctattctttggccatccctgcctgtgagcccttctgaaagagcctcccctgggtcacccttggactcggtctctccttccatctcctggcctggcctagtacctgagccctaggtgtcagggtcaacatggagcacctgaccagccaggccagtcagatcccttttagagaatgtggatttgtggtcagtcaactcagcaccaagtaaggaacatcacggacaggtgggctggagggagcatcatggcactctgaagccacatgcatgccaaagttaggaagtgaaggagcagacgtacagagacttccccctcaccagaaaaaaaaaaaaaaaaagaacaatgaacctctgctgtgatacaagaggatcccttacagtaaatgcctaacttggtaagggctctgggtgcagactgcctgggttccaatgacaggataaggacacatgacacgattaatcaatgtacagatgacatgaaaaaaatcagaattctagaagattttgaaaggctgaataagttgaaggttctatactaaaggcctaaagaagcaactgtgtaaatacaatatgggagacacctgacccagcaaggcatgtagagcataaatgtttttactgcttttattg

SEQ ID NO: 78992 - DNA, 703 bp, Homo sapiens
ctgctgctcagactgtgatctgcaggccagcatccttcagcattacattcttgtcagaaatgtagtaactctggccccactccagacctcctgaatcagactctgcgtttaacaagatcctcaggtgattcctatgaaccttcgagtttgagaagcactgtgtgagggctcatctcaaatcacacctcaatgaaatgttcactcagcaggccttatgttcagtaataagtatgtactaaattcctaatcttccacaggtcctgcgtcccccacagcatgcacaatatttaattaacaacatcccctcttagactatttattccctctttaagtcctttctccccastttggttgtaaacaacttacaggcatgacagtcatacatctggccaatctggatgaagggaacagaaacccattcaagtcatttcaagggggggaaaagagcttattttaatgctacttgggaactagggctataaaattcgggagggcaggctccaaggtctcgccaccctctctcaggatctgtgtctgcccatccattccattttctttgctatctctctactcactcatagtttctgctttcttctatcagcagcattcccatgacttattatggccacccattctctcccataccagcctattcacctctgctcccttctgcttttactctaaatctctaactttaatgttt

SEQ ID NO: 78993 - DNA, 1094 bp, Homo sapiens
cacattcatttaatatttctgctgtattatagaaagacttattttgaaaaatatctagaactttttgtttttttcatagtatattttgagtactgttatcatagattttatttaaccatgaactgttttgtgttgtaattttttgctttactcatctactgtccaagtaaaaataagaattttgagttctgatgttttacttctgcatattttacttccaattcatatagtgagactaattacatttgcttacyactaattcctttaaaacaaaaatcttacaaattaaacattgtcttctaatgaaatcagttctttaacatcaaagattaatttgtttataggacctctaacatggcagttagtaggttaagtcataatttaacaaatgttattcaggtgtttattcttttcagccttcactttcaaaaggtaagcaattattattagttctcccttagttctggaagaaggtttaaaatctagtcatccacaaatgaatagctttggtaacttggtaaaagactttttggagtctgagccacccttcttagggcactttatttcctgggattgccaggacattagaggtgtatctcacaggacagtattttgctaggacaatcgaagtgtaaccaacagtttatttgcactccagtacttcccagctagttgaagtccatgcccttgattctaccttgtcatggtcatcttgtatttctgcaggggatatcttgtaccccccaattaaaaattaattaaatttctgttgattttcaatcagtggctagaatagagactgacatctcctctttcatatagttgaaaatttacccctattttttctttggtttttgacatgagagcaacaaatgggaaaataccttggttgtgttttatttatttctgtgataggaatctctttttcagaagaacaaaataaaaatgctaaaagcaatttcaaaataagtttcttttctactcttttctggcacctatggaattaaacattttagaaagaagacaggtaggatataatcaagtatgataagatgaattttattacaaatattattttacctagggttgtcagt

SEQ ID NO: 78994 - DNA, 543 bp, Homo sapiens
attcgactatacttaatacggagttcaaacccattgcatggtgggcttcagagttcagtctgaacccagagaaaatgggtggggcactgagtggatctcagaagcagtctgttgaatgtcttgaagtccatttccrttaaataggtgagtattgtatgtcctctttgcacaagattgtgctaggaaaagctgagagagataccaaagagcatgattaagatgcgtttctttctctcagtaaagttcacctttagcatgactttacagacaaagaaggcttctgaaggcctgacctaccaggaagactcagaactgttaccagatcaagaacggcactcgccttccccttgctttctgtgaggggatgacataaaagcgtcagagttttcagtagtccttaggagttcagacaggtggattaaaagctactagtaaattttaatgacttatgtgaacgaaccctctaaattattaaacagcaagggacatgggttccttccttaaaacgaggaatagaactccatgtataagaaggaataccat

SEQ ID NO: 78995 - DNA, 1023 bp, Homo sapiens
caaaattactagaaggtgtgggtgggaggagtttcatgcagaaagaagtgggcaggaacagtcatgaaacaaaacaaaagtggctatgacttgatgattgttatagacaggtaaggagtcaatggggagagaggaggaaggttgayggcactattgttctctactttcctatgtatttgaaaattactatattaaaaaggtttttttaagcggtaagggtctgtttaaacatttttcatttgtaaccacacaacatctttaaatatctttcattttggtaatttctcaaactgcaaagttcttccatccaaagcaggaaacaaaaaacaagtgggcgtggggcggacgccgtggctcacgcctataatcccagcactgtgggaggctgaggcgggcggatcacgaggtcaggagattgaggccagcctgaccaacatggtgaaaccccgtctctactaaaaatacaaaaattagctgggcatggtggcgcatgcctgtaatcccagctactcgggaggctgacgcaggagaatcgcttgaaccagggagtgggaggttgcagtgagccgagatcatgccactgtactacagcctggcgacagagtgagactgtctcaaaaaaaaaaaaaaaaagtgtgtgtatgtggtgccttctcacacacccttgcatctatgtttctcatatgtggtctagatctgattaatgcaaggactaccaggctacatggttgacagagcatagtccagagaggaaatggtaatagtgatctcattaaaccagtctttcaatacaggtgggcatttttcctggctgcatagcttcaagtctggctctctgagccccccagagattttctatacttgtttaatatcttttaataagcttatcaaattattcagtgtgaattctgttatttgcaaccaagaaatgtgatttatgtagtgccctcaagagacacaactgttgtgagagatcggaagagctggtagtatcagaaaaattatttcttagaaaatgacctt

SEQ ID NO: 78996 - DNA, 1023 bp, Homo sapiens
caaaattactagaaggtgtgggtgggaggagtttcatgcagaaagaagtgggcaggaacagtcatgaaacaaaacaaaagtggctatgacttgatgattgttatagacaggtaaggagtcaatggggagagaggaggaaggttgatggcactattgttctctactttcctatgtatttgaaaattactatattaaaaaggtttttttaagcggtaagggtctgtttaaacatttttcatttgtaaccacacaacatctttaaatatctttcattttggtaatttctcaaactgcaaagttcttccatccaaagcaggaaacaaaaaacaagtgggcgtggggcggacgcmgtggctcacgcctataatcccagcactgtgggaggctgaggcgggcggatcacgaggtcaggagattgaggccagcctgaccaacatggtgaaaccccgtctctactaaaaatacaaaaattagctgggcatggtggcgcatgcctgtaatcccagctactcgggaggctgacgcaggagaatcgcttgaaccagggagtgggaggttgcagtgagccgagatcatgccactgtactacagcctggcgacagagtgagactgtctcaaaaaaaaaaaaaaaaagtgtgtgtatgtggtgccttctcacacacccttgcatctatgtttctcatatgtggtctagatctgattaatgcaaggactaccaggctacatggttgacagagcatagtccagagaggaaatggtaatagtgatctcattaaaccagtctttcaatacaggtgggcatttttcctggctgcatagcttcaagtctggctctctgagccccccagagattttctatacttgtttaatatcttttaataagcttatcaaattattcagtgtgaattctgttatttgcaaccaagaaatgtgatttatgtagtgccctcaagagacacaactgttgtgagagatcggaagagctggtagtatcagaaaaattatttcttagaaaatgacctt

SEQ ID NO: 78997 - DNA, 1023 bp, Homo sapiens
caaaattactagaaggtgtgggtgggaggagtttcatgcagaaagaagtgggcaggaacagtcatgaaacaaaacaaaagtggctatgacttgatgattgttatagacaggtaaggagtcaatggggagagaggaggaaggttgatggcactattgttctctactttcctatgtatttgaaaattactatattaaaaaggtttttttaagcggtaagggtctgtttaaacatttttcatttgtaaccacacaacatctttaaatatctttcattttggtaatttctcaaactgcaaagttcttccatccaaagcaggaaacaaaaaacaagtgggcgtggggcggacgccgtggctcacgcctataatcccagcactgtgggaggctgaggcgggcggatcacgaggtcaggagattgaggccagcctgaccaacatggtgaaaccccgtctctactaaaaatacaaaaattagctgggcatggtggcgcatgcctgtaatcccagctactcgggaggctgacgcaggagaatcgcttgaaccagggagtgggaggttgcagtgagccgagatcatgccactgtactacagcctggcgacagagtgagactgtctcaaaaaaaaaaaaaaaaagtgtgtgtatgtggtgccttctcacacacccttgcatctatgtttctcatatgtggtctagatctgattaatgcaaggactaccaggctacatggttgacagagcatagtccagagaggaaatggtaatagtgatctcattaaaccagtctttcaatacaggtgggcatttttcctggctgcatagcttcaagtctggctctctgagccccccagagattttctatacttgtttaatatcttttaataagcttatcaaattattcagtgtgaattctgttatwtgcaaccaagaaatgtgatttatgtagtgccctcaagagacacaactgttgtgagagatcggaagagctggtagtatcagaaaaattatttcttagaaaatgacctt

SEQ ID NO: 78998 - DNA, 1023 bp, Homo sapiens
caaaattactagaaggtgtgggtgggaggagtttcatgcagaaagaagtgggcaggaacagtcatgaaacaaaacaaaagtggctatgacttgatgattgttatagacaggtaaggagtcaatggggagagaggaggaaggttgatggcactattgttctctactttcctatgtatttgaaaattactatattaaaaaggtttttttaagcggtaagggtctgtttaaacatttttcatttgtaaccacacaacatctttaaatatctttcattttggtaatttctcaaactgcaaagttcttccatccaaagcaggaaacaaaaaacaagtgggcgtggggcggacgccgtggctcacgcctataatcccagcactgtgggaggctgaggcgggcggatcacgaggtcaggagattgaggccagcctgaccaacatggtgaaaccccgtctctactaaaaatacaaaaattagctgggcatggtggcgcatgcctgtaatcccagctactcgggaggctgacgcaggagaatcgcttgaaccagggagtgggaggttgcagtgagccgagatcatgccactgtactacagcctggcgacagagtgagactgtctcaaaaaaaaaaaaaaaaagtgtgtgtatgtggtgccttctcacacacccttgcatctatgtttctcatatgtggtctagatctgattaatgcaaggactaccaggctacatggttgacagagcatagtccagagaggaaatggtaatagtgatctcattaaaccagtctttcaatacaggtgggcatttttcctggctgcatagcttcaagtctggctctctgagccccccagagattttctatacttgtttaatatcttttaataagcttatcaaattattcagtgtgaattctgttatttrcaaccaagaaatgtgatttatgtagtgccctcaagagacacaactgttgtgagagatcggaagagctggtagtatcagaaaaattatttcttagaaaatgacctt

SEQ ID NO: 78999 - DNA, 1023 bp, Homo sapiens
caaaattactagaaggtgtgggtgggaggagtttcatgcagaaagaagtgggcaggaacagtcatgaaacaaaacaaaagtggctatgacttgatgattgttatagacaggtaaggagtcaatggggagagaggaggaaggttgatggcactattgttctctactttcctatgtatttgaaaattactatattaaaaaggtttttttaagcggtaagggtctgtttaaacatttttcatttgtaaccacacaacatctttaaatatctttcattttggtaatttctcaaactgcaaagttcttccatccaaagcaggaaacaaaaaacaagtgggcgtggggcggacgccgtggctcacgcctataatcccagcactgtgggaggctgaggcgggcggatcacgaggtcaggagattgaggccagcctgaccaacatggtgaaaccccgtctctactaaaaatacaaaaattagctgggcatggtggcgcatgcctgtaatcccagctactcgggaggctgacgcaggagaatcgcttgaaccagggagtgggaggttgcagtgagccgagatcatgccactgtactacagcctggcgacagagtgagactgtctcaaaaaaaaaaaaaaaaagtgtgtgtatgtggtgccttctcacacacccttgcatctatgtttctcatatgtggtctagatctgattaatgcaaggactaccaggctacatggttgacagagcatagtccagagaggaaatggtaatagtgatctcattaaaccagtctttcaatacaggtgggcatttttcctggctgcatagcttcaagtctggctctctgagccccccagagattttctatacttgtttaatatcttttaataagcttatcaaattattcagtgtgaattctgttatttgyaaccaagaaatgtgatttatgtagtgccctcaagagacacaactgttgtgagagatcggaagagctggtagtatcagaaaaattatttcttagaaaatgacctt

SEQ ID NO: 79000 - DNA, 941 bp, Homo sapiens
ttgtgttaagatagaatgaccctctataccactggctcccaggtttccatgttagtgggtttcttgctagctttggccaatgagagttattggtggaagattagagggggagatgtaggagtacaacagggaatttcttcccattttattttyctcaggtggtatctatccctgacattgactgtgtttctttctcacagatcaggcccaccttgattataggttacattaagtcatattatcactgtcccttggttctggtaccggggcctctccttttgtccttccaccttggctttatgctgctgctaatctctggatagactctttggtctcctttttaccttctcagctcttctgtcatgtaagtaaccaatcctgagtttatatttcctctattttaaagacttggtgccatcttaattccctagaaataataattccccttatttcccatacaacaaaatggcaagaagtgtgatggtggttgctatctggcaaactctatcttagttgttaagcataaactttgaaaagaataatcttggaatccaattttgactgtttttcttacctgtgtgaccactgggacattattaaacataattaagttttcttcctctgtaaaatagaaataactatttctcatagtatatgcaaagtttaaagaataaagtgtgtgtatagcatcttgcacagtcattagcagttaagaactatgcaatctttacttttattctgcttcttattattgttactaatattgaggtctctcaaattgtgatttagggacttccttataagagcttttccaatatggaatcttataattttataacaggaataaacaatgaaaacaaagattttctttacatattccaagtaaataactcacagagcatataaccatggcctagctgctgttacaagttttttatgca

SEQ ID NO: 79001 - DNA, 941 bp, Homo sapiens
ttgtgttaagatagaatgaccctctataccactggctcccaggtttccatgttagtgggtttcttgctagctttggccaatgagagttattggtggaagattagagggggagatgtaggagtacaacagggaatttcttcccattttatttttctcaggtrgtatctatccctgacattgactgtgtttctttctcacagatcaggcccaccttgattataggttacattaagtcatattatcactgtcccttggttctggtaccggggcctctccttttgtccttccaccttggctttatgctgctgctaatctctggatagactctttggtctcctttttaccttctcagctcttctgtcatgtaagtaaccaatcctgagtttatatttcctctattttaaagacttggtgccatcttaattccctagaaataataattccccttatttcccatacaacaaaatggcaagaagtgtgatggtggttgctatctggcaaactctatcttagttgttaagcataaactttgaaaagaataatcttggaatccaattttgactgtttttcttacctgtgtgaccactgggacattattaaacataattaagttttcttcctctgtaaaatagaaataactatttctcatagtatatgcaaagtttaaagaataaagtgtgtgtatagcatcttgcacagtcattagcagttaagaactatgcaatctttacttttattctgcttcttattattgttactaatattgaggtctctcaaattgtgatttagggacttccttataagagcttttccaatatggaatcttataattttataacaggaataaacaatgaaaacaaagattttctttacatattccaagtaaataactcacagagcatataaccatggcctagctgctgttacaagttttttatgca

SEQ ID NO: 79002 - DNA, 941 bp, Homo sapiens
ttgtgttaagatagaatgaccctctataccactggctcccaggtttccatgttagtgggtttcttgctagctttggccaatgagagttattggtggaagattagagggggagatgtaggagtacaacagggaatttcttcccattttatttttctcaggtggtatctatcyctgacattgactgtgtttctttctcacagatcaggcccaccttgattataggttacattaagtcatattatcactgtcccttggttctggtaccggggcctctccttttgtccttccaccttggctttatgctgctgctaatctctggatagactctttggtctcctttttaccttctcagctcttctgtcatgtaagtaaccaatcctgagtttatatttcctctattttaaagacttggtgccatcttaattccctagaaataataattccccttatttcccatacaacaaaatggcaagaagtgtgatggtggttgctatctggcaaactctatcttagttgttaagcataaactttgaaaagaataatcttggaatccaattttgactgtttttcttacctgtgtgaccactgggacattattaaacataattaagttttcttcctctgtaaaatagaaataactatttctcatagtatatgcaaagtttaaagaataaagtgtgtgtatagcatcttgcacagtcattagcagttaagaactatgcaatctttacttttattctgcttcttattattgttactaatattgaggtctctcaaattgtgatttagggacttccttataagagcttttccaatatggaatcttataattttataacaggaataaacaatgaaaacaaagattttctttacatattccaagtaaataactcacagagcatataaccatggcctagctgctgttacaagttttttatgca

SEQ ID NO: 79003 - DNA, 1061 bp, Homo sapiens
ccctcttgcaaaagacaagatgtacaaaaagacaaaagcgattaattaaatgcacattttttcctgtacaaaatgagcaatttatttggaaagtggaggatgacaagtcactcactgaattaaaaacattgacagtgtctcttgtccatattctagtcctgctggtatgaatcgagacatttaccatatcacaaaggggctgatgtaaaatgaaagctccagtgtcactgaggttcttctcattttcagtagttggaaatatctcatcctgtagaaccagattaaattacacatctatttcttgcccatcctgttagtgatagaggagaaaacaaaccatccaattttatttattcttccaaatccaatctaggtaccatcactggcctgaatcagatattttcccctttttatgtttcctggaacgtagtgaatgtatcacatatgtaggcacctaatgctataatgtaatagcttgtattacttttcccttggcttcctcatctcttctccacaggatgattataaactcagtgagaaacaaatgtgtcatagccacctcttgctttactccttattactgttggtaagacctctatctagattacaatatgaatcaatattctctggtttcttgctcgaatgttttagaataacccttcaaaaacactttyaggagtgttttgtggaacacacttgatgactgtctttcccacttaaattttaaaactcaagcagtgggtctagggaaaatgatttcataccaaagtttgtttttttccagtgataatgggataggcttatttgattgtttattgtgatttatgtaatttggatttagttcatttcagtcttttcaaatgtgaaccaaaattgatctcattgctttttagcaaataataaatgtcttagtgaagcttttaaaaagtatacttgcttgacataatattgaataagtagaaatttatatttttactgcaaaagaaaatctgatcacacttatgtaattttatatttaatttattaaatttaaatttctttattcattctaaaattattct

SEQ ID NO: 79004 - DNA, 1061 bp, Homo sapiens
ccctcttgcaaaagacaagatgtacaaaaagacaaaagcgattaattaaatgcacattttttcctgtacaaaatgagcaatttatttggaaagtggaggatgacaagtcactcactgaattaaaaacattgacagtgtctcttgtccatattctagtcctgctggtatgaatcgagacatttaccatatcacaaaggggctgatgtaaaatgaaagctccagtgtcactgaggttcttctcattttcagtagttggaaatatctcatcctgtagaaccagattaaattacacatctatttcttgcccatcctgttagtgatagaggagaaaacaaaccatccaattttatttattcttccaaatccaatctaggtaccatcactggcctgaatcagatattttcccctttttatgtttcctggaacgtagtgaatgtatcacatatgtaggcacctaatgctataatgtaatagcttgtattacttttcccttggcttcctcatctcttctccacaggatgattataaactcagtgagaaacaaatgtgtcatagccacctcttgctttactccttattactgttggtaagacctctatctagattacaatatgaatcaatattctctggtttcttgctcgaatgttttagaataacccttcaaaaacactttcaggagtgttttgtggaacacacttgatgactgtctttcccacttaaattttaaaactcaagcagtgggtctagggaaaatgatttcataccaaagtttgtttttttccagtgataatgggataggcttatttgattgtttattgygatttatgtaatttggatttagttcatttcagtcttttcaaatgtgaaccaaaattgatctcattgctttttagcaaataataaatgtcttagtgaagcttttaaaaagtatacttgcttgacataatattgaataagtagaaatttatatttttactgcaaaagaaaatctgatcacacttatgtaattttatatttaatttattaaatttaaatttctttattcattctaaaattattct

SEQ ID NO: 79005 - DNA, 1483 bp, Homo sapiens
ggggaaaaactagagtttgatatcaaatattgacaaggatgcggaacaacataatttctcatgaatataaatgcagacattcactttcttaaacagtttaacctttttaattaaagttgcaagttcacgtgcctatgaccagttattttcatcttagacgtgtcattgagagaaatacgtgcaagtacacgccagaaggtatgcccttttaaatgacagaaacaagatacaaaaggatacatataatgctttatycacttaatgttccaaacagccaaatctaaactatataagaatatatacatgagtagtgtagaatacaatgactattagtactgtctgatgggactgatcccattcacgctatggtgcctgcagatcagctcactgcctccaaaattacactcagtgcttctcatcttctgctacctatgccctgaatactcaccttcaaaactgaatgggcgtgaactgtaaaatgaataaaatggtgtgaaagtcatggtgtgcatgtttagaggctaggtcataaaaggatttggcaggaagctagctgctatgctgtgagaacaaatagcccactggagaacccaactgaaaaggaactaagatctcttaccaatacctaacaccatctcgctagtcatgtaaacaggcatttttgtaagagaatcctccagtcttagtcaagtcttcctactactttgccttgcccaacatctgagtattatgagaaaccacagaagtattagagtaggcagatatctagaaagcagcaggagggcgagcccctgaaaaaaggaggtctggaaaatctcacatcccagagaccactcaaaacgtgtgctagatatgagcagagaggagaggaaataccttcgtagaaagaaacaccccctttagacgcccagtaattactcactctgcagttagcctgtcagaatggagttagctacatgatgattagaaaggaacaagggcaaaggagaaattcctaagagatatgcagttgcagtaagtacagatttaactgctctacaaccttcctcgggtggtggtaatgagtaacacagccatgaggtagaatttatatctaacaccaagcccgcacatgcccatcaactgacaggatgaatcccacaaacctggggccagaactaggcagggacaatgtgcagacttaaggcagaaacagcagctagacaaggcagagacttcaggcagaggtgagaatttaaagaaacaatctaacaaaataactgcaaggcagaattctcgaggctgctgctggctcattctcttaacagcccactctacctctgcctcctctttcagagtgtagtgtctctgctattacttaatccctgcagccgctgctgcttttcccccgctgtcagccagaccaacccagagctgttttccaactggaccagtctgcttctctcttggaatgtactttaataaactccctgctttttatttc

SEQ ID NO: 79006 - DNA, 1483 bp, Homo sapiens
ggggaaaaactagagtttgatatcaaatattgacaaggatgcggaacaacataatttctcatgaatataaatgcagacattcactttcttaaacagtttaacctttttaattaaagttgcaagttcacgtgcctatgaccagttattttcatcttagacgtgtcattgagagaaatacgtgcaagtacacgccagaaggtatgcccttttaaatgacagaaacaagatacaaaaggatacatataatgctttattcacttaatgttccaaacagccaaatctaaactatataagaatatatacatgagtagtgtagaatacaatgactattagtactgtctgatgggactgatcccattcacgctatggtgcctgcagatcagctcactgcctccaaaattacactcagtgcttctcatcttctgctacctaygccctgaatactcaccttcaaaactgaatgggcgtgaactgtaaaatgaataaaatggtgtgaaagtcatggtgtgcatgtttagaggctaggtcataaaaggatttggcaggaagctagctgctatgctgtgagaacaaatagcccactggagaacccaactgaaaaggaactaagatctcttaccaatacctaacaccatctcgctagtcatgtaaacaggcatttttgtaagagaatcctccagtcttagtcaagtcttcctactactttgccttgcccaacatctgagtattatgagaaaccacagaagtattagagtaggcagatatctagaaagcagcaggagggcgagcccctgaaaaaaggaggtctggaaaatctcacatcccagagaccactcaaaacgtgtgctagatatgagcagagaggagaggaaataccttcgtagaaagaaacaccccctttagacgcccagtaattactcactctgcagttagcctgtcagaatggagttagctacatgatgattagaaaggaacaagggcaaaggagaaattcctaagagatatgcagttgcagtaagtacagatttaactgctctacaaccttcctcgggtggtggtaatgagtaacacagccatgaggtagaatttatatctaacaccaagcccgcacatgcccatcaactgacaggatgaatcccacaaacctggggccagaactaggcagggacaatgtgcagacttaaggcagaaacagcagctagacaaggcagagacttcaggcagaggtgagaatttaaagaaacaatctaacaaaataactgcaaggcagaattctcgaggctgctgctggctcattctcttaacagcccactctacctctgcctcctctttcagagtgtagtgtctctgctattacttaatccctgcagccgctgctgcttttcccccgctgtcagccagaccaacccagagctgttttccaactggaccagtctgcttctctcttggaatgtactttaataaactccctgctttttatttc

SEQ ID NO: 79007 - DNA, 1483 bp, Homo sapiens
ggggaaaaactagagtttgatatcaaatattgacaaggatgcggaacaacataatttctcatgaatataaatgcagacattcactttcttaaacagtttaacctttttaattaaagttgcaagttcacgtgcctatgaccagttattttcatcttagacgtgtcattgagagaaatacgtgcaagtacacgccagaaggtatgcccttttaaatgacagaaacaagatacaaaaggatacatataatgctttattcacttaatgttccaaacagccaaatctaaactatataagaatatatacatgagtagtgtagaatacaatgactattagtactgtctgatgggactgatcccattcacgctatggtgcctgcagatcagctcactgcctccaaaattacactcagtgcttctcatcttctgctacctatgccctgaatactcaccttcaaaaytgaatgggcgtgaactgtaaaatgaataaaatggtgtgaaagtcatggtgtgcatgtttagaggctaggtcataaaaggatttggcaggaagctagctgctatgctgtgagaacaaatagcccactggagaacccaactgaaaaggaactaagatctcttaccaatacctaacaccatctcgctagtcatgtaaacaggcatttttgtaagagaatcctccagtcttagtcaagtcttcctactactttgccttgcccaacatctgagtattatgagaaaccacagaagtattagagtaggcagatatctagaaagcagcaggagggcgagcccctgaaaaaaggaggtctggaaaatctcacatcccagagaccactcaaaacgtgtgctagatatgagcagagaggagaggaaataccttcgtagaaagaaacaccccctttagacgcccagtaattactcactctgcagttagcctgtcagaatggagttagctacatgatgattagaaaggaacaagggcaaaggagaaattcctaagagatatgcagttgcagtaagtacagatttaactgctctacaaccttcctcgggtggtggtaatgagtaacacagccatgaggtagaatttatatctaacaccaagcccgcacatgcccatcaactgacaggatgaatcccacaaacctggggccagaactaggcagggacaatgtgcagacttaaggcagaaacagcagctagacaaggcagagacttcaggcagaggtgagaatttaaagaaacaatctaacaaaataactgcaaggcagaattctcgaggctgctgctggctcattctcttaacagcccactctacctctgcctcctctttcagagtgtagtgtctctgctattacttaatccctgcagccgctgctgcttttcccccgctgtcagccagaccaacccagagctgttttccaactggaccagtctgcttctctcttggaatgtactttaataaactccctgctttttatttc

SEQ ID NO: 79008 - DNA, 489 bp, Homo sapiens
ctctgcactccatgctgaaaagatatgattgtgggtctgctatattacttgtcacataggaagaactgctgaaattcaaagaaaataagtccaagtagggctaaggaataactgaagttggatataaagaaatactggctaaattgaatcttaatttggtcaccaaggcaacatttttatagctgcttcttcgatcctgtgttaacaccagttctttgagacaatgaatttccttttattcttataccagttaaacttaytggggacttgtaaaatgcaggagccttgaccaatataccaagcaaacgctttaatactagaaagtagcagttgtgatatattaaaatagttgaagacacaaaccttcattgaaacaaaaagggtcattttatcatgagtataaagaaagtgtacaatgacaatatagctgttaagttttgacaacagtaattccacagcaaaacatgtaaaacaaaaactatatgacat

SEQ ID NO: 79009 - DNA, 1091 bp, Homo sapiens
tgattcacaaactgagtgaggaaaacatgggtacaaagtgagggctttggctttaagagagctgcacaaagatgaccatgtgtatgttattcctgagcactgagaagaaggatacctgcagggtgtacccgggctcgcactggaaggagagcacgtcgttcaccatgtaccgatctccgattttgatgctgttgctggggagggctggttcttggcatgcagcaagacctacagctagaaatgcaaagacaaatgctagaaattatatgatgtaaacaatattcttatcatttgaataaccaaagtttatttctattgctctccttctgtagaaatgaacaaagacttcaactctttctcttgttattctaccaagaagactttgagtacctttaaatcagagctatgagttaattgttaaaaattaaattatcttattttcattacacaatgaatcaaggctttgatttcaataacaaaatttgttacttccacattgagtatagaagatcccaacttcaatatatacatattgtaaaaagtctcttcaaaaattgtgtttttatgatatgtaaaactccaggatattgccctcttacttttgtttttcaagcatacttagcagtctttatataaaaaaattatgtgtgaatcttggaattctgttcttctacaaaaaaaaaaaagagaaaaaatattttayattcaatctctctctctctttctcttaaagacaacaaaaaaggatctcatgaacagtctgttcttcattaaacagaaacaatatttacagaacctaaagctgtaatcctgcactttcctagatgaattgcattcagttaagacactcacagatttttttaaaggcatcatataatactggaactcagcctaaggtatcagataaacgaattctaaaacactgaaacctctctgtataaatccttatcataagaataaacaagatatgcagctaccatattttgtagaatcaaaaattgattttggtttatcaaaaggtacaaactttccattatgagatgagcaagttctgaggatctaaagtgtacagcattggatgttgatggata

SEQ ID NO: 79010 - DNA, 1185 bp, Homo sapiens
tgcatgatttcctatgccaagtccatagtgctttaattgaaataacaataatatgttttcatatcaaatgcawtcaagtcattttcctcactctatttgcaaagttttcatcagagacaataggacttttgtatttatttaagaactttagcatcattttaactaactttaagaaatagcactgggaatttgggagggttgcatttcatttttacaaaaaagagtggaaaaaattaattttatgattttatttttcattaggagaagagttgactggggagatttttccaagccaattttgtctattcttaatattatctgacacttgaaggcaaatactgggttttgcattactctgaattaacatgatatttatgttcccattaatactgaaaagtgggcaccacacacacacctatatatatacatcgaccagtattcagatattcggcaagctgtgctaaccaatacgatgctatgcactgaaatggaagaacctcatgccttcactccaagtggagatgaaaagttcagattcttggcatcgtttctctgccacatctgcttccctagtgctaattaaaattgggatactattaaaaggaggcccacaaatgaaacatctgagggtgttccaacagctctttaatttgggctggaaacccaggcacacatgcacataaacacctacgccaagaactgtgctcttccaagtattttgaccatgacatgacaagcttggtggaacattttctggttcatattaacataatattctttaaaataatacctccttggcatattgatttattctatgactggtttaaaaaaattctgaagcttgttcttagctatgcttttttagagggtgataattaattgttaaaatcttcattgttgattctaattcagagcatttgttttgtggattggtttgatatattcttcggttccatactcctagtttggtcagcttaatagagaaaatcattaattggactcttccatgtaaaagtttgtaaacaaaactttcgacctctaattgtaatagtttgaatctgtgcagacatagactccggaagaattgatctcagatgccctgagactcgagactttctgccattcactcttactcttgaacctttctgaggtactattgattttcttctaaaaaataacttagac

SEQ ID NO: 79011 - DNA, 1185 bp, Homo sapiens
tgcatgatttcctatgccaagtccatagtgctttaattgaaataacaataatatgttttcatatcaaatgcattcaagtcattttcctcactctatttgcaaagttttcatcagagacaataggrcttttgtatttatttaagaactttagcatcattttaactaactttaagaaatagcactgggaatttgggagggttgcatttcatttttacaaaaaagagtggaaaaaattaattttatgattttatttttcattaggagaagagttgactggggagatttttccaagccaattttgtctattcttaatattatctgacacttgaaggcaaatactgggttttgcattactctgaattaacatgatatttatgttcccattaatactgaaaagtgggcaccacacacacacctatatatatacatcgaccagtattcagatattcggcaagctgtgctaaccaatacgatgctatgcactgaaatggaagaacctcatgccttcactccaagtggagatgaaaagttcagattcttggcatcgtttctctgccacatctgcttccctagtgctaattaaaattgggatactattaaaaggaggcccacaaatgaaacatctgagggtgttccaacagctctttaatttgggctggaaacccaggcacacatgcacataaacacctacgccaagaactgtgctcttccaagtattttgaccatgacatgacaagcttggtggaacattttctggttcatattaacataatattctttaaaataatacctccttggcatattgatttattctatgactggtttaaaaaaattctgaagcttgttcttagctatgcttttttagagggtgataattaattgttaaaatcttcattgttgattctaattcagagcatttgttttgtggattggtttgatatattcttcggttccatactcctagtttggtcagcttaatagagaaaatcattaattggactcttccatgtaaaagtttgtaaacaaaactttcgacctctaattgtaatagtttgaatctgtgcagacatagactccggaagaattgatctcagatgccctgagactcgagactttctgccattcactcttactcttgaacctttctgaggtactattgattttcttctaaaaaataacttagac

SEQ ID NO: 79012 - DNA, 1185 bp, Homo sapiens
tgcatgatttcctatgccaagtccatagtgctttaattgaaataacaataatatgttttcatatcaaatgcattcaagtcattttcctcactctatttgcaaagttttcatcagagacaataggacttttgtatttatttaagaactttagcatcattttaacwaactttaagaaatagcactgggaatttgggagggttgcatttcatttttacaaaaaagagtggaaaaaattaattttatgattttatttttcattaggagaagagttgactggggagatttttccaagccaattttgtctattcttaatattatctgacacttgaaggcaaatactgggttttgcattactctgaattaacatgatatttatgttcccattaatactgaaaagtgggcaccacacacacacctatatatatacatcgaccagtattcagatattcggcaagctgtgctaaccaatacgatgctatgcactgaaatggaagaacctcatgccttcactccaagtggagatgaaaagttcagattcttggcatcgtttctctgccacatctgcttccctagtgctaattaaaattgggatactattaaaaggaggcccacaaatgaaacatctgagggtgttccaacagctctttaatttgggctggaaacccaggcacacatgcacataaacacctacgccaagaactgtgctcttccaagtattttgaccatgacatgacaagcttggtggaacattttctggttcatattaacataatattctttaaaataatacctccttggcatattgatttattctatgactggtttaaaaaaattctgaagcttgttcttagctatgcttttttagagggtgataattaattgttaaaatcttcattgttgattctaattcagagcatttgttttgtggattggtttgatatattcttcggttccatactcctagtttggtcagcttaatagagaaaatcattaattggactcttccatgtaaaagtttgtaaacaaaactttcgacctctaattgtaatagtttgaatctgtgcagacatagactccggaagaattgatctcagatgccctgagactcgagactttctgccattcactcttactcttgaacctttctgaggtactattgattttcttctaaaaaataacttagac

SEQ ID NO: 79013 - DNA, 1185 bp, Homo sapiens
tgcatgatttcctatgccaagtccatagtgctttaattgaaataacaataatatgttttcatatcaaatgcattcaagtcattttcctcactctatttgcaaagttttcatcagagacaataggacttttgtatttatttaagaactttagcatcattttaactaactttaagaaatagcactgggaatttgggagggttgcatttcatttttacaaaaaagagtggaaaaaattaattttatgattttatttttcattaggagaagagttgactggggagatttttcmaagccaattttgtctattcttaatattatctgacacttgaaggcaaatactgggttttgcattactctgaattaacatgatatttatgttcccattaatactgaaaagtgggcaccacacacacacctatatatatacatcgaccagtattcagatattcggcaagctgtgctaaccaatacgatgctatgcactgaaatggaagaacctcatgccttcactccaagtggagatgaaaagttcagattcttggcatcgtttctctgccacatctgcttccctagtgctaattaaaattgggatactattaaaaggaggcccacaaatgaaacatctgagggtgttccaacagctctttaatttgggctggaaacccaggcacacatgcacataaacacctacgccaagaactgtgctcttccaagtattttgaccatgacatgacaagcttggtggaacattttctggttcatattaacataatattctttaaaataatacctccttggcatattgatttattctatgactggtttaaaaaaattctgaagcttgttcttagctatgcttttttagagggtgataattaattgttaaaatcttcattgttgattctaattcagagcatttgttttgtggattggtttgatatattcttcggttccatactcctagtttggtcagcttaatagagaaaatcattaattggactcttccatgtaaaagtttgtaaacaaaactttcgacctctaattgtaatagtttgaatctgtgcagacatagactccggaagaattgatctcagatgccctgagactcgagactttctgccattcactcttactcttgaacctttctgaggtactattgattttcttctaaaaaataacttagac

SEQ ID NO: 79014 - DNA, 1185 bp, Homo sapiens
tgcatgatttcctatgccaagtccatagtgctttaattgaaataacaataatatgttttcatatcaaatgcattcaagtcattttcctcactctatttgcaaagttttcatcagagacaataggacttttgtatttatttaagaactttagcatcattttaactaactttaagaaatagcactgggaatttgggagggttgcatttcatttttacaaaaaagagtggaaaaaattaattttatgattttatttttcattaggagaagagttgactggggagatttttccaagccaattttgtctattcttaatattatctgacacttgaaggcaaatactgggttttgcattactctgaattaacatgatatttatgttcccattaatactgaaaagtgggcaccacacacacacctatatatatacatcgaccagtattcagatattcggcaagctgtgctaaccaatacgatgctatgcactgaaatggaagaacctcatgccttcactccaagtggagatgaaaagttcagattcttggcatcgtttctctgccacatctgcttccctagtgctaattaaaattgggatactattaaaaggaggcccacaaatgaaacatctgagggtgttccaacagctctttaatttgggctggaaacccaggcacacatgcacataaacacctacgccaagaactgtgctcttccaagtattttgaccatgacatgacaagcttggtggaacattttctggttcatattaacataatattctttaaaataatacctccttggcatattgatttattctmtgactggtttaaaaaaattctgaagcttgttcttagctatgcttttttagagggtgataattaattgttaaaatcttcattgttgattctaattcagagcatttgttttgtggattggtttgatatattcttcggttccatactcctagtttggtcagcttaatagagaaaatcattaattggactcttccatgtaaaagtttgtaaacaaaactttcgacctctaattgtaatagtttgaatctgtgcagacatagactccggaagaattgatctcagatgccctgagactcgagactttctgccattcactcttactcttgaacctttctgaggtactattgattttcttctaaaaaataacttagac

SEQ ID NO: 79015 - DNA, 639 bp, Homo sapiens
tagtgccccagattgtttttaaagaaaaataaaatgtgaggcttaaaacccaaagcatcttattcaacgcatctcataggccttcagcaaaactaatagcagatgaggattagtactctaggattaatagcataaattgggatttatgagtaactaagattattcttaaaagcacctataggtatgacagaattggagaaggtgagccctctgtgaactagggaaaaggctgccccagagcccttgtgatgcctgctattatccagcacatatagaaggaagctggagctgggcagcggcggtttttatgtcgcctccatctgctgctttcgaatgatcattatcagaaggtcactgaatctccttaatgttcactgaatacgtatggtgttttttttttttttttctaaagaaatgaatattctaaaaactattgaaggatcccccaaggtccacaggatgaagaaacctgacgttgaagacctttaaagtcaggtcctagtctagctttccagcctgatttaatttaccacctcttccccmaaaacaccctgagagcaagcagtaggaagccatctcctcctttttcctcaacgccacaccctcctttgtgtttccaaacctttgttattaattctc

SEQ ID NO: 79016 - DNA, 577 bp, Homo sapiens
gatccacccacctcagcctcccaaagtgcgtatttttaagtctgataagaaacattttaaatctgttctctctgaagcaggctacctggaggcatcatctgcataataagaaccttggtctccacaaccccttatcttaacccagacacttatttcggttggttccaggtctttagataaactataaatgctttcaaccattgtcagtcagaaaatgtttgaattcacctatgacctggaagtgccacacaccccaccaccttgagttgtcccctgccttttcagacagaaccaatgctcatcttacatgtattgattggtgttttttgtctccctaaaatgtatagaaccaagctattgcccaatcaccttgggcacatgttcacaggatctcctaactcatatttggctcagaataaatctcttcaaatattttacagagcttgagtcttttgccaacgccattaatatttcttcttttaactatattaaaaatagggaggattttgaatawttaagtgcttgagtaagagaaaagacaaattaagtaacacattagacacttgccaattcatga

SEQ ID NO: 79017 - DNA, 661 bp, Homo sapiens
tgatgacatgacggtgtggggcgagggcttccctagcccaggacaggcaggtggggccctgagcaggttggggctgtggctgrctgtctgagccacagggcctcgcctgggctgtgctctgggtgtacatgtccttggtcccaggaccctgtgcactagccccaccaccactttgggcctcagcaacttagtttgtgggatggggacaatgactcatctgcctggaggcagggccgggcagaagcaccctccatcttccagacctagagctgaggacccccagaggtgtctgcccacgtcgctggcccagtgtgttctctacccggcctatcccttggccaatgtgctctccggtcctgcctggtaaggtcccccagcctgcgtgtgggacaacgggccggcagggagctcagggagcaggcggcaaggagacaggctggccaatggtctggccgtggatggagcccctcccgcacggcctggccgccttccctcggcacagcccttcctggctccctctcctctcaggccctccaggacaatgaagctaattgccttcagacggctcccgcctgcgggaagggcgccgcgtggccctgggccggcggggcaggctgcagtgggagtgaggctggtggcgaggctgggcaccgggccattt

SEQ ID NO: 79018 - DNA, 575 bp, Homo sapiens
atgactcagtcacctgtacccaagagcagcagagggcacaggcacatccctgtccaccgaggaggaaagacccacgcctgtccaatgggagggtggggttcagacctccataaagatcggtggatgtttggacggtctcgccttggttcaggggtaaggtcgtcccctccggaggtctagcataggcttgctttctgcaagaaaacttgggaccaaggaggatggcagcagaactgggaaactgggctgctgggcatctccagttccccaggcttggatggaggagcctcccgcatacccctgtcgagccagagtcagctgccctgcattgcccgtcactggggacgtgatgccagccagaccaggagtctccrgaggcctgtcatccaccctcctggccctgccagctgtgcccaccacagatgcctccgtgccaaagctcagcccccactgatgggggtggcacatgtcagggaaccccaaggagcagccgcccagcttgcccaagcctgggggctcatgccctccgagagccatgaccattttccacctcttggggtcctgagggagatgca

SEQ ID NO: 79019 - DNA, 679 bp, Homo sapiens
ggtgcacccccggcaccccccagctggccagccagtctacgtggagaagacagactctccaccatccagcccctccccacctccacacacccacgagtggcctcccgccaccgtgccccgctggcggagtttagttgcagcgttgcagccccagtaggggcagatctgctggcctggtgagtcctgctggggtcagcaggctggggagggctcgtcaaggagaaggggcggcttaggatggaaattccattagtgctcagccgtgggcaacagggtctgtttgaagaatacattcaattaaaaattgatttttcagtttaatctcaatcataatgaaccatgttcagacccctcctgcctctccaacggggctgctcccacccctggaggctccgcagccacctccccatccccagaggcaggtaatacagtcgggccagaggccggggaccgggagggaataattacagacaaggcacacagggagttttgtgaaatgaaagtgtcacggtggtaaatcgtctttttatttactgcaaggttgtgttttcggtgtggctccagttaaaagctgcgatatttaatttcccttcatccagacggtrtttcaaagcatcgtaaaaggatagcagcaccaaccttttccctcccttcccacaaactcagaggcagcgggcaa

SEQ ID NO: 79020 - DNA, 726 bp, Homo sapiens
atcctggcctcttccagctcctgggaccccgggcattacttggcggggacagcatcactgcaatctctgcctcagccctcccatgccttcttcctggcgtgtgcctgcacgtctctatcttttgtgtccgcatctccccttctcagaaggaccccagtgattggatgtaaagcccaccccagtccagtctgacctgatcttagctaactgcaaagatcctatttccaaatgaggtcacattctgaggctttaggtagacatgaatttggggggacaccccagtacaacagctaagctggacaaggaggcgtgtgaagacaagrgggtgagagggagacgtttcagggagcaatggctgagctgtcctaattaggcccaggaccaatgtcctctgtgggaggaaggaacaggaatgagagaaagaggaaagagggtggcaggcagcgggcagcacaggttgggatgaggtccgggggctactggagagggacagatggggagcggagtgaaggtgtgggaagtcagggagcgggagggatgccagagccatgggtcatcacacgggggctggagtcagccagggcatgagtgtggcttttcctgggggaagggagtccaggaggatgtgcaggccaggggcttggggtcacaaaggagaagatcagcttccttttcccatgaagatggcagaggactggcctgggaactgtggctggagctcagagg

SEQ ID NO: 79021 - DNA, 726 bp, Homo sapiens
atcctggcctcttccagctcctgggaccccgggcattacttggcggggacagcatcactgcaatctctgcctcagccctcccatgccttcttcctggcgtgtgcctgcacgtctctatcttttgtgtccgcatctccccttctcagaaggaccccagtgattggatgtaaagcccaccccagtccagtctgacctgatcttagctaactgcaaagatcctatttccaaatgaggtcacattctgaggctttaggtagacatgaatttggggggacaccccagtacaacagctaagctggacaaggaggcgtgtgaagacaagggggtgagagggagacgtttcagggmgcaatggctgagctgtcctaattaggcccaggaccaatgtcctctgtgggaggaaggaacaggaatgagagaaagaggaaagagggtggcaggcagcgggcagcacaggttgggatgaggtccgggggctactggagagggacagatggggagcggagtgaaggtgtgggaagtcagggagcgggagggatgccagagccatgggtcatcacacgggggctggagtcagccagggcatgagtgtggcttttcctgggggaagggagtccaggaggatgtgcaggccaggggcttggggtcacaaaggagaagatcagcttccttttcccatgaagatggcagaggactggcctgggaactgtggctggagctcagagg

SEQ ID NO: 79022 - DNA, 726 bp, Homo sapiens
atcctggcctcttccagctcctgggaccccgggcattacttggcggggacagcatcactgcaatctctgcctcagccctcccatgccttcttcctggcgtgtgcctgcacgtctctatcttttgtgtccgcatctccccttctcagaaggaccccagtgattggatgtaaagcccaccccagtccagtctgacctgatcttagctaactgcaaagatcctatttccaaatgaggtcacattctgaggctttaggtagacatgaatttggggggacaccccagtacaacagctaagctggacaaggaggcgtgtgaagacaagggggtgagagggagacgtttcagggagcaatggctgagctgtcctaattaggcccaggaccaatgtcctctgtgggaggaaggaacaggaatgagagaaagaggaaagagggtggcaggsagcgggcagcacaggttgggatgaggtccgggggctactggagagggacagatggggagcggagtgaaggtgtgggaagtcagggagcgggagggatgccagagccatgggtcatcacacgggggctggagtcagccagggcatgagtgtggcttttcctgggggaagggagtccaggaggatgtgcaggccaggggcttggggtcacaaaggagaagatcagcttccttttcccatgaagatggcagaggactggcctgggaactgtggctggagctcagagg

SEQ ID NO: 79023 - DNA, 637 bp, Homo sapiens
gacccaagcttagaagactcccatgcctggcttaatgctctgctgtcccaccttcaaattcttactaatttttaggccgggcacggtggctcacgcctgtaatcccagcactttgggaggccaagacacatggatcatctgaggtcaggaattcragaccagcctggccatcatggtgaaacactgtctctactaaaaatacaaaaattagcagggcatggtgacgggcacctgtaatcccagctactcaggaggctgaggcaggagaatcgcttgaacccgggaggcagaggttgcagtgagccgagatcgcaccattgcgctccagcctgggtgacaacagcaaaactccgtctcaaaaaaaaaaaaaaatcttatgaatttttaagaaaagatgcatattttcattttgcaatgggccctgaaaattaagtcatcagtcctgggctttggagaagaaaaaaacaaaaaagaaaagaaagagaaagaaaaagaaaaggaatctgaatccagccctagcatgttgttgcataacattggaaaatgactgaacctctcggcctcatttccttatctgcaaaatggggatgaagatggcgtgtagtacatgctctgtgcaaggtattgtcatggtcat

SEQ ID NO: 79024 - DNA, 637 bp, Homo sapiens
gacccaagcttagaagactcccatgcctggcttaatgctctgctgtcccaccttcaaattcttactaatttttaggccgggcacggtggctcacgcctgtaatcccagcactttgggaggccaagacacatggatcatctgaggtcaggaattcgagaccagcstggccatcatggtgaaacactgtctctactaaaaatacaaaaattagcagggcatggtgacgggcacctgtaatcccagctactcaggaggctgaggcaggagaatcgcttgaacccgggaggcagaggttgcagtgagccgagatcgcaccattgcgctccagcctgggtgacaacagcaaaactccgtctcaaaaaaaaaaaaaaatcttatgaatttttaagaaaagatgcatattttcattttgcaatgggccctgaaaattaagtcatcagtcctgggctttggagaagaaaaaaacaaaaaagaaaagaaagagaaagaaaaagaaaaggaatctgaatccagccctagcatgttgttgcataacattggaaaatgactgaacctctcggcctcatttccttatctgcaaaatggggatgaagatggcgtgtagtacatgctctgtgcaaggtattgtcatggtcat

SEQ ID NO: 79025 - DNA, 637 bp, Homo sapiens
gacccaagcttagaagactcccatgcctggcttaatgctctgctgtcccaccttcaaattcttactaatttttaggccgggcacggtggctcacgcctgtaatcccagcactttgggaggccaagacacatggatcatctgaggtcaggaattcgagaccagcctggccatcatggtgaaacmctgtctctactaaaaatacaaaaattagcagggcatggtgacgggcacctgtaatcccagctactcaggaggctgaggcaggagaatcgcttgaacccgggaggcagaggttgcagtgagccgagatcgcaccattgcgctccagcctgggtgacaacagcaaaactccgtctcaaaaaaaaaaaaaaatcttatgaatttttaagaaaagatgcatattttcattttgcaatgggccctgaaaattaagtcatcagtcctgggctttggagaagaaaaaaacaaaaaagaaaagaaagagaaagaaaaagaaaaggaatctgaatccagccctagcatgttgttgcataacattggaaaatgactgaacctctcggcctcatttccttatctgcaaaatggggatgaagatggcgtgtagtacatgctctgtgcaaggtattgtcatggtcat

SEQ ID NO: 79026 - DNA, 637 bp, Homo sapiens
gacccaagcttagaagactcccatgcctggcttaatgctctgctgtcccaccttcaaattcttactaatttttaggccgggcacggtggctcacgcctgtaatcccagcactttgggaggccaagacacatggatcatctgaggtcaggaattcgagaccagcctggccatcatggtgaaacactgtctctactaaaaatacaaaaattagcagggcatggtgacrggcacctgtaatcccagctactcaggaggctgaggcaggagaatcgcttgaacccgggaggcagaggttgcagtgagccgagatcgcaccattgcgctccagcctgggtgacaacagcaaaactccgtctcaaaaaaaaaaaaaaatcttatgaatttttaagaaaagatgcatattttcattttgcaatgggccctgaaaattaagtcatcagtcctgggctttggagaagaaaaaaacaaaaaagaaaagaaagagaaagaaaaagaaaaggaatctgaatccagccctagcatgttgttgcataacattggaaaatgactgaacctctcggcctcatttccttatctgcaaaatggggatgaagatggcgtgtagtacatgctctgtgcaaggtattgtcatggtcat

SEQ ID NO: 79027 - DNA, 637 bp, Homo sapiens
gacccaagcttagaagactcccatgcctggcttaatgctctgctgtcccaccttcaaattcttactaatttttaggccgggcacggtggctcacgcctgtaatcccagcactttgggaggccaagacacatggatcatctgaggtcaggaattcgagaccagcctggccatcatggtgaaacactgtctctactaaaaatacaaaaattagcagggcatggtgacgggcacctgtaatcccagctactcaggaggctgaggcaggagaatcgcttgaacccgggaggcagaggttgcagtgagccgagatcrcaccattgcgctccagcctgggtgacaacagcaaaactccgtctcaaaaaaaaaaaaaaatcttatgaatttttaagaaaagatgcatattttcattttgcaatgggccctgaaaattaagtcatcagtcctgggctttggagaagaaaaaaacaaaaaagaaaagaaagagaaagaaaaagaaaaggaatctgaatccagccctagcatgttgttgcataacattggaaaatgactgaacctctcggcctcatttccttatctgcaaaatggggatgaagatggcgtgtagtacatgctctgtgcaaggtattgtcatggtcat

SEQ ID NO: 79028 - DNA, 904 bp, Homo sapiens
tctcagatactttcctttttttggtgagaacacttaaaatctactctttctcaattttcaaatatgaaatatattgtcattaattatagtcaccatattgtacaatagagctcttgggttaatttcttctaacagaaattttgtatcctttgtccagcatctccccaatcccattcacaccccaacccccagcccctggtaacttccattttactctatgcttctatgagttcaactttttagattccacctacatacattccacaagtgagatcatgtggtattcgtgtttctgtaacttcattaacttaaaaactatattcagtgcctcctttattccaggccttatgctagaccctaaaaacacaagtttatgtaatacatagccatttcatacaggacctcatgatcaattgaaagtgctaatgatgttaatacataaatcaaatatactatttcatatgctataagagtgtttttggttaaatatatctttagcaattttgtcaaatataatsgccaaaagtgtgtatcaatgattttttaaaatcttataagaagaaaatgtgatattttttcttattcattgtcccacatgaattatatacacagatttgaaagattaggccaaattcagttatcacaggctcatcagaaatagatgaaggagaaacaagtcttcccaaggaaagaagtaagtaccccaaggtatgttgaaaccgatgggaatgaatcattgcccagcctatgagggacaggatgggctcacagaggcctatagctctttgggcttggcagaagtagctaacaactcagggaaactggatcaaagagatgctggaaaccaggtaagcaggagtaggaaaaatggggaaagtggtcatttttccttgaggcatttcta

SEQ ID NO: 79029 - DNA, 2354 bp, Homo sapiens
ggaagaacaaattgtgatatgttaacacagaaaatgcaaccatgaaatcttacaaatagcaaatggatataagagggctgtatgcaagaaatctggagaagcatgtagaagtgaatattaaagggcttataaatttgcattgtgagacaaatgcacaaaatagagggctcttttctgtcaaaatgtcattgatttgattaaaatagtttcaattaacaattattgaaaccttacaggtgaaatacccaattgtagaaaggtgtaagataaacaacttatttttctaggctactagtatgtgctaaaaaattagattgtcttaattataaccatgacaaaaattatttatctgactccagcctccacttctattgtagaaaaaaaaccctttcaaaagcatatatattatctaaagaaaggctgacacattaacccacccttaacatccactaatgcattgacatttgttttatcatattaatttccatcatggatgctgggcaatgaatgataagagtccactaaaaacatattaatatggaagatagaaaagatgttgaaaggggttctagattaaaatgctagaaaaatgtttgttacttaaaatttgacattttggctgacttttccacccttgcataaactctaagactaagatcataatttcttcattagattatgctagtttagcagagcagagagttgatcaagttattttaagtggtagaggtgtttattgtctggatgccttttggaataaaaaaatcaaggtctttagccaagtaggtcttataaaaacaaacaaactaggaaaatgaaccaagcagatcttagtggcagctggaactacaatagagtcgagcttcaatgatgtaagaattgatgctgatgatgatgctggtggggctggaggtattagtaaaaacctcacatcccctctgggatcctagcagcaggagagcttggcccctgaaatcttgctggtgggattcagttctccctcttggctactctttggattttggttgccttttcccactatagtgccctctgttaatgcctctgagcatctgcctgctcttatattctgcttcctcaggtttggctcagttgtgatcacacccctcatcacagctcctttacataataaactcagttagtatatctttttagctacctctcctgttactagtgccttgatactctgacctttgaaactcctatccattaagtcagaatctccatttctttcttggtggaacaatccatgataagtggccatccagtcagaactatttccattagatcaagttttggccaggcaggtatcacaactagcacatgagtgttaaaactattaggaaagcagttgtttattttttcaaatatgattcctaaaaaaaaaaaaatcccttaaatccctgatagtaggcataaaagtcacttttattaatagatgaattttcaatttattatcttattattattttttaaataaattttaattttaaatttttgtgggtacatagtagatgtatatacttatggggtacatgagaagttttgacacaggcatccaatgcataataatmacatcatggagaatggggtatccataccctcaagcatttgtcctttgtgttacacacaatccaattatacttttagtaattttaaaatgtacatttgaattattgactatagtcatcttgttgtgctatcgaatattaggtctcattcattcttcctatttttgtctacccattagccatcccaaacctccccctcatctcccactacccttcccagcctctggtaatgatacttctactctctatgtctatgagttcaattgtttttatttttagatcccacacataagtgagaacatgtgatgtctgtcttactgtgcctggcttatttcacttaacataataacctccagttccatccatgttgttgcaaatgacgggatatcattctttttttatggctgaatagtattccattgtgtgtatgtacattttccttatccattcatcttttgatggatatttagtttgcttccaaatcttggctattgtgaacagcactgcaacaaacatgagagtgcacatgtctcttcaatatcctgatttcctatcttttgggtatacaccttccagtgtgatttctagattatatggcagctccatttatagtgtttttgaggaacctccaaactgttctccatggtggctgtactaatttacattcccaccaatggtgtacaagagttcccttttctccacatcctcgccagcatttgtatgaaacccttaaaagttaaaatcatggtccctgagaactcacag

SEQ ID NO: 79030 - DNA, 1039 bp, Homo sapiens
gttcactcctctgtcccacaatagtaaattctgttagtctttgtcatctgtgttagaactcacttcctacagtatcataatggtttcattgtctatccttttctctcttcagagtcccccaggagcttggactataccacattgcctttacatcttacagtcgagggctatgtgtcaaattctcaataaatgtttcttggattggactgagtctggtcttgatttctagctctaccactaaaaatgtaggaatgcttatttgactgcacatcacgcatcaaattataacactgtctcaagactcttcctgctcttaaggtcagacctaggttatggagacctacctaaatcatacctgagttctccccatgcctttgagctttgaaagaaactgatttataattttcctggagaatgagaaaggaagaaagaaatgaggtctgcctaggyatattaatccatacctttggcacatagcagatcaagcttactctcaatcttgccacagttccaccaagaacagtttagtacactttacaactgaggctatatgctttttttaaatttattttttatattaaattggcaagttataatagtatatatttgtgaagtacaaaacgatgtgatgatatgaatacaatgtattgggttggtgcaagaacaattgtagattttgccattaaaaataatgacagaaaccacaataacttttgcaccaatctgtcaattgagaaaaatgatgagaaaagtctcaatcattttaggaagtttatttgccaaagttaagggtgcacgccggtgtcacagcctcagaaagtcctgacgacatgtgcccaaggtggttggagcacagtttggttttatacattttagggagatatgagacgtccatcaatatatgtaagaggtatgttggttccttccagaaaggtggggacaactcgaagtagggagggggcttccaggtcacaggaaggtgaaagacaaatggttgcctgcttttgagtttctgataagcttaagcctttccaaagga

SEQ ID NO: 79031 - DNA, 1039 bp, Homo sapiens
gttcactcctctgtcccacaatagtaaattctgttagtctttgtcatctgtgttagaactcacttcctacagtatcataatggtttcattgtctatccttttctctcttcagagtcccccaggagcttggactataccacattgcctttacatcttacagtcgagggctatgtgtcaaattctcaataaatgtttcttggattggactgagtctggtcttgatttctagctctaccactaaaaatgtaggaatgcttatttgactgcacatcacgcatcaaattataacactgtctcaagactcttcctgctcttaaggtcagacctaggttatggagacctacctaaatcatacctgagttctccccatgcctttgagctttgaaagaaactgatttataattttcctggagaatgagaaaggaagaaagaaatgaggtctgcctaggcatattaatccatacctttggcacatagcagatcaagcttactctcaatcttgccacagttccaccaagaacagtttagtayactttacaactgaggctatatgctttttttaaatttattttttatattaaattggcaagttataatagtatatatttgtgaagtacaaaacgatgtgatgatatgaatacaatgtattgggttggtgcaagaacaattgtagattttgccattaaaaataatgacagaaaccacaataacttttgcaccaatctgtcaattgagaaaaatgatgagaaaagtctcaatcattttaggaagtttatttgccaaagttaagggtgcacgccggtgtcacagcctcagaaagtcctgacgacatgtgcccaaggtggttggagcacagtttggttttatacattttagggagatatgagacgtccatcaatatatgtaagaggtatgttggttccttccagaaaggtggggacaactcgaagtagggagggggcttccaggtcacaggaaggtgaaagacaaatggttgcctgcttttgagtttctgataagcttaagcctttccaaagga

SEQ ID NO: 79032 - DNA, 1039 bp, Homo sapiens
gttcactcctctgtcccacaatagtaaattctgttagtctttgtcatctgtgttagaactcacttcctacagtatcataatggtttcattgtctatccttttctctcttcagagtcccccaggagcttggactataccacattgcctttacatcttacagtcgagggctatgtgtcaaattctcaataaatgtttcttggattggactgagtctggtcttgatttctagctctaccactaaaaatgtaggaatgcttatttgactgcacatcacgcatcaaattataacactgtctcaagactcttcctgctcttaaggtcagacctaggttatggagacctacctaaatcatacctgagttctccccatgcctttgagctttgaaagaaactgatttataattttcctggagaatgagaaaggaagaaagaaatgaggtctgcctaggcatattaatccatacctttggcacatagcagatcaagcttactctcaatcttgccacagttccaccaagaacagtttagtacactttacaactgaggctatatgctttttttaaatttattttttatattaaattggcaagttataatagtatatatttgtgaagtacaaaacgatgtgatgatatgaatacaatgtattgggttggtgcaagaacaattgtagattttgccattaaaaataatgacagaaaccacaataacttttgcaccaatctgtcaattgagaaaaatgatgagaaaagtctcaatcattttaggaagtttatttgccaaagttaagggtgcacgccggtgtcacagcctcagaaagtcctgacgacatgtgcccaaggtggttggagcacagtttggttttatacattttagggagatatgagacgtccatcaatatatgtaagaggtatgttggttccttccagaaaggtggggacaactcgaagtagggaggggkcttccaggtcacaggaaggtgaaagacaaatggttgcctgcttttgagtttctgataagcttaagcctttccaaagga

SEQ ID NO: 79033 - DNA, 648 bp, Homo sapiens
tagcacagagcaggtgtttaggagttgtagtggttattcttttctttcttcctttggaacttctgggctcaagtgatcttcctgtcccagcctcccaagcagctaagactacaagagtgcaccaccatgcccagctacttttccttaattttttttttcttttagatatggtgtctcactatgttgccgatacttgtcttgaattcctgagctcaagtaaacttcttgcctctgcctctcaaagcactggaattacagtttcttcctttcttcctctcctcctaaggcctcctccaccaccttggaataaaccgcctagcttggcartgtaacttcaaatgataacactgcttgtatgaaaaatttggtgtgttcagaattccttacaactgagttaaaaataatctatgaaacacaatctattttactagaaattggctgcacatgaatttaaggacatctaaatttccagagcatttatcactcataaggaagctggtaggaaaaataactggaaatgagatgagagctgtagtgagtattgggcatgggaagggagaagacttctcccccataactgagcttgaaataacaactttttagggtccattttacttcccctgcatgttaaaaattaataggcatcat

SEQ ID NO: 79034 - DNA, 1959 bp, Homo sapiens
ttggctggtatttgtgtgttcttgttctttttctgcaaactctacatcaacaccaccactcacttcaacatcatttctatgctgatttttcttccagctcaaatgccatctctgcaagaagcctcatatataatagttcctttctctggatgagtctgtcttgacctcctttatggctcttccatgccctacaatatattgtagctgtgtacatatctgtgtccatattcatatcctctacttaacaaaaagctccttgagggtgttttctgtttgtttgtttgtttgtttgtttttgctctgttgcacaggctggagtgcagtggcacgatctcagctcactgtaacctctgcctcccgggttcaagcgattcttctgcctcagcctccttagtagctgggactacaggagcacgccaccacactcagctaatttttgtattcttagtagagaagaggtttcaccatattggccaggctggtctcgaactcccgacctcgtgatcagcccaccttggcctcccaaagtgctgggattacaggcgtgagccaccgcgcccggctgagggtgctttccaatccaatatgtctttatgtccaccagcacccagtgctttgctaagaagtcttcaataaataaatgtctgttgaatgaataaatggtgggtgcaaaagtttccagacaaggaaaggcaaaagcaaaaacacatcactttggatctttctgcaaagtagtcttcgtagatgaaaagactcttctagacttaattaacaataaaaacttcattaactcataacagcgcactagtatttgctgcagcctttctacagaacattgtctcttctttcaatagcagatcaatggccacattttgtagaatgatttgctcataagctgtcaacatccacatagctcttttgtacataaagcaagataaactgaagttggaattggctatccggaaagttaaactacttctctaaatacagaatgcatgtttactgcttcatgagccttttggcagtttccctaaaatgaccagcattacagccatgtgaacattttgaagattacaccacagccattcttgtcttttttcttctccaaccattactataatgtgctcattatgggaaagcatgccctaacaatgcctcgctgaattttaagggagcagtagttgagagaagcactgtaagtccgacaaccattaagaaatcaaaatgtacagaccaaaacttattttcaaagaaattaagttccaaaaaagtctctgggtgtgtacactgttttggagagtttatattctgctgctaaatactgtagtggccggaataaaagctgacaagaatttttttaatctatattttaaaataaatagaataacaaaattggcactcctcaaattcagagatatttgctaaggattttttaaatgtgtaaacgtaatcatcacagtcttattgcaaagaaaaacaaaaggaaataatttctgtttttgtgtttatatatgatgatgaaataggtaagcatcaarcattgaacattctatttcttttcagtcttgttaggtagatggatgtggcagagactgtttccctcccaaactgtgtactttggtccaagaccagggtgaggcaagcaaggcagctagggctggaatatgtaaggagactctcagatttctgcaaatcccggtcctgcgtttgtgtgaccctgaactggctgaccttgagaatgactggctgaccttgacagtgaccccttaaattttgcatactcagcttctggcttgcttcattcaaatcgtggcaattgctttgctttgcagcttgactgcatttcccagcctcccagattaggacgtatcttgtaactgaattctgtccagtggaatacggatagagttagtgtttgccccttccagtcttgacctacaaagttctctaaagtattgt

SEQ ID NO: 79035 - DNA, 1169 bp, Homo sapiens
cacccagcctatgtagccttttaagtaagctagttcccaatgggaccagtgattttagtacataaatagcaaagaaaatcagttgcccctttcctggctgtgagtttaccatttgccagcacaattgtagtatctgtttgcttctgcatcagagttagtgggtttttttgtttgtttgttttttcttttcatatgtcttgtgcttcacggagagaaagatatgtggttcactttcttagcagatccaacacccacctctattgtttctcatctgcacagttgttatttcttacagtctatgtcccaagttgctaaactgaactggttttggtgtcaacaggctgtgccttcaagttgttgtaacaagagactaagaagtgaaaaaaatatgtccatcaaggtgctttttaatttacatgtcacaaaaggtttgtctgtttactcattttcccccagctgagctggtcaattgcattagcatatctaaggactgctcatgaccttgtgtatttatccatcaatctgttcatccattgatttattgggttgcttatttaattaatgaattagttatttctctggctcaataaaaatattagataaatgactttttaaaagttttaatagtaaaacataaccccccaaatggacaagagaaaactcaaaagtgaagtcaacactagcagaaagagtgtacaaacaccacaggctttcagctgttgtgaggcacatatttaactctgatgtaactattggccaagaagaatgtcatagttctaaataaccaaaagaaaaaagtttcttggtgggtaacgaaaattttttctcagttaattcaaaggatattctttcgtattagttttctatatgctcagttgcagatttgagartcttgtttccatagataaacaatattcgggtgaattttattttctgcaaaatctcattctaatagtagattttaaatttataaatatctgtaaattaatttctccttgttaaagtcaagatttgaagccagggctttctgaaggagtatggcaattcaaattgtcaagatgttgctctgtaccaacattataataggtactggggatataaagacagatatctttgcactgaaagagcttttatatatcagtacagattttcccataagagtgctgcta

SEQ ID NO: 79036 - DNA, 589 bp, Homo sapiens
caatgtcaaccctgggaactatttatacatttcaatcctgggaaccattataaaggctcggtcataagtaactgactaaaatgaaatatgagttgaattaaaataaactgctgtctccgtacttggaagaacaaaggatgctaactcagtcctctggctgccactcatccagtcygcctgccccacttttgccgtctaattattccttagggtcctaactactttagactactctactttgtatcaccagcagggacacagttgctcatggaattacaggaaactgaagttaaattcagaagtcttaatgcctgattatgggacaaatttcttgtgttggaaacttatctgagtcaagaatatagagcaaaatatgtgctgaccccgccaagggaatgagattgcttcctaccctcatttatcgtaactatttccttatttcaaacactactgcactggcagtcaagtactgtgcaaataataaagcaaactaataaaagaagtctgaatctgtcatcagtttatcctcaccgagattaaggaaacaaatggtggtttttaaatggagttaataattgctagcttgcaa

SEQ ID NO: 79037 - DNA, 589 bp, Homo sapiens
caatgtcaaccctgggaactatttatacatttcaatcctgggaaccattataaaggctcggtcataagtaactgactaaaatgaaatatgagttgaattaaaataaactgctgtctccgtacttggaagaacaaaggatgctaactcagtcctctggctgccactcatccagtctgcctgccccacttttgccgtctaattattccttagggtcctaactactttagactactctactttgtatcaccagcagggacacagttgctcatggaattacaggaaactgaagttaaattcagaagtcttaatgcctgattatgggacaaatttcttgtgttggaaacttatctgagtcaagaatatagagcaaaatatgtgctgaccccgccawgggaatgagattgcttcctaccctcatttatcgtaactatttccttatttcaaacactactgcactggcagtcaagtactgtgcaaataataaagcaaactaataaaagaagtctgaatctgtcatcagtttatcctcaccgagattaaggaaacaaatggtggtttttaaatggagttaataattgctagcttgcaa

SEQ ID NO: 79038 - DNA, 589 bp, Homo sapiens
caatgtcaaccctgggaactatttatacatttcaatcctgggaaccattataaaggctcggtcataagtaactgactaaaatgaaatatgagttgaattaaaataaactgctgtctccgtacttggaagaacaaaggatgctaactcagtcctctggctgccactcatccagtctgcctgccccacttttgccgtctaattattccttagggtcctaactactttagactactctactttgtatcaccagcagggacacagttgctcatggaattacaggaaactgaagttaaattcagaagtcttaatgcctgattatgggacaaatttcttgtgttggaaacttatctgagtcaagaatatagagcaaaatatgtgctgaccccgccaagggaatgagattgcttcctaccctcatttatcgtaactatttccttatttcaaacactactgcactggcagtcragtactgtgcaaataataaagcaaactaataaaagaagtctgaatctgtcatcagtttatcctcaccgagattaaggaaacaaatggtggtttttaaatggagttaataattgctagcttgcaa

SEQ ID NO: 79039 - DNA, 589 bp, Homo sapiens
caatgtcaaccctgggaactatttatacatttcaatcctgggaaccattataaaggctcggtcataagtaactgactaaaatgaaatatgagttgaattaaaataaactgctgtctccgtacttggaagaacaaaggatgctaactcagtcctctggctgccactcatccagtctgcctgccccacttttgccgtctaattattccttagggtcctaactactttagactactctactttgtatcaccagcagggacacagttgctcatggaattacaggaaactgaagttaaattcagaagtcttaatgcctgattatgggacaaatttcttgtgttggaaacttatctgagtcaagaatatagagcaaaatatgtgctgaccccgccaagggaatgagattgcttcctaccctcatttatcgtaactatttccttatttcaaacactactgcactggcagtcaagtactgtgcaaataataaagcaaactaataaaagaagtctgartctgtcatcagtttatcctcaccgagattaaggaaacaaatggtggtttttaaatggagttaataattgctagcttgcaa

SEQ ID NO: 79040 - DNA, 589 bp, Homo sapiens
caatgtcaaccctgggaactatttatacatttcaatcctgggaaccattataaaggctcggtcataagtaactgactaaaatgaaatatgagttgaattaaaataaactgctgtctccgtacttggaagaacaaaggatgctaactcagtcctctggctgccactcatccagtctgcctgccccacttttgccgtctaattattccttagggtcctaactactttagactactctactttgtatcaccagcagggacacagttgctcatggaattacaggaaactgaagttaaattcagaagtcttaatgcctgattatgggacaaatttcttgtgttggaaacttatctgagtcaagaatatagagcaaaatatgtgctgaccccgccaagggaatgagattgcttcctaccctcatttatcgtaactatttccttatttcaaacactactgcactggcagtcaagtactgtgcaaataataaagcaaactaataaaagaagtctgaatctgtcatcagtttatcctcaccragattaaggaaacaaatggtggtttttaaatggagttaataattgctagcttgcaa

SEQ ID NO: 79041 - DNA, 521 bp, Homo sapiens
gtattttttaaatgtggctccgaattataaagggtcggggggtggtccattctgtgttttgatgcagtctgcccacagaggcgccgtcactgggtacaggtgaatggctcacctccttcaatatggccctacatgagsagcttgcagggaaaagtaacaaaggtgaatgagctcattcttggctcaacagctccgaataaccaagacccaaaaggtcatagccagtcacctctgggaaactcaagctgggtacaatgacatggcagagatcccagggggtagagggcaagaagaacactactaataatactgcccttgagatccatctgcaagtcactacagctgcaaccagagaagatattcatgcataaagacctgccacccatgactgtaaaggtgtgagggttcagagagtaaaaagacacattctcagccagcaacattctcatccagcaaataacacaacttgttatttggctgctatacaaagaggcactgtgagaagcagtgccagcgtggat

SEQ ID NO: 79042 - DNA, 655 bp, Homo sapiens
tatgaatgcatgcttatctagtccttcaataagcctgtcacacattttcaccatgtcttctataggcactttgtctgtaacgttaacaatgtcatcttcattgtcctgtcagcactcaaagagtttcagattttggagcattttggattttgaatttctggataaggagtgttcagcctgtatagccttaaaatagaatattattcatcaatgaaaaggaagggagtgctgatatgtgctacaatgtggatgagcctcagaaacattatgctaattgaaagaagccagacacaaaagaccatgtattgtataagttcatttatataatgtatccagaataagtaaattcatagagacagaaagcagattaatggttgccagcaactaaggggagagaagaatgaggactaactgatcaatgggtaagacatttccttcagggagatgaaaaggttttgaaaccggatagtggtgatggttgcacaatgttgtgactatcctayacaccattaaattgtacattttgaaatggttaattttgtgttatatagatttcaattcaattttttaaatgaataatatataaccttttaaaagacatgttcagccagagacatacactcctgttgactcattttattataattttacttaa

SEQ ID NO: 79043 - DNA, 2330 bp, Homo sapiens
taagtcacatgccaagtgtgatgtagaatatagtgacaaaaaaagacaaacgaaagacacagataarcaacaaaacaatgcctgctctcagagatgttacaatgaactgagaaagacaaaagtgtaagcaactaactatactaaagagtagaaacaaaaagagcccaagctttaaataatgtttaatgaaatgataaatttttctgaggaacttgaaaggcagctcaaaagtgtgaattggagcttgttcttaaagaatgaaaagtagagaagaaagggggaagaaacacagaaaaagaataagcagagaaattgggtagggtattcaaagctgaacaactaatggttcaagggtatcactatcattaacacatgctttagtcaccaggaactgctaattttacttctcaaatctctcaattacatctgcttctccatttttatttccattgccatcattgcttgtcactgaatttattgtaataacttcttcataagaatttattgttagatggatttattgtctgttgctatatttcaggcacagaattaagcaccttttgcacagcctcacttaattctgaggtatggtgtattctattattagccccatttgatagaaaaggattctgaggcttgaagacgttggtggaagaaacagaacttgcctccaactagcatgacttctaagaatgtgttgtcaagggcgtaagtgactcactcaccttgctctacagcagggggtccctttgttccatccccaggccaaatcctgctgctgcctgttattgtaaataaaatttgttttaacacatttacatccttatgttgacatattgtttatgggtgcttttgtgttacaatgacagaattggtgcagagttgagtggttgcagcagaaaccatctggcccccaaagctgaaaattatttactatctggcccttgacagaaagagtttgtacccccgtgaagcaccctgatattttgtagttttgaaattatctagtatatcttcttgttattgcaaacaattgttccatttaaaagaaaatactggttaaatattattagatgccaggtactgttctaggtgctaggacaaaagcagaacaaaacaggtatagctgcttctttgtggagctcatatcttaaaatgctgaggagaaagaggagaaagaatgagaaagataagcaaacatgtaaatgcataggatactattaaatattagcaaaaatgctgtgaagggaatgagttcaactgatgggatggaatgaggctggtgtgtgtgggtgatacttttcacttttatgaatggtttggctaatcaggtgtttcatgaatgggaacctgagacatatgaaggatcaactgtgtgtagattgagattagaatgtttcttgtagaactgaaagtgcaaaagctttgtgtagaaataagcttggaatgttcaaggaacttgaagaaagcaagtgaagtttacaaggcaagaatcgaagttaaaaaaagggggctggagacagagaagactgaactttgttaaccgtcaagttgagataatattaaatattttagtgcatttggaaaatgtttgagaacattagtagagaaatggtgtggtctgatttacatatgaggagatataattataaagtaaagccaacggatttgttgttagacagtagaaatatacacccacactgtgaccagcattgtgctgtttaccaatacatgattctctgctccttttaggcaaatgagacattgtatgtcctcaccacctttcaattagactcagccatttgacttgctttaggtaaaaaatataagagactaaatctgagtcaaagtaattactggcacttttacagaattgcagttgagcaactctccagcacacttctccctgccaccaacaatggaagcacatgtctgtaagtgggtggcatgagctctaaccagacattcaaactgagccaacatgtatagaacagctgccctggagagtcagctagacctgcatcgaactttgtcaaaagggagaaaaagctttatttttatttttaattgatggtaaacaaaccaaaatattggggtttcttgttcctgaaacatatattagcctctcctgactaatatgaatgcctactatcattggtttttctccacttgaatttcaatatccaacttaaatcccacttgttatggaacatcttcaacaagcatttattgagtacctagcatgtgccaagtactgcatcagctgttatatgactacaggaataaacacttcatctcccccgcaacctggcagaaactcaaaaactaaa

SEQ ID NO: 79044 - DNA, 2330 bp, Homo sapiens
taagtcacatgccaagtgtgatgtagaatatagtgacaaaaaaagacaaacgaaagacacagataagcaacaaaacaatgcctgctctcagagatgttacaatgaactgagaaagacaaaagtgtaagcaactaactatactaaagagtagaaacaaaaagagcccaagctttaaataatgtttaatgaaatgataaatttttctgaggaacttgaaaggcagctcaaaagtgtgaattggagcttgttcttaaagaatgaaaagtagagaagaaagggggaagaaacacagaaaaagaataagcagagaaattgggtagggtattcaaagctgaacaactaatggttcaagggtatcactatcattaacacatgctttagtcaccaggaactgctaattttacttctcaaatctctcaattacatctgcttctccatttttatttccattgccatcattgcttgtcactgaatttattgtaataacttcttcataagaatttattgttagatggatttattgtctgttgctatatttcaggcacagaattaagcaccttttgcacagcctcacttaattctgaggtatggtgtattctattattagccccatttgatagaaaaggattctgaggcttgaagacgttggtggaagaaacagaacttgcctccaactagcatgacttctaagaatgtgttgtcaagggcgtaagtgactcactcaccttgctctacagcagggggtccctttgttccatccccaggccaaatcctgctgctgcctgttattgtaaataaaatttgttttaacacatttacatccttatgttgacatattgtttatgggtgcttttgtgttacaatgacagaattggtgcagagttgagtggttgcagcagaaaccatctggcccccaaagctgaaaattatttactatctggcccttgacagaaagagtttgtacccccgtgaagcaccctgatattttgtagttttgaaattatctagtatatcttcttgttattgcaaacaattgttccatttaaaagaaaatactggttaaatattattagatgccaggtactgttctaggtgctaggacaaaagcagaacaaaacaggtatagctgcttctttgtggagctcatatcttaaaatgctgaggagaaagaggagaaagaatgagaaagataagcaaacatgtaaatgcataggatactattaaatattagcaaaaatgctgtgaagggaatgagttcaactgatgggatggaatgaggctggtgtgtgtgggtgatacttttcacttttatgaatggtttggctaatcaggtgtttcatgaatgggaacctgagacatatgaaggatcaactgtgtgtagattgagattagaatgtttcttgtagaactgaaagtgcaaaagctttgtgtagaaataagcttggaatgttcaaggaacttgaagaaagcaagtgaagtttacaaggcaagaatcgaagttaaaaaaagggggctggagacagagaagactgaactttgttaaccgtcaagttgagataatattaaatattttagtgcatttggaaaatgtttgagaacattagtagagaaatggtgtggtctgatttacatatgaggagatataattataaagtaaarccaacggatttgttgttagacagtagaaatatacacccacactgtgaccagcattgtgctgtttaccaatacatgattctctgctccttttaggcaaatgagacattgtatgtcctcaccacctttcaattagactcagccatttgacttgctttaggtaaaaaatataagagactaaatctgagtcaaagtaattactggcacttttacagaattgcagttgagcaactctccagcacacttctccctgccaccaacaatggaagcacatgtctgtaagtgggtggcatgagctctaaccagacattcaaactgagccaacatgtatagaacagctgccctggagagtcagctagacctgcatcgaactttgtcaaaagggagaaaaagctttatttttatttttaattgatggtaaacaaaccaaaatattggggtttcttgttcctgaaacatatattagcctctcctgactaatatgaatgcctactatcattggtttttctccacttgaatttcaatatccaacttaaatcccacttgttatggaacatcttcaacaagcatttattgagtacctagcatgtgccaagtactgcatcagctgttatatgactacaggaataaacacttcatctcccccgcaacctggcagaaactcaaaaactaaa

SEQ ID NO: 79045 - DNA, 2047 bp, Homo sapiens
atccagtttcagctttctacatatggctagccagttttcccagcaccatttattaaatagggaatcgtttccccattgcttgtttttctcaggtttgtcaaagatcagatagttgtagatatgcagcgttatttctgagggctctgttctgttccattgatgtatgtgtctgttttggtaccagtaccatgctgttttggttactgtagccttgtagtatagtttgaagtcaggtagcgtgatgcctccagctttgttctgttggcttaggattgacttggcggtgcgggcccttttttggttccatatgaactttaaagtagttttttccaattctgtgaagaaagttattggtagcttgatggggatggcattgaatctataaattaccttgggcagtatgaccattttcatgatattgattcttcctacccatgagcatgcaatgttcttccatttctttgtatcctcttttatttcattgagcagtggtttgtagttctccttgaagaggtccttcacatcccttgtaagttggattcctaggtattttattctctttgaagcaattgtgaatgggagttcattcatgatttggctctctgtttctctgttattggtgtataagaatgcttgtgatttttgtacgttgattttgtatcctgagactttgctgaattgccttgatattctatatcaattgagggagaactgacatattcccaatatgtgtcaccacagactatatctattctgatgggctacctttaggcagctcagggttaattattataattttacctctttttcttatcataccatttccacttcttgtgtatattatctagaattgaagagctaaaataaaattattcaattttgacatagtatgcattggatttctagaattaactttggcatgtttactttaaagtacaattcattatcaactctgcatttgatttataataattctccattcatgagttctctatgttttctcatttcacagggtgctaaagtatgtcttcccataattattttcagtagagtgcatgtatattatatatttggtaatattcaaggcttaagaacatcttgtttcttctcagatacgaacaatgtgactgagtatggaatgttttggatagaatactttatcttcaaaatctgtggacatatattgcttaatctttggtatttagtggtgcaagaaaaaatctgaagtcagccttcattaactgttgttgttattagtatcatttgctttaactagctcatttttggcttcatatgattttattttcattttaaaattaaattaagcttgccccttgatatttctctctttttaaaatatttcttggttttggaatactacaaaaacaaacaaaaatttttaaaaaatayatttcttggtggatggtaaaattaccatacacaggctggacacaaggatgtcttctacctaaacaagctcgcttatgcaattctttaaacactatttcaactctgtgtaattctttaaacactatttcaactctgtgtaagcatgtatctcatttcttctccaatcatgttcatggttatcatttaactgaactataagttcttcattatctttctgttcttcattacttcttaattttgcagaaaagattttatttccatgcaattttttgtaatctcagatttttccttctttgtgattgttttctctgccttcttgaatctttatataaaccatagccattttctaaaattttttctgcttcctttaggaaatcagagtgaccatttttccaaatcattacaggagtacctgtatggattgtactacctttttgtagacgtttttatttttctctatttttttgagaggtgtgattacctgttctaacacagccctgccaccatgccagccaactttttggtgcactcatatgttctgagggttcattctacagaagtcactctattcttgctgtaaccacaggatccagacagaagctgtctgctcaatggattggattcctgaaaaatatgc

SEQ ID NO: 79046 - DNA, 1318 bp, Homo sapiens
aggacctgggagaagaaggagtgtagggacagcctggccggggttactggggcccctggcgtggggggcggtcaggctgcccaatggggctgcccgtcctggactcgaggtggtgctttctgctggagctgagaaaggttagccctgagatgggatgggggccgcccagggtgggcgaccgggccctgacaggagtccctcagggagtgaccacatccccccgccagggtcaagggagcctgccctgagacctgcccggtgtactctggctgcaccaggggcccaccccacttgacagccccaaggcccttgcaggttctgacctcccagcatccacctgcctctccctgcacccgagccacacaccctgcgtttcagaagtggcacggctcgtcagctccctcccgccctacctccccagggatcctctgtctctccatcctgtgatccctgagggatgggctcctggctgggctcctcttaccyggccccagatcccttcccagcaccagacccaggtctttagccgcgagccctgctgcctccctggcctcaccgtgagatgcccagaacggggccctgcccatcttctcccccgttctcctagggctacagcccccattgtcaccatgccttttcccctcacgggacagtgagggctgtagctctaggggaatgggggagaacaggggcaggtgggccctcagagacctgctggacaacagccctgaggctgggccaggcgtcccctcaccctgtggccataacccttgcatctcaccggggttgtctccaagtagacagggccagaccctcaggctgccccgctcctcttgtgctcacttgccgacagaactgctgagcgcccaggggcctgacctagcccagtctccattcccaccggctccctagatgggccccacacctctggcctaacaacctcgggctggacctgcaggggagtcagggaggagttctgtccctggaaaggaggttgacccgacctggtgagacatgtcctgcgtcagaaaggcctttctaaaagcaaacccatccctgagctgagacaggtgctttaggggtgaggggagtgcagaggactcactgtacaatccccaaatgatcgacgttgttgttgtagcttcgaaaaggcttaggccccttgtcctctggcagcccagctcggtgtccctgtagcccagagggagccttggtgaggggtccaaggtaaagggtgcaagggcctgggggcattggccacccgtccctgccctgtgctcctagggagcccaggaccctttgaccagggcacactgga

SEQ ID NO: 79047 - DNA, 716 bp, Homo sapiens
tgtatttttgttggatatataaccaggagagaacttgttgagtaatatgtatgtgtataatrtaatatgttctagcagatatgaccacacaggtgcaataaataagagttctgaatgttccattcacccataaacatttgattttttttattttatccattctagtgtgtagtgttactgcaatatattattaatttgccatttttaatgaccaaagatgatgaatgttttttcatagttttgttgactatttggaaaaccattttttgtaaagttttactctttgctcattttactgttcacctgttggcattttggttacagtttggagagttctttgtatattatgattcttttatgggtatgtgtattacaaatatcttttctcactttgtggtttgaatttctaaatcttaacaacgtatattgatttaatgaagggtttaaagtagtccgacttatcatctttcttatgattagtgtgttttctttccagtttataaaatatttgcatatagcctgaaggccatattttttctctttgtttattgctctttagaagtttccactttttaaaaaaaaatggcggctttactgaaatataattcacataccataaaatctacccatttaatagtttgaggtacagttaattttttttttttttacttacagttaaaggtacaacttgctagtttttagtgtatttacagata

SEQ ID NO: 79048 - DNA, 602 bp, Homo sapiens
ccttttgcaaaggcctcctgcaccccacacctgacgccgacaagggggtgcgggtcccccaccgcacctctctgtgcttccagccctgcccctctaggcaccggaaatcactgccataggggggccaggtccagagagaggcacccacgaaggtctgggctcaccttggccgcagctcatctactgccgctcactccagaccctccccctggccccagacagccccattcagggctcaggggtgtcctgagcaccaggcaggctgggcttcgaccctctcagcctaactttcctaactttcaggatctcgccgtgttgcccaggctggtctcgaactcctgggctcaagcratcctcccacctcggcctcccaaagttctgggattacaggcgtgagccactgcacccagccttactttaaaacttagcttaggagttttagtcctattaagtcctgaggaaaataacccctctgtagcataagtcttccctgtgaggcctctcctgaccctccaccctatccgcctccaggacggtggccctccccagcaagccatctacctgacccccagacagaaggcaggctcttgaagggcaggtct

SEQ ID NO: 79049 - DNA, 991 bp, Homo sapiens
aaacctctgcttctttgacttctgacctctgccatgataccagggtcttccaggaccccagcctaggccccaaatctgctaccattctttttacttaaccgcgcaaggtagactccccttttctttcagataggcagttaaactccttgttgcagcacctccctgattggaccccaggcctctcttttgcagaaccaaaggtcctttaaagtttttcttaaacaaaaagccatctctgacccccgcacgatgcagtcttccgcctcctgtagcagatggtaacggctttgagcagctttttaaaatagcaccttttccattcctgccacagatgtaagggacatagcgtggcacgtgggaagtgtccagcaaatggccgtagatagcaacatcatttccttaaaggcccagtggtcatcagttgatttgaagagttcacagggaggagttgcagtgaggccctggcatcrgtattttttatatgccccagtttgagcagaatgtgcaactggatccaccatcagttcttcaaaatggtacttgagacacatcagaggctctcagagctgttagtttattcctttcctcccttgattgagtgagttggtttattatcctctgtcccagctctgttaattctctctctttgcctttgctcatgttagactcctgctgggatctgcccttcccccaccgtgtgtgtgtaccacacccaacagtgactccacaagccaattcctttatggcttctaggtttacttcccactaataggtgtatcctttcagtggccaccttttccttagagtcctatgctcatctaggtctcacccatgcattgagccctactcaagttctgcttcctcccagaagcctgccctgactactgcaggcagggttgggcgagcctgttctgtgttcccacagcatgttgtggatatccctgctgtcactctttgccttagagtcagcttccaccctcctccacatcgc

SEQ ID NO: 79050 - DNA, 941 bp, Homo sapiens
tgcatgggggtgcccagctccagtggggccctggctgcttcctcttccctctgtttctgtcacccttggcccaggcccctgcccattctgtaccccagaagcctccttatagggcttgsgccggagattggggtcatgaagaaatagcctgtagagggggaaggaatgagcgctgagaaccaccatctgtttatctgctttgggagttggagtggtcttggagatagggagggcatgatgtcctcaaaatctgggtgctaaaacttctgaccacagtcaaataaaaaagaaagaatgtgtcagaccaaccacctggtggattttcaggctctgcagccaccgtagaatgctgctcagagaccccacagatcccagggcaggaagcccttgctgtgtgccaggcactatgtctcatgctctacaaacattgtcttaattatccccaaatggcttcatgaagcagagttaattattttctccaacaggtgccttgttcaaggcaacccaaccagtaggcagtggagctgagattcaaatacagatacagccaacagcaaagcctgtgctcttcccattatgccaggttgtctctctaacaaaccctgccctcaaagagcttacaatttagttgtagaaacaaggcatcaaaccatcaaaaaagagtgccagaaggatctttttagattttctggtccagtttaacacacgtggagatggcaggctgggggattttagttaaggtaaactcaggttatttgtcacctactgtatgacagatattaggtgatgtatgggggacacagcgatgttaaggagccatactcagaatgacacacccaaggtcacaagttggtggcagagccaacttaaacctggggcacagacatctagacttgagctttgtctgaaagagcagttgctacccaccattcacatatgtg

SEQ ID NO: 79051 - DNA, 941 bp, Homo sapiens
tgcatgggggtgcccagctccagtggggccctggctgcttcctcttccctctgtttctgtcacccttggcccaggcccctgcccattctgtaccccagaagcctccttatagggcttgggccggagattggggtcatgaagaaatagcctgtagagggggaaggaatgagcgctgagaaccaccatctgtttatctgctttgggagttggagtggtcttggagatagggagggcatgatgtcctcaaaatctgggtgctaaaacttctgaccacagtcaaataaaaaagaaagaatgtgtcagaccaaccacctggtggattttcaggctctgcagccaccgtagaatgctgctcagagaccccacagatcccagggcaggaagcccttgctgtgtgccaggcactatgtctcatgctctacaaacattgtcttaattatccccaaatggcttcatgaagcagagttaattattttctccaacaggtgccttgttcaaggcaacccaaccagtaggcagtggagctgagattcaaatacagatacagccaacagcaaagcctgtgctcttcccattatgccaggttgtctctctaacaaaccctgccctcaaagagcttacaatttagttgtagaaacaaggcatcaaaccatcaaaaaagagtgccagaaggatctttttagattttctggtccagtttaacacacgtggagatggcaggctgggggattttagttaaggtaaactcaggttatttgtcacctactgtatgacagatattaggtgatgtatgggggacacagcgatgttaaggagccrtactcagaatgacacacccaaggtcacaagttggtggcagagccaacttaaacctggggcacagacatctagacttgagctttgtctgaaagagcagttgctacccaccattcacatatgtg

SEQ ID NO: 79052 - DNA, 549 bp, Homo sapiens
ggaacttaagggcaattcatgctgaatcaaggaaaaacaccaaggtttgggggcagggaatctgaggtcaacttacgttaactttctaaaagagaaaacaccaaggtctgggggcaaggaatctaaggccaattcgtgctgacttcccaaagctgaattcccaaaaggaaccccctgggtttgggggcagggaacctaaggccaattaaggccaacttcctaaagctaaaccaaaaggaaaaaacccatctgcccacgcccgagtggcaaaggatcaaaggctactatccctgcaaccctccccatccacyacgtctcacatggaaagggagagtgccttagactggccgcaggccaagcagggaccatccgttcatctgcacaggacgccaattcacctcggcctttagccacagaccaaatccttcatccagataaggggtaacccataggaaccataaaaggagcacttaaaatccagaaaactttgtaagtgggctcttgagccccttgctccggcccactcacaccctgtggggtgctttctcg

SEQ ID NO: 79053 - DNA, 895 bp, Homo sapiens
tcatcctatattcattttggggtagaagcttaacatttaaatgtattacaattaggccctatacatcaaaggtggaggcagggacatgaaggaacttagtgtacagcctctgtggaccggccagaaccagcctatggtccgtgatctcttatcaagagaaagttactgaaatcagtctcttatccagttgaagttgcagttatggactgtggaacgggaggggatcagttagtcagagtctggtggtcagtgagttgcaattgttttaacattgtttatctcgaggccagtacttgcttagctactagataaaaagaaaaaaccttttgacaattagaacatggttgattctttatgtgtaggggtatgtgacttaatccttgcctggcatgaccttaggtctttatcttattgctgtaaagagtctgttatattagtcttaagatctctattttaacagtagcttcatgcagtccagaaaattttgcctgtaacagaactagcagtatttttgcagcaatcatggtagccaaaggaggctcttagcccatatttgtgtgacaggggttagtgactttaaaagaacatgtctttatgttaataatgttggtggttgtattcctgaatattttattcttttctattaactcttgctttcctgtctgcacaaagccattagaatgtgtttgaagtttacttatttcagttctacacttataacgtggaaasttcttattcatttccctgccttcattcatgcccacttccaatccaactttgatacagctgtttgaagcatcatttttatggctctcattgccaatactagtgattctcaacacaggcaaggcattgtcccctagaacattgtttttaaaacttacctacaggactc

SEQ ID NO: 79054 - DNA, 637 bp, Homo sapiens
tacaggcgtgagacaccgcgcccggccagtcattactcttaaacacatccatttacatgcctgggtatcagttggttcctccaatggacgcttaaactcacccactttagtatatgatacacatatatctaatttaagggaactgtatccattttactcagtttaatggatactagtactatgtagaatgaataataaggagagagcaggagggaggtgataaatatggggcagttgtgaacctataggcccgccgcggagcccagcagcagatgcgcctgtgggctctggggggcagaagggagggaccgcaggctggtactcggcagcctcgcggcggccgggmgctcaggcgcaggcgcggcccggctgtcaggcgctgatgcgcggggccacctgcagaggcctcctcaccctgtccccgggatgtcccctagacgcggacccccgtgccctccttgccctgtgctgtcacagagtgacctgaatcctcccacgccaaaaagatgggtggaagaaagtatttccaaccctccccccgatcatcccttacccagggagagccgctggcccctcagcagggggctgcgcacagcggtggagcgatctgcggctttgtttctcaggcacctgttgt

SEQ ID NO: 79055 - DNA, 637 bp, Homo sapiens
tacaggcgtgagacaccgcgcccggccagtcattactcttaaacacatccatttacatgcctgggtatcagttggttcctccaatggacgcttaaactcacccactttagtatatgatacacatatatctaatttaagggaactgtatccattttactcagtttaatggatactagtactatgtagaatgaataataaggagagagcaggagggaggtgataaatatggggcagttgtgaacctataggcccgccgcggagcccagcagcagatgcgcctgtgggctctggggggcagaagggagggaccgcaggctggtactcggcagcctcgcggcggccgggagctcaggcgcaggcgcggcccggctgtcaggcgctgatgcgcggggccacctgcagaggcctcctcaccctgtccccgggatgtcccctagacgcggacccccgtgccctccttgccctgtgctgtcacagagtgacctgaatcctcccacgccaaaaagatgggtggaagaaagtatttccaaccctccccccgatcatcccttacccagggagagccgctggcccctcagcaggggrctgcgcacagcggtggagcgatctgcggctttgtttctcaggcacctgttgt

SEQ ID NO: 79056 - DNA, 2035 bp, Homo sapiens
gctgctgtacactatcaaggaaatttttgttgttccttgaattcagaaacttcctgaactcccaagatgatggcaccatcttttccatgctggggataaatagggaagtctcttttttaaccaagcatcattatttatgtgactcattcagggacaggactgtattgaaacagagctggggctacctctccttggcttgactgaagccaagtgtaagagcttagagaccccacatttgcaaaggaattggatttagtctctcaagttattttccactccctttgtccctcctccattctggaacaagatttctcccatcttgtatcttggatttggcctcacatccaccctttaagaaagacagagagaaggagagacttttatagacttaaaaagagtgaaggcaattgttttcctctaagagcattaaccttcaaagttgattaccactttcaactgtaaataaatctttttctcaagagtagatgttactttactagtgtctattttttcctctgttattttctgcagttgtgaggtggaattcaaagtatatatcatactgtatgttaccttagtaaagaagtcaaatttattaattagctatggtactgtctgttttaatactataagtagagtgactactttaaaaagcattaacacatttatacatattacaaaataatatattttgtcattttattgagtaaatagaagcaaaaatgctattcattttttatggtacccatgaataggagtctatgtccttttggcccagcaatttcacttttagaaatctgtcttacaggcatattcacataagtggacataaataatatgttaaaaaattctcattgcgatatcgtatgcataaaaatgaaatatgcagcctaatggataatacagggtagctctatagatgtataggtgctttcatagaaagaagtttaagaaatattatttgcaaaaaacaaattgcaaaacttttagtgtgtcatgattccatttgtgtaagaaaagtatgaacacaaatacatttcsatatatgtagaatatttctaaaactatatgtatataagatgtgttctaacattcttatggatggtactggataaatggggaagaccacatttacttttatttctacactgcttaaatactttattatgggcttgtacaatttaataataaacattaattaaataaaaaacataatctgaattcagtaaatgctgtagtaaaacactgggaaatctccctatttcaaggcactctggagaagaacattttgttttgtatgatatacctctggttgagtaagttaatttatttcattcacttgtgataaatgtgaacgtggagaggttacataatagaagctaggctggtgaaaaagtaattgcggtttttgctatttttttaatggcccacaattacttttgcatcatctatctgggatgcctcttagaattcccccagtcctttctcttacctgtaagtcaccttctcccttacccagatgtgatttttccctaatcaaacctttttaaagatcaaagaaattgctaaacaaacggaaaaacctgctaacttggggggaaaggattgtgaacacaatctggatttttgcttctgcccccaaatttgaatcatgttgcggttacttgccagttgcccccagatcccagaactgaccttgatctgaaccaggaggaacagactttacttgagtcctccttctgaaactgtccctaacccgttgttacctttgaaaacaacgttcccatcttgctccaaagccccaggccagatttctgctttggttgctgtcatgtagattcctttctaatgcccacccaggtatccaggtttcctttaggactgaggtcgtgccttcctctacccaatccccaggcaccagatttctaggcaccaatgactagggacttatttcccgtcaacaagtttccagacactgcatgtctgcctcctgtcttttgagccatccattaattaactgttgtactctgcttat

SEQ ID NO: 79057 - DNA, 2035 bp, Homo sapiens
gctgctgtacactatcaaggaaatttttgttgttccttgaattcagaaacttcctgaactcccaagatgatggcaccatcttttccatgctggggataaatagggaagtctcttttttaaccaagcatcattatttatgtgactcattcagggacaggactgtattgaaacagagctggggctacctctccttggcttgactgaagccaagtgtaagagcttagagaccccacatttgcaaaggaattggatttagtctctcaagttattttccactccctttgtccctcctccattctggaacaagatttctcccatcttgtatcttggatttggcctcacatccaccctttaagaaagacagagagaaggagagacttttatagacttaaaaagagtgaaggcaattgttttcctctaagagcattaaccttcaaagttgattaccactttcaactgtaaataaatctttttctcaagagtagatgttactttactagtgtctattttttcctctgttattttctgcagttgtgaggtggaattcaaagtatatatcatactgtatgttaccttagtaaagaagtcaaatttattaattagctatggtactgtctgttttaatactataagtagagtgactactttaaaaagcattaacacatttatacatattacaaaataatatattttgtcattttattgagtaaatagaagcaaaaatgctattcattttttatggtacccatgaataggagtctatgtccttttggcccagcaatttcacttttagaaatctgtcttacaggcatattcacataagtggacataaataatatgttaaaaaattctcattgcgatatcgtatgcataaaaatgaaatatgcagcctaatggataatacagggtagctctatagatgtataggtgctttcatagaaagaagtttaagaaatattatttgcaaaaaacaaattgcaaaacttttagtgtgtcatgattccatttgtgtaagaaaagtatgaacacaaatacatttccatatatgtagaatatttctaaaactatatgtatataagatgtgttctaacattcttatggatggtactggataaatggggaagaccacatttacttttatttctacactgcttaaatactttattatgggcttgtacaatttaataataaacattaattaaataaaaaacataatctgaattcagtaaatgctgtagtaaaacactgggaaatctccctatttcaaggcactctggagaagaacattttgttttgtatgatatacctctggttgagtaagttaatttatttcattcacttgtgataaatgtgaacgtggagaggttacataatagaagctaggctggtgaaaaagtaattgcggtttttgctatttttttaatggcccacaattacttttgcatcatctatctgggatgcctcttagaattcccccagtcctttctcttacctgtaagtcaccttctcccttacccagatgtgatttttccctaatcaaacctttttaaagatcaaagaaattgctaaacaaacggaaaaacctgctaacttggggggaaaggattgtgaacacaatctggatttttgcttctgcccccaaatttgaatcatgttgcggttacttgccagttgcccccagatcccagaactgaccttgatctgaaccaggaggaacagactttacttgagtcctccttctgaaactgtccctaacccgttgttacctttgaaaacaacgttcccatcttgctccaaagccccaggccagatttctgctttggttgctgtcatgtagattcctttctaatgcccacccaggtatccaggtttcctttaggactgaggtcstgccttcctctacccaatccccaggcaccagatttctaggcaccaatgactagggacttatttcccgtcaacaagtttccagacactgcatgtctgcctcctgtcttttgagccatccattaattaactgttgtactctgcttat

SEQ ID NO: 79058 - DNA, 741 bp, Homo sapiens
ttattccttgctggtaaaggaattcagcgatatttcttctattcactttctgcaagaagagaaatatgagtctgttctgcccggaccygcaggcagtcagaccttatggttatctcccttgtttcctgaaaatcgctgctaacctgttcttttttaggatgcccagatttcatattgttcaaacacacatgttttacaaacaatgtgtgcagttaaggcaatcatcacagggtcctgaggcaacatacatcctcagttgacaaagatgacaggattaagagattaaagacaggcataggaaattataagactgttgattggggaagtgataaatgtccatgaaatcttcacaatttatgttcagagattgcagtaaagacaggcataagaaattataaaagtattaatttggggaactaataaatgtccatgaaatcttcaaaatttatgttcttctgccacggcttcagccagtccctccatttggggtccctgacttccctcaacactttgtatgtatctcttcctaaacccttttcttctctttacttttgcttcattttttcatctttatttatattattctctgtcacctgctgatctttccatgatttttctttgtgctctttttaatatacttcttatttcctaaatgatttagcctgttacttctttttttttttttttaactgaattctgttagccttttttcacattttcctgttatgtggtcatcttttc

SEQ ID NO: 79059 - DNA, 1274 bp, Homo sapiens
tgcattggtaactaaggttactctctttctttctgttaatggatgttccttatctctgcttctttcaggatcttcttcattctcacctttccctttgtaaagcaactttctctgcttctgctgatgtatgtggctaatattcagttgctgaatttctatgtgctcttgtcaagaaattggcttattttgttgactgcattgaaaaaatacaatagctgactgtgtgggaggaaaattattagaaaaggaatattgtgaactagacaggtgtttaccgtagggaaaaaaacattctagtcaggattgaaaaatacacatgaggatcatacatgtaaatctttgtttaagggactagaatactgtttcaaagattttgctttgaagggggtaaaagagaaaagcttaacaggtgaattgggaataatttaggagagaaaaccacagaggcgagaaactgtgctctctgtctacttaacaaatacctctctccttttggtattcagtgaatctcactgtgagtgaataggtgtcacttcagtaaagccctgtttctaactagctgtctgctatttcatatgagtgaaagaatttcatgaatagtaattaatacatgggaaaagttagtcatgattttttaattataaaagagatcaaattttcttccattatttggttaaaaatattgttgatcgctattttagaagagaaatgagctttctttagttaatgtctraaaaaataatttcagtgagggccaaagaatgttaattagtcttggtggtgtatgtattaagctctgtattttttaaaacagaagtctttttagacaacatgcttataagtacacatctaaatgttattacaatctttttgatacatttgggtctgacccagtgcagtcctagtggtggtggccacaggagtgcttgtgtgacccctaccttagtaccaggcagctcagcaaaaagaaggaagctccaactgttttgagggaaagtaagggaaaagaacaagagtctatgcttattaattcacagtattctcctggatattacctaagaccaccaaggcagtgcctctatgagtctgtaagactcacagcattactgggttcgaggtatcccctgatgcaagtaaagctgcagtggccaaagacttagatcacaacactaaattccctttgaatacttggaaagtcttcccaagaaggataggtactaacaagccaaggtgatgaaggctacaataaataccttactctccagtgcccatgc

SEQ ID NO: 79060 - DNA, 1178 bp, Homo sapiens
tcatggaatactatttggccataaaaaaaaagatagaaagcacgtcttttgcagcaacacagatggaactggaggccrttatcccaagtgaaataactcagaaacaaagttaaatactgcatactatcacttataagtgggagctaaacaatgggtacacataaacatacagagtggaataatagacattggggacttcaaaacgtgggaagggagtgaagattgaaaaattacctactagttacaatgttcactatttgggtagtgggtacactaaaagcccacacttccccactgtgtgatatatacatgtaagaaatctgtactgtacccactaaatgtataaaaataaaataaaacaaattaaaaaaagaataaggaacatatctaggaaatcatgtaaaatgacttacaggagatattattaaatttttaaaaagcaaagtccaaaagagcatatttaatatgctaccatttgcataacaaagaaagggatataagaagacatcaatatatctgttaatatttgcaaaaagaagtacaggaataataagctaaatgacaatgaaattggatgcacacaagtgatgagggaagtaggtatgagagaggtgggaacatcactgttctgagtatctttctatttagattttattttggaatcctaataaggttctacatgtccaaacaataaaataagattaataaagataagaaagggaaaaataaaactaaaataaaggaaggcaattatgtttcctaaggaaaaataaagaaaataaatttatgaacataattcttaactgtatactatatactgtcttggatgatgtgggggtatgaggaacagaccagcaaatctgtttttcagaggtttgtttgctgggaatgtaagtatttggagataatgtaatctaaggagaatttcagggtcccctaaattatgtcataagattaaacaaacaaaccgtgtgcatgtgtatctgtgtgtatgtgcacattcacacaggcgtggcatgtatacacatcacaaaagactttgaaatgagcaaaaatatgttcttgggtgtcttgtctaattcactcatcaaggttatctccatatttatcttgatctatttcacatatctgtaagttgtagaaaactgaatgtaatgtgaataattcttgcccatgga

SEQ ID NO: 79061 - DNA, 1178 bp, Homo sapiens
tcatggaatactatttggccataaaaaaaaagatagaaagcacgtcttttgcagcaacacagatggaactggaggccgttatcccaagtgaaataactcagaaacaaagttaaatactgcatactatcacttataagtgggagctaaacaatgggtacacataaacatacagagtggaataatagacattggggacttcaaaacgtgggaagggagtgaagattgaaaaattacctactagttacaatgttcactatttgggtagtgggtacactaaaagcccacacttccccactgtgtgatatatacatgtaagaaatctgtactgtacccactaaatgtataaaaataaaataaaacaaattaaaaaaagaataaggaacatatctaggaaatcatgtaaaatgacttacaggagatattattaaatttttaaaaagcaaagtccaaaagagcatatttaatatgctaccatttgcataacaaagaaagggatataagaagacatcaatatatctgttaatatttgcaaaaagaagtacaggaataataagctaaatgacaatgaaattggatgcacacaagtgatgagggaagtaggtatgagagaggtgggaacatcactgttctgagtatctttctatttagattttattttggaatcctaataaggttctacatgyccaaacaataaaataagattaataaagataagaaagggaaaaataaaactaaaataaaggaaggcaattatgtttcctaaggaaaaataaagaaaataaatttatgaacataattcttaactgtatactatatactgtcttggatgatgtgggggtatgaggaacagaccagcaaatctgtttttcagaggtttgtttgctgggaatgtaagtatttggagataatgtaatctaaggagaatttcagggtcccctaaattatgtcataagattaaacaaacaaaccgtgtgcatgtgtatctgtgtgtatgtgcacattcacacaggcgtggcatgtatacacatcacaaaagactttgaaatgagcaaaaatatgttcttgggtgtcttgtctaattcactcatcaaggttatctccatatttatcttgatctatttcacatatctgtaagttgtagaaaactgaatgtaatgtgaataattcttgcccatgga

SEQ ID NO: 79062 - DNA, 961 bp, Homo sapiens
aatttcaaaatcccagaaaacattgtttagtgatgacaaagtagtagacaaaactatctcttatttctccrtgactctataattagcaaaatgactacaatttaaaaaaaaattgtaagcacagctagtgcctttaatggcaggctatttatcctaaagagttgaagtgaactgtaaaaccattatggtctacagttgggacgtcagagccttaggtattgtatttaattaatgtttgattaagtataacatgagcagaatatgtttataatcttttctttggggaattatgatgaggaagaagaacacagatgatttcgctaagcttccaatagcaggctgtgacctgttttattcccccagtctttgatgaacacacgcattcagaaactagttgactggtttggtaaaaattttacaacatagtttgctactatttgatgtcaatcttgccttttaatgagaagaaaagcccaaggaggaaaaaaagcgggaaaaagctagtaaaataaatatggagtttttcctctaatttgtgattctgagggctagcactcatgtgtacatctaaacatgtactgtttgtactaaagacctgattttgaggtaagtccctcattttgctcatttcaaataggaatgggaaggcattttataacagctgcttatcagaattgcttctggatattaagccttcctcagaatcagctggatgtttaagtgttggactgtacagaaaaatgcaaagaactgaatttgctgcataccacctggggagtaggacctcattaggaaggaatgtgtttgcagagggagacatgaccaggtcggatcaagttccggtggttttgaaaataatgcagagtcaggtgagtagttacagtggaaggtcaaacttttctatgtttagccatgtgttaattaataagaaatgttctgtaaatatacattcttaattgcc

SEQ ID NO: 79063 - DNA, 961 bp, Homo sapiens
aatttcaaaatcccagaaaacattgtttagtgatgacaaagtagtagacaaaactatctcttatttctccgtgactctataattagcaaaatgactacaatttaaaaaaaaattgtaagcacwgctagtgcctttaatggcaggctatttatcctaaagagttgaagtgaactgtaaaaccattatggtctacagttgggacgtcagagccttaggtattgtatttaattaatgtttgattaagtataacatgagcagaatatgtttataatcttttctttggggaattatgatgaggaagaagaacacagatgatttcgctaagcttccaatagcaggctgtgacctgttttattcccccagtctttgatgaacacacgcattcagaaactagttgactggtttggtaaaaattttacaacatagtttgctactatttgatgtcaatcttgccttttaatgagaagaaaagcccaaggaggaaaaaaagcgggaaaaagctagtaaaataaatatggagtttttcctctaatttgtgattctgagggctagcactcatgtgtacatctaaacatgtactgtttgtactaaagacctgattttgaggtaagtccctcattttgctcatttcaaataggaatgggaaggcattttataacagctgcttatcagaattgcttctggatattaagccttcctcagaatcagctggatgtttaagtgttggactgtacagaaaaatgcaaagaactgaatttgctgcataccacctggggagtaggacctcattaggaaggaatgtgtttgcagagggagacatgaccaggtcggatcaagttccggtggttttgaaaataatgcagagtcaggtgagtagttacagtggaaggtcaaacttttctatgtttagccatgtgttaattaataagaaatgttctgtaaatatacattcttaattgcc

SEQ ID NO: 79064 - DNA, 961 bp, Homo sapiens
aatttcaaaatcccagaaaacattgtttagtgatgacaaagtagtagacaaaactatctcttatttctccgtgactctataattagcaaaatgactacaatttaaaaaaaaattgtaagcacagctagtgcctttaatggcaggctatttatcctaaagagttgaagtgaactgtaaaaccattatggtctacagttgggacgtcagagccttaggtattgtatttaattaatgtttgattaagtataacatgagcagaatatgtttataatcttttctttggggaattatgatgaggaagaagaacacagatgatttcgctaagcttccaatagcaggctgtgacctgttttattcccccagtctttgatgmacacacgcattcagaaactagttgactggtttggtaaaaattttacaacatagtttgctactatttgatgtcaatcttgccttttaatgagaagaaaagcccaaggaggaaaaaaagcgggaaaaagctagtaaaataaatatggagtttttcctctaatttgtgattctgagggctagcactcatgtgtacatctaaacatgtactgtttgtactaaagacctgattttgaggtaagtccctcattttgctcatttcaaataggaatgggaaggcattttataacagctgcttatcagaattgcttctggatattaagccttcctcagaatcagctggatgtttaagtgttggactgtacagaaaaatgcaaagaactgaatttgctgcataccacctggggagtaggacctcattaggaaggaatgtgtttgcagagggagacatgaccaggtcggatcaagttccggtggttttgaaaataatgcagagtcaggtgagtagttacagtggaaggtcaaacttttctatgtttagccatgtgttaattaataagaaatgttctgtaaatatacattcttaattgcc

SEQ ID NO: 79065 - DNA, 1323 bp, Homo sapiens
ccacctgtatgctccctatgcccctttcgtatcgtgctctctctcctcaccagagataatactggcttgaatttcatgtcgaccattttcttgatttttaaaaaaatatgtagttttggccgggcgcggtggctcacgcctgtaatcccagcactttgggaggccgagacgggcggatcacgaggtcaggagatcgagaccatcctggctaacacggtgaaaccccatctctactaaaaatacaaaaaaaattagccgggcgcggtggtgggcgcctgtagtcccagctgctcgggaggctgaggcaggagattggcgtgaacccgggaggcggagcttgcagtgagccactgcaagcsgagtttgcgccactgcactccagcctgggcgacagagcgagactctgtctcaaaaaaaaaaaaaaatgtagttttatcataggcataggtattaccaaagaagatattgtttagtttacttgagatttatagaagttagactttatgctgtttgtgtgtcgccactggtggcataatatcggcggctaaaaaagaagtatctgccgacatttgtgtcactgtcacatcaatcacatcatgtgaacaagctatttggcaccagactttctgtgagtgattttgatgactattgcattgctattttaacattgattgttactaaattttaagtattactttatatattgcaatagtgtcatcagacattattaaacagtggttctaatgctagtggtgaaaaacacagctccaaaatgttagacataaaagtgcaagttagatgtgtcaattgccatgagggactgtcctcccgctccatgttattaatttaggaatgaatgccttgggaaatattggaacattctgagaaataaaactcagcattcaaacagaaacacttctaagtttgcaaaaatagttacataaccaggcagaaagaaaggaaaaataaaaacaaaaaacccggtcacgtggctgcaagatccatgccacagtgatgtacgcctgagatgctgtggttgtgcatttaaacactctgagcacatcaagccctattttatatgtatccgcatggggaaattagaatgctgctagaaagctattaggtacatgtccatttacaccagcctttcccattcaggatttatttcactaaggtgctagcctgccatgtagtggcgaaagagggaaactacagctctcttaaaaactatagtatttgatacatcaaaagaacaaatgcaacatgaaatgaagacttagaaactcgccattcaacttaagaactagaacactgcctattcat

SEQ ID NO: 79066 - DNA, 1323 bp, Homo sapiens
ccacctgtatgctccctatgcccctttcgtatcgtgctctctctcctcaccagagataatactggcttgaatttcatgtcgaccattttcttgatttttaaaaaaatatgtagttttggccgggcgcggtggctcacgcctgtaatcccagcactttgggaggccgagacgggcggatcacgaggtcaggagatcgagaccatcctggctaacacggtgaaaccccatctctactaaaaatacaaaaaaaattagccgggcgcggtggtgggcgcctgtagtcccagctgctcgggaggctgaggcaggagattggcgtgaacccgggaggcggagcttgcagtgagccactgcaagcggagtttgcgccactgcactccagcctgggcgacagagcgagactctgtctcaaaaaaaaaaaaaaatgtagttttatcataggcataggtattaccaaagaagatattgtttagtttacttgagatttatagaagttagactttatgctgtttgtgtgtcgccactggtggcataatatcggcggctaaaaaagaagtatctgccgacatttgtgtcactgtcacatcaatcacatcatgtgaacaagctatttggcaccagactttctgtgagtgattttgatgactattgcattgctattttaacattgattgttactaaattttaagtattactttatatattgcaatagtgtcatcagacattattaaacagtggttctaatgctagtggtgaaaaacacagctccaaaatgttagacataaaagtgcaagttagatgtgtcaattgccatgagggactgtcctcccgctccatgttattaatttaggaatgaatgccttgggaaatattggaacattctgagaaataaaactcagcattcaaacagaaacacttctaagtttgcaaaaatagttacataaccaggcagaaagaaaggaaaaataaaaacaaaaaacccggtcacgtggctgcaagatccatgccacagtgatgtacgcctgagatgytgtggttgtgcatttaaacactctgagcacatcaagccctattttatatgtatccgcatggggaaattagaatgctgctagaaagctattaggtacatgtccatttacaccagcctttcccattcaggatttatttcactaaggtgctagcctgccatgtagtggcgaaagagggaaactacagctctcttaaaaactatagtatttgatacatcaaaagaacaaatgcaacatgaaatgaagacttagaaactcgccattcaacttaagaactagaacactgcctattcat

SEQ ID NO: 79067 - DNA, 1557 bp, Homo sapiens
gggtctcccatcacaccagcccacagcaccaccagcgactacctccacctggctccatcgtcttgcctcacaaaagccaaaaagagctagaaggaagaattactggcacctggtatcctaattccgtgactrctgggcaagagggaagcactgtctggcatgtgggctcagaaaaatcatttgacctgtctgagcttgtcttagtagatgtctgaagaatatttgtgaaatcgaatcaaggcttggaactggaagtgttcgttttgagacttactaataaatcaagtaagattttcttaaaagcctttcctaaccctactatgtactcaccccctcttctcagttgttcacctgctcctgggactgccaaaataaccggtccctgactccatcagagcacttctcacatgctaccgcaatgacgaacgtgactgtgacacctgattcttcgactcccgaccactggggagatgcttacagatggattcatgaacgagaagagctaccatgtaccaagtactcactggctgccaagtgccctgctaagaattaaaaatgctgattttcacaacagaactattttacagctgaggaactcaaggttcagagagagagagagagagagagagagagagagagagagagagaagaacttgcccagggtcacacagctagaagctctgagctggaagtggaactcagaagcctctgactccagaactccttcctgctctcaccaccacgccagggatcctccacctctgtcctagtgacatcttgggctggataactctgccgtaagggaccatctggtgcattgtaggatggttagcagcatctctggcctcgactcactagacaccagtagcacccccaccactacccccagctgtaacaagcaaatatcacctagggcacaaacctgccccggctgagcagcactgccctagaccatgctgccttcactgccggggctgtggtccaaccctggcttgggacatggactggccggaacacagggctttgagagatatggtcacacaccctgggagcacgcagctcagctgggaaggcaagactgcctcagaggccaggtcagagggcagctgagagctgagttggcagggtctggtggagggagctacacacactgcaggtgctagggctacaacgtcctttgggaaggcacagcgtggcctcagaccttctgacagctgccaagcctgagacctcatgtctacacagaacgccaggaaaatcagcttgtggggaaggtcccctcgtgcaaggccacccaggcacaccctggtaatatctggtgggagcccaggtggccccacataggaaaggaggctataaaacaggaagccagtgcgaggcctgcagagcgggggacacagctcttcccgggaatgcccactgtttgtttgccagctgggcccacgtgcctgacttcccctattaaggatttggtcccttctctttttttgccccacccttctagatttttctaaactcaaaatgtctgggcttccccagctgggaagagattgtgac

SEQ ID NO: 79068 - DNA, 1557 bp, Homo sapiens
gggtctcccatcacaccagcccacagcaccaccagcgactacctccacctggctccatcgtcttgcctcacaaaagccaaaaagagctagaaggaagaattactggcacctggtatcctaattccgtgactactgggcaagagggaagcactgtctggcatgtgggctcagaaaaatcatttgacctgtctgagcttgtcttagtagaygtctgaagaatatttgtgaaatcgaatcaaggcttggaactggaagtgttcgttttgagacttactaataaatcaagtaagattttcttaaaagcctttcctaaccctactatgtactcaccccctcttctcagttgttcacctgctcctgggactgccaaaataaccggtccctgactccatcagagcacttctcacatgctaccgcaatgacgaacgtgactgtgacacctgattcttcgactcccgaccactggggagatgcttacagatggattcatgaacgagaagagctaccatgtaccaagtactcactggctgccaagtgccctgctaagaattaaaaatgctgattttcacaacagaactattttacagctgaggaactcaaggttcagagagagagagagagagagagagagagagagagagagagagaagaacttgcccagggtcacacagctagaagctctgagctggaagtggaactcagaagcctctgactccagaactccttcctgctctcaccaccacgccagggatcctccacctctgtcctagtgacatcttgggctggataactctgccgtaagggaccatctggtgcattgtaggatggttagcagcatctctggcctcgactcactagacaccagtagcacccccaccactacccccagctgtaacaagcaaatatcacctagggcacaaacctgccccggctgagcagcactgccctagaccatgctgccttcactgccggggctgtggtccaaccctggcttgggacatggactggccggaacacagggctttgagagatatggtcacacaccctgggagcacgcagctcagctgggaaggcaagactgcctcagaggccaggtcagagggcagctgagagctgagttggcagggtctggtggagggagctacacacactgcaggtgctagggctacaacgtcctttgggaaggcacagcgtggcctcagaccttctgacagctgccaagcctgagacctcatgtctacacagaacgccaggaaaatcagcttgtggggaaggtcccctcgtgcaaggccacccaggcacaccctggtaatatctggtgggagcccaggtggccccacataggaaaggaggctataaaacaggaagccagtgcgaggcctgcagagcgggggacacagctcttcccgggaatgcccactgtttgtttgccagctgggcccacgtgcctgacttcccctattaaggatttggtcccttctctttttttgccccacccttctagatttttctaaactcaaaatgtctgggcttccccagctgggaagagattgtgac

SEQ ID NO: 79069 - DNA, 1557 bp, Homo sapiens
gggtctcccatcacaccagcccacagcaccaccagcgactacctccacctggctccatcgtcttgcctcacaaaagccaaaaagagctagaaggaagaattactggcacctggtatcctaattccgtgactactgggcaagagggaagcactgtctggcatgtgggctcagaaaaatcatttgacctgtctgagcttgtcttagtagatgtctgaagaatatttgtgaaatcgaatcaaggcttggaactggaagtgttcgttttgagacttactaataaatcaagtaagattttcttaaaagcctttcctaaccctactatgtactcaccccctcttctcagttgttcacctgctcctgggactgccaaaataaccggtccctgactccatcagagcacttctcacaygctaccgcaatgacgaacgtgactgtgacacctgattcttcgactcccgaccactggggagatgcttacagatggattcatgaacgagaagagctaccatgtaccaagtactcactggctgccaagtgccctgctaagaattaaaaatgctgattttcacaacagaactattttacagctgaggaactcaaggttcagagagagagagagagagagagagagagagagagagagagagaagaacttgcccagggtcacacagctagaagctctgagctggaagtggaactcagaagcctctgactccagaactccttcctgctctcaccaccacgccagggatcctccacctctgtcctagtgacatcttgggctggataactctgccgtaagggaccatctggtgcattgtaggatggttagcagcatctctggcctcgactcactagacaccagtagcacccccaccactacccccagctgtaacaagcaaatatcacctagggcacaaacctgccccggctgagcagcactgccctagaccatgctgccttcactgccggggctgtggtccaaccctggcttgggacatggactggccggaacacagggctttgagagatatggtcacacaccctgggagcacgcagctcagctgggaaggcaagactgcctcagaggccaggtcagagggcagctgagagctgagttggcagggtctggtggagggagctacacacactgcaggtgctagggctacaacgtcctttgggaaggcacagcgtggcctcagaccttctgacagctgccaagcctgagacctcatgtctacacagaacgccaggaaaatcagcttgtggggaaggtcccctcgtgcaaggccacccaggcacaccctggtaatatctggtgggagcccaggtggccccacataggaaaggaggctataaaacaggaagccagtgcgaggcctgcagagcgggggacacagctcttcccgggaatgcccactgtttgtttgccagctgggcccacgtgcctgacttcccctattaaggatttggtcccttctctttttttgccccacccttctagatttttctaaactcaaaatgtctgggcttccccagctgggaagagattgtgac

SEQ ID NO: 79070 - DNA, 1557 bp, Homo sapiens
gggtctcccatcacaccagcccacagcaccaccagcgactacctccacctggctccatcgtcttgcctcacaaaagccaaaaagagctagaaggaagaattactggcacctggtatcctaattccgtgactactgggcaagagggaagcactgtctggcatgtgggctcagaaaaatcatttgacctgtctgagcttgtcttagtagatgtctgaagaatatttgtgaaatcgaatcaaggcttggaactggaagtgttcgttttgagacttactaataaatcaagtaagattttcttaaaagcctttcctaaccctactatgtactcaccccctcttctcagttgttcacctgctcctgggactgccaaaataaccggtccctgactccatcagagcacttctcacatgctaccgcaatgacgaacgtgactgtgacacctgattcttcgactcccgaccactggggagatgcttacagatggattcatgaacgagaagagctaccatgtaccaagtactcactggctgccaagygccctgctaagaattaaaaatgctgattttcacaacagaactattttacagctgaggaactcaaggttcagagagagagagagagagagagagagagagagagagagagagaagaacttgcccagggtcacacagctagaagctctgagctggaagtggaactcagaagcctctgactccagaactccttcctgctctcaccaccacgccagggatcctccacctctgtcctagtgacatcttgggctggataactctgccgtaagggaccatctggtgcattgtaggatggttagcagcatctctggcctcgactcactagacaccagtagcacccccaccactacccccagctgtaacaagcaaatatcacctagggcacaaacctgccccggctgagcagcactgccctagaccatgctgccttcactgccggggctgtggtccaaccctggcttgggacatggactggccggaacacagggctttgagagatatggtcacacaccctgggagcacgcagctcagctgggaaggcaagactgcctcagaggccaggtcagagggcagctgagagctgagttggcagggtctggtggagggagctacacacactgcaggtgctagggctacaacgtcctttgggaaggcacagcgtggcctcagaccttctgacagctgccaagcctgagacctcatgtctacacagaacgccaggaaaatcagcttgtggggaaggtcccctcgtgcaaggccacccaggcacaccctggtaatatctggtgggagcccaggtggccccacataggaaaggaggctataaaacaggaagccagtgcgaggcctgcagagcgggggacacagctcttcccgggaatgcccactgtttgtttgccagctgggcccacgtgcctgacttcccctattaaggatttggtcccttctctttttttgccccacccttctagatttttctaaactcaaaatgtctgggcttccccagctgggaagagattgtgac

SEQ ID NO: 79071 - DNA, 1557 bp, Homo sapiens
gggtctcccatcacaccagcccacagcaccaccagcgactacctccacctggctccatcgtcttgcctcacaaaagccaaaaagagctagaaggaagaattactggcacctggtatcctaattccgtgactactgggcaagagggaagcactgtctggcatgtgggctcagaaaaatcatttgacctgtctgagcttgtcttagtagatgtctgaagaatatttgtgaaatcgaatcaaggcttggaactggaagtgttcgttttgagacttactaataaatcaagtaagattttcttaaaagcctttcctaaccctactatgtactcaccccctcttctcagttgttcacctgctcctgggactgccaaaataaccggtccctgactccatcagagcacttctcacatgctaccgcaatgacgaacgtgactgtgacacctgattcttcgactcccgaccactggggagatgcttacagatggattcatgaacgagaagagctaccatgtaccaagtactcactggctgccaagtgccctgctaagaattaaaaatgctgattttcacaacagaactattttacagctgaggaactcaaggttcagagagagagagagagagagagagagagagagagagagagagaagaacttgcccagggtcacacagctagaagctctgagctggaagtggaactcagaagcctctgactccagaactccttcctgctctcaccaccacrccagggatcctccacctctgtcctagtgacatcttgggctggataactctgccgtaagggaccatctggtgcattgtaggatggttagcagcatctctggcctcgactcactagacaccagtagcacccccaccactacccccagctgtaacaagcaaatatcacctagggcacaaacctgccccggctgagcagcactgccctagaccatgctgccttcactgccggggctgtggtccaaccctggcttgggacatggactggccggaacacagggctttgagagatatggtcacacaccctgggagcacgcagctcagctgggaaggcaagactgcctcagaggccaggtcagagggcagctgagagctgagttggcagggtctggtggagggagctacacacactgcaggtgctagggctacaacgtcctttgggaaggcacagcgtggcctcagaccttctgacagctgccaagcctgagacctcatgtctacacagaacgccaggaaaatcagcttgtggggaaggtcccctcgtgcaaggccacccaggcacaccctggtaatatctggtgggagcccaggtggccccacataggaaaggaggctataaaacaggaagccagtgcgaggcctgcagagcgggggacacagctcttcccgggaatgcccactgtttgtttgccagctgggcccacgtgcctgacttcccctattaaggatttggtcccttctctttttttgccccacccttctagatttttctaaactcaaaatgtctgggcttccccagctgggaagagattgtgac

SEQ ID NO: 79072 - DNA, 658 bp, Homo sapiens
tgtcactactccaagacagatgatatagaagtttgtcccttgagcagtcccctgataatgtatcacattggacagccacttcaaatcttcccctgtccaggtagaagctgagatttgggaattcttgcttgcttactctgcactgagtcaggggtttggggaggggtgttaatggctagtgagtgcaaactggtcgaaactgttgcttttgttctcagcggttccaacctggggacctttcctgtccataatcaaattcaggcaagagagaaaccaatctctcagccagacccctaaagtgtcagaatgccatgtattccatccagtctgtctttccctccttcgccagggagaagctgagaacttcctcctaattgtgtaacactgtgctgggggcaggaattatagtgaaagggtgttaggaattattctactggcttccatcagctgattttatacttgcccagggtgcaagagactgtcaacttgcctttgtatttctgacaaaataaattggttcaggggttgttgagtcagtgtgtccaagggaaaaaggaggggctggggcttcatrctctgccgtcttgctgacaggcaccaaagatattctttcttgctcaaggagtgctcacatgtgagttgtagctttttttttttt

SEQ ID NO: 79073 - DNA, 826 bp, Homo sapiens
ctattcagaccccaggagagggttcttgagcctcaagcaagaaagaatttggacacatccatatggtaaagtgaaagcaagtttattaggaaataaagaaataaaagaatggctacttcatagccagagcagccccgagggctactggttgactacttttatgattatttattgattatatgctaaataaggggtggattatttatgagctttctgggaaaggcatggcaattccctgaactgaaggctcctcccctttttagacttattgggtaacttcctgactttgccatgacatctgtaaaccttcatggtgctggtgggtgtgtcttttggcatgctaatgaattataagcatatataatgarcagtgaggatgacgagggggtcatttttcatcaccatcttcgttttggtggtttttggccagcttctttaccacatgctggttttatcagcaaagtctttgtgacctgtaccttgggccaacctcctatttcatcctgtgacatagaatgcctgacatcctggcaatgcagcccaggaggtctaagcctcattttaccctgctcctattcaagatggagttgctctgtttcaaaggcctctgacagaagtttttgacatagttgaccagccattcctttttcttaaaaaggctgtcttctgtttctttgttatttattttttgagacagggtctcactctgtcacccaggatggagtgcagtggtgccatcttggctcactgcaacctccacctcatgggttcaagcgattctcctgcctgaacctcccaagtagctgtgagtacaggtgcgcaccgc

SEQ ID NO: 79074 - DNA, 826 bp, Homo sapiens
ctattcagaccccaggagagggttcttgagcctcaagcaagaaagaatttggacacatccatatggtaaagtgaaagcaagtttattaggaaataaagaaataaaagaatggctacttcatagccagagcagccccgagggctactggttgactacttttatgattatttattgattatatgctaaataaggggtggattatttatgagctttctgggaaaggcatggcaattccctgaactgaaggctcctcccctttttagacttattgggtaacttcctgactttgccatgacatctgtaaaccttcatggtgctggtgggtgtgtcttttggcatgctaatgaattataagcatatataatgaacagygaggatgacgagggggtcatttttcatcaccatcttcgttttggtggtttttggccagcttctttaccacatgctggttttatcagcaaagtctttgtgacctgtaccttgggccaacctcctatttcatcctgtgacatagaatgcctgacatcctggcaatgcagcccaggaggtctaagcctcattttaccctgctcctattcaagatggagttgctctgtttcaaaggcctctgacagaagtttttgacatagttgaccagccattcctttttcttaaaaaggctgtcttctgtttctttgttatttattttttgagacagggtctcactctgtcacccaggatggagtgcagtggtgccatcttggctcactgcaacctccacctcatgggttcaagcgattctcctgcctgaacctcccaagtagctgtgagtacaggtgcgcaccgc

SEQ ID NO: 79075 - DNA, 614 bp, Homo sapiens
aaaaaagtactgcatatataatagttgttaaataaataggtggtgaatctcagagactgattattcatacttattgatagtttaatcttacagtatagatcctagcattaaaagttacttaggaaatatgtgttgaatcagactggattcaataacaccacttgggctgctgttgaagaaaggacacaaacattgtatgcagttccaggacaaatgctgatccattctagttgaatcagagaattaattactggagtgacagatggatatctatataaaaaccctgtatttaaagtgaagcttcaaaatattaccttacctctggttctatgtttgacatcagattcagcttcattctcctctttttcctcttcattagtggaaatggcatccaattcacggcagatgaagctgcaagtaacagaacaagagaattttgtttttgtttttgtttttgagacggagtcttgctctgttgccaggccggagtgtggtggtgcgatcttggctcactgcaacctccgcctcccaggttcaagtgattcttctgcctcagcctcccaagtagctgggactacaggcatrtgccaccaagcgcagctaatttttgtatt

SEQ ID NO: 79076 - DNA, 612 bp, Homo sapiens
cagttaggaggcagggctttgcttcagggaggttcctatactttgtcacaggacctcctgcagtgactcagctacagagatggctacagtccttgagggagaggcagagaaagctggcaagagttatgtaagatggtggaaccctggccatgtggatgaagattcagggccattctctagccccagactctaccagggaaccaaagcaggagcccactatgctgtctgggccatcatgagtggggccatctgaaccttggtgagtacctaggtcacccaagcccactagatgctgaactgaagatagcaaaattcagaccgtgcctccttgtayagatggagctgtcacacgccctatgctggggtcagcttctactcagagtctaggagagtgtgagcctgcagacgaaaggtccttgaggcctacaaccgaatgggactgaaagctagcaggggctgaatagacccagggagagagaaggatggggaaaccagcacacagtggctcttgccatgaggaaacagcaggagaccaagctgcctctgcaagtggaggagaagagtatggagcagagccacagccatgcagagctctgctgccagctgaccttg

SEQ ID NO: 79077 - DNA, 612 bp, Homo sapiens
cagttaggaggcagggctttgcttcagggaggttcctatactttgtcacaggacctcctgcagtgactcagctacagagatggctacagtccttgagggagaggcagagaaagctggcaagagttatgtaagatggtggaaccctggccatgtggatgaagattcagggccattctctagccccagactctaccagggaaccaaagcaggagcccactatgctgtctgggccatcatgagtggggccatctgaaccttggtgagtacctaggtcacccaagcccactagatgctgaactgaagatagcaaaattcagaccgtgcctccttgtatagatggagctgtcacacgccctatgctggggtcagcttctactcagagtctaggagagtgtgagcctgcagacgaaaggtccttgaggcctacaaccgaatgggactgaaagctagcaggggctgaatagacccagggagagagaaggatggggaaaccagcacrcagtggctcttgccatgaggaaacagcaggagaccaagctgcctctgcaagtggaggagaagagtatggagcagagccacagccatgcagagctctgctgccagctgaccttg

SEQ ID NO: 79078 - DNA, 790 bp, Homo sapiens
aggcccaaagatatttgtgaatcactgggcattcagaaattgatcattattgttatttggttgaaagaagtctacatcaaggcattcttcgcaggaggaatagggcagacattcagaggaagaaataaaaggttgacttatattgagttagttcagaagaggtagaggacaatagacatacttctcaggtagccaggggctcagcctagactcagacagcagcagattgaatctcaaggcagaagtcatttcaaatgctgctatttagcccttattccattcagctttctatcatagttaattatttctatgtctgtctcctgcattaaattgtatcttccttgaagtcagtgacctcgtctttgtaaacccaatgcttgcaccgtgcttggcattcagaatcaggcacgaatgcttgtgagtgaatgcaacagcaaatgccatctgcytggtgaactcttagacacatgttaaggcccagtttaaatatcatctgctctctgaaatggactgaattgagaaaagaagaatatagatttcaagacagaagtaatgagagacctggatggagaatcccaatcctggagaaaatgtatccagaattatggagattcagaaaaactctgccgaagtagatgctgcatttatacctatattacagactgtgtgccctttaacacacacaagtcctcatagagactgagaagtcatctctgaagggggctgatcctgtgggaaaagctattgtcagagctgcctatgagttgagtgtggctggaacaggcagctg

SEQ ID NO: 79079 - DNA, 790 bp, Homo sapiens
aggcccaaagatatttgtgaatcactgggcattcagaaattgatcattattgttatttggttgaaagaagtctacatcaaggcattcttcgcaggaggaatagggcagacattcagaggaagaaataaaaggttgacttatattgagttagttcagaagaggtagaggacaatagacatacttctcaggtagccaggggctcagcctagactcagacagcagcagattgaatctcaaggcagaagtcatttcaaatgctgctatttagcccttattccattcagctttctatcatagttaattatttctatgtctgtctcctgcattaaattgtatcttccttgaagtcagtgacctcgtctttgtaaacccaatgcttgcaccgtgcttggcattcagaatcaggcacgaatgcttgtgagtgaatgcaacagcaaatgccatctgcctggtgaactcttagacacatgttaaggcccagtttaaatatcatctgctctctgaaatggactgaattgagaaaagaagaatatagatttcaagacagaagtaatgagagacctggatggagaatcccaatcctggagaaaatgtatccagaattatggagattcagaaaaactctgcygaagtagatgctgcatttatacctatattacagactgtgtgccctttaacacacacaagtcctcatagagactgagaagtcatctctgaagggggctgatcctgtgggaaaagctattgtcagagctgcctatgagttgagtgtggctggaacaggcagctg

SEQ ID NO: 79080 - DNA, 790 bp, Homo sapiens
aggcccaaagatatttgtgaatcactgggcattcagaaattgatcattattgttatttggttgaaagaagtctacatcaaggcattcttcgcaggaggaatagggcagacattcagaggaagaaataaaaggttgacttatattgagttagttcagaagaggtagaggacaatagacatacttctcaggtagccaggggctcagcctagactcagacagcagcagattgaatctcaaggcagaagtcatttcaaatgctgctatttagcccttattccattcagctttctatcatagttaattatttctatgtctgtctcctgcattaaattgtatcttccttgaagtcagtgacctcgtctttgtaaacccaatgcttgcaccgtgcttggcattcagaatcaggcacgaatgcttgtgagtgaatgcaacagcaaatgccatctgcctggtgaactcttagacacatgttaaggcccagtttaaatatcatctgctctctgaaatggactgaattgagaaaagaagaatatagatttcaagacagaagtaatgagagacctggatggagaatcccaatcctggagaaaatgtatccagaattatggagattcagaaaaactctgccgaagtagatgctgcatttatacctrtattacagactgtgtgccctttaacacacacaagtcctcatagagactgagaagtcatctctgaagggggctgatcctgtgggaaaagctattgtcagagctgcctatgagttgagtgtggctggaacaggcagctg

SEQ ID NO: 79081 - DNA, 790 bp, Homo sapiens
aggcccaaagatatttgtgaatcactgggcattcagaaattgatcattattgttatttggttgaaagaagtctacatcaaggcattcttcgcaggaggaatagggcagacattcagaggaagaaataaaaggttgacttatattgagttagttcagaagaggtagaggacaatagacatacttctcaggtagccaggggctcagcctagactcagacagcagcagattgaatctcaaggcagaagtcatttcaaatgctgctatttagcccttattccattcagctttctatcatagttaattatttctatgtctgtctcctgcattaaattgtatcttccttgaagtcagtgacctcgtctttgtaaacccaatgcttgcaccgtgcttggcattcagaatcaggcacgaatgcttgtgagtgaatgcaacagcaaatgccatctgcctggtgaactcttagacacatgttaaggcccagtttaaatatcatctgctctctgaaatggactgaattgagaaaagaagaatatagatttcaagacagaagtaatgagagacctggatggagaatcccaatcctggagaaaatgtatccagaattatggagattcagaaaaactctgccgaagtagatgctgcatttatacctatattacagactgtgtgccctttaacacacacaagtsctcatagagactgagaagtcatctctgaagggggctgatcctgtgggaaaagctattgtcagagctgcctatgagttgagtgtggctggaacaggcagctg

SEQ ID NO: 79082 - DNA, 1229 bp, Homo sapiens
gtttaagtcagcctggttctcctgggattcttaatcaaagttttgctgagcccagggtagggaggatgagttgggaaaacctaccccttccatattgtttcctttttaacagcttgaagtgagagaaaaatagtcaattgtagaaagaaggaagtggaaggctcaatgccccctctgcctcccacaggctgccatcaaacctgtttatcctgtttcacttttaaagccctgttccaaagagagctctgtcattggctctttcccctgtggaatcacagctgctatgttttcaaataccaccctggttttctgaatggcttaaagctcattaagagatagagaaagagtttctgattctctctaaaggagtacttccctactccatgcctagctctgaaggctagtgggctccccgctgtcactccactaatgccagtaatctgctcgtaaattccaaaaacctagatccaggaaccctgaaacttgtgttcatattataaaaatacactttatatattttagagttgctttatctctagctatacaattatacttttttgttttctttttcattttccaccaatggtaggacagttctccaggtggcctcagactgacccagttcttctcctttcttccttgcagttctcaagactaactgtaggatgttctgggactgcaacatcctgagataaggaaggaatgacaagagcagcctgggccctgttccagttcccccttagaaacaggacgtccttcagtgctttagcccagcatgtcatgcggcctctgggaataaaacccagggtaggctgctttctggaatctcttagctgccgtgcaagtggggcacgtgctgatgagactccatccatccacggcagctttcctgagcctggagggaccagctggcaatgaatcgtaggcttttgttgttccttgctgyctgtctggaagtcataaatccacttcatataactcgctgcatatgagcgttttctgtctcactggactcagaaaagttggtaaccagtgcacagtgagcctgctttacatcaaccactggacactccatgagaacctgaaactttactgactagcccactgcatcttagacttaatggctggtgcatagtaggtggtcaataaatacttgttgaatgaatgaacaaatacatttctatatcatctggtccccttctcttagatcagctactcctaaccctgga

SEQ ID NO: 79083 - DNA, 630 bp, Homo sapiens
agttaaatgtctggtcatcctgctggctacagacattgtacacagcgtctgggagcctggaggagctgtggaaagtccattttacctctgccccgcagcgggcatcccttgccgccaagttctctgaaggcaagcagcccacctcccatcaatgaaatggtgagcaagtgataaaaacatgtccagaacatttctctgtctaaatcaaattgtagctggtctgagtgctcgcttcagcagcatatccactaaaactggaataatacagaaaagattagccaaaaaaagaattataactggtctgacacccccgaggttgccaatgtctgcatgttttcagaatattctcacataaaaaacaaacaaacaaaaaacagcaacaacaaaacttgggyttctcaggtctcagaaggtggaagtgaggtgtcctctgtttggtcctgtctatgatgctcttggctgtgctcctcatccaggtccacacaggtgaactgataccatggagactcccaagaccatggcctgggtgctcaatcctcacggacacccatggagccctccagagccacctgatcctccctcctcagaagatctgcattccctggggttcaggtatctgcctcgatggaa

SEQ ID NO: 79084 - DNA, 677 bp, Homo sapiens
ctcactaggatctgaagtaggaagagatagggcccagtaagcacagacttcagaaaagcagctgaattactgacagcccaggggtaatgcaacattctcgtgaaagtttattcatcctcctaaaggaatatggatgactgtgctttgggataaaaaaacaaacaaacaaaggtaagatgttttctgctttttacttcctgaacttgattcataaaacaactgtcatccatctatataaagatgcagttttggagtatatgacacagtcaccatgcttatcataatcaactgatagctatrtaacagaaactttatagagtttgcaaaatactgaaaaaataaggttatcctatctattctctaaagttactgataataaaaggtaaaaaagataacagtaggtctgcctgaataggagaaataaccaaagttatcagacaactgaaactacagcagtttattggtttcactgaaagatcaaacatttaagatcaaacatttaagatcaaacatttaccaaatgtggtggccatatactcaccgtatctaatagctcaataaatttggagaagtaataaagccagcaggtacgtgccatctgcagaagcacaaataaatctaaatttattttgtatatggaagaaaagcttatatttttaaattttggtaaaatatgc

SEQ ID NO: 79085 - DNA, 989 bp, Homo sapiens
tattataataaatgatttgtaataattctaagcacccaggaggtttacaacagtgattctaggtagcacattaagaactacacacatattctttgcaaagaagaaaaaatgtttatgattaaacttcgttagttttcttccctgaatttaatacttttccagaattaaaacagaagaactagcactatcctgagccctagatttaaccttccgatgtccagaaattcattacaatagaaagcaaagtgattgttttcctttctgtaattagctttccctgctatatttttcgacaggcaatattctaattgtgctaggcttgccattccatttctggcatagttagagtgattttaagtttactgctttagtgataagttttttagttcgggctcaataattagcacctgaacatggaaaacattaaattaaaaaaatggaaatttaccaaagtatttgtttataaaaattatagaattcacagaaacrtctttagcttctctagtcttcagtagttatatcatttttatagaaataacaaagtattagtatattactcaacagtaatgaaatatttctgaatgaaaactgtgtagcccttatttaagtacctaatttgaggttttcctttccattgtgaaatagtgattttgctttgaaaaataattgagattagtttgctgatgcaatatttttctaccactgtctcatttcgattttaaataataaagctaatggtgtgtctctcaccaaaactgagctctacaaacctatgtgtctcttactgaagagcttcgttttgaaattactttatctattattataattggtacagtttaaggttttgtctttagagaattttttaaaggttttaaaatctattttaaatggggctttttagtataaactggacacaaggaacacttcagttcatgggataactttttttctctattaaggtgttcccttaattctaaagtaaaggcatg

SEQ ID NO: 79086 - DNA, 989 bp, Homo sapiens
tattataataaatgatttgtaataattctaagcacccaggaggtttacaacagtgattctaggtagcacattaagaactacacacatattctttgcaaagaagaaaaaatgtttatgattaaacttcgttagttttcttccctgaatttaatacttttccagaattaaaacagaagaactagcactatcctgagccctagatttaaccttccgatgtccagaaattcattacaatagaaagcaaagtgattgttttcctttctgtaattagctttccctgctatatttttcgacaggcaatattctaattgtgctaggcttgccattccatttctggcatagttagagtgattttaagtttactgctttagtgataagttttttagttcgggctcaataattagcacctgaacatggaaaacattaaattaaaaaaatggaaatttaccaaagtatttgtttataaaaattatagaattcacagaaacgtctttagcttctctagtcttcagtagttatatcatttttatagaaataacaaagtattagtatattactcaacagtaatgaaatatttctgaatgaaaactgtgtagcccttatttaagtacctaatttgaggttttcctttccattgtgaaatagtgattttgctttgaaaaataattgagattagtttgctgatgcaatatttttctaccactgtctcatttcgattttaaataataaagctaatggtgtgtctctcaccaawactgagctctacaaacctatgtgtctcttactgaagagcttcgttttgaaattactttatctattattataattggtacagtttaaggttttgtctttagagaattttttaaaggttttaaaatctattttaaatggggctttttagtataaactggacacaaggaacacttcagttcatgggataactttttttctctattaaggtgttcccttaattctaaagtaaaggcatg

SEQ ID NO: 79087 - DNA, 842 bp, Homo sapiens
tttattgactgtcttcctcatgagaaagtaatctcttcaagggtagatgattttgtctattttgttcactgcaagtgcctagaacaatggctggcatattacgggagttcaataactgttgttgaatgaatgaatgaatgaacgaagcactgaataagtatgtgctattgttataaattctcttcctctgctcactctttagtggtttagtcaatcattcaacaatttgttaaactcctactatatgccaactgctgtgctagaatataaaaatraagtcaaataataccaatccccacagagattttcgcttggatagagggcaacaaacatgcaaacaagtcaagtcagatattctgctgttaaacaaatagtttttgtttgtttgcttgtttgtttgttttgagacggagtatcgctctgtcatccaggctggagtacagaggcgcaatctcagctcacagcaacctctgccttccgggtacaagcaattctcctgccttagcctcctgagtagctgggattatagacacctgccatcatacctggctaatttttgtatttttagtagagacagtagaaactggaccttttccttataccacatacgatggactaaagactaaaatgtatacccccaaactataaaaaccctgaaggacaacctacgtaataccattctggacatgggaacaggcaaagatttcgtgacaaagatgccaaacgcaattgcaacaaaagcaaaaattgacaaatgggatataattaaagagcttctgtacagcaaaagaaactatcaagaacataaatagacagtttatagaatgagagaaaatttttag

SEQ ID NO: 79088 - DNA, 771 bp, Homo sapiens
agtttcaggagtgcctattttctatttggatattttcaccattaaatatcctaaaatgaggatcttagacacagggatttaacaaagcactagtgtagccaagagtgtttagtaaggtttactgatcaaaataagctatcaaataaaagtaacatgtttactttctctagttatgattattttctgacaagctattttaatgtttatttacaaaacaaccatattttaattaataatgttttttgtatcttctttggaaggctttcctaacaaaatattttctaagcctgttttcttctttatgataatgggtctgtaaacaracatctcagaatgaataacgattagtaccatcacattttactcctttggaaaaaacaaaggaatcacctgggtaattatcacaattctccatatctctggaaggggatatatgcacaattaatgtaaaaacctaccacagaaatatcttcatcctattcaaaagaatagctggattgctattaccccattgaggagtacaacagaaaaataggaaattaaatactagatagagatcagctgtgctcaagtttttgcaaaaatcagtttggaatggacagtttcattctaggaatggacctcagtgccaaacaacatttctgggaacagcttttgttgctgtgcttgtcactgaaataggtatcaggtctgctgaataaacctctattatttactctatcaaagtaactcttttatcagacatatttcttaggtttggggggaatattg

SEQ ID NO: 79089 - DNA, 771 bp, Homo sapiens
agtttcaggagtgcctattttctatttggatattttcaccattaaatatcctaaaatgaggatcttagacacagggatttaacaaagcactagtgtagccaagagtgtttagtaaggtttactgatcaaaataagctatcaaataaaagtaacatgtttactttctctagttatgattattttctgacaagctattttaatgtttatttacaaaacaaccatattttaattaataatgttttttgtatcttctttggaaggctttcctaacaaaatattttctaagcctgttttcttctttatgataatgggtctgtaaacaaacatctcagaatgaatwacgattagtaccatcacattttactcctttggaaaaaacaaaggaatcacctgggtaattatcacaattctccatatctctggaaggggatatatgcacaattaatgtaaaaacctaccacagaaatatcttcatcctattcaaaagaatagctggattgctattaccccattgaggagtacaacagaaaaataggaaattaaatactagatagagatcagctgtgctcaagtttttgcaaaaatcagtttggaatggacagtttcattctaggaatggacctcagtgccaaacaacatttctgggaacagcttttgttgctgtgcttgtcactgaaataggtatcaggtctgctgaataaacctctattatttactctatcaaagtaactcttttatcagacatatttcttaggtttggggggaatattg

SEQ ID NO: 79090 - DNA, 948 bp, Homo sapiens
tggtttgtttatattctttgctggctaggaatttctggcattaagttttctttctttgaacctgagccagattaattattaaatctcaaaatgtcactaaaatgaactaatcacagagctcaagtcattaacagtttttcaggtggtatttcctttactaaaataaatgaactcccatatatatgcaaaaagggcctctaagcataaagacacaattatttaattgaaaaagaaatttagcagttaaacattaataaaaaataattagagtcacttaatgctagtcctatttaattgaactaccctggtgggagacaaagaaaaccttgctcccttgtgtgggaagaggaaagaccataatccctgggagaaaaagcaatgtcagatccccatggctttccaggcttggcctcagagagagagaaagaaatggcagaaaggcaagagccctggaggaaagaaaaggctccatctgtgaatgattgctaacattcattgagctgttatgtgccagctgctgtcgggggaaaagaattcttctggcctaggatgagagagggaagaagagttggatgagaagaagtaagacataaagaagctacaacttaggctatatagagcctgccctagagaataaaaaatatggtcagaggcagcaccctctaggacttgttgcaggggacaacaggagctgtggccctgaaagatatacttattcattcatgtgtttttcattcattcattcattcattcattcatttaatatatactgagcacctacaatttaagggcctagggatacagagattaaaacctagttcctattcttatgaagcatctttgaggaacaaagaggatggtcaaaggaggyaccatagggaagagctgggtaagctccaatggccaattatgtggctaatgcttatgggtcctttcctactttcccat

SEQ ID NO: 79091 - DNA, 499 bp, Homo sapiens
tgcaaatcttgcactcatttctatgtaggtttcatttaatctttgaaattaaaatgaaattaaaagattgtgatcttttgatgaaattgggctaaaatgaacaataacaaaataagaacttacttatattctttatatggtcaataaagaagtgatagtggaaaaaaacaggatcaaatgaaggtgaggattyaggaagttggaaagatagctgaaactacaaaatggtatataaccagtgaacacttagacacactgattgatgaacttcagcttttggcttggtgagagcataaaatgagagcagctgaggtttacaaatttgtaatctccttgtggaaaaacgggaaaacacatctcagcctaataagatttatctactaaagagtctagacttgatccatttgtccttgtaattcaaaagctaattcaaatactgatttgatgtattgtgtgaacaaccattgctgattatcatcgcatacctggcattctcttg

SEQ ID NO: 79092 - DNA, 1395 bp, Homo sapiens
ccccagggcatccaaaagctgcagccctccggctctctcctggcccctgctagggtgatgagtgaggctgggcatctccagcccagacagggccacaggttggctacagagtagagatgcccacgaggggctgatccgaggctgggagggtagcagcgatgccatggccccaggcagcacttgaaggtggccagatgcccgtggagcctggggcagcaccaaggcggatgtgggaccctcagggtgagccacagctctcgtagccaggccagcgctgagcaagtgcaggctggagggctccagctggggacagcagggatggggcattggggatggcacccagcagttctcacaggcctccccagtctctccttgctgccctccagcagggtgagccccccagatgtggctcacagtgccactccctgctcagccttccacgacacctccacaccagtgggacgcctaccctgtgacagtggagcccacctctcttcctgctgggctgaggggccacccaccgggaaggctaaagtccttacccagaartacaaatcactcagagccctgagttacctttccactgatgccatttgctctgtttttaataagatgtcaggcctcccactgccaggagaaaatctcatgttctgagcagcggggatccggcagccctgatctgttttacggctgagttgaatgcaacctgaaaaggaagtagagacgatgggggctgaggagtgggcttggaggtcaggaggcatccctggaatttaggaagcaggccaggcacaggcaagacacagctcctgggctcaaagcaaccgattcacaaactttgctcttgaagtttgtgttaaaatggcatcacttgctggggcccctggatgaagaggacgggctctcggaaggcggcaagcagtcagcatgtgacatcagcagtacgaggggccctagtgtgcgccagcgtgatagggatgcaggatgagagacaggcaccactgggacccctgcatgccccagagccaacggcccctggagcataaggagacagggaagcgcctggcggacgcagccccaggccccagcccgggaccctctgcagagctcggctatcctgccacaggagctggactcggagtgaggccggtgatggcaaccactggttggtgctcactgcggtgctttaggctaggaaaagactgccaattttctggtgccacgtcctcgtgcagagagggagggtgggtgtagacggcaagcgatttttctgctgtcacacgctcggcctctctgagaccaccctctgatgtgagcctcttggtctcttcagggcaccatggatgggcaaacaatgccttctggactcctccacctggaagtcctaaagcgtcc

SEQ ID NO: 79093 - DNA, 1012 bp, Homo sapiens
tgctcctgccttagtaccgatcatccaccaagcgctccccagggcagagggccaatcctctgaaaacgcagataacctggagcccagctcttggcatgtggacaagtaatcctaatataggtggagcatcccaaatccaaaaatcccaaattcaaaatgttcctaagtccaaaactttttgaacaccaacgtgacattcaaaggaatgctcagtggagcattttgkacttcagatttccagatttgggatgttcagccagtaagtataatacaaatatttcaaaatccaaagaaatacaagacacttctggtcccaagaatttcagatcagagatgctcaaccatgatacgaacggcagatgacaaagtcgcattggcatagcttgtacgtccaggcagtgtggcagggatttgttgcattttgacccattcaattctggtgacaatgctggcagtgaccttctgcaaggacccaagaccctcagccttaggaacaggccacgagtgtggcctaggcagtggccctcagccagggacggtcaggaagtggtgactgaaacatccacgtccccacccttggggtagcgcatatctgagctgtgggacccacatcccagatcccagcccagctgagcttcaggtgccaccatggtaactgccttgataacagacccctcctcccgaacagctgcttcctgagacatctcacacaccccaaaataagccacgcacactagattcctggcttcagaatctgcttctaagggaatccaaccaaacagaacaaccctctgaagcctccattttacagaagggggaaacaagtcatggagtgcagagtgactagggccccacagccaggggatggggatgccaggtccgagccaccaccgtttgaccctggcttcaggctctgcacctccacaaggcgcaaggcccagccaatggtcagtatgcttacccatcctctttccaacctcatgaggccccacgtcctctctttccaagccat

SEQ ID NO: 79094 - DNA, 1012 bp, Homo sapiens
tgctcctgccttagtaccgatcatccaccaagcgctccccagggcagagggccaatcctctgaaaacgcagataacctggagcccagctcttggcatgtggacaagtaatcctaatataggtggagcatcccaaatccaaaaatcccaaattcaaaatgttcctaagtccaaaactttttgaacaccaacgtgacattcaaaggaatgctcagtggagcattttgtacttcagatttccagatttgggatgttcagccagtaagtataatacaaatatttcaaaatccaaagaaatacaagacacttctggtcccaagaatttcagatcagagatgctcaaccatgatacgaacggcagatgacaaagtcgcattggcatagcttgtacgtccaggcagtgtggcagggatttgttgcattttgacccattcaattctggtgacaatgctggcagtgaccttctgcaaggacccaagaccctcagccttaggaacaggccacgagtgtggcctaggcagtggccctcagccagggacggtcaggaagtggtgactgaaacatccacgtccccacccttggggtagcgcayatctgagctgtgggacccacatcccagatcccagcccagctgagcttcaggtgccaccatggtaactgccttgataacagacccctcctcccgaacagctgcttcctgagacatctcacacaccccaaaataagccacgcacactagattcctggcttcagaatctgcttctaagggaatccaaccaaacagaacaaccctctgaagcctccattttacagaagggggaaacaagtcatggagtgcagagtgactagggccccacagccaggggatggggatgccaggtccgagccaccaccgtttgaccctggcttcaggctctgcacctccacaaggcgcaaggcccagccaatggtcagtatgcttacccatcctctttccaacctcatgaggccccacgtcctctctttccaagccat

SEQ ID NO: 79095 - DNA, 668 bp, Homo sapiens
ttttctgggaacaccttatacaccataagggaacgatctccttccccctagacacctggctaatctatatccctctctacccactcaagccaccaggacagctagaattagaaagacctgtcctagttacgcctgcaggctgagggtcctcaatgaatgctccttttcagtaatgactcccctgcccctgcatcttgagcaagacaaaccggggacatttaggaacaatggtgagaagaaaggagtagatgaccctcaactggctttgaatttactacttttcctgcctttggccgctggtgggagatgcagggtgcccagtggccttcgcagactcgcagatcccatcccaggaaatgcacgggccggtgtggccaggacagaacagagggaccactctcagtccagccctccctgcaggcggctcgccagctattccttctggtcttcggtttgcaggagggcaagagggtttcccgcgccctggaccatccgggcgtagtcccggcagcaaggccttgtttccttgctagcctgggcctgccgcagacagaccccagagggagccgcgcccagcccgctgggcsgccccggcttcccgcgaccccctccagaccctgggcagaaagagcgccctgctgtcccgacagagccactgtgcttttgag

SEQ ID NO: 79096 - DNA, 1260 bp, Homo sapiens
tggggattttttaagtcttttttgagggggcctttcatacaagctgctaatgtgccagctrcttacatataagacagaggattctaaacagattgcattgcttgggaaggtgatagatgattgatagatggatatagataaatagaaaggtaggtaggtagatagataggtagatagataaatagatttggcaaaatgtcatttcggttcagtacagctgaaccgaaatactctgagtattccaaaatactctgattttttttagtaggagacttacaaactgcttacctgttatgcaataacaatggctctgaaaacctgagcaacatcctagcatggcgcatggaaacctttcatgctcacttgggttggacttgctgccttaactgctcccttggaggtggtttcatctcatgcttcacttttgtctaatttgaagtgtgcacctttgtcttctcaatgcccccaccacttgttgcatctatcgttttagtttgaagccagtcacaccactgatttatttttttttttaaatccattcttcaagtgagaaggcttttctagtcaatgtagagcataatttctatcagtccatggtgtggaaaatctggcatgaacgtgaaactttaaatataaacaaacttttatttttggggttttgtttttggtttttgagacagagtctcgttctgtttcccagactggagtgcagtggctcaatctctgctccctgcaacctccacctcctgggttcaagtgattctcctgcttcagcctcttgagtaactgggattacaggcgcgcacaaccaggcccggctaatttttgtatttttagtagagacgggattttgccaggtgggccaggctggtctcaaactgctgacctcaagtgacccacccaccttggcctcccaaagtgctgggattacaggcatgagccaccatgtctggctaaatataaacaaacttttaaaatatcttttttgcagttttttgaaaatgccttgctatatgagataaacataaatgccacaccagaggaggagttttcctaatgtatgacagataatttgaatcaaacataactaatgaatgatcatcgttctttcaaatttcaaaatgtggattttaaatttttttaattcccatttgtgcatgagaggccatctgtgtgcatgtgtgtgtgttttgtgttactttgtactgtcattggtagaattaatcaactcaacaaagcaaaccaaaaacttgcagttag

SEQ ID NO: 79097 - DNA, 1260 bp, Homo sapiens
tggggattttttaagtcttttttgagggggcctttcatacaagctgctaatgtgccagctacttacatataagacagaggattctaaacagattgcattgcttgggaaggtgatagatgattgatagatggatatagataaatagaaaggtaggtaggtagatagataggtagatagataaatagatttggcaaaatgtcatttcggttcagtacagctgaaccgaaatactctgagtattccaaaatactctgattttttttagtaggagacttacaaactgcttacctgttatgcaataacaatggctctgaaaacctgagcaacatcctagcatggcgcatggaaacctttcatgctcacttgggttggacttgctgccttaactgctcccttggaggtggtttcatctcatgcttcacttttgtctaatttgaagtgtgcacctttgtcttctcaatgcccccaccacttgttgcatctatcgttttagtttgaagccagtcacaccactgatttatttttttttttaaatccattcttcaagtgagaaggcttttctagtcaatgtagagcataatttctatcagtccatggtgtggaaaatctggcatgaacgtgaaactttaaatataaacaaacttttatttttggggttttgtttttggtttttgagacagagtctcgttctgtttcccagactggagtgcagtggctcaatctctgctccctgcaacctccacctcctgggttcaagtgattctcctgcttcagcctcttgagtaactgggattacaggcgcgcacaaccaggcccggctaatttttgtatttttagtagagacgggattttgccaggtgggccaggctggtctcaaactgctgacctcaagtgacccacccaccttggcctcccaaagtgctgggattacaggcatgagccaccatgtctggctaaatataaacaaacttttaaaatatcttttttgcagttttttgaaaatgccttgctrtatgagataaacataaatgccacaccagaggaggagttttcctaatgtatgacagataatttgaatcaaacataactaatgaatgatcatcgttctttcaaatttcaaaatgtggattttaaatttttttaattcccatttgtgcatgagaggccatctgtgtgcatgtgtgtgtgttttgtgttactttgtactgtcattggtagaattaatcaactcaacaaagcaaaccaaaaacttgcagttag

SEQ ID NO: 79098 - DNA, 829 bp, Homo sapiens
ggatcccacagcaacaaacttagggtaaaacatggatcgccctgggaagcaaaggaccctaaggtgtggaaatcctaaactcagtgagaatagatcaggaacaagccaatgggagcaaagaggtcaagaaaagtcaagctccgattctgccaaccagatctccgcccagaagatgtggtcctatgtaaggactgtgtgtacgattggacttttcacctaactagaagcagaaaaccgagtgcactcgagaaaattacgggactgttgagaaaggtagaacaccaactatggatgtgttctgactccacttgagtcaaagatagggacccgatggggtggtagtacaaatggcaggtgctcctcattgctctagtctttcagatatgcctgccaayggcagtgctgggagcgaggactggaggcgtgcacggggtgacctctcagatccttctctccgtttctcacccagactcccctcctgcccacctgcattgattctggagttccatgttgcttctccatgagagtctgtgggtggacggcctttattagaaggggatgatatgtgatataaaaatcacacacataaaatcaattttgcaggggcctagaaaaagccataaatgacaggtccatagatagttattttaaaaaatccaggttaaatattcacaaggctgagtggctcagtggtctcaaagcctgctcctgtctgattctatgaggctatctcactatttaacaaatatatacctgactgaaattctcaatagaccaggaatcaaggatttaatgagaaaggaccaaagccatctgaaggcatcagaaa

SEQ ID NO: 79099 - DNA, 829 bp, Homo sapiens
ggatcccacagcaacaaacttagggtaaaacatggatcgccctgggaagcaaaggaccctaaggtgtggaaatcctaaactcagtgagaatagatcaggaacaagccaatgggagcaaagaggtcaagaaaagtcaagctccgattctgccaaccagatctccgcccagaagatgtggtcctatgtaaggactgtgtgtacgattggacttttcacctaactagaagcagaaaaccgagtgcactcgagaaaattacgggactgttgagaaaggtagaacaccaactatggatgtgttctgactccacttgagtcaaagatagggacccgatggggtggtagtacaaatggcaggtgctcctcattgctctagtctttcagatatgcctgccaatggcagtgctgggagcgaggactggaggcgtgcacggggtgacctctcagatccttctctccgtttctcacccagactcccctcctgcccacctgcattgattctggagttccatgttgcttctccatgagagtctgtgggtggacggcctttattagaaggggatgatatgtgatataaaaatcacacacatraaatcaattttgcaggggcctagaaaaagccataaatgacaggtccatagatagttattttaaaaaatccaggttaaatattcacaaggctgagtggctcagtggtctcaaagcctgctcctgtctgattctatgaggctatctcactatttaacaaatatatacctgactgaaattctcaatagaccaggaatcaaggatttaatgagaaaggaccaaagccatctgaaggcatcagaaa

SEQ ID NO: 79100 - DNA, 716 bp, Homo sapiens
cagcccccagcagatgtgccaaagcccagcaaaggttctgagagacaggcccatctgcctctcctccctgacagctaaaaaaattcttccatcaccagagtgtgtcacaacctgtcaaagatcagtttgatgtttacagtccagggtgaggaacaggtctgatgtgaaacaaggcagccgcaaggttgcctgaaccctgccaaggcatgaatcagggctccgagaaggtgagagaggggagggtagaacatactgaaccctctgtgttttgtcctaagtcctcaccacattatttttttaggaagagatcctgaaaggaaaaccaaacacaaattgacaacatcaaatttcaaccaaactgtcaagcaagcatggagcattccaggaacgccaagaagtggattcccaaacatratgaggtgggaggcacgtggcatctcatcagggagcattaattctcttctgtaggaccttcttggggacaggggtcaggatgaacgggctgtgacccctcctcacgtgtctccctagtagttgagctagtaccctgctcagtacattaaggctctgcatgatattgtatttgaaaatgagattcttcagctagaagcacagacataaataaataatatcatgagtcactgtgttctgagcaagacggcccagctagaaggagcaggtcacctccctaacactactaggatgccctccacggg

SEQ ID NO: 79101 - DNA, 716 bp, Homo sapiens
cagcccccagcagatgtgccaaagcccagcaaaggttctgagagacaggcccatctgcctctcctccctgacagctaaaaaaattcttccatcaccagagtgtgtcacaacctgtcaaagatcagtttgatgtttacagtccagggtgaggaacaggtctgatgtgaaacaaggcagccgcaaggttgcctgaaccctgccaaggcatgaatcagggctccgagaaggtgagagaggggagggtagaacatactgaaccctctgtgttttgtcctaagtcctcaccacattatttttttaggaagagatcctgaaaggaaaaccaaacacaaattgacaacatcaaatttcaaccaaactgtcaagcaagcatggagcattccaggaacgccaagaagtggattcccaaacataatgaggtgggaggcacgtggcatctcatcagggagcattaattctcttctgtaggaccttcttggggacaggggtcaggatgaacgggctgtgacccctcctcacgtgtctccctagtagttgagctrgtaccctgctcagtacattaaggctctgcatgatattgtatttgaaaatgagattcttcagctagaagcacagacataaataaataatatcatgagtcactgtgttctgagcaagacggcccagctagaaggagcaggtcacctccctaacactactaggatgccctccacggg

SEQ ID NO: 79102 - DNA, 716 bp, Homo sapiens
cagcccccagcagatgtgccaaagcccagcaaaggttctgagagacaggcccatctgcctctcctccctgacagctaaaaaaattcttccatcaccagagtgtgtcacaacctgtcaaagatcagtttgatgtttacagtccagggtgaggaacaggtctgatgtgaaacaaggcagccgcaaggttgcctgaaccctgccaaggcatgaatcagggctccgagaaggtgagagaggggagggtagaacatactgaaccctctgtgttttgtcctaagtcctcaccacattatttttttaggaagagatcctgaaaggaaaaccaaacacaaattgacaacatcaaatttcaaccaaactgtcaagcaagcatggagcattccaggaacgccaagaagtggattcccaaacataatgaggtgggaggcacgtggcatctcatcagggagcattaattctcttctgtaggaccttcttggggacaggggtcaggatgaacgggctgtgacccctcctcacgtgtctccctagtagttgagctagtaccctgctcagtacattaaggctctgcatgatattgtatttgaaaatgagattcttcagctagaagcacagacataartaaataatatcatgagtcactgtgttctgagcaagacggcccagctagaaggagcaggtcacctccctaacactactaggatgccctccacggg

SEQ ID NO: 79103 - DNA, 716 bp, Homo sapiens
cagcccccagcagatgtgccaaagcccagcaaaggttctgagagacaggcccatctgcctctcctccctgacagctaaaaaaattcttccatcaccagagtgtgtcacaacctgtcaaagatcagtttgatgtttacagtccagggtgaggaacaggtctgatgtgaaacaaggcagccgcaaggttgcctgaaccctgccaaggcatgaatcagggctccgagaaggtgagagaggggagggtagaacatactgaaccctctgtgttttgtcctaagtcctcaccacattatttttttaggaagagatcctgaaaggaaaaccaaacacaaattgacaacatcaaatttcaaccaaactgtcaagcaagcatggagcattccaggaacgccaagaagtggattcccaaacataatgaggtgggaggcacgtggcatctcatcagggagcattaattctcttctgtaggaccttcttggggacaggggtcaggatgaacgggctgtgacccctcctcacgtgtctccctagtagttgagctagtaccctgctcagtacattaaggctctgcatgatattgtatttgaaaatgagattcttcagctagaagcacagacataaataaataatatcatgagtcactgtrttctgagcaagacggcccagctagaaggagcaggtcacctccctaacactactaggatgccctccacggg

SEQ ID NO: 79104 - DNA, 1736 bp, Homo sapiens
aaatatgttcagcttacaatgggctaatcaggatgcaatcccactgtaagtcaaggagcatctgtatatgtttaggctcactcagactgaactactggcacattaatcatgattccaggcaagagagtgaagacccataactattaccactccctccagcatcttccttaccacaggcttccccaactatctagtgttgtgagtcaccagccctttttaggtggattgcccagaaatgatctcattgattatccccaaaagacactcttgagagagaaagatgctccggagagacaggaagtctctgatcagtgaggtggctggctcaaagctaacaggcagtggttgttttgagatttcagtgaatcctagggaagattcttggaacttggaaactatctgggccaggaaagacctttccattccacctgaacattcattgagtcaggtggtgtcagctgtgtctcgacctttcccacctcaattcttgctgcttctccagatgccaaattctattccagccattcagaacctctcatctgtcttcaaacaggtcactgtttcttggcctccgtgcatttgcagatactttttctcttcctttcttctctttgctaaatcttgtagttctttcaagactctgctcagaagtcctcttgccctgagaaatgggccccgctctgttcctccctcctgcccttcaccttgagcactccctactggcacacacacacacactcagtgctgggtgtgtggggttatcatcctcttctacactagatcaggaggtgccatgccaccatccctgcattgcacttaccccttgctcagtgtctggcccttgagatgtagataatacatccatgcctgaggatgcatgtttacctccaggatgtctacccctcttctcccacatgctagtgctaccaaggtatgaagagttactcctctagggcatatttgctctataaaggaggaaacagagggagagagcccagtgtgacccaaaaattgcactggaaaagctaaagtaatagcagcattttggaaaatgacaagcaggtgggaaaatgtgtccgggtgtgaasagacttagggtgactcccagctccttcatggctaacacctatcccgtcgctctgggcctatctcctttcctgcaaaggaggacaaaggacagactctgaccctccagggctgagctgtgcctctagccaaggtctatccagtgccaagctcagatgtcagagcagcttgtctctgtccacggagcagaccttcactcctgccggtcatctgtgttcatctctgcagccctctcaccctgcttgccctctttttatttatgcctcccctctcttgctccctctctgtcctcaaagctttaatttccatttttcttggtgggggaagaggttgaagactgggggggcctgaatcagggagtgcctcctcactcgtgagcccaactcctccccaccacacctccagactggcatggtgcctgctcacccctccactgcggtctgctcacttggaagctagcatgtttcctgctgcagcctgattagatgatgccacgaagccctgtactgctgagccacttcttaaatcagatgctcgcttagcacaatcacctcattatggaaagcttagcactgttgtaattttatgtgcactttgacaattgattttggggtacagaagaattcaattgttgtggggtttcacatgtt

SEQ ID NO: 79105 - DNA, 1736 bp, Homo sapiens
aaatatgttcagcttacaatgggctaatcaggatgcaatcccactgtaagtcaaggagcatctgtatatgtttaggctcactcagactgaactactggcacattaatcatgattccaggcaagagagtgaagacccataactattaccactccctccagcatcttccttaccacaggcttccccaactatctagtgttgtgagtcaccagccctttttaggtggattgcccagaaatgatctcattgattatccccaaaagacactcttgagagagaaagatgctccggagagacaggaagtctctgatcagtgaggtggctggctcaaagctaacaggcagtggttgttttgagatttcagtgaatcctagggaagattcttggaacttggaaactatctgggccaggaaagacctttccattccacctgaacattcattgagtcaggtggtgtcagctgtgtctcgacctttcccacctcaattcttgctgcttctccagatgccaaattctattccagccattcagaacctctcatctgtcttcaaacaggtcactgtttcttggcctccgtgcatttgcagatactttttctcttcctttcttctctttgctaaatcttgtagttctttcaagactctgctcagaagtcctcttgccctgagaaatgggccccgctctgttcctccctcctgcccttcaccttgagcactccctactggcacacacacacacactcagtgctgggtgtgtggggttatcatcctcttctacactagatcaggaggtgccatgccaccatccctgcattgcacttaccccttgctcagtgtctggcccttgagatgtagataatacatccatgcctgaggatgcatgtttacctccaggatgtctacccctcttctcccacatgctagtgctaccaaggtatgaagagttactcctctagggcatatttgctctataaaggaggaaacagagggagagagcccagtgtgacccaaaaattgcactggaaaagctaaagtaatagcagcattttggaaaatgacaagcaggtgggaaaatgtgtccgggtgtgaagagacttagggtgactcccagctccttcatggctaacacctatcccgtcgctctgggcctatctcctttcctgcaaaggaggacaaaggacagactctgaccctccagggctgagctgtgcctctagccaaggtctatccagtgccaagctcagatgtcagagcagcttgtctctgtccacggagcagaccttcactcctgccrgtcatctgtgttcatctctgcagccctctcaccctgcttgccctctttttatttatgcctcccctctcttgctccctctctgtcctcaaagctttaatttccatttttcttggtgggggaagaggttgaagactgggggggcctgaatcagggagtgcctcctcactcgtgagcccaactcctccccaccacacctccagactggcatggtgcctgctcacccctccactgcggtctgctcacttggaagctagcatgtttcctgctgcagcctgattagatgatgccacgaagccctgtactgctgagccacttcttaaatcagatgctcgcttagcacaatcacctcattatggaaagcttagcactgttgtaattttatgtgcactttgacaattgattttggggtacagaagaattcaattgttgtggggtttcacatgtt

SEQ ID NO: 79106 - DNA, 1736 bp, Homo sapiens
aaatatgttcagcttacaatgggctaatcaggatgcaatcccactgtaagtcaaggagcatctgtatatgtttaggctcactcagactgaactactggcacattaatcatgattccaggcaagagagtgaagacccataactattaccactccctccagcatcttccttaccacaggcttccccaactatctagtgttgtgagtcaccagccctttttaggtggattgcccagaaatgatctcattgattatccccaaaagacactcttgagagagaaagatgctccggagagacaggaagtctctgatcagtgaggtggctggctcaaagctaacaggcagtggttgttttgagatttcagtgaatcctagggaagattcttggaacttggaaactatctgggccaggaaagacctttccattccacctgaacattcattgagtcaggtggtgtcagctgtgtctcgacctttcccacctcaattcttgctgcttctccagatgccaaattctattccagccattcagaacctctcatctgtcttcaaacaggtcactgtttcttggcctccgtgcatttgcagatactttttctcttcctttcttctctttgctaaatcttgtagttctttcaagactctgctcagaagtcctcttgccctgagaaatgggccccgctctgttcctccctcctgcccttcaccttgagcactccctactggcacacacacacacactcagtgctgggtgtgtggggttatcatcctcttctacactagatcaggaggtgccatgccaccatccctgcattgcacttaccccttgctcagtgtctggcccttgagatgtagataatacatccatgcctgaggatgcatgtttacctccaggatgtctacccctcttctcccacatgctagtgctaccaaggtatgaagagttactcctctagggcatatttgctctataaaggaggaaacagagggagagagcccagtgtgacccaaaaattgcactggaaaagctaaagtaatagcagcattttggaaaatgacaagcaggtgggaaaatgtgtccgggtgtgaagagacttagggtgactcccagctccttcatggctaacacctatcccgtcgctctgggcctatctcctttcctgcaaaggaggacaaaggacagactctgaccctccagggctgagctgtgcctctagccaaggtctatccagtgccaagctcagatgtcagagcagcttgtctctgtccacggagcagaccttcactcctgccggtcatctgtgttcatctctgcagccctctcaccctgcttgccctctttttatttatgcctcccctctcttgctccctctctgtcctcaaagctttaatttccatttttcttggtgggggaagaggttgaagactgggggggcctgaatcagggagtgcctcctcactcgtgagcccaactcctccccaccacacctccagactggcatggtgcctgctcacccctccactgcggtctgctcacttggaagctagcatgtttcctgctgcagcctgattagatgatgccacgaagccctgtactgctgagccacttcttaaatcagatgctcrcttagcacaatcacctcattatggaaagcttagcactgttgtaattttatgtgcactttgacaattgattttggggtacagaagaattcaattgttgtggggtttcacatgtt

SEQ ID NO: 79107 - DNA, 722 bp, Homo sapiens
ggatcccaaccaccagacctaggagggatctcatccatgctcgctccaccagaagaggttgcaggttgtgcccagaagatctcttacctccagagactccacacaacagaaagcattcccttgaccccctaacctttcagagaataagtatttgctaagatgctgcatgtactagggcagagccaggcatacagaccactttgcattctcctgttggacttcaaactatgctggataggtagtacatgtcctcagcacatggggcatgcaagaccaaaaaataatactctcccatcctttagctgtaactgtctcacacagaccaaacttagaccaacagggctctgtgcccccatccagttagcactaccggactgctcttaggacagtgccttgtctttggcctgccaagttctaggtcaccctctctcccctgstctcatcctgcatagacagcctttgagtcacatttactctttccttcccatccttaagaagactcagcccttgtcctcgggatgcctcagggtagaaaataaagcagagtggatacggactccagcttcaccccccaccacacttactagcccttggcaagttaatcgcctgccgccacgctcagttttatttactgtaaagtgagcgtgtaactctcaaatttagaactccagcacatacctttcccttgaatggtagaaggctatatccagtgctacttgaca

SEQ ID NO: 79108 - DNA, 1323 bp, Homo sapiens
ttacttatttatttattgtctgtctccctttgcttgcactgatccttatgagggcacagtgtttagtttcagacagatccccagagatgagaacagttcccaacacggagcacacagtaagcctttgttgaatgaattgttgaaggaatgcatgaatgtgtagggggtgaatgagtgatattgattaaatactccctaggtatcaggcattgtgaaagtgctttccaggtattaaccccttctatcttcaccctgactgagaggcaggcgtttttgtgatccccatgacataagagcaggagcctgtcatgacttgctgggaagaacaaatgaggtcatgtatccaaagtacaaggttctcagtaagctctcaataaatgctgacaattgctactatgatcaacatcatccaagtcatccacacccctgtactgagcccttccctcawggccatcactgttctgggcatgaggggttgacgctggggttggttggagaagaagcaaggcctacttgaaaagggcccccaaatcagctcaggtgagggcctctaactctgggaggagcataccccacaccacttcaggtgcttgagacagttgctctgtgcccagatagatgggcaagcattcaggctaagtccccagtgggatggacaaacccaccagcacaggcctaggggagcaggccactttgaagctgtcgagatggggaggatcctgtatgtttgtgtgagctaaccggcccttccactaaccccgcccctgtcagcctcccctcctcgtgtgactccagaggaagagtcccttgccctggcctggcctctggttcctcacctgaaaaggtgaaggggattgtaccgcagcatcccaactatctccttcagcaccgagtggctgtctgactcctccggtcagaggtaccagaataggctaaatatccccagcagctgccatcccagcgggtgggatgagagcgagcctgagctctgctcccttgatctcctctgcgtctctgctggatggcaggggtgagctggagcttccctggaggctgccacatgctggactcccccaaagtgctgactcctgagcctctctgctcgttttctatgcattgaacttcaaacaccagagaggcactcaggcagcaagacgggtggatttggccattatgttctcgctctcctttttcccttcatctccctcaagacaggattatgggttgcacctattaattcttgtctggaagcagcaagccaaccttttctctttgtggagttttataaccttctctgctgcaatggaggaggctacgagccat

SEQ ID NO: 79109 - DNA, 651 bp, Homo sapiens
catcttcctatgcttgtggactggtttggtgatccattgggtgtcaggatttcttctgatagctttatggaatggatcaatgaggataacctcaaaaaacttgtatgtggaatcttcaccaacccagtgagaattcaggacytttagagccccacagtggcatccagcttgccgctttgcaatggactgaagactttgagcaaactttagctggttaacaccatgatggacaggcttgccataagttgcacccttaggaactgggtgctttcggccaccatggcgaacacgaatcctatatataacataaacttggttggccttgtagcccagctggtgcgctttatcaagccagatggggtggggagccctgtggagagcagagagctggtggtactgccagcaaccaactctcagaagaaagtgcattttctccatagctcctggatttacttgtatgcccccatcttggcttacctgatggctgctgctagacagaaggggcacggattcttttattaaaatcacaatatgggtttattaatcccttacttgtatttatggttgttttttgcctattaaacatcagcattctagtataatttccattcttttactcataacaatatgatgtttaaaaaatactgattt

SEQ ID NO: 79110 - DNA, 651 bp, Homo sapiens
catcttcctatgcttgtggactggtttggtgatccattgggtgtcaggatttcttctgatagctttatggaatggatcaatgaggataacctcaaaaaacttgtatgtggaatcttcaccaacccagtgagaattcaggacttttagagccccacagtggcatccagcttgcckctttgcaatggactgaagactttgagcaaactttagctggttaacaccatgatggacaggcttgccataagttgcacccttaggaactgggtgctttcggccaccatggcgaacacgaatcctatatataacataaacttggttggccttgtagcccagctggtgcgctttatcaagccagatggggtggggagccctgtggagagcagagagctggtggtactgccagcaaccaactctcagaagaaagtgcattttctccatagctcctggatttacttgtatgcccccatcttggcttacctgatggctgctgctagacagaaggggcacggattcttttattaaaatcacaatatgggtttattaatcccttacttgtatttatggttgttttttgcctattaaacatcagcattctagtataatttccattcttttactcataacaatatgatgtttaaaaaatactgattt

SEQ ID NO: 79111 - DNA, 1364 bp, Homo sapiens
tgcattgaaaattaccccaaaacttagtggtttaaaacaataaaagtgtattattcagtttctgtgagtcaagaattcaagagtggcttatttgggtggccctggctcagattctctcataaagttgcagttaggatgttggcatgggataaagtctcatgtgaagggttgactggggctggagaagcaacttccagattgatcattcacgtggaagctagcaggaggcatcaggtgcttgccacatgggcttgtcctgcatggctgctagcttcttccacagtgaattacgagacagagagacagagtaagcagtaagccacagtgccttttatatcatcttcaaagtctcatgttgtcactttcattatattattttcattagaagaaattcattaagcctactccagcccacactcaaggtaaggagaattatcttccacctactgaagggaagaatgtcaaataatttgggggcatttaaaaatcatcacaacagtatttgagattgttttaaaaagcagataatttgtcttcagataatgctacagacatgaggctagtgattatgaaataagcctaagttatttgaccaggagaaaaggatagaggcttatgttagagatggcaatcaggttttagctctctcacctaccacaattaattggtagtagttgcttagagtactatgttgataaggattctgattagtagctatcaaatacacatattttctatcagagtaaaaaaacaaaagttcaaataatgagaatttggagaaaaagcaatttatgaagcatgtcaaagtctccagaaagcttataaaaccatggctcttgggcagcttgtccaggatgtttctctggagtcctggtttcccaggagagattccctttctcyttccctcccttccttccatcaaaccatccttccttcaacaagcacttattgagtacctatgttttagacataggtattctcagctgggtgcagtggctcacgtttgtaatctcagtgctttgggaggccaacgtgggaggattccttgaggccaggagtctgagaatagcttgggcaatatgatgagaccccatctctaaaaataaataaataaatttaaatttaaaataagtcataggtactctggctgccagagatagaataagaaactagataaatatctccctctcatggtaaaatacaaatttctgtcttctgtaaaatgtctgaaattttattttccttttaagaagccatacatattatttctgattaccatctcattacactagatattttagattaacattaaataatagtggtgataattcttgcttccaatccctctattgcagggtttacca

SEQ ID NO: 79112 - DNA, 1364 bp, Homo sapiens
tgcattgaaaattaccccaaaacttagtggtttaaaacaataaaagtgtattattcagtttctgtgagtcaagaattcaagagtggcttatttgggtggccctggctcagattctctcataaagttgcagttaggatgttggcatgggataaagtctcatgtgaagggttgactggggctggagaagcaacttccagattgatcattcacgtggaagctagcaggaggcatcaggtgcttgccacatgggcttgtcctgcatggctgctagcttcttccacagtgaattacgagacagagagacagagtaagcagtaagccacagtgccttttatatcatcttcaaagtctcatgttgtcactttcattatattattttcattagaagaaattcattaagcctactccagcccacactcaaggtaaggagaattatcttccacctactgaagggaagaatgtcaaataatttgggggcatttaaaaatcatcacaacagtatttgagattgttttaaaaagcagataatttgtcttcagataatgctacagacatgaggctagtgattatgaaataagcctaagttatttgaccaggagaaaaggatagaggcttatgttagagatggcaatcaggttttagctctctcacctaccacaattaattggtagtagttgcttagagtactatgttgataaggattctgattagtagctatcaaatacacatattttctatcagagtaaaaaaacaaaagttcaaataatgagaatttggagaaaaagcaatttatgaagcatgtcaaagtctccagaaagcttataaaaccatggctcttgggcagcttgtccaggatgtttctctggagtcctggtttcccaggagagattccctttctccytccctcccttccttccatcaaaccatccttccttcaacaagcacttattgagtacctatgttttagacataggtattctcagctgggtgcagtggctcacgtttgtaatctcagtgctttgggaggccaacgtgggaggattccttgaggccaggagtctgagaatagcttgggcaatatgatgagaccccatctctaaaaataaataaataaatttaaatttaaaataagtcataggtactctggctgccagagatagaataagaaactagataaatatctccctctcatggtaaaatacaaatttctgtcttctgtaaaatgtctgaaattttattttccttttaagaagccatacatattatttctgattaccatctcattacactagatattttagattaacattaaataatagtggtgataattcttgcttccaatccctctattgcagggtttacca

SEQ ID NO: 79113 - DNA, 538 bp, Homo sapiens
tcagcttctgtttttccatgaatcttgtctgtttgttatggtagacaaactaattcccctccaactatcttgtgggaatatttaaataaatgtgagctttgctctgtggtctcatgtattkggaaaggttatgtattttccttatgccgcagtgagtcacctgtggtgtggatgtgtgtgcatgtattccctgtttgaggctagaaagctggaacaagtgacttattggagctcttctcagttttgagttttatgataattggcgattgatgatcttgcttctcatttttattatgaaatacatcccagttgcattttaagtaagctctacatacgtgggagtattagtaaagaaggaaacctatcttcattttgatcactagtggataaaaaggttaaaaagaagaatgatacaaaaaaattaaggaagaaacaaggtagataaactcacttgaggtcacaagtgaatgagcagcaccaccattttgcatagtttgtgattcaattcacacatacacacaaacatacacacacacac

SEQ ID NO: 79114 - DNA, 661 bp, Homo sapiens
aagaagatgtttagggattcctatatcatgcttctttccccgtgcacttcactttaatctccctagtcctgtcactgagtacagagcctccccaaatcaaaagaagtccagggatatgaagggcaggaaggacaagggaggaaggaaaaagacaaaagaaaagcaatttggctagctagtcattgcagattgaataaatatgctaatttcccctctctccgaaaatacacaacactaaatattataaccaaaatcatattaagggaaataagtatcatccacctttaaagacaaagagaatggaaaacaaaaacacagaagatgagaaatggatgtttctgcataattcaactataaagaaactacagttccttatccagtcaaattgtcaattattatgaaggctaaaagtagactttgcaaaatccattgcatttttgtctgttgttagaaagcttctgaagacttttctccaccaaaatgagagattaaaacaagatagaggaaagggtgggatccagcaggggctccaagatgaacagaaacaaagggaattcttacaatcaagttgaaggaaaatcccaggtgaaatatgaggcaattattaactctaggaaacacaaaaacraaagggacatttaagcatagtacatttcatgca

SEQ ID NO: 79115 - DNA, 1343 bp, Homo sapiens
cccaggctggagtgcaatggcatgatctcagctcactgcaacctccacctccaaggttcaagygattctcctgtctcagcctcccgagtagctggggtttacatgcatgtgccaccatgcccggctaacttttgtacttttagtagagatggggtttccacatggtggccaggctggtcttgaactcccgacctcaggtgatccacctgcctcggcctcgcaaagtgctgggattacaggcatgagccactgtgcccagacattgccttttattttctactgaagcaccaatgtcttctggagcctacaggcattgggagaaaagccactcctttaggttttccatgggctattttgccctgttaaaggatctgccaggtgccataatcttaattgagtctgcacagttccatggggttatgggatccagtttcagtaccagatttattgagactagaaatgagagtggcattgtaagatcaacagttttggaagctctcttaatagtattatggctgagaatggactagggaaatgaatgtctccctagtgtgagaatggactagggaaatgaatgtcaattcagacactgtttctgttcattaaacaaatattcatgctatgcccctatattccagtaagcgtggggagtacaaaagttggaagacaaacagataagaagttgtgtgattttggtgaagaaagtgagactgtttgttctaaggcagtattcagaaggcagatttaaaaaggtttttctggcccaggcaatggcagatagtctaagacaaatgggtttcttttcctcattttgggctctggtccttggtgaatttcatctcctccaggctgctagagtttcctgtctcattttctctctgaagcatagaatatggcttattcaaaggagggggcctctgggattcctcttaacttagatgaaattctcccatagctcaatttcctcatagtccctttgacatcactctatccctctcagaatgtcaaaagtttctaatttctctgctaaccagaaggaaagctagcaggggaaccagcccccagtatttcaacataggttctttctattttccctaagtgtcagccagtctgagaaataaagagaaagagtacaaagagaaattttacagctgggcctccgggggtgccatcacatattggtaggaccatgatggcgactccaagctgcaaaaccacgaagtttttataagggattttagaaagggaggggatgtacaaacagggagtaggtcacaaggatcacgtgcttcaaagtgtaataaaagatcacaaggcaagggcaaaattagaattacagataa

SEQ ID NO: 79116 - DNA, 1343 bp, Homo sapiens
cccaggctggagtgcaatggcatgatctcagctcactgcaacctccacctccaaggttcaagtgattctcctgtctcagcctcccgagtagctggggtttacatgcatgtgccaccatgcccggctaacttttgtacttttagtagagatggggtttccacatggtggccaggctggtcttgaactcccgacctcaggtgatccacctgcctcggcctcgcaaagtgctgggattayaggcatgagccactgtgcccagacattgccttttattttctactgaagcaccaatgtcttctggagcctacaggcattgggagaaaagccactcctttaggttttccatgggctattttgccctgttaaaggatctgccaggtgccataatcttaattgagtctgcacagttccatggggttatgggatccagtttcagtaccagatttattgagactagaaatgagagtggcattgtaagatcaacagttttggaagctctcttaatagtattatggctgagaatggactagggaaatgaatgtctccctagtgtgagaatggactagggaaatgaatgtcaattcagacactgtttctgttcattaaacaaatattcatgctatgcccctatattccagtaagcgtggggagtacaaaagttggaagacaaacagataagaagttgtgtgattttggtgaagaaagtgagactgtttgttctaaggcagtattcagaaggcagatttaaaaaggtttttctggcccaggcaatggcagatagtctaagacaaatgggtttcttttcctcattttgggctctggtccttggtgaatttcatctcctccaggctgctagagtttcctgtctcattttctctctgaagcatagaatatggcttattcaaaggagggggcctctgggattcctcttaacttagatgaaattctcccatagctcaatttcctcatagtccctttgacatcactctatccctctcagaatgtcaaaagtttctaatttctctgctaaccagaaggaaagctagcaggggaaccagcccccagtatttcaacataggttctttctattttccctaagtgtcagccagtctgagaaataaagagaaagagtacaaagagaaattttacagctgggcctccgggggtgccatcacatattggtaggaccatgatggcgactccaagctgcaaaaccacgaagtttttataagggattttagaaagggaggggatgtacaaacagggagtaggtcacaaggatcacgtgcttcaaagtgtaataaaagatcacaaggcaagggcaaaattagaattacagataa

SEQ ID NO: 79117 - DNA, 1343 bp, Homo sapiens
cccaggctggagtgcaatggcatgatctcagctcactgcaacctccacctccaaggttcaagtgattctcctgtctcagcctcccgagtagctggggtttacatgcatgtgccaccatgcccggctaacttttgtacttttagtagagatggggtttccacatggtggccaggctggtcttgaactcccgacctcaggtgatccacctgcctcggcctcgcaaagtgctgggattacaggcatgagccactgtgcccagacattgccttttattttctactgaagcaccaatgtcttctggagcctacaggcattgggagaaaagccactcctttaggttttccatgggctattttgccctrttaaaggatctgccaggtgccataatcttaattgagtctgcacagttccatggggttatgggatccagtttcagtaccagatttattgagactagaaatgagagtggcattgtaagatcaacagttttggaagctctcttaatagtattatggctgagaatggactagggaaatgaatgtctccctagtgtgagaatggactagggaaatgaatgtcaattcagacactgtttctgttcattaaacaaatattcatgctatgcccctatattccagtaagcgtggggagtacaaaagttggaagacaaacagataagaagttgtgtgattttggtgaagaaagtgagactgtttgttctaaggcagtattcagaaggcagatttaaaaaggtttttctggcccaggcaatggcagatagtctaagacaaatgggtttcttttcctcattttgggctctggtccttggtgaatttcatctcctccaggctgctagagtttcctgtctcattttctctctgaagcatagaatatggcttattcaaaggagggggcctctgggattcctcttaacttagatgaaattctcccatagctcaatttcctcatagtccctttgacatcactctatccctctcagaatgtcaaaagtttctaatttctctgctaaccagaaggaaagctagcaggggaaccagcccccagtatttcaacataggttctttctattttccctaagtgtcagccagtctgagaaataaagagaaagagtacaaagagaaattttacagctgggcctccgggggtgccatcacatattggtaggaccatgatggcgactccaagctgcaaaaccacgaagtttttataagggattttagaaagggaggggatgtacaaacagggagtaggtcacaaggatcacgtgcttcaaagtgtaataaaagatcacaaggcaagggcaaaattagaattacagataa

SEQ ID NO: 79118 - DNA, 1343 bp, Homo sapiens
cccaggctggagtgcaatggcatgatctcagctcactgcaacctccacctccaaggttcaagtgattctcctgtctcagcctcccgagtagctggggtttacatgcatgtgccaccatgcccggctaacttttgtacttttagtagagatggggtttccacatggtggccaggctggtcttgaactcccgacctcaggtgatccacctgcctcggcctcgcaaagtgctgggattacaggcatgagccactgtgcccagacattgccttttattttctactgaagcaccaatgtcttctggagcctacaggcattgggagaaaagccactcctttaggttttccatgggctattttgccctgttaaaggatctgccaggtgccataatcttaattgagtctgcacagttccatggggttatgggatccagtttcagtacmagatttattgagactagaaatgagagtggcattgtaagatcaacagttttggaagctctcttaatagtattatggctgagaatggactagggaaatgaatgtctccctagtgtgagaatggactagggaaatgaatgtcaattcagacactgtttctgttcattaaacaaatattcatgctatgcccctatattccagtaagcgtggggagtacaaaagttggaagacaaacagataagaagttgtgtgattttggtgaagaaagtgagactgtttgttctaaggcagtattcagaaggcagatttaaaaaggtttttctggcccaggcaatggcagatagtctaagacaaatgggtttcttttcctcattttgggctctggtccttggtgaatttcatctcctccaggctgctagagtttcctgtctcattttctctctgaagcatagaatatggcttattcaaaggagggggcctctgggattcctcttaacttagatgaaattctcccatagctcaatttcctcatagtccctttgacatcactctatccctctcagaatgtcaaaagtttctaatttctctgctaaccagaaggaaagctagcaggggaaccagcccccagtatttcaacataggttctttctattttccctaagtgtcagccagtctgagaaataaagagaaagagtacaaagagaaattttacagctgggcctccgggggtgccatcacatattggtaggaccatgatggcgactccaagctgcaaaaccacgaagtttttataagggattttagaaagggaggggatgtacaaacagggagtaggtcacaaggatcacgtgcttcaaagtgtaataaaagatcacaaggcaagggcaaaattagaattacagataa

SEQ ID NO: 79119 - DNA, 695 bp, Homo sapiens
gatcctttggtggtggtctcataatagtgagtgagttatcaagagatctagttgtttaaaagtgtgtagcaccactcccttctctctcctcctcctgctctgggtcatgtaaaatgtgcctgcttccctttcaacctctgccatgattcaaagttccctgagacctccccagccatgcaacctgtacagcctgcataactgtgagccactttaccctcttttctttataaattacccagtcttaggtatttctttatagcagtgyaaggataaagaaatatactatcctaactttttttttctttaagtctctttgtaattttgtttgtgttagagtgagaggtaagtctttacccttgtatgacattgtctctatgaacgcattttctggtcaattttgtgtttgtctgctcatcaaaatgggcacattaaaattacatttttttcctctgtgtcagaaaacacatgtagaaagtacaaaaaaatgtgaaagtgcagattaaccatttattcaaaacaaacaaccacgtagcaacccaaattatgacaatgaaaactgcaaaaacctggagcctcctgttgtgtccttagctagttacagcctctatgattccttcttcaatggtcattatccaaatttgagggtaataagttctcttttcttcattattgtactccaatgtacacattcctaa

SEQ ID NO: 79120 - DNA, 695 bp, Homo sapiens
gatcctttggtggtggtctcataatagtgagtgagttatcaagagatctagttgtttaaaagtgtgtagcaccactcccttctctctcctcctcctgctctgggtcatgtaaaatgtgcctgcttccctttcaacctctgccatgattcaaagttccctgagacctccccagccatgcaacctgtacagcctgcataactgtgagccactttaccctcttttctttataaattacccagtcttaggtatttctttatagcagtgcaaggataaagaaatatactatcctaactttttttttctttaagtctctttgtaattttgtttgtgttagagtgagaggtaagtctttacccttgtatgacattgtctctatgaacgcattttctggtcaattttgtgtttgtctgctcatcaaaatgggyacattaaaattacatttttttcctctgtgtcagaaaacacatgtagaaagtacaaaaaaatgtgaaagtgcagattaaccatttattcaaaacaaacaaccacgtagcaacccaaattatgacaatgaaaactgcaaaaacctggagcctcctgttgtgtccttagctagttacagcctctatgattccttcttcaatggtcattatccaaatttgagggtaataagttctcttttcttcattattgtactccaatgtacacattcctaa

SEQ ID NO: 79121 - DNA, 1129 bp, Homo sapiens
agaattgcttgtacttgggaggtggaggttgcagtgagccgagattcacgtcgctgcaattcagcctgggtgactcagcaagactccatcttgaaaaaaaaatttttaaataataataataataatttttttaagaaaaaaaagaaattctggcacagatgcacaaagttgtagtatcacagcagagtttataatgggaaaaaactggaagcaacctcaatgcccatcaagagagaaatggttaagtcaggtgcagcagctcatgcctgtaatcccagctacttaggaggttgaggtgggagaaatgcttgagcccaggagtttgagtccagcctgggaaacacagctagaccccctctcttaaaaaaaaataaaaaataaaaaagagtaaaatggttaaacaaatccagaccagtatggaaaaatagccaagtgttactgttaagaagaaaaagcatgctgggtgcggtggctcacgcctgtaatcctagcactctgggaggccaaggcgcgtggatcacctgaagtcaggagtttgagacctgcctggccaacatggtgaaaccccatctctactaaaaacacaaaaaattagccaggcgtgatggcagacacctgtaatcccagctactcgggagcctgaggcaggagaatcacttgaacccgggaggcagaggttgcagtgagccgagatcatgccactgcactccagcccgggcaacaaaagcaaaactccatctcaaaaaaaaaaaaaaaaaaaaaaaaaagccgggcacaatggctcatgcctgtaatcccagcactttggaaggctgaggcgggcggatcacgaggttaaaaaatagacaccatgctggccaacatggtgaaacccagtctctactaaaaatacaaaaaattagccgggcattgtggcaggcgcctgttatcccagctacttgggaggctgaggcaggaraattgcttgaacccgggaggcggaggttgcagtgagctgagatcgtgccattgcgctccggctttggcaaaaagagcgaaactcagtctcaacaacaaacaaacaaaaaaaaaaaaaaaaagaggaagaagaagaagcaatttagaacctacctatgaatataaatttata

SEQ ID NO: 79122 - DNA, 1129 bp, Homo sapiens
agaattgcttgtacttgggaggtggaggttgcagtgagccgagattcacgtcgctgcaattcagcctgggtgactcagcaagactccatcttgaaaaaaaaatttttaaataataataataataatttttttaagaaaaaaaagaaattctggcacagatgcacaaagttgtagtatcacagcagagtttataatgggaaaaaactggaagcaacctcaatgcccatcaagagagaaatggttaagtcaggtgcagcagctcatgcctgtaatcccagctacttaggaggttgaggtgggagaaatgcttgagcccaggagtttgagtccagcctgggaaacacagctagaccccctctcttaaaaaaaaataaaaaataaaaaagagtaaaatggttaaacaaatccagaccagtatggaaaaatagccaagtgttactgttaagaagaaaaagcatgctgggtgcggtggctcacgcctgtaatcctagcactctgggaggccaaggcgcgtggatcacctgaagtcaggagtttgagacctgcctggccaacatggtgaaaccccatctctactaaaaacacaaaaaattagccaggcgtgatggcagacacctgtaatcccagctactcgggagcctgaggcaggagaatcacttgaacccgggaggcagaggttgcagtgagccgagatcatgccactgcactccagcccgggcaacaaaagcaaaactccatctcaaaaaaaaaaaaaaaaaaaaaaaaaagccgggcacaatggctcatgcctgtaatcccagcactttggaaggctgaggcgggcggatcacgaggttaaaaaatagacaccatgctggccaacatggtgaaacccagtctctactaaaaatacaaaaaattagccgggcattgtggcaggcgcctgttatcccagctacttgggaggctgaggcaggagaattgcttgaacccgggaggcggaggttgcagtgagctgagatcgtsccattgcgctccggctttggcaaaaagagcgaaactcagtctcaacaacaaacaaacaaaaaaaaaaaaaaaaagaggaagaagaagaagcaatttagaacctacctatgaatataaatttata

SEQ ID NO: 79123 - DNA, 673 bp, Homo sapiens
cctggctggtmgcatgaccagaggacagcctgtcagactgagtgggcggagtgagcccaactggctggagcaaagcccaggcagaggtgccacgggccacagagattcccagctggtgaagtggcactgaaataattctgtgtcataattaccgtttattttaagtcttttaacgtattttaaaaagctgtttttctctcctcatgtgataaagacaatattaaagcaatattaggttgtgtttctattgaccaattaaaaaaaatagaccatgcttccttgctaatttacatggttgaattatattttctttctttatagggtattaattatattttgtcagacgattaaattaccccggatttttgttgcttctgctagtcttggttttagtctctgttaaggtaggtcgattttgattttgtcattagttagagggtgcacctttattccaaagccatgtcttttctgactctcaattaaatatctgcaatcttcagcaatgtgtctcatttctttatgggccagaattgcaatatttttatcctggtgtgatctctgttatcttcattcattctcagcccagcaccagcacatttctgctaagtgtcgctgagtcgttctgtgagcattacacaacaaggccctcagtcaaaataataataataaaata

SEQ ID NO: 79124 - DNA, 996 bp, Homo sapiens
agatataactttaaatcaagtcctgaggtcctctcagttcagagtaaggttagctaatctgcttttgctcttgctgctgtatgattattacagttcaaggatttacttgcactctagccacttttgcagtttgaaggtggattagtgttgccctcttacttaagtacttctcttatagctaaacttgctttttgaatttaaactgcttgtgttatttctgcttgatattgaattcaacaatgattcaaaaattgatttagattttgtgtaatagattggaaataacaagcttagtcttgattttacaagaaactgtgtgacctcaatcagataacttcatctctttgggccaagatttcttattgataacaaataagcttgaataaaacaatgtcttaattccattcaacactctatgagtctatgagctaaaaagttggacaatcaccgccaaaaccatcatattcccargattagcttaccatctaaatacacggactttattatacatagactataggttccattacatcagtctgtaattctgttttatatattgttctaggactttgcttcagacctcttatgacctctttgattagaaatatatctttctaaaccatgatgttatctttgtttcacatttatgtatccaaggacaacctagatatctccaattataggtatcacagaaaactcacatctcatattatgcaaaactgaagcctggtgagcctgtgccccagtgaattttattcattccaaatgttgagaaccgctgtcatagagagaaagcaaaatgtaactgttaatcctatcagtctcctgtaggacattcctaggaggttagagacctaggacaattggttttctcttctggatgagttcctatacatgtaaactgtttgacttaaaaatgtattacaaaattaatagaacatatgataaatagtgatttattgataacaatagatagagaaaagctacttcatcttt

SEQ ID NO: 79125 - DNA, 1063 bp, Homo sapiens
gactcctgaacaggtgtccaaatttcaagctggttaactgaaagataaatgttataatattggtgcctacttcataagattgcggcagtcatcaaacgaatggaaatataaaacatacttactacagtgccaggaccaagcaaggactattgctaaaattttggagagaggggagtatgaagaaattggatagagtagaaagcaggttctttttaatgtgagcctatttaccctgacagagtaaagcatatttcatttttaagtgttatcaaattaagcagatataccaattgctattcattcattcagtaaataaaatttcacttcctattatatgtccagctgtatgctccaaagtaaggagaaaaatgtaaaccatatcaaatatgcacaatcctcaaagtagcctgacaccacttgaatatcacacgcactacagctggaaaaatttcttgtattttgcagctctcctccagctgctacaagtgcctatggtgagacttttgacagtgtgagtggttcccagaaaaaatgatgttcagttgtagaaagaccatggggcagaaagaaggatcccaggagaggggagcacatgtgcagaggcggaacccagaaatgtgcgtttggctttgtggacctctaccagtagttctttggggctcgtatttgcaggatagcagaacatcaggcactgggagattctaggaaaacagaaaccttggactctaggagaagacttactgatttggaaggagaaggtggatccactaagatttatttgcatgtttaattgtattacagagcatgtcatgccatgtaagacacatttgggagttaggagcaaggtttgtaaaggaaatgtagacaaataatatatgtagaggaagcatatagtgtggactctaataataacagcaataccatctacttagcccttactgtgtgccagccccatcctagatgtttagcrcgtattatttcatgtagctctggcaataaacccgcaaagaaggtattattgctcccattttacagataaggtaactgaagcttaaaaaggttg

SEQ ID NO: 79126 - DNA, 578 bp, Homo sapiens
ctgtttggggcaagaggtacttgtctgctgagttggactaggaaccaaagttttaacttgcaatctggtatttatccctgctgtatattttaataaattttattgtaaaatatgtcagacaaaaattgatattatgagtccccattacttgcctttgtgaaccctgaaaatcggagacaggtctcaatttagaaagtttatttgaggacgcatgcccatgacacagcctcaggaggtcctgatgacatgtgcccaaggggktcagaacacggtttggttttatacttgtagggagacatgagacatcaatgaacatatgcaagatgagcaatgtctcagtctagaaaggtgggacaactcaaagcaaaggtgggaagactcaaagtggggagggggcttccaggtaataggtagataagagacaaatggttgcattcttttgagttcctagtctctccaaagaaggcaattagatatgcatttatctcagtgagcagaggagtgactttgactagaatgggaatcaggttttccctaagcagttcccagcttgacttttccctttagctaagtgattt

SEQ ID NO: 79127 - DNA, 469 bp, Homo sapiens
cgcttgaacctgggaggtagaggttgcggtgagccaagatcatgccattgcactccagcctgggcaaaaagagcraaattccatctcaaaaaaataaaaattttaaaaaaaagaagaatttcttaattcaaaaagcacaacagctctagagggcactggaacgcatttgaaagatcagtcatacactgatgcataatgtgttaatatctcattctagtctccaaaatttttccttgattctaagaagagtagtagtagattttaattaaaattgcatgcttctacctggatatactttttgagaattttctcatgtttagagcttaaaaaataagcgtattctcttgaaatgtaacttgtatgcaaaagtcttaagaagacagcctctcctagggtttttatggttttaggtctaacgtttaagtctttaatccatcttgaattaatttttgtataaggtgtaaggaaa

SEQ ID NO: 79128 - DNA, 498 bp, Homo sapiens
gcattactctttgaagctttgatttcttttgttcctgctgctggagcctccttggctgattaagtctgaggcttcttccaggttttgttggtccatgaatggagcctcttcagtgctcactggagtgcggtatcattgatacttcctccgcctggctccctccctctcccagcccagcagagctgatggattaatcctrttgtgcgcttgtaagtctcccaggcagaaatgtaagctagggtagaaaaagacggctcaggttggatgggaccacagagaccttcctttctaatactcctcattttacttaattaggcttcaagaggtatagggcagagcagtgaagggcctggcccaagtctctcagagggttggggcaagtctagacttccccagggctttctactttacttgttccagcacaggcccttctcagtgggaagcctgcaagaatttttttgcccttgctgtagaacagtaacattgtatctacataca

SEQ ID NO: 79129 - DNA, 706 bp, Homo sapiens
cttcttaaatgttctttatgtgcaatgargtttcagactgcttcatagagtatgtcctcacatccattacatattcacataccagtcatcaagtgttgccaaatatattccaaatttattttattttattttcaattttaggttcaggggtatatgtgcaggtttgtaatacgagtaaattgcatgtcacaggtgtttggttgtactgattatttcatcacccaggtaataagcatagtatccaataggcagtcttttcttttcttttcttttcctttcctcttctcttttcctctccttttctcttctcttttcctctcctctcctcttttctcttcttttctctctctccttccttccttcctttctccctccctccctccctctctctctttctttctttcaacagagttttgctcttactgcccaggctgaagtgcaatggcacgatctcggctcactgcatcctccgcctcccgggttcaagcaattctcctacctcagcctcccaagtagctgggattacaagtgtgcaccatcacacctggctacttttgtatttttggtagagacagggtttcaccatgttggtcagactggtctcaaactcctgacctcaagtgatccacctgccttggcctcccaaaattctgggattacaggtgtgagccaccgtgcccagccggtagtttttcaattatcacat

SEQ ID NO: 79130 - DNA, 706 bp, Homo sapiens
cttcttaaatgttctttatgtgcaatgaagtttcagactgcttcatagagtatgtcctcacatccattacatattcacataccagtcatcaagtgttgccaaatatattccaaatttattttattttattttcaattttaggttcaggggtatatgtgcaggtttgtaatacgagtaaattgcrtgtcacaggtgtttggttgtactgattatttcatcacccaggtaataagcatagtatccaataggcagtcttttcttttcttttcttttcctttcctcttctcttttcctctccttttctcttctcttttcctctcctctcctcttttctcttcttttctctctctccttccttccttcctttctccctccctccctccctctctctctttctttctttcaacagagttttgctcttactgcccaggctgaagtgcaatggcacgatctcggctcactgcatcctccgcctcccgggttcaagcaattctcctacctcagcctcccaagtagctgggattacaagtgtgcaccatcacacctggctacttttgtatttttggtagagacagggtttcaccatgttggtcagactggtctcaaactcctgacctcaagtgatccacctgccttggcctcccaaaattctgggattacaggtgtgagccaccgtgcccagccggtagtttttcaattatcacat

SEQ ID NO: 79131 - DNA, 706 bp, Homo sapiens
cttcttaaatgttctttatgtgcaatgaagtttcagactgcttcatagagtatgtcctcacatccattacatattcacataccagtcatcaagtgttgccaaatatattccaaatttattttattttattttcaattttaggttcaggggtatatgtgcaggtttgtaatacgagtaaattgcatgtcacaggtgtttggttgtactgattatttcrtcacccaggtaataagcatagtatccaataggcagtcttttcttttcttttcttttcctttcctcttctcttttcctctccttttctcttctcttttcctctcctctcctcttttctcttcttttctctctctccttccttccttcctttctccctccctccctccctctctctctttctttctttcaacagagttttgctcttactgcccaggctgaagtgcaatggcacgatctcggctcactgcatcctccgcctcccgggttcaagcaattctcctacctcagcctcccaagtagctgggattacaagtgtgcaccatcacacctggctacttttgtatttttggtagagacagggtttcaccatgttggtcagactggtctcaaactcctgacctcaagtgatccacctgccttggcctcccaaaattctgggattacaggtgtgagccaccgtgcccagccggtagtttttcaattatcacat

SEQ ID NO: 79132 - DNA, 624 bp, Homo sapiens
tgagaactcaagaattcttatgcttgaagacaaaattttctctctgcarccattcaatttgaagagaatcagggctaagaaaaggtatctgtgcagctatcacctttatttatttcagaaatcatatgctgttactgaactaaatgtctataggaatgtggcaaggaaatatatgggattaaatgaaaataacatttgtgacatttttctttttttaacttaaagccaggcttaatttattaaaaattatttgaggattcacaattataaaatttgtatttctaaattattaatctgggcagtggtagaaaaaaacaggatagtctaatttcagtagaaagttccctgtgcttggcaaatcttttatttctccctagtaaattctcttgtgcacttcctatagtaggtttcctaaacttttaccgctgtgctttaaagtccacatcccaatgacttttaaaataaagacctctaggtaacagactttcctcaacttcccttccatttactttaacactaataagtttattcatcttcactaattctctaggaagcactctattccttctcccttgagtcctatgctatcctgagtcttaagtcctgtcctttctcaacttctcc

SEQ ID NO: 79133 - DNA, 624 bp, Homo sapiens
tgagaactcaagaattcttatgcttgaagacaaaattttctctctgcagccattcaatttgaagagaatcagggctaagaaaaggtatctgtgcagctatcacctttatttatttcagaaatcatatgctgttactgaactaaatgtctataggaatgtggcaaggaratatatgggattaaatgaaaataacatttgtgacatttttctttttttaacttaaagccaggcttaatttattaaaaattatttgaggattcacaattataaaatttgtatttctaaattattaatctgggcagtggtagaaaaaaacaggatagtctaatttcagtagaaagttccctgtgcttggcaaatcttttatttctccctagtaaattctcttgtgcacttcctatagtaggtttcctaaacttttaccgctgtgctttaaagtccacatcccaatgacttttaaaataaagacctctaggtaacagactttcctcaacttcccttccatttactttaacactaataagtttattcatcttcactaattctctaggaagcactctattccttctcccttgagtcctatgctatcctgagtcttaagtcctgtcctttctcaacttctcc

SEQ ID NO: 79134 - DNA, 1215 bp, Homo sapiens
gaaaaacatgtttcaagggtgactagactgacaccaggctatgttttaacattagcactaattgatttgatggattcaacaggctttttcttgttggatgtttctttatattctaattggtttatactttaatacataaaaaaatcttgtgaaaaggtgcaaagagagaatgacctttaagtagtaaatatctggattggaaataaaacaaatgaacccacctgcttcattatgttataggtgagtgtgcctctgaaatcctcaaaaactacatttggaattcaaaaagatcagtctttgcacaattagtcaacattcagaacgtatagattgttttaagaattagtttaagctggaaataaatatagttcaaaaatttagaaatttcataaatagcaaacatacaaagcattattaagaaaacattgtatgttctcactgatatgtgggagttaaactwtgaggacacgaaggcataagaatgatacaatggactttggggacttgcagggaagggtgggagggaggcgagggataaaaggctgcaaacagggtgcagcatatactgctggggtgatggatgcaccaaaatctcacacatcaccaattaagtacttacataaccaaataccacctgtaccccaataacctatggaaaaataaaaaaaaagaaaaaaaaaaaaagaaaacagggtccttgcaggagatattgaagctaaaagattgaagtctgcaaagaaaacccataaaaaataaagtgtgagcccaaccacatggggctggcccagtaggacaattcttattgagagcatcctagacaacctgctgagaaaggcagacaggcagtgaccgttactgaatggaccaattaacaagggtccctaaggaggggctttggaatgaacagtattgcagtgcactcacgtttctcaggtttgttgacagtcatgattgtggcagatcctgtctgattataagcgagtacacatggagcagaagacagagctctagatgaatcaagaacagaggcagtagtggcagtaggacactcagtccatgcatcaatggatacctgagggatcatcaaacaccataaaatagaacatggcctctgataagagatgtcaaataatattagctctgtaaaaataaattaattataaggctccagtagggagtttcatgtggtcagcatgggctgatattacctaatta

SEQ ID NO: 79135 - DNA, 1971 bp, Homo sapiens
tgatcactatctacgagtgctatatcagaaagttgtaaacactaaggaggcaaaggaataatttacagtactgtgataccaaggtgtatgtggctaagggtaataggatagaattacactttgcaaaatataatttgaaagcttaggatatattttagaaaagttaattgtgcacaaactgttttacatgcccagaatgttaatcagctgcatcctttcccaggtgatgctctatctctgcctgcacctctacctcatcaacaaacactcaaggaaaagcacttagctgaagtctaaatctcccaaaggaaatgctgccttagactttaggtcttaggattaggttctccttctttatcctcaaggcatagatacacactaattggctttctcccctctaagcctcacgtaggttgaggacccaggccaaggaaaagggagccagagttagaaacctggaagttatgctggtgtagcagcaaagaagtcctatcctagctctccctcaacctcctccaggtaaccagcactcttagaaggtgtccaagtgcagttactaaagccctagaagattatgccgtggtctcaaagaggatccaaagattatgcactgagaacttgaagaaattattagaaaccctgtgtattttgtatctcactcatttttattcctatttttatatattttacatttataatatattagtatagtttatagtaagttaatatagcagttcattattatttatatattattcgaaaattttaaaaaatgtgtatgtgaggtcctgtgaccaattattattattttaataaatctgcttttactggagagaagagagactcctggagattaaagaattctacctaccactaggcagtgtcagtaaatatcaaatgagatcaagtgtgtttgtttaagccctttggaaagttaaatttactatacaaatgtaaagaaggatccttattgaaaggattagaaggagggaaagtttagcattcctttccttagaaaaagacaatcacataaaaccatcttctgaatgtaaatgaaagatttagccctatatgtgaggcaaataccaaatcttggaaatgtaacttctccaaggaacatacttgggaaattgcagggggaatattgagaagaaagactgtagaaaaaagagaaaaagagaatctggaagatgcatagcgtgaggatagaagaagtattttgagatgaggtaaaatgagaaaaatgaggagaaagcaagctgtgatgctgctgcagaggataaagatagctgttataaaggcagagagctaagaaggagaagacccaagcactctgtttttcttttgttgtttttttgtttgtttttttagttgagastttttcttatcaaaagtattatccagtcacttgtacactcaaccaataggagataaacatatttttgcaagcaactttacgaaatgattgcataccaacaccaccagcaccacagctacacacatcacacatttatgtagtgccttctaagttaaaactacttgcatgcacatcattattacattggcttctggttgtgaaagacagagaagtaatctagcaaaacgaaataagtcttaaaatatgacacaaacacatataattatttttaaaaatgggcataagaagtaagccttggtgaaattttccaattttagtttatcttgtggactgtcaagactgaaaatgaaccggtctaaattcttcaccatttatgaacaaagtatagccattaaatactgtcttatacctctagagcaatgttagaacaaacaaaccatattttatatgagtgtttttaactcctgtctctgggccaatgtctcataaataagctaaaaaaggtttttgagtaaatgcaattgattgaggcatgtgcactgttggtaagatcagtttggcattttaagtctgacatgttatcaaattgctaa

SEQ ID NO: 79136 - DNA, 596 bp, Homo sapiens
tagaagaaagagaagcaatgccttaaagttctgaaggaaaatgctttttgaacctaaaattctatgcccagctaagctatcattcaaatgtaaggagagaagctgggcactatggctcattcctgtaatcccagcactttgggaggccaagacaggtggatcacctgaggtcaggagttctacaccagcctgaccaacatggtgaaatcccatttctactaaaaatacaaaaattagccgggcttggtagcatgcwcctgtaaccccagctacttgggaggctgaggcaggagaatcgcttgaacctggaaggtagaggtagcaatgagccaagatcgcaccattgtactctagcctgagcgacaagagtgaaactccttctcaaaaacaaaacaaacaaacaaacaaacaaaagccccccaaaaaacccaccaccaccaccaacaacaacaaaaatgaaaacaaaatgtaatgagagaatattttcaaaaatacaatgtctcaaaaataaatctttcatgagtttttccttagaagctaccaaaagatgtaattacagcaaaattagagaataagctgagacagaggaagacatg

SEQ ID NO: 79137 - DNA, 2280 bp, Homo sapiens
caggctccatcccatgtgactctgggcttagccccttctggggccacaggtcaggcaggtccaggccccaaggacctcccagtgacaggcgactgtgagctgggcagacaggagtgaagtcaggtgggggttctggcttgctgacaccagcgtttggagcctcctgctgctgcctggcttccctgcattccctgttccctgcctcaggcaagaaataaccaagccgagttgcctctgcacagcagtgagctcctggtggccctggcttctggggagccctgtggatggcttccttgcccaagtcmaggccttcttgttccctttgtgtgctccagagaaagggggcagcaccagatccagatccagggccaaccaacagaaagctgagtccatcccaaactcgcccattctcagagcacaaagaccccatgatctagggcaaacttgtccaactgttggcccatggaacagctttgaatgcagcccaacacaaatctataaattttcttaaacattgtgagttgttttttgttgttattttgagacagagtctcgatctgtcgcccaggctggagttagtggcccaatctcggctcactgcaagctccgcctcctgggttcacgctcgtctcctgcctcagcctcccgagtagctgggactacaggcgcccgccaacacgcctggctaattttggtatttttagtagagacggggtttcaccacgttagccaggatggtcttgatctcctgaccttgtgatctgcccgcctcggcctcccaaagtgctgggattacaggtgtgagccaccgtgcctggccaacattgtgagttttttttacgattttttttttaaagcttatcagctatcattactgtattccatgtatggcccatgtatggcctcagtgtattccaatgtggcccagggaagccaaaagattggacacccctgacctagggcatccccatcctctgccttcccatgcatggctgtacccaggtataggggtcctccacattctgctcaacacaaaagatttctccagccccaaccatggatcctggagctgggagtgtatggcttacccttagaaccaggagaggtgacagctagcccaagggcccaggcaggggctgggctgtggacacaatttttttttattttggagacagagtcttgctctgtcactaaggctggagtgcagtggagtgatcttagctcactgcaacctctgcctcccaggttcaactaattctcctgcctcagcctcccaagtaactgggattacaggtgcatgccaccacacccggttttgtttttttttttttttgacagagtcttgctttgttgcccaggctggagcacagtggcgcgatctcggctcactgcaaactccgccccccgggttcacgccattctcctgcctcagcctcccgagtagctggaactacaagcaccctccaccacgcccggccaattttttgtatttttagtagagacggggtttcatcatgttggccaggctggtctcaaactcctgacctcaggtgatccgcctgcctcagcttcccaaagtgctgggattacaggcgtgagccaccatgcctggcccctgccctgatttcaaagctgcaagctcagagcagacatttcacacccacctggagaagaggaggcagcccctgcccactggtacccataccctccctggggtggtgaagcagcctgggactggctgacctgagtgtgggatccacccccacaagttctcagtaaacctgacgggcgggtctagcttgtcctgacgtcctcagttcccgctgctggcggggcacaggcaacatgacagagagtcaggtgggagggggtccagacaaatgcctgggacagtcaggccaggctgaaccagcaggcccaccaggctggggccctcacaggagagcccctggggttaggtgaggcagagcagatggaatgtggagctcaggaagccccagccctgggccctactgagcaccctgagggatcctattctcagatactccagctgtggtgagccccaggtgtgtcagggtactgctcagtggcaccccatggaggctcaagttcaagacctcagaccctgcccagcgcagcctccacacacactcaagctgcttcgggcagtttattgaggttttcacgttggggtaggggaagtggcacacacatgctcttgctgtgtacacacagtgaaggacctctcccgcaggcaagcacatgcccacagcttgagca

SEQ ID NO: 79138 - DNA, 2280 bp, Homo sapiens
caggctccatcccatgtgactctgggcttagccccttctggggccacaggtcaggcaggtccaggccccaaggacctcccagtgacaggcgactgtgagctgggcagacaggagtgaagtcaggtgggggttctggcttgctgacaccagcgtttggagcctcctgctgctgcctggcttccctgcattccctgttccctgcctcaggcaagaaataaccaagccgagttgcctctgcacagcagtgagctcctggtggccctggcttctggggagccctgtggatggcttccttgcccaagtccaggccttcttgttccctttgtgtgctccagagaaagggggcagcaccagatccagatccagggccaaccaacagaaagctgagtccatcccaaactcgcccattctcagagcacaaagaccccatgatctagggcaaacttgtccaactgttggcccatggaacagctttgaatgcagcccaacacaaatctataaattttcttaaacattgtgagttgttttttgttgttattttgagacagagtctcgatctgtcgcccaggctggagttagtggcccaatctcggctcactgcaagctccgcctcctgggttcacgctcgtctcctgcctcagcctcccgagtagctgggactacaggcgcccgccaacacgcctggctaattttggtatttttagtagagacggggtttcaccrcgttagccaggatggtcttgatctcctgaccttgtgatctgcccgcctcggcctcccaaagtgctgggattacaggtgtgagccaccgtgcctggccaacattgtgagttttttttacgattttttttttaaagcttatcagctatcattactgtattccatgtatggcccatgtatggcctcagtgtattccaatgtggcccagggaagccaaaagattggacacccctgacctagggcatccccatcctctgccttcccatgcatggctgtacccaggtataggggtcctccacattctgctcaacacaaaagatttctccagccccaaccatggatcctggagctgggagtgtatggcttacccttagaaccaggagaggtgacagctagcccaagggcccaggcaggggctgggctgtggacacaatttttttttattttggagacagagtcttgctctgtcactaaggctggagtgcagtggagtgatcttagctcactgcaacctctgcctcccaggttcaactaattctcctgcctcagcctcccaagtaactgggattacaggtgcatgccaccacacccggttttgtttttttttttttttgacagagtcttgctttgttgcccaggctggagcacagtggcgcgatctcggctcactgcaaactccgccccccgggttcacgccattctcctgcctcagcctcccgagtagctggaactacaagcaccctccaccacgcccggccaattttttgtatttttagtagagacggggtttcatcatgttggccaggctggtctcaaactcctgacctcaggtgatccgcctgcctcagcttcccaaagtgctgggattacaggcgtgagccaccatgcctggcccctgccctgatttcaaagctgcaagctcagagcagacatttcacacccacctggagaagaggaggcagcccctgcccactggtacccataccctccctggggtggtgaagcagcctgggactggctgacctgagtgtgggatccacccccacaagttctcagtaaacctgacgggcgggtctagcttgtcctgacgtcctcagttcccgctgctggcggggcacaggcaacatgacagagagtcaggtgggagggggtccagacaaatgcctgggacagtcaggccaggctgaaccagcaggcccaccaggctggggccctcacaggagagcccctggggttaggtgaggcagagcagatggaatgtggagctcaggaagccccagccctgggccctactgagcaccctgagggatcctattctcagatactccagctgtggtgagccccaggtgtgtcagggtactgctcagtggcaccccatggaggctcaagttcaagacctcagaccctgcccagcgcagcctccacacacactcaagctgcttcgggcagtttattgaggttttcacgttggggtaggggaagtggcacacacatgctcttgctgtgtacacacagtgaaggacctctcccgcaggcaagcacatgcccacagcttgagca

SEQ ID NO: 79139 - DNA, 2280 bp, Homo sapiens
caggctccatcccatgtgactctgggcttagccccttctggggccacaggtcaggcaggtccaggccccaaggacctcccagtgacaggcgactgtgagctgggcagacaggagtgaagtcaggtgggggttctggcttgctgacaccagcgtttggagcctcctgctgctgcctggcttccctgcattccctgttccctgcctcaggcaagaaataaccaagccgagttgcctctgcacagcagtgagctcctggtggccctggcttctggggagccctgtggatggcttccttgcccaagtccaggccttcttgttccctttgtgtgctccagagaaagggggcagcaccagatccagatccagggccaaccaacagaaagctgagtccatcccaaactcgcccattctcagagcacaaagaccccatgatctagggcaaacttgtccaactgttggcccatggaacagctttgaatgcagcccaacacaaatctataaattttcttaaacattgtgagttgttttttgttgttattttgagacagagtctcgatctgtcgcccaggctggagttagtggcccaatctcggctcactgcaagctccgcctcctgggttcacgctcgtctcctgcctcagcctcccgagtagctgggactacaggcgcccgccaacacgcctggctaattttggtatttttagtagagacggggtttcaccaygttagccaggatggtcttgatctcctgaccttgtgatctgcccgcctcggcctcccaaagtgctgggattacaggtgtgagccaccgtgcctggccaacattgtgagttttttttacgattttttttttaaagcttatcagctatcattactgtattccatgtatggcccatgtatggcctcagtgtattccaatgtggcccagggaagccaaaagattggacacccctgacctagggcatccccatcctctgccttcccatgcatggctgtacccaggtataggggtcctccacattctgctcaacacaaaagatttctccagccccaaccatggatcctggagctgggagtgtatggcttacccttagaaccaggagaggtgacagctagcccaagggcccaggcaggggctgggctgtggacacaatttttttttattttggagacagagtcttgctctgtcactaaggctggagtgcagtggagtgatcttagctcactgcaacctctgcctcccaggttcaactaattctcctgcctcagcctcccaagtaactgggattacaggtgcatgccaccacacccggttttgtttttttttttttttgacagagtcttgctttgttgcccaggctggagcacagtggcgcgatctcggctcactgcaaactccgccccccgggttcacgccattctcctgcctcagcctcccgagtagctggaactacaagcaccctccaccacgcccggccaattttttgtatttttagtagagacggggtttcatcatgttggccaggctggtctcaaactcctgacctcaggtgatccgcctgcctcagcttcccaaagtgctgggattacaggcgtgagccaccatgcctggcccctgccctgatttcaaagctgcaagctcagagcagacatttcacacccacctggagaagaggaggcagcccctgcccactggtacccataccctccctggggtggtgaagcagcctgggactggctgacctgagtgtgggatccacccccacaagttctcagtaaacctgacgggcgggtctagcttgtcctgacgtcctcagttcccgctgctggcggggcacaggcaacatgacagagagtcaggtgggagggggtccagacaaatgcctgggacagtcaggccaggctgaaccagcaggcccaccaggctggggccctcacaggagagcccctggggttaggtgaggcagagcagatggaatgtggagctcaggaagccccagccctgggccctactgagcaccctgagggatcctattctcagatactccagctgtggtgagccccaggtgtgtcagggtactgctcagtggcaccccatggaggctcaagttcaagacctcagaccctgcccagcgcagcctccacacacactcaagctgcttcgggcagtttattgaggttttcacgttggggtaggggaagtggcacacacatgctcttgctgtgtacacacagtgaaggacctctcccgcaggcaagcacatgcccacagcttgagca

SEQ ID NO: 79140 - DNA, 631 bp, Homo sapiens
ataaagcaaggctcccgaaacccaggccatggcgtggggcaggcgcgcgggtccatgggggtcccattcactcagtcccctgtcgtcattagcgcttgagcccaggtgtgcagatgaggcggtgggtctggccacgctgtccccaccccaaggctgcagcacttcccgtaaaccacctgcagtgcccgccgccttcccgaggctctgtgccagctagtctgggaagttcctctcccgctctaaccacagcccgaggggggctcccctcccccgacctgcaccggagatctcaggcacccggctcawctcagacctcccgctcccgaccctacacagagattgcctggggaggctgaggagccgatgcaaacccccaaggcgacgcacttgggagccggtggtctcaaacacctgccgggggtcctagtccccttctgaaatctacatgcttgggttggagcgcagcagtaaacaccctgcccagtgacctggactgaggcgcgctgggggtgggtgcgccgtgtggcctgagcaggagccagaccaggaggcctaggggtgagagacacattcccctcgctgctcccaaagccagagcccaggctgggcgcccatgcccagaaccatcaag

SEQ ID NO: 79141 - DNA, 514 bp, Homo sapiens
acccaagttacagagaaaatctggcaagatgaagggaagtcataatgaatcaaaatgcaattaaaaaattctacctaaatgcattactcttacacaacagtaaccaaaatgataaatgattctatctttcccttactcaagcttactagttatgccaggacagagtatctaggccaccactgtgtacaacttatacaaaagcctacagacctggaacaaggatggatttacaaactgaggacaaggtcggaagaaaagtaaacacttaggtcaaacrgtatcaccagttgtgacctaagttaacaggcattcacaaagcataggattaactacctatgggaaactatcgccattttcatcagcaaacacccaacctacaacgagaccgagatctattattgatgaaattaaagagtctcttaatatggcacagaaaaggtcccacctacaatttaattaggaaaacataattggtcatgctgagaactaaagaagatactaaggggtagaattc

SEQ ID NO: 79142 - DNA, 654 bp, Homo sapiens
ttttaatagcatttgaatgcttacaaattaagaaaattaaatttccaaacaaaaaatgaattcttttacagacgaaattcttttctctgtcctgtgtgtctgtctgcctatcccagaatgaaacatccttgaaggcaggaagcacatctcattcagattatttcctcctctgagcctagccctgccctggctcacagcagatgattggcatctgctgaatgaatgatgggtgaatgaatgatgtgtccttcagaagaaaggctaaagtagggaggaaggaggcgatcaggcaggagggagggactaagaatcagaatcctcactgggctttgctgccataaaartcaaatgtgctctaagatgggaaaagagtactacaacttatttaaaggtataaaaaacaagcaaacgaaacaaacaacgatgccccactgagccacgtggctttcacagacacagagccttagaatagcatgcaaccttaaagacaccttgccctattgcttacttaatgccagagtccttccaacgactttcccaattaactcttgccccttgccgacattagcctctcccaggtgtggccattctatctttggctggttctgttggaaatttctttttgataaggtgaaatcctgtactctccatccg

SEQ ID NO: 79143 - DNA, 654 bp, Homo sapiens
ttttaatagcatttgaatgcttacaaattaagaaaattaaatttccaaacaaaaaatgaattcttttacagacgaaattcttttctctgtcctgtgtgtctgtctgcctatcccagaatgaaacatccttgaaggcaggaagcacatctcattcagattatttcctcctctgagcctagccctgccctggctcacagcagatgattggcatctgctgaatgaatgatgggtgaatgaatgatgtgtccttcagaagaaaggctaaagtagggaggaaggaggcgatcaggcaggagggagggactaagaatcagaatcctcactgggctttgctgccataaaagtcaaatgtgctctaagatgggaaaagagtactacaacttatttaaaggtataaaaaacaagcaaacgaaamaaacaacgatgccccactgagccacgtggctttcacagacacagagccttagaatagcatgcaaccttaaagacaccttgccctattgcttacttaatgccagagtccttccaacgactttcccaattaactcttgccccttgccgacattagcctctcccaggtgtggccattctatctttggctggttctgttggaaatttctttttgataaggtgaaatcctgtactctccatccg

SEQ ID NO: 79144 - DNA, 654 bp, Homo sapiens
ttttaatagcatttgaatgcttacaaattaagaaaattaaatttccaaacaaaaaatgaattcttttacagacgaaattcttttctctgtcctgtgtgtctgtctgcctatcccagaatgaaacatccttgaaggcaggaagcacatctcattcagattatttcctcctctgagcctagccctgccctggctcacagcagatgattggcatctgctgaatgaatgatgggtgaatgaatgatgtgtccttcagaagaaaggctaaagtagggaggaaggaggcgatcaggcaggagggagggactaagaatcagaatcctcactgggctttgctgccataaaagtcaaatgtgctctaagatgggaaaagagtactacaacttatttaaaggtataaaaaacaagcaaacgaaacaaacaacgatgccccactgagccacgtggctttcacagacacagagccttagaatagcatgcaaccttaaagacaccttgccctatkgcttacttaatgccagagtccttccaacgactttcccaattaactcttgccccttgccgacattagcctctcccaggtgtggccattctatctttggctggttctgttggaaatttctttttgataaggtgaaatcctgtactctccatccg

SEQ ID NO: 79145 - DNA, 835 bp, Homo sapiens
cttcatttgttgtcttttaaaacctgtgaatcacttaatagctgagctgggaccacaagtaatcagtgatctggtcaccgttttgattgtccaaattactaaatcaatgtttgtttcattttgttgttgttaacctatttcattttttaaatttagaaataatttttttatttccagaaactttttgtttttttgtttttttgttttttttttttttgctctttggcaattcctttgcaatatagtctaatatttcagtaaggtttacacaatgtttttgaatctcttgtttcttcccaagtctgaatcagcactccctagcctggctttggctagttttcgcttcaagccgctgagcctgctaaatggttcagggtctttcttttcctgtttgcaaagaaagtaggcaaagacttaatgcaggttgggatgttgagctcttgcaggccccatggagctggccgcttgggaaggaactgtttctcctgtgagtcagggcccagtggcctggcaagcaggggtctcttgactgaagcccctgaggagacacccagtatctcagggactttgggaggaccagttctctcccaaccacatgaaaagagagcagttcgacccagcacggcggttcctcttgagggggaccaagacctgtggaatcagcagcccrtgacctctggatcactgggctctggcctaggctttgccagaaagtttggcttcctcccaggtccttgggtgttctctcagtattgcaaataatgatgcaccaatgcaaccctccactggcccttgcctgcacttcctctcatgctcaaagctccagatgtgtttg

SEQ ID NO: 79146 - DNA, 750 bp, Homo sapiens
caggaatgcctggaggaaatgctccttctcccgaattcttctagcacttgctctctggattatgtgatttaggactgaattacaccctgccttgcatggtcctctaattgtttctcatgtttgtgttacgtctctcctctacccccgaccccactatgagttcataagcacccctgaccgtaacggggagatgaactggagccacaatgccttggctcagtcctgaccctgccatgtactgaataaatcattyaatctctcagtttcagtttctccaactgcaacaccgagataatggcaccacctcacagggctgttgctgggataataggtgtgaaagcgcctaaatcgttgtacaaatgtaaagtgctgttattatcacctctgctgaatctactagagcccctgcaagcctccctgcctggtggagtgtagacggtaactacctgattgattgaatacaggatagcttagtgacagctcttgtcataggctccagggagcacaggtttgagcctaatcctgcaatcactcccttcactgacaatgcaaactcgcctgcattttacaaatccgtaagtactctcagccttcagctgataaagcaggggctgctgccctgtgcgcaacaaaactgcgccctcaaaatgacccgaggctgtaccacagcgccctcgccaggcagcaccaggcggcacatgcttttacagaggtggtgatggttggggatgggttttccagggaccctcc

SEQ ID NO: 79147 - DNA, 563 bp, Homo sapiens
  misc_feature (1)...(563): n = A,T,C or G
ggatcctggctgaacagagtccaggtgaagcaggcttgagaatggattgatggggaggtggggatgtcacaggtctgatggcagagccgggggaagggaacagccaggaaggcttgcaggttctgctgtttggttgctgaagggggtcagtgtgtgtatgtgtcatggaggtgggcagggaaggggagggctgtgcgtgggggagaggatatatatgctggtgtggctgagaaagcggaaccgagcctcgcatccatcggagggagccggggactgacagctctcaggtaggcaactgcacggggcccccagcccgaccgcgactaactggactaactgmgtggagctccgggagggcagggccaccaggggctggctcctcggcctctctcctttgtccagtgtggatgctgctggcctcttgcgagatggtttcttcattcatctcctttgtagcgcnnnnnnnnnnnnnnnnnnnnnnnnnnnnnnnnnnnnnnnnnnnnnnnnnnnnnnnnnnnnnnnnnnnnnnnnnnnnnnnnnnnnnnnnnnnnnnnnnnnngtcc

SEQ ID NO: 79148 - DNA, 2419 bp, Homo sapiens
aattatcatttagaaaattaagttacactggccaccacttcaaagaaggagtcactttgagtaaactctgggtaaatcccctcaaaagagttcctataaatcaagtgaaaagttccattttggggaaaaagatgagaattttttaaatccccatatgtttagaaaaagtctaattgctttacagtttcacaactggttttaaaattttaatcagttaataaaagctcccttcagtgaacgrcctctgaaagccaaccaatcaatgacagtctcactctttgaaagacaggcaatcagcagtatactcactctagtgaaaaagcttccaaggcctaagtcaacccacccctatttcagtaatctacatgccaataaactaaatgacaccaggagtttgccttgctcagtcagactgggccagactaacatagctcttccttactttactttttcgatatcacataatgagtggtgatctcttctatcaatatagcataaaattctgtttaaactgtttaaaacttaaatttacttgaaccctaaaatgtattcataatagtaatttggggtttataatgtgggaaaagttagatcagtgctggcccagtgtccctacagcagaaagggacccatggacaaggtttcatatgtgaactaaaaaactgtatatgaagagctgcatcctttaagaccatgcacagggcaacctccaactgagacagtgcagtgtcctttcatggaatcaagctgaccttaactgcttgtgggtaaggtaggcctcactgcatcacagaacatcatttgttagatgggcagtcccatcttcaacactgacatgacatagtacagaaaagcaacagcagctggagactgggaggagcaggcttttatctctccctccatttggctggaaaggctagacaccatttgaaacatgtaaacctttaaggttttgagcaattcagcaagaaaaatgtcagaggtagatctttaagaggtaagttgtatacttcctgttactaagacatacaggttctcaaagaataaaaatataagagaaaataagaaatatgaaaatataagagataggtatgcatatcaatgttagaagttatttactacttatgaatgtgtaatttttctattttataataaagtttcatggcttctctgggtaccttctattgggaacatatttagatacattagaatttttttttcttttttttgagacagagtctcactctgtcgcccagactggagtgcagtggcatgatctcagctcactgcatcctctgcctcctgggttcaagcaattctcctgcctcagcctcctgagtagccgggattacaggtgcctgccaccaagcccagctaattttttgtatttttaatagagacagggtttcaccatgttggccaggctggtctcgaactcctgacctcaggtgactcacctgcctcgacatcccaaagtgctgggattactggcatgagccactgctcctagacaatacattagaattctacataatgtagcaattgttaaatatccatattatatttccccaccactaccagatccttgtttcacttctgtataatatttttggtgtgccagttctctttaatcttccctaggaattatgtacccacatacataaaaaagtataaataatagtataagcaccattagtataagtatcatagtcctaatttttcatggaccatagcagaaggaaacaatcaaaagttgtctaactttttattcacaatattttgatgttcatactataaaacaagtttgtattaggttgatttaccatgggatggcctattagggacaagggcaaataactagatctatgatctcagaaacacaacggaatgttgctatttttcttacagaaaactagatctctttattatattatgatctctttattacattattgtgccaaattttcttctcaaagttttggtattactgtcgataacatcctacaatataaccctacttataaaccattaatcaatgacgatccaacttatacaagaagactacttaggcattacccagttgataacagctattaaaaataaacacaaactacaaagaagacattacttttaatctgttaaatagcaaaaaagaatggcattactatagtagacattaacagttttattttatgatagaataagttataaaatacatttggtaattactatgttcccttcactgatgatgtatctagaaggtaataggcactcaaataaatgttagcatttacaattttttgttgttgctatgatttattctttttattgttactattatttaatccatagcctttgatgatatttcattcatttaaaaagttctattttttacataggtttttaaatttccataaag

SEQ ID NO: 79149 - DNA, 574 bp, Homo sapiens
ttttctcagaaagtctcaaagagacaaaaatacaaacactgcatggaatccttggataacctacaatcagatgcctattttctcacagctggaaaaacttggtctttctcttttattttgaatattttcaaacaaaagcaaacttatcagtgttatggcaaaaggcagagctatatgcatttggctctgaatgattgctgttatagataacaatatcagtgagctagagaagtggaatggaactgtagtacttaaacttttgttttctggatggtaagatgaagctactgtctcaccaacacagaaatgtgaacttcgaagtttttgtttgtttgtttgtttgttttttgagatggagtttcgctcttgttgcccaggctggagtgcaatggcacgatctcaactcactgcaacctctgcctcccaggttcaagcgaytctcctggctcagcctcccgagtagctgggattacaggcatgtgccaccacacccggctaattttgtatttttagtggagacggggtttctccatgttggtcaggctggtctcgaactggaactcccgacctcagg

SEQ ID NO: 79150 - DNA, 1546 bp, Homo sapiens
ctttgtaatttgaagttatctaaattgaataattattttcagaatgtacctttcatttaaaattattcatggtgttttacttgcatgtttcttatagttgtactaaatgatgtgtgttagtcatgtgacaccaactgacagattcagactatgcaggtaagcaattgatcttacaaatttattaaggtgtctgacatacttgtgtagaaacacaatagaatacaaaccttaattaatgtgtaggagttttttatgtttaaagaagtgttgtggctaggtgtggtggcttgcacctataaacccagcactttgggaggccgaggtgggaggatcacttgagtccaggaacttgagaccatcttgggcaacataaagagacccccaactccacaaacaaataaaaaattagctagatgtggtggcatgggcctgtggttctgctacttgggaggtagaggtgggagaatggctggagcctgggttttggaggctgcaatgagctatgatcatgccactgtactacagcctgggtgacacagtgagactctgtctcaaaaaaaagtgttgttccttaagtggttaattttaggggcctcattttaagcataaggaaatcattttgccttaaaagaagagaatagttttctcttattcacatttttatatacattaatcattatcccaacgatggtcaattaccagtttgttcctttttcccagctcattaactctgaggcttatttttttttctagattctaaatattcatcatgttcaaatcagctttgtgctgctttctctgaatcactttttattttagtttgagctttcaaactcctgtttcatacccggcatctgtctgtctgtctgtctgtctgtctgtctgtctatctatctatctatctatctaagaacatgaaactgctgtttgattgaaaatattgataaaggcaatcgagccaaacccattttcctctgcaggctacttcctgtactcaattgtcatgaacagcatggtgggctcactgctttcagtaattattaaactggttctttcctttcccttagaactctcactagggtgtgaggatagcattgggcttttatatgggaatggaaaattccagctgcattatgcatgtcatacaaagcagggcatcaacaccttttctggatctttcctgttttccttgatttaaagccattttttttaatgaggtcagtgggtatagtcaagtgacacaagaaagtttcttaatgatatagaaacagaattttaaaacctgtaacaacaacatcaacaaaatcaaaccatgtttgatatcctcattgcaataaaaaaaaatcaaaccaatataacaggttgttaaatcaaatgcacatttagaaattgttagttatttctgggaaaatcaaacgttcttaaaagtatttttgtctgtatttatgctctgtgatctcatttgtagggaattgctaagccatatacatttaccagaaggaaattcttttttttgtacaggttaaaamaaaactgtatttcagca

SEQ ID NO: 79151 - DNA, 1292 bp, Homo sapiens
cttcctgttaggcatctatcattgtcagcatcaattgaattttttctgaacttgtcatgtatccatcaatacttctgagcattgcctaccactgtctactcttctttcactattatgtttcattattatgccccacatcctactacctaaaatcccctgagacctgctttctctatttactgcaacaatgtcactgccactgcccaagtccaggccctagtcatatggctcacacattatcagcaatggccttctgccttgccccctccctctgagtcccatatcgccaaaaacatccgagaaactgttgcataaatgatctttctaagcaacatacctaatcatatttcagccctgatgtaaattcaccagaggcctcctcttctcctgtctcgtctcatacaccctagcttgagtgtcccgtgcatactctccatcctagcgcatggctttgtggacagactctattctggtctcatcacctccatgcaccattctctccagctttgcttcaatatttgctgtttcttactcattggcctttatacaagctatttacacaactagcatgccctttcttctccttcatccagcagctgacacctactccgacatcaratctaagaacagctcacctctttcataagtttttctcccactggctaatttaaatgattacaggcttacatgatatccaagtggataagcttattataagttttcctcactgctttgtatttactactttatttctctggcttacaactaaatagtcaaaaagtagttggtagagggaataaagggtaaacaaatgaatgagaatcttgtcatctctcctcccttgttttgctttaatttattttcaaattggagaaaggaaaaaaatgattccttaaaaacaaaccaaaaaatgcccttaaaaaagagcagagaaattctacccctcgaatcccaccctactctagaaagctgagaaaatgtaagtgttcattgtttggaggaatacgctcttccttttcctgtctccagtggctccttttcctgaagaaggtcaatggaccacatggggccattcaaagccagccaaggtcacatggacggggtttgttggcttcatctcagaggatctctggttgagttgaataaagttgcaactttatacatttggctcatgcaaagcctttttaaaataagactcttccatctgaatttcaaaacttgtgcatataggacttccccattccctaaaggctcttatttctagtggagctacgacatcacttgtgctcaca

SEQ ID NO: 79152 - DNA, 592 bp, Homo sapiens
tgatcctttctttcagctgtgctgaaaaataagggggagctgtcaatctgaaaatttttgctcttcatttttgtaaaattttattttcatttttcttttatttattccctttcatatttctataatcttcttctcgaactcattctttgaataccctgaactaatgttttagttttattatattatttttttctattgcttatatgatatgctttctaggagatgttatcaattttgtcatccattctttctatttatttttttatttcaccatttaatttttaatgtctgagaggtattttctattatctataggggaaaaagttctcagctctttttacatagatgcagtaactacttttatrtttctaagtgtgtgtacacacataacgtacacatacacacccgcactcagagcagctgccatcagtggatggctgagacaggaccataaggtctggagcccttgtcttatcataggacaaattctgcaggaccatcttaactccagtactccctgtaggacatttttggaaggacaccatctccctagagccactcctactttcttcactccctcctctgctggcgt

SEQ ID NO: 79153 - DNA, 736 bp, Homo sapiens
cagcctcgatccagctgtatttttatctctagtttttaatctccagtttttatctctagtttttaatacagcctcacactgttcctatgaaatagactaaagatatgcaagaaacacactagtaagcgaatctctggaaacagaatcctccaccttcctttccatgtgttttgcttctctgaccatctcaatgccaaaatacaaaaattagccaggcgtggtggttggcgcctgtaatcccagctacttgggaggctgaggcaggagaatcacttgaacctgggaggcggaggttgcagtgagccgacatcgtgccattgcactccagcatgggcaacaagagtgaaactccacctcaaaaaaaaaaaaaaaaaagtctataaaagattcaggaggatgcagtaaggattagtgtctccacaatgtgcatttgaaccctagaaaacaagtgccttagaaagtccacgtggtgaagcccaggcgatcattcctggcacattccaattgcacacttctggtggtgacctcggaatccytgtaagcctctgactccaaatggtacagtaagtgaaagatggcaagactgagaaaagatgagttattatgtttcgccccatcattagttcagggtactcctgggtgtgcctgacactcatttccctgcttgtgagttttgaaagtcttgaaactcacagcagagaacatcagcaagacggaaagggaaagctggaaagat

SEQ ID NO: 79154 - DNA, 2141 bp, Homo sapiens
ggatccctttacaatagcacaaatcacactgcattgaaaccactggtttgcttcagtcataatcctccgtacgatggcaggcatcttgaggacagggaacacccctgggttcctggttcataacaggagtgcaataaatatccactagatgacagaatgaatgaaatctaaaagttcatataaactgtcagtgagcaaattcgagaagaggatcagaattaagacctacactggaacagcctccatcctcgtgctaacctaccacaagtcccattatctctggtggaaaatgtgttcactcttacgtgtcagtacaagcggagaaagcgaaatgctcttttcttatttattcggaactctaagaccatgctgtacatctttaagtggaacaaagttaatgcatgaacagccaatcagactcaaatcatagatctcttcacaaagtagtacaaatctgatgattttattgggggaaaaatgagacaagaaagcattctcttttatcacaattattccaatactttaggtgaaagggtttttgtgtgtctgggaaagactgaaatggtgggatatttctggagcgatatttttaacacagcataaattaaacgtttttgtacccacatcattcattatatgatgtgttattccaggttgacgtcttgccagtctattattttgcaaaccattacattatcacagctgctaagctgcataacttaagaattcggaatacaacagagtctctatcgttgagtgtgtgctgcttacattctgaatgtattcatgcagggaagtgtgagacgttaccaaaaacacatacagcagacggctttcagtggatatttattaccattgagcgcaggcagccaagaactgttcagacagatcagtgtattcacacatattattagccagccccctcatcctgcatggggttttgttccttctataaatatacgcctctctggagaaaaagaacacagactactggggactccaattctctggttcatagaatgcattgaaggccattttccctgcattggttaggcccgtgcaattttaagtgacccaaacttggtgaaccgatatttattttgttttgtatagcagcttatgtcatgttaagccattgacttctcatcttgggtagaatgacattgcttattggctcagtgtggggaaggaaaggctgtctctatgggtaccactccagagttttcattcctcaagctggtgtggaaagcaggattgcaaatatctatgcaaatggtcaggactcccaggcgtttcagcatcctatgcaaaatggcagctctcaggctgggcctgaaactgagctatggttctcttctttgaatagcttgtcccctcgtcatgcctcgccatcatgccatgggtcatgttaaaacaatgcttttcaactttggtgttgcattggaaacactcaaggagcttttaagaacccatctgtaccccagactatgtacatcagaatctytggggataggatccaggcatcagtatttaaatccccaggtgattccaacctgcagccaacactgagaacagctgccccaaggaaataatattaccaagatcgatgatttgggcaagatgctagcataaggaaaccagctagtttttgtgttttctggtgactttacataaaagagaaataaatgggttggttgggttgggtttttgggtcatgtcattctcaataggggaaaaaaactatttaggctccttgaaagttgggtccatattcctggcacatcctatgcagtgtccagcacattgaggagagtctctggatagttacctgaggccttccgaagtcatagagtctagaattgtgcatgacttccttccaggctatttaagatcaaaaacatccaatctagcttctcctgtatgcttcttttcttgactggtgcatggacaaagtcccttttgtgtgtctttcaatctgccatattgcaaatatgtacacaaagtcaatcgtgttctcaaggagaaaggggacatagctttcttctctttttttttttttttttttttttgaggtggcgtcttgctctgtcacccaggctggagtgcagtggcatgattttagcttactgcaacctcctctt

SEQ ID NO: 79155 - DNA, 761 bp, Homo sapiens
aacacacaaatagaacatactttacaactataaattgtacttcactgtccggatctggaatatttcctttttctttactttttttgaaacagtctcgttctgtcatccaggctggagggcagtacactctgcctccagggctcaagcgattctcctgcctcagcctcctgagcagctgggattacagatgggcaccaccatgtccacctaatttttgtatttttagtagagacgggggtttgccatgttggccaggctggtcttgaactcctgacctcatgtgatccacccaccttagcctctcaaagtgctgggattacaggtgtgagccacctagccyggaacatttcattaaatcagtcttctattgatggatatttgaatatgtcactaattcaatgtgaaaatgtttttgtacatctgtcaatgtatctctaaggtagacttctaggagtagaattgttggctcaaaagtcatgtgtatttaaaaaaaaaattagacattgtcaattttgctccccatggaggttataccaatttatatccccagtatagagagtgtctgactccctccactcttatgttacagtgagggtgtgtaccataaaactttcaaatcttgggcactgtgatgggtaaaaaatggcatctcatttttatttcaattgataatctcctttcataagccaaaatgctgtttcacaaaatttccccaagaccaattcccttttttaaaccaagctttcattgatccaaatgga

SEQ ID NO: 79156 - DNA, 2051 bp, Homo sapiens
tttttcaaggaaaaccaaaacaatttaattcttgatcatttccaccagttccaccccgagagattcccaaacaaatacaaattaagtaaaaccctggctgttctccttcccagtgggattactattcgtgagctccatctaagtagacctttagaagccctcagtgttcaaaagtagttggctcttgatcaaaagctcaaattctcagttgattcccacagtgctttggtggtagattagcatatggcgggagagacagaacccaaattactggtggctgatgcaaaaactggcagctaattgtaaacctccaaacaaagtattatttactcactgaaacaaagaaaagtgctttcaaggagaatgaaaatatcccttatgtcatgtcagattcaagaatatttcatgaacaaagtaaaaattgagctgttaggttgtttgcaaatactgtccacatcaaggaagaacaatttgaaaatgtaagaagtgagagttttgctttccatcctattgcaaaaatatgtttccgtgtcaatttaagaaagtactgttgcaaacgacagggtgagtgaaatggaagcacaccagtagaaatgcaaacacatcttcctttactgacaggcacctacagccttaatgaatgcctgaaaaaaactaaaacaaacaaatgtgcagacttgacagagaaatttaatgaatttactaattgttcttccttggtgcaagcctcttttttttttttttttttcaaccacatatgttgtagataatcagagaaaaggccaagcccacaccatatgtaggcactaaataatatgcagggcatcgctctttaaaacatacattgccataacgaaatgatgaaaggggaacagcaaaaatagcaaattgagaatcaaagcccaactttccacatgtggaaacgtttggttgggtcatggtagaatccatcagtccaagattggttgtatgagctgtttgtgaagataaaaatgaatcattgaaaacccaatctcattttagaggaattgtcctttattaggagaatggatcattgatgtcactataactaatcatgtggacagctgatagagatgcattttcaaaatgattattctagaagttctgtttcaaaagcatattttctataaagaagaaaacacacaaagcgttctacgtaattacaaaccctattctaggttggtaggtgttcttatatattagctcacatgttttcttatagagtgtgtgagaaattcagtatctataggtcattgcaggcctggctctgtggtctccagacagccagtgttagagcattaggttaggactgctttgcaggttaggaaaaggactctcctcaaattcctaacacatggatgttcattctagccactggtccatatttcctttctagaagcagcagtgatgggtgaaccactgatmattataaaaccatgaaacattcaagggcattcatgcttggaggaaggtgggatgtgccctgtgaccctcaacacagccaacccagaaccagagaggagaggaccaggtgtgttatcttgttggtgctttgtcaacaggcattagaaaaaaaaaaaaaacagaaacaaagtccacaactctgatgactctgatgacggacgcggtttctacaaatagaccaaagaaaaccaaaacaaaaaacatcaaacaaacaaacaaacaaaaaccaaaccaaacacaatccccctccccacgaacaaacgaacaacatctaacttaaaaagaaaaatttaaaacaggtttacatatgccatacatatgtgttttacaactttggggccagaagcaatttatggtaagtcaataattcagattgttggtcttatttattttatttttcctatagttttactgcacagccaggagtggcgtggagctggaggcagggtgggggtgggtggggaggcaatagagaggacagaggtcgatttgtcatgaaaccaatgaagcttaaacttcagggttcctcacttcatgggatcttccaagtctctgggatgattcct

SEQ ID NO: 79157 - DNA, 2051 bp, Homo sapiens
tttttcaaggaaaaccaaaacaatttaattcttgatcatttccaccagttccaccccgagagattcccaaacaaatacaaattaagtaaaaccctggctgttctccttcccagtgggattactattcgtgagctccatctaagtagacctttagaagccctcagtgttcaaaagtagttggctcttgatcaaaagctcaaattctcagttgattcccacagtgctttggtggtagattagcatatggcgggagagacagaacccaaattactggtggctgatgcaaaaactggcagctaattgtaaacctccaaacaaagtattatttactcactgaaacaaagaaaagtgctttcaaggagaatgaaaatatcccttatgtcatgtcagattcaagaatatttcatgaacaaagtaaaaattgagctgttaggttgtttgcaaatactgtccacatcaaggaagaacaatttgaaaatgtaagaagtgagagttttgctttccatcctattgcaaaaatatgtttccgtgtcaatttaagaaagtactgttgcaaacgacagggtgagtgaaatggaagcacaccagtagaaatgcaaacacatcttcctttactgacaggcacctacagccttaatgaatgcctgaaaaaaactaaaacaaacaaatgtgcagacttgacagagaaatttaatgaatttactaattgttcttccttggtgcaagcctcttttttttttttttttttcaaccacatatgttgtagataatcagagaaaaggccaagcccacaccatatgtaggcactaaataatatgcagggcatcgctctttaaaacatacattgccataacgaaatgatgaaaggggaacagcaaaaatagcaaattgagaatcaaagcccaactttccacatgtggaaacgtttggttgggtcatggtagaatccatcagtccaagattggttgtatgagctgtttgtgaagataaaaatgaatcattgaaaacccaatctcattttagaggaattgtcctttattaggagaatggatcattgatgtcactataactaatcatgtggacagctgatagagatgcattttcaaaatgattattctagaagttctgtttcaaaagcatattttctataaagaagaaaacacacaaagcgttctacgtaattacaaaccctattctaggttggtaggtgttcttatatattagctcacatgttttcttatagagtgtgtgagaaattcagtatctataggtcattgcaggcctggctctgtggtctccagacagccagtgttagagcattaggttaggactgctttgcaggttaggaaaaggactctcctcaaattcctaacacatggatgttcattctagccactggtccatatttcctttctagaagcagcagtgatgggtgaaccactgatcattataaaaccatgaaacattcaagggcattcatgcttggaggaaggtgggatgtgccctgtgaccctcaacacagccaacccagaaccagagaggagaggaccaggtgtgttatcttgttggtgctttgtcaacaggcattagaaaaaaaaaaaaaacagaaacaaagtccacaactctgatgactctgatgacggacgcggtttctacaaatagaccaaagaaaaccaaaacaaaaaacatcaaacaaacaaacaaacaaaaaccaaaccaaacacaatccccctccccackaacaaacgaacaacatctaacttaaaaagaaaaatttaaaacaggtttacatatgccatacatatgtgttttacaactttggggccagaagcaatttatggtaagtcaataattcagattgttggtcttatttattttatttttcctatagttttactgcacagccaggagtggcgtggagctggaggcagggtgggggtgggtggggaggcaatagagaggacagaggtcgatttgtcatgaaaccaatgaagcttaaacttcagggttcctcacttcatgggatcttccaagtctctgggatgattcct

SEQ ID NO: 79158 - DNA, 1930 bp, Homo sapiens
gtcaccaacccaacgcccagcctttaaatgttttacctatacttacagcggtgttcctttaaatatgatcaccgataaagaggggtgccttttaggtttagacccgcctcaaattgagtaacaaatcagctctttcacactcaggctgcgttttggttaactgcagcagtgatgttcattatccttcgtgagtaagccctgaggctctttgggcatcagtgctcataaattaatatttatgatgaagattaataaaactgaaatgaaaaaaagggacttaaaattaaaatttaaaaagctcttcaatctctaaatccatttccagtgagagggatggaagaacagttagtaccacgtgtgttcgcaagcatttatcagtagacaaatctcttaattgtaaccattatattgtgaacgatccactaatccttcaatttcattcttcactgtttctcatttaagcaattcttgcattttttctatgcctagttcctcagttaaagaaggaaaataaacttcttgtgaaaaaatttacttttcctttgtattcttatatacccacatgcttttctgtttatcctttttgttaaatatgaaagaaaytgaataaaaagtctgaaaaaggaatttaagagaaacctgtgctatttatttgcccctaaaccaccactacagataatcttctaatttttaaagaccttcaaataatagaatagcattgaatgcatttcattattaagcactctcagtattagaagttttccttgtgttcagaaagcattcttgttgtgttttttgttgttgctgtttgtttgtttgtttgtttgtttttgagacacagtcttgttctgttgcccaggctggagtgcagtggcatgatctcggctcactgaaacctctgccccccgggttcaagcgattctcacacctcagcctcccgaatacctaggactacaagcgcacaccaacatgcctggctaattttttgtatttttagtagagatggggtttcgccatgttgcccagggtggtctcaaactcctgagctcaggcaatccatccacctcaacctcctaaagtgctaggattgtaggcatgagccactgtgcccagactcttattgtggttttatatgaactactttttgctctgttcttctattgcctcaatagagtatactattacatttttatccagcacaaaatcctggcaaggctttatacagggcacagaagggttaacagtgatcctccactgggggtgattttgcacctctgctctccagccagtggaggacatttggcaacatcaggagatatgtttgattgtcacaacatggaaggtgctaccagcatcagttggtagaggccagggatgctgttaaacatcctggaatgcccagagcaacaccgtcctccccaacctccaacagagaaagacctggtcccaaatgtcaatagtaccaagtaccaatagtccaaggcaacatcatgagatatgtttgattgtcacaacctggaaggcgctaccagcatcggttgatagaggccagggatgctgttaaacatcctagaattcccagaatagcaccatcctccccaccctccagcagagaatgatctggtctgaaaagtcaatagtaccaagattgagaaacccgagggttaagaggaagtggcagctacacggtaaggcaagaccattgaaacagctgcagggaattcaacgccagtatcaaccgtatggttcacattattctaaattgcctgggattaatcaatgtagggtgagattagggagtgaaaccatcctggagagcgtttaaggttttgaaaattgttaaccacatgattttagttatattttggatctactttttattttatggtgagattaccaatgcaattttcctctatttttcataaggtaa

SEQ ID NO: 79159 - DNA, 1930 bp, Homo sapiens
gtcaccaacccaacgcccagcctttaaatgttttacctatacttacagcggtgttcctttaaatatgatcaccgataaagaggggtgccttttaggtttagacccgcctcaaattgagtaacaaatcagctctttcacactcaggctgcgttttggttaactgcagcagtgatgttcattatccttcgtgagtaagccctgaggctctttgggcatcagtgctcataaattaatatttatgatgaagattaataaaactgaaatgaaaaaaagggacttaaaattaaaatttaaaaagctcttcaatctctaaatccatttccagtgagagggatggaagaacagttagtaccacgtgtgttcgcaagcatttatcagtagacaaatctcttaattgtaaccattatattgtgaacgatccactaatccttcaatttcattcttcactgtttctcatttaagcaattcttgcattttttctatgcctagttcctcagttaaagaaggaaaataaacttcttgtgaaaaaatttacttttcctttgtattcttatatacccacatgcttttctgtttatcctttttgttaaatatgaaagaaactgaataaaaagtctgaaaaaggaatttaagagaaacctgtgctatttatttgcccctaaaccaccactacagataatcttctaatttttaaagaccttcaaataatagaatagcattgaatgcatttcattattaagcactctcagtattagaagttttccttgtgttcagaaagcattcttgttgtgttttttgttgttgctgtttgtttgtttgtttgtttgtttttgagacacagtcttgttctgttgcccaggctggagtgcagtggcatgatctcggctcactgaaacctctgccccccgggttcaagcgattctcacacctcagcctcccgaatacctaggactacaagcgcacaccaacatgcctggctaattttttgtatttttagtagagatggggtttcgccatgttgcccagggtggtctcaaactcctgagctcaggcaatccatccacctcaacctcctaaagtgctaggattgtaggcatgagccactgtgcccagactcttattgtggttttatatgaactactttttgctctgttcttctattgcctcaatagagtatactattacatttttatccagcacaaaatcctggcaaggctttatacagggcacagaagggttaacagtgatcctccactgggggtgattttgcacctctgctctycagccagtggaggacatttggcaacatcaggagatatgtttgattgtcacaacatggaaggtgctaccagcatcagttggtagaggccagggatgctgttaaacatcctggaatgcccagagcaacaccgtcctccccaacctccaacagagaaagacctggtcccaaatgtcaatagtaccaagtaccaatagtccaaggcaacatcatgagatatgtttgattgtcacaacctggaaggcgctaccagcatcggttgatagaggccagggatgctgttaaacatcctagaattcccagaatagcaccatcctccccaccctccagcagagaatgatctggtctgaaaagtcaatagtaccaagattgagaaacccgagggttaagaggaagtggcagctacacggtaaggcaagaccattgaaacagctgcagggaattcaacgccagtatcaaccgtatggttcacattattctaaattgcctgggattaatcaatgtagggtgagattagggagtgaaaccatcctggagagcgtttaaggttttgaaaattgttaaccacatgattttagttatattttggatctactttttattttatggtgagattaccaatgcaattttcctctatttttcataaggtaa

SEQ ID NO: 79160 - DNA, 734 bp, Homo sapiens
tgtagctggtgaactgtatggtcttgaataagatgtctggaccttctctttcttcactcagcaacatcttacatattggaaggaaatgaaaacaatacttacagaaatgttctcaagactttggagagtaaattttagaataaaatcttagggataaatatgttccagaatttcaaaacaggaaaaatttagttagattttttaaaataaatatatttgttgtcctgaatagatgtaacctaaattaaacctcaggatagcatgttttgtatatagtgagcatttggcaaattattttctcccattctataaacttttggaaaaaataaatgctgagtgcgtaattaatgagttttatacaggcttgtaaaatctgctgcactgccctgctcagggactggtttatggaacaaggctcttttgaggcctacctattattctgtttctccatttcacgtttctccttcatctttctacactttgaggtttttatcttactctatgctctcacttttcatttcttgtcccgttttttgtttatgtatactatttatgagtttctttctctgacctactacattattagctattcaaggacacaacgtatatcttagtgtcttattcatttatatttcctcagacctggtaagtttaaaggaactcctggaagtaagcaagttatctaaaaaccacagtgtaataawagcactcctttacctaatttttaataatgt

SEQ ID NO: 79161 - DNA, 1326 bp, Homo sapiens
  misc_feature (1)...(1326): n = A,T,C or G
tggtgcatttatgcacagataaaatgattcttaaagttagaaatccctaggcttgcaaaagatcagtgctttcaactaatataagcttttcattttataaactggggaagtaaaaattaattattataagtaattcaaggaagtcaactagaaactaggtgtttgattgtcaagttaaccaagtctagttttcataagtgagccctaccattttcctgcaaatgtccagatagaggctgcctcacattgcaaaactacttgggtcttgcagaaaaactaacaattaataatttaataggtaaggcatggtggctcatacctgtaatcccagcactttaggaggccaaggcaggcaggtcaagaggttaggagtttgagaccagtctggccaacacagtgaaaccccgtctccactaaaaatacaaaaattaactaggtgtggtggtgtgcacttataatctcagctactggggaggctcaggtaggagaatcacatgaaccagggaggcagaggttgcagtgagctgggatcgcgccattacactccagcacaggtggcagtgtgagaatccatctcagtaataatrataatcataataaatttattgagcatggccaacatcagtaaatatgagtgtaccgaataaaagttttccattcattcatccacgtattcattgcaacacatctattactaatggttcattatttgctaaatccccccgtaggctttagggaaaaggatgaggcctggcatcataaaaaattttcaggccgggcgcggtggcttacgcctgtaatcccagcactttgggaggccaaggggggcggatccccaggtcaggagatcgagaccatcctggctaacccggtgaaaccccgtttctgctaaaaatacaaaaaattaaccgggggtggtaacgggcccctgtagtcccagcccctcgggaggctgaggcaggagaatggcgtgaacccgggaggcggagctttcagtgagccgagatcgcgcccctgcactccagcctgggggacaaaacgagactccgtttcaaaaaaaaaaaaaaaaaaaaaaaaaaaaaaaaaanaattctcagtgaatatgaaatggttgtaaaatgaatcaaagaaaggatttctgcctttaagaatatccaagcaaatctgtaaacttataacaggaacacaataaattatatgtgaataaatgaaaataaaaatgttattgaattagagaaaaataaaacttgaatgtgaacaggttagaatcaacaaaagaggggaggttagtaaaaagagtattaacaccaaagtagaaattgctag

SEQ ID NO: 79162 - DNA, 1326 bp, Homo sapiens
  misc_feature (1)...(1326): n = A,T,C or G
tggtgcatttatgcacagataaaatgattcttaaagttagaaatccctaggcttgcaaaagatcagtgctttcaactaatataagcttttcattttataaactggggaagtaaaaattaattattataagtaattcaaggaagtcaactagaaactaggtgtttgattgtcaagttaaccaagtctagttttcataagtgagccctaccattttcctgcaaatgtccagatagaggctgcctcacattgcaaaactacttgggtcttgcagaaaaactaacaattaataatttaataggtaaggcatggtggctcatacctgtaatcccagcactttaggaggccaaggcaggcaggtcaagaggttaggagtttgagaccagtctggccaacacagtgaaaccccgtctccactaaaaatacaaaaattaactaggtgtggtggtgtgcacttataatctcagctactggggaggctcaggtaggagaatcacatgaaccagggaggcagaggttgcagtgagctgggatcgcgccattacactccagcacaggtggcagtgtgagaatccatctcagtaataatgataatcataataaatttattgagcatggccaacatcagtaaatatgagtgtaccgaataaaagttttccattcattcatccacgtattcattgcaacacatctattactaatggttcattatttgctaaatccccccgtaggctttagggaaaaggatgaggcctggcatcataaaaaattttcaggccgggcgcggtggcttacgcctgtaatcccagcactttgggaggccaaggggggcggatccccaggtcaggagatcgagaccatcctggctaacccggtgaaaccccgtttctgctaaaaatacaaaaaattaaccgggggtggtaacgggcccctgtagtcccagcccctcgggaggctgaggcaggagaatggcgtgaacccgggaggcggagctttcagtgagccgagatcgcgcccctgcactccagcctgggggacaaaacgagactccgtttcaaaaaaaaaaaaaaaaaaaaaaaaaaaaaaaaaanaattctcagtgaatatgaaatggttgtaaaatgaatcaaagaaaggatttctgcctttaagaatatccaagcaaatctktaaacttataacaggaacacaataaattatatgtgaataaatgaaaataaaaatgttattgaattagagaaaaataaaacttgaatgtgaacaggttagaatcaacaaaagaggggaggttagtaaaaagagtattaacaccaaagtagaaattgctag

SEQ ID NO: 79163 - DNA, 635 bp, Homo sapiens
acccccatgacccaaagacttcccagtaggcccacttccaacattggaggtcacatttcaacatgagaactgaccaagataacacatctaaaccatatcaacattattatgggaataggtttttcatgctgggaaatccacaggatgggatactgtttatcagataaaatgataacaagatccaaatgtatctacttggataggtccccaaatatagagtcaagtgaaaaaaggcaagctgtgtaatgatactttcctgtgtcccttttaaataagatgtacaaatagtcaaaaatagacaaaataattaaatctcaattataaatataaaaatatatagaaaagacagggggaatgcacacagacttcaaaacagttatgcytccgaagagggaaggaggtaattttatggggcagagctgtgaaggggacttcaactggatctatgtttcatttatctaaaaatatctggagccaatatattagaaggctagccttgttaattttattggtaggcaaaagaacatatgatatatttgtctctgtaactgtcattttgtgtgcaatagcttttaatgtttaaaaaggaaatcgccagtccaggtggtactcacctgtagtcctggctgctcaag

SEQ ID NO: 79164 - DNA, 635 bp, Homo sapiens
acccccatgacccaaagacttcccagtaggcccacttccaacattggaggtcacatttcaacatgagaactgaccaagataacacatctaaaccatatcaacattattatgggaataggtttttcatgctgggaaatccacaggatgggatactgtttatcagataaaatgataacaagatccaaatgtatctacttggataggtccccaaatatagagtcaagtgaaaaaaggcaagctgtgtaatgatactttcctgtgtcccttttaaataagatgtacaaatagtcaaaaatagacaaaataattaaatctcaattataaatataaaaatatatagaaaagacagggggaatgcacacagacttcaaaacagttatgcctccgaagagggaaggaggtaattttatggggcagagctgtgaaggggacttcaactggatctatgtttcatttatctaaaaatatctggagccaatatattagaaggctagccttgttaattttattggtaggcaaaagmacatatgatatatttgtctctgtaactgtcattttgtgtgcaatagcttttaatgtttaaaaaggaaatcgccagtccaggtggtactcacctgtagtcctggctgctcaag

SEQ ID NO: 79165 - DNA, 785 bp, Homo sapiens
actttatttgatggtaactcttttgtatgcacctctattgagttgttctgaagtgttcaacccactttcattgtaacaaaaactgtcctttcttagtaatattttattagcttataaaatacttactcaaattatacatctacactaagaactgtaactggcataaataatttggtaagtaacccaagtgactctgaaaacatacaactccactcactggagcacaagtacatgaaagtactagcacctgatatcgatcagaatgttttacagagggaatgagggacagtatttaatcctctaaattggttagtcaattggttaagtggaagctggttaaaataattctaactgaacactaacccagtcttcttagagattccagagttttctctctagaaaatgtacctcagtattacggtcccctcctgaaagcccgttaatggcctcaagataaaaccaagctccgtggacagaatgatatttgagagatgaaatttaacttgtcaaggaacacttcccttcaggttatttttgattgagttctgaatattttagaggaaaatattaattatggaaataatgcaggcttggattgattgtttcctgctccaaggagaatttagatttgcctctggcagtggctaggggcactagcaatgaaacttcacattaggcygtttatagtgattgagtccctaggacaaaagactatttctggttcactgtcccatcttgaatggaggccttaaggtccccagttcaaagcgtgtatggtttactgt

SEQ ID NO: 79166 - DNA, 1035 bp, Homo sapiens
tgtgtgtgtgtgtgtgtgtgtgtgtgtgcatatgcacgctcatgtgtgcgtggaaaaaagagaagaaatggtaaagtaaatggggcaaaatgttaacaacagtaaaatatggataaaggacatatggctgtcttttgcactgtttttagtctgtgatttttcttcaaatttattttcattttttaaaaaatatttttgagttctggcactctgaagatttaacaaaaggaaaaaaatgtggatttttttttcagctgccgtaaaaagtagaagtaattctttaatagaagaaaattcccatagacttgcatagaaattatttaggagttaattttcccattatattgttctcctttgagaagcttccagtgatttcaaacactacagtgattaaaaactcaattggctgaagccaaaaatcacattaataaaataaaaatcaaacttaaaatttaaatagtcaaaaggaagaacatggaaaacacatgcttaattgttacctgcaagtatagttaaattggaattatttggtcaaacatatttacaaatgtcacagagagaaaatgaccaatacaattttgagaactacataatggtttaaatgcttcagaagtataatttttaaaagttattttaaatgataaaacattcaataactttatagaatctttcattattaaataaatgactgtatttttctcttaaaaattttttaaaagcttttttttcttaattttgagtttctggtgattacatttcaaaagagcaatgtgaaccttattgcctcagactatcctctggtacatgtcagcatttttcactgcagcagctcttggcccattcatgtgttcttcctaaagccattatcttaagattctgamatgtaagggacgcattctgggtgcatacttcattgcagtgcacagagggtaaggtaaaggaagataaattgtgtcctcaatcaggctagcagtgcttggtacttgggtcatcttaagttgcttggaacaatgatacctaccacatcatgcacca

SEQ ID NO: 79167 - DNA, 1058 bp, Homo sapiens
catatcacaccactgtccttagcatttgcctccaaacagaataaaaacaattattgatagaaacagcctataaagcagatactggctcaatccctcaacacgttctatatagaggttacattctaggtttcatttagtttgtgaagcccagaaagggcacccccaccccaccctagcagtaagcattaatcacactgaaagtgctaaatccagtaacctctaagtgcacttaagtcccactcaaagttaagggaaattatgtgtatacgagaagtagaaggggaggagaaataagaaagatgccttgctatttcatgaaaaagtcaggaaaaagaccacaaaggttcaattcccgagaaaattgtcacccatttgctgtcactttttcatcttcataggaatttattggattaggaaagacctttgctactccacattatcccaagctcccagttgcctttgcattagttaatgtctgcacttcctggttaattgtggcagactagcagcaggctgcacasatgtcagatgtcatgctctatcagatgaagaggttcctgcctcaggctgtttatatatgacctaccaggatttcctgctgcatgatgaaataattaggaggccctggcatgcaaggaataatgttgcaagtaagttgtagcagcgttatatttgaaaacaaaattgaaacatttggcttatctgtatcagaatcttccttaggtttactgtgaacattctattccttatttttataaaacttacattggtgttaattttaatgttcaccggagaatacaatgagtttagcaaggctttctttaatgcttgtgctgtgatttgagtcaagagtaaacagggtagggagaggtcatttttgtttaattttctaaataaagtttgtcttttgacttttataaaaaaccaattctacagactcaacaaagtctgtagaaatacagactttgtaattggtaaaaaagttagtaatattttctaaatcaattaatccctaagtcttactgaactctaacttctttctcacgcagaaaataagt

SEQ ID NO: 79168 - DNA, 1272 bp, Homo sapiens
ttcccacttttgcttgactccttttctcccctcactcttaaaaacaattcaccacctagttctttcaactctactacyaataaatgccagatctttccaattttcaccattctttttttgaaacggggttttactgtcacacaggctggagtgcagtggcatgatctctgctcaatgaaacctccacctcccaggctcaagtgatcctcccatctcagcctcctgagtggctgataccacaggtgcatgccatgatacccagttcatttttttttcttttttgcatttttggtagagacagagtttcatcatgttgcccaagctggtcttgaactcctgtgctcaagcaatccacccacctcagcctcctaaagtgctgagattacaggcatgagccactgtgcccagcctttcaccattcttatttccaatgttacaccaagccacagtcatctctcacatagatcaaagccatgactcctaactggacttttttcttgtacttttactaacttacactctatccttcacagagcagtttgagtgatttacaaatggaaaatagatcacatcacactactgtttaaacaatctgatgacttgtatcaaactcagaaaaaaatccaaactttaaaaccagggttatgagattctgtatggtccacctacatctttgatcttttctctttccactgttaaccaggccatcttctcattgtaaaaacctgatagtctcatcttgccttagaatcttcgtagcagttctttccccatgtctttccagggtggctcctaattgatatttatttgctgacatgttacttcttcagggatgctttctgtatggacattctaaagtctcctactcactgtttcataatgctatactgtttccttctctgtgttgcctatcattatgttttgaggctttttttttttggagaagttgttttttgttttgttcaaagtatatccaatgagactgttctttaaatctcagaatcttaaaaaaaaacttagcctcctaaagacttataatgatacaaactttgccaagcaccttacatcatatgctgcatgatagaaaatcaggaaagcttatcttggaccagagcatttgtctgtgtccttctgggtacagttaacagacccattgactctcatccaaaacaatgtactcatatcatcagcctttactggtaatgcaggtaatatttcacctcaatttgcccctctgttgatacagtcatcattttattttaattgaaaccg

SEQ ID NO: 79169 - DNA, 1272 bp, Homo sapiens
ttcccacttttgcttgactccttttctcccctcactcttaaaaacaattcaccacctagttctttcaactctactaccaataaatgccagatctttccaattttcaccattctttttttgaaayggggttttactgtcacacaggctggagtgcagtggcatgatctctgctcaatgaaacctccacctcccaggctcaagtgatcctcccatctcagcctcctgagtggctgataccacaggtgcatgccatgatacccagttcatttttttttcttttttgcatttttggtagagacagagtttcatcatgttgcccaagctggtcttgaactcctgtgctcaagcaatccacccacctcagcctcctaaagtgctgagattacaggcatgagccactgtgcccagcctttcaccattcttatttccaatgttacaccaagccacagtcatctctcacatagatcaaagccatgactcctaactggacttttttcttgtacttttactaacttacactctatccttcacagagcagtttgagtgatttacaaatggaaaatagatcacatcacactactgtttaaacaatctgatgacttgtatcaaactcagaaaaaaatccaaactttaaaaccagggttatgagattctgtatggtccacctacatctttgatcttttctctttccactgttaaccaggccatcttctcattgtaaaaacctgatagtctcatcttgccttagaatcttcgtagcagttctttccccatgtctttccagggtggctcctaattgatatttatttgctgacatgttacttcttcagggatgctttctgtatggacattctaaagtctcctactcactgtttcataatgctatactgtttccttctctgtgttgcctatcattatgttttgaggctttttttttttggagaagttgttttttgttttgttcaaagtatatccaatgagactgttctttaaatctcagaatcttaaaaaaaaacttagcctcctaaagacttataatgatacaaactttgccaagcaccttacatcatatgctgcatgatagaaaatcaggaaagcttatcttggaccagagcatttgtctgtgtccttctgggtacagttaacagacccattgactctcatccaaaacaatgtactcatatcatcagcctttactggtaatgcaggtaatatttcacctcaatttgcccctctgttgatacagtcatcattttattttaattgaaaccg

SEQ ID NO: 79170 - DNA, 1038 bp, Homo sapiens
cgttcccgaaatattgttgatactcaataaaacctaacagtgctagtagcagtaatcacaggagcagttgctattattwttcagctatattgtatttgttttgtttgtatttccataagataatcacagtatagtaaggagtcgaagggagggtcacttaagaaaattattatttatacttacataaacattattaatcttgagataaaaatctatgtggagaaatacaatagcagttttacagaaaaggcttcataaaatatgaactacttaaaggaaaaccataaaatccatggcttgtacagtggaattaagttttcaagattacattactaaatcttggaagatttgctaataaccagtggctaatttcagcaaggaatttatatatatgtgtgtgtgtgtgtgtgtgtgtgtgtgtgtgtgtgtgtgtgtgtgtctatatatctatatctctatatttatatttccttgttatttaaggaagtcattatatggtagccattatatggtactgcctaataaatagtgtttgcctcacaatagccatttaaaaaatgttacttttttctcctcttcacactctatgggatttttattcctttcatgggaaagaataataaatcttcagcatcaaaaatagaagaataatttcattaggtaaaatataatttgctttaagtgatatcatgaagttcctgatgcttgaaataacccatttctagaattctcctcagtcacctttggatatcatagtatttcctaaatttcttgtgagcttccattcttcatctcacaaatttcattcttggagttattttcttcaaagaaagtagaagatatgtcctaaatgtgtgtgctttaattatttctttagttctttattagatgttgttacttttcctgacaaaacccagtagcaggatatgactgaaaaccattgagacaacattgaatctcagaatattaatagccaatctgccattattccgtgtaggctaacctattaggtgattaagatagtgcatggctaccctc

SEQ ID NO: 79171 - DNA, 1038 bp, Homo sapiens
cgttcccgaaatattgttgatactcaataaaacctaacagtgctagtagcagtaatcacaggagcagttgctattattattcagctatattgtatttgttttgtttgtatttccataagataatcacagtatagtaaggagtcgaagggagggtcacttaagaaaattattatttatacttacataaacattattaatcttgagataaaaatctatgtggagaaatacaatagcagttttacagaaaaggcttcataaaatatgaactacttaaaggaaaaccataaaatccatggcttgtacagtggaattaagttttcaagattacattactaaatcttggaagatttgctaataaccagtggctaatttcagcaaggaatttatatatatrtgtgtgtgtgtgtgtgtgtgtgtgtgtgtgtgtgtgtgtgtgtgtctatatatctatatctctatatttatatttccttgttatttaaggaagtcattatatggtagccattatatggtactgcctaataaatagtgtttgcctcacaatagccatttaaaaaatgttacttttttctcctcttcacactctatgggatttttattcctttcatgggaaagaataataaatcttcagcatcaaaaatagaagaataatttcattaggtaaaatataatttgctttaagtgatatcatgaagttcctgatgcttgaaataacccatttctagaattctcctcagtcacctttggatatcatagtatttcctaaatttcttgtgagcttccattcttcatctcacaaatttcattcttggagttattttcttcaaagaaagtagaagatatgtcctaaatgtgtgtgctttaattatttctttagttctttattagatgttgttacttttcctgacaaaacccagtagcaggatatgactgaaaaccattgagacaacattgaatctcagaatattaatagccaatctgccattattccgtgtaggctaacctattaggtgattaagatagtgcatggctaccctc

SEQ ID NO: 79172 - DNA, 609 bp, Homo sapiens
ggaggaagggacaaaagaaaagcttggacagttggacagggaccagatcttggagggatgaatatatcaagctaagggcctagatttaattttgttagtgacaagattgcccttctgaaaagataattctaaaagagtgacagatcgttttcaagagaatgagaatgtagaaagagcaacaatttaagatgctgttttagtgattccagtaagaaatgtgttgcgtaagtagaattcacatatgcygggatgagaccaacaggtggcattttttctacttcctatctagtttgaaacagatacatcttatgggaggtaaacttgcccctgctggcacatggctgaaagccacagatggagtcctgacatggggcacagaatgtgtgtatatgtctaaatatcctctactggaagaaaatcatagccaaaaagatattattaaatattcaggagtgtcaattacataaaagaaaatatgattttatgaatattatccaggacaacatctatttaactgtgatgctttagtatttgtatttatttcttttatttaagctctttctacacattttatcacccttcattgtcttattgtcctgtttttatttc

SEQ ID NO: 79173 - DNA, 1012 bp, Homo sapiens
ttgttgcttcctgaccaagcttatcaataagtctggaaaatcccaagcagtgaaaaactaagagaaaccagaaaaccagtacaataagtattagaactaaattagtatgtggctttttggctaggagtttgcatattaatccctatgtaaggataggaagcaaaactctcagaagtggccttgctcaatgaaagaggaacagaaaaactaccccaggaagataagaaagagtatttccaaatctcccaagaaaaatctgtcaagcctgaagtacaaatgggttgggactaaaaaaaaaaawaataatattatatataattccggaatgaatttcttcacatggggattctggagttatgtataatacttttataataattatatataaaaaattgtttccaggtcaatgatactattgggaggcttgtcagaaacactacagacctatttgaatatctaaatttttttaaaagaccatgacaagtgttaatggctaggcgcagtgtctcaggcctgtaatcacagcactttgggaggccgaggtaggtggagcacttgaacccagcagttcaggaccagcctgaccaacatggtgaaactccctctctactaaaaatacaaaaattagccaggcatggtggcacacactggtaatcctacctcgggaggctgaggtggggaaatcacttgaacccaggaggtggaggttgcagtgagctgagattgtgccactgcactccagcctgggctacagagcaagacaggggggaaaaaaaagaccatgacaagtattaagaagaatgtacagcaactggaactcatacactgacggggggaacgtacaatggaaaacagtttggcagaaataggtcagtgattgctcagggaaagaaagaacagggaacagtgacattacaatggggagtaagaaaagttttgaaggtggtagataagttcattattttaattatggtaatggtttcatgagggtatacatatgtcaaaacttaat

SEQ ID NO: 79174 - DNA, 817 bp, Homo sapiens
gggtgacaaaaccaggaagagcaagtgtgaccagtggagaaataagagcagtaataccactatggtactatgagatactgtggtatctgcaggaaattgtgtacatgagctaaatccttasgtactaaagtagtgtatgaataaatatattattgcaaacatgctatttagatatacagtggtaactccctgaagaattaaaatcagaggtaaaactgtctcagtgaatggagagggacagtgaatttcactataagctctattagcttttttttaaccatatgtatttattacttgaaaaaaaaatttcttctaaaaagttcaattagtgcattcaaaatattcttgaactgctcaaaagaaaaccgagtaatctgaaataggcacatattacataaaaattattttattttttatttaactaagcattaagcctgaatccccattctctacacttattaagagagctttataatggagccaagcccaggatatgcacaaaggatggccaggctcaggctttcacagataactaatggttcaagggccagaacaatgaagtctttcatgcacacactaggctctgctccatacatccatcagtaattgatggggttatcttctagcatagtggggaaattagagcaatcaggtctaattgctctgtctcaagacttctgtatcatgactagccttgccctcaggtgagttctggggctgccagatcgtctgctgaattgccagagagagctgagaaggaaagtaagaaagctcttcaaatcaccagaatgccattacaaatacatttacaaagaaa

SEQ ID NO: 79175 - DNA, 817 bp, Homo sapiens
gggtgacaaaaccaggaagagcaagtgtgaccagtggagaaataagagcagtaataccactatggtactatgagatactgtggtatctgcaggaaattgtgtacatgagctaaatccttaggtactaaagtagtgyatgaataaatatattattgcaaacatgctatttagatatacagtggtaactccctgaagaattaaaatcagaggtaaaactgtctcagtgaatggagagggacagtgaatttcactataagctctattagcttttttttaaccatatgtatttattacttgaaaaaaaaatttcttctaaaaagttcaattagtgcattcaaaatattcttgaactgctcaaaagaaaaccgagtaatctgaaataggcacatattacataaaaattattttattttttatttaactaagcattaagcctgaatccccattctctacacttattaagagagctttataatggagccaagcccaggatatgcacaaaggatggccaggctcaggctttcacagataactaatggttcaagggccagaacaatgaagtctttcatgcacacactaggctctgctccatacatccatcagtaattgatggggttatcttctagcatagtggggaaattagagcaatcaggtctaattgctctgtctcaagacttctgtatcatgactagccttgccctcaggtgagttctggggctgccagatcgtctgctgaattgccagagagagctgagaaggaaagtaagaaagctcttcaaatcaccagaatgccattacaaatacatttacaaagaaa

SEQ ID NO: 79176 - DNA, 993 bp, Homo sapiens
tgcatttaccattatgctattcatgatgattctatgtgtatgtgtatacataaacagatcatttttcttcccttaaatacaaattaatcattaatttaaaaatggttcaagtatctaaacacactgctttatattctagagtaactgtgcctgaacaactatgggttgcaaaggaaagaataacatcttaacgcctctctttttaacccctctgcccgcagatcccatgcttattcagctatagaaactcataggttactttaatgttactactgaacctggatatagaaaagaattctcctggaaccttcaactgcattgcctagaatttggactgtcatctgaaaaaggcacaggatggcaaatatccaaggaaaagctgcaatggcacctgttgcatgtccaagtttcagacacaaaaacaaacgtgctgagttttgtttttggctagaataaggtctctggatttgagacatctgtaaagtacacagatcaggaaaactgccttctatagcaagtatgtgcaaggtatgctcttagaagcagtaactgaggggacaatgtccattcaggccagccagagaatatgtcatccacctcagagaaaggtatagggctggaggtccctgagtaggtagggggagggcagtaggaaggattctatagagtccaacaaagcattctttgagagaaagaaccagcatttatttgcacatctgccaaactgatggcctcaatgccagattccaatggcaatgatcaagttaaaccttgcgcttttcttctagttcctcttctttgcctgatcttaaaggagccagamgcaacagctaacaagtggtagaagaaatagaacaaaaccagtgaagaaataggccatgttttggcccattcctcaatgctgccggttgtagaacctgggttatgcctaagccaagaccggggaataccaagatgaacagaagagaatctttaaactgcatgtagaatgca

SEQ ID NO: 79177 - DNA, 543 bp, Homo sapiens
tttcacccctaccccacaaaacccctcttaaatatccaagatttttggtgggctgtggtgtcacaggtgagtgaattgaaatcattaggtagttggatgtatttcattcagcatgcaggactatctggcagcagagactagaagggccaaatcctacttctctggattttgcctctgcaataatctaacaaccatctgcttayatcactttttagaataaccagtcatttaatgtcgttcattcatttaataaatacttattgaacacttgctatatgtcagtcaccatctgcagcgctgggcatacagcagtgaacaaaacggatattctccttattttgtccttctcagaaatgcgtacatatccctgagggtcttgggcagtgagacagaaacatatagcattctaaaataattatgtaatcaatattttcttggagtgtcagtttactaaataagtaattgaaaacactgccctgtatttaaatatatacatatggagtggaatacaaaatttaaatgcatttcttttttgagacaggg

SEQ ID NO: 79178 - DNA, 542 bp, Homo sapiens
actcttcttactttaattttatatatttaagattagaagcaaaacaaaacaaatgaacaataaccaaaaataagcccaaaactaaccttttccaaactcttaaatactgggtttcaaaacacagtgtggaggatggttacttgagtgggtttgggtcacattggagtcctgattctgmccttaatctatctttctttcttttttcttttcttttctattttttttgaaatggagtttcgctcttgttgcccaggctggagtgcaatggtgtgatctcggttcactgcaacccctgtctcccgggtttgagtgattctcctgcctcagcctcccgagtagctgggattacaggtatgcgccaccacgtccggctaatttttgtatttttagtagagacgtggtttcaccatgttggccaggctggtttcgaactcctaacctcaggcaatccacctgccttagcctcccaaagtgctgggattacaggcgtgagccactgcacctgaccaagatccttaatttttctaaacctacgtttatca

SEQ ID NO: 79179 - DNA, 542 bp, Homo sapiens
actcttcttactttaattttatatatttaagattagaagcaaaacaaaacaaatgaacaataaccaaaaataagcccaaaactaaccttttccaaactcttaaatactgggtttcaaaacacagtgtggaggatggttacttgagtgggtttgggtcacattggagtcctgattctgaccttaatctatctttctttcttttttcttttcttttctattttttttgaaatggagtttcgctcttgttgcccaggctggagtgcaatggtgtgatctcrgttcactgcaacccctgtctcccgggtttgagtgattctcctgcctcagcctcccgagtagctgggattacaggtatgcgccaccacgtccggctaatttttgtatttttagtagagacgtggtttcaccatgttggccaggctggtttcgaactcctaacctcaggcaatccacctgccttagcctcccaaagtgctgggattacaggcgtgagccactgcacctgaccaagatccttaatttttctaaacctacgtttatca

SEQ ID NO: 79180 - DNA, 542 bp, Homo sapiens
actcttcttactttaattttatatatttaagattagaagcaaaacaaaacaaatgaacaataaccaaaaataagcccaaaactaaccttttccaaactcttaaatactgggtttcaaaacacagtgtggaggatggttacttgagtgggtttgggtcacattggagtcctgattctgaccttaatctatctttctttcttttttcttttcttttctattttttttgaaatggagtttcgctcttgttgcccaggctggagtgcaatggtgtgatctcggttcactgcaacccctgtctcccgggtttgagtgattctcctgcctcagcctcccgagtagctgggattacaggtatgcgccaccacgtccggctaatttttgtatttttagtagagacgtggtttcaccatgttggccaggctggtttcgaactcctaacctcaggcaatccacctgccttagcctcccaaagygctgggattacaggcgtgagccactgcacctgaccaagatccttaatttttctaaacctacgtttatca

SEQ ID NO: 79181 - DNA, 728 bp, Homo sapiens
accctgccatccagacacctcccaccaggccccatctccagcagtggggattacaattcgacgtgagatttgggtggggacaaatattccaccatgtcacttggctgtatcagtttagggaaatgttatgacttgctttacactcagtcagcctctgttttgccattgtgcatgaataatttgcttgggtgtattagtgcctgattctgctgactcattcgttctgctcctcagggaataaaatgatgaaaagacatctctgcttttgctctgagattttgtttttgtctcgttcctatacagcgactgcttcctctacctcctcttcagctagcagctgccacggggaactctgtggctcaagcagcagcagttgaaagatactctcactgcccacttcctgtagacaaggaggttttggtgggctgcttaggaactgtgccagccttgtgtctgactggtaactgactcatgagaaaagcagccttatgtyggaaagataagggccaacaaattgcctccaggtggtggtagtttggaggtgactgaccattcatttcctttctttgggaggagacagtggggagggaattggtgaataagtggtcttgcctgcgtttttctccagctcttagtgatgcagccaggcagatagttggttctctgggctggaatggctcgtggaccccagtgccctcagaatcccctctgctgctatcagagcatca

SEQ ID NO: 79182 - DNA, 278 bp, Homo sapiens
tgcataaatgctcatagctgacttctccattgctgtgtctctatgacacaggagttaagaagaaattacttaggcagatagtgagggtatggaagtcctcagtaaagtttttattttaatgaaaagcagcccgaaatcattttcctttctaacaaagagcagcctgtaaaacragctgctgacatagatgctgacagttatgctaatcatgatcaagatggcggctctaacgtcccttctctttgtcagtcaggtatacagtaaggagcagacaagac

SEQ ID NO: 79183 - DNA, 278 bp, Homo sapiens
tgcataaatgctcatagctgacttctccattgctgtgtctctatgacacaggagttaagaagaaattacttaggcagatagtgagggtatggaagtcctcagtaaagtttttattttaatgaaaagcagcccgaaatcattttcctttctaacaaagagcagcctgtaaaacaagctgctgrcatagatgctgacagttatgctaatcatgatcaagatggcggctctaacgtcccttctctttgtcagtcaggtatacagtaaggagcagacaagac

SEQ ID NO: 79184 - DNA, 263 bp, Homo sapiens
ccacatgctcatgacaaccctaacccagtgcattcataacctctatggaccactgatggccatcatagggacataacagaatccgtgccaccaacacagttttcctatcaaatgagactakgctaaacacccacaccagaagttctttgttattttgcaatgtggctcatcaatatttgttcatataaacaaaaaattagctgtacttaaagtctctagtaatgaataagtctacctcactgctgacagatgagccaagggga

SEQ ID NO: 79185 - DNA, 609 bp, Homo sapiens
ctctgtgtccagtaatgtgcaagtgactatccttcaatgaagaagccgctgagatgctttgctcttggtggagtgggtgtgtcaggtcactcatgtgcttgacctcctgtgacatgacatgtgtctaggtgctttctgaccactaaagatgctgcygatgataacaaaaatgagtttgaatgaggatggacctttgaccgattaatatctcaccataaccacccaactcaaccacccccaatattgcttagagaggagccattaattatttcacctccttaaaatatccttccaagagtgtgtagagaggctgctgtgaaaggtgagaggagctgacattgaacgcctctggtggaagcaaagccagtgattctccaagactttttaggaacgattataagcttcaagacagtccaccaagctccaccaaccacttcagttggctgcagtgaagtgaatggtttagcagtgtgtccagaagccactgtgaatctcttatctgcctacttgcctgcttgcaactgaccctggagaatacaagcttctacttcttttgtgccttcttgtgcaaattcccctttttagcacacctgaactgtgcctggaaag

SEQ ID NO: 79186 - DNA, 609 bp, Homo sapiens
ctctgtgtccagtaatgtgcaagtgactatccttcaatgaagaagccgctgagatgctttgctcttggtggagtgggtgtgtcaggtcactcatgtgcttgacctcctgtgacatgacatgtgtctaggtgctttctgaccactaaagatgctgctgatgataacaraaatgagtttgaatgaggatggacctttgaccgattaatatctcaccataaccacccaactcaaccacccccaatattgcttagagaggagccattaattatttcacctccttaaaatatccttccaagagtgtgtagagaggctgctgtgaaaggtgagaggagctgacattgaacgcctctggtggaagcaaagccagtgattctccaagactttttaggaacgattataagcttcaagacagtccaccaagctccaccaaccacttcagttggctgcagtgaagtgaatggtttagcagtgtgtccagaagccactgtgaatctcttatctgcctacttgcctgcttgcaactgaccctggagaatacaagcttctacttcttttgtgccttcttgtgcaaattcccctttttagcacacctgaactgtgcctggaaag

SEQ ID NO: 79187 - DNA, 587 bp, Homo sapiens
tcctgcctcggcctcccaaactgctgggattacaggtgtgagccaccatacccagcctgagttacttttataaccctcctgtttccttttcaaaaaataaaacccgatggctgctttttcagtgctaggtggggggtcatcaaatggagccgtcctgatttggagtcggaaagtaaaattcctcttcctccaaagaggcggtgtcttcacatctcacgaggtctagctcctgccatgggcatctggacaggcggctctggagtcttctgattggttcccatctgtaaactcagttcaaaaacacgtcctaaatacctcgggcagaaagagctccctgacgatgcggggtcacagttgccctttttagatacatgcgtttgggtccaaactcacagttgctgtgttctgtccacacccctgtcaccccaggcttctctatctgagatgtgcacagaaacccagacaggaccagtcggcactgtgtgctgcrtgctgcctcctgaccagtctgtgtgacaccgtcggggctcttctggccagacagctcacaatccaggtatgttgggcctccagctgacagtggctta

SEQ ID NO: 79188 - DNA, 1715 bp, Homo sapiens
gccactgcactccagcctgaatgacagagcaagaacttgcctctaaatatatatatatataaatatatatatataaaatacattatatataaatatatatttatatattaaatatattatatataaatatatattatactctatatatagtagccctgaggcttcatccagagcagaacatccagcgggtattccatcaaggagtgtttgcttgcttctaaagaagaacattctagcaatcaaagctgcccataacttaagggtgtcctgtcaaagtgtcatatcaaataatttaccagaaactttcaataataaaattgagaaacgcctccttcaactctcttaatctcgttttccctgtaaaatcggattctttctctggtccctgccacttaatttcagatattgctcaattcatattgaatttatattttatgctatatgccaggcattgtgttagatgctgtggtccagcagtgaacaggatgggcatgggccccaccctcggggaactgccagccccagagctgcaggcatctccaatgctgatgtcactgtggaagtagctgcattccacatggaggaaactgaggaaccacgctcattcttttactgacagggttttccaagggatgggacatgcatggaaataattaatagaggtgacrtagagattcccaggacctctgttggatccaatctgcaacctgccttggagacgtcatctgtgggtcttggaggtggagaggaaatgcctgggatcctaggactgcgtcacattgatgccctttcccctgcctgccccctccaagccttggccagcctgaaaggagcacattgagaagtaaaaccgcatcctcggctgcttgagtgcctttgcaagaccttctttttttattattattatttttttcttctgagacagagtctccctctaccgcccaggctggagtgcagtggcatgatcttggctcactgcaacctctgcctcccgggttcaagcaattctcctgcctcagcctcctgagtagctgagattacaggcacccaccaccacacccagctaattttttgtatttttagttgagacagggtttcgccatgttgtccaggctggtctcgaactcctgacctcatgatccacccacctcggcctcccaaagtgctgggattacaggcttgagccaccacacccggcctctttatgcactcagatggacagacgtgctgtgcagacagtggcgctgctgggctcttttagagagggactgtctccctaaattgaaaacaaattctccagaagtacaggaagcatacacaggaaccaacccagttaaatgaagaataacagtttactgtggctcctcagtgagaagcttcggaggggatccagcagcaggctaagtcgtggcaaggttggatgagtaaaagagagaacgaagacagtctcataaccacagcctgtccctatgccacctccatgtcttgcccttccggactagtcacattctcacacactctggcacacacacactcatgctcatgctcacactcacacttacatgcacacacacacttttccagttcaatgccattcccccggattgctgcgggtatgtgccacccctcccccgccctttccctgcatcaaaccaaagaccacgtttactcacagcccaaccttcgggaaaacagacctcctgggctgcttccta

SEQ ID NO: 79189 - DNA, 1715 bp, Homo sapiens
gccactgcactccagcctgaatgacagagcaagaacttgcctctaaatatatatatatataaatatatatatataaaatacattatatataaatatatatttatatattaaatatattatatataaatatatattatactctatatatagtagccctgaggcttcatccagagcagaacatccagcgggtattccatcaaggagtgtttgcttgcttctaaagaagaacattctagcaatcaaagctgcccataacttaagggtgtcctgtcaaagtgtcatatcaaataatttaccagaaactttcaataataaaattgagaaacgcctccttcaactctcttaatctcgttttccctgtaaaatcggattctttctctggtccctgccacttaatttcagatattgctcaattcatattgaatttatattttatgctatatgccaggcattgtgttagatgctgtggtccagcagtgaacaggatgggcatgggccccaccctcggggaactgccagccccagagctgcaggcatctccaatgctgatgtcactgtggaagtagctgcattccacatggaggaaactgaggaaccacgctcattcttttactgacagggttttccaagggatgggacatgcatggaaataattaatagaggtgacgtagagattcccaggacctctgttggatccaatctgcaacctgccttggagacgtcatctgtgggtcttggaggtggagaggaaatgcctgggatcctaggactgcgtcacattgatgccctttcccctgcctgcccsctccaagccttggccagcctgaaaggagcacattgagaagtaaaaccgcatcctcggctgcttgagtgcctttgcaagaccttctttttttattattattatttttttcttctgagacagagtctccctctaccgcccaggctggagtgcagtggcatgatcttggctcactgcaacctctgcctcccgggttcaagcaattctcctgcctcagcctcctgagtagctgagattacaggcacccaccaccacacccagctaattttttgtatttttagttgagacagggtttcgccatgttgtccaggctggtctcgaactcctgacctcatgatccacccacctcggcctcccaaagtgctgggattacaggcttgagccaccacacccggcctctttatgcactcagatggacagacgtgctgtgcagacagtggcgctgctgggctcttttagagagggactgtctccctaaattgaaaacaaattctccagaagtacaggaagcatacacaggaaccaacccagttaaatgaagaataacagtttactgtggctcctcagtgagaagcttcggaggggatccagcagcaggctaagtcgtggcaaggttggatgagtaaaagagagaacgaagacagtctcataaccacagcctgtccctatgccacctccatgtcttgcccttccggactagtcacattctcacacactctggcacacacacactcatgctcatgctcacactcacacttacatgcacacacacacttttccagttcaatgccattcccccggattgctgcgggtatgtgccacccctcccccgccctttccctgcatcaaaccaaagaccacgtttactcacagcccaaccttcgggaaaacagacctcctgggctgcttccta

SEQ ID NO: 79190 - DNA, 1715 bp, Homo sapiens
gccactgcactccagcctgaatgacagagcaagaacttgcctctaaatatatatatatataaatatatatatataaaatacattatatataaatatatatttatatattaaatatattatatataaatatatattatactctatatatagtagccctgaggcttcatccagagcagaacatccagcgggtattccatcaaggagtgtttgcttgcttctaaagaagaacattctagcaatcaaagctgcccataacttaagggtgtcctgtcaaagtgtcatatcaaataatttaccagaaactttcaataataaaattgagaaacgcctccttcaactctcttaatctcgttttccctgtaaaatcggattctttctctggtccctgccacttaatttcagatattgctcaattcatattgaatttatattttatgctatatgccaggcattgtgttagatgctgtggtccagcagtgaacaggatgggcatgggccccaccctcggggaactgccagccccagagctgcaggcatctccaatgctgatgtcactgtggaagtagctgcattccacatggaggaaactgaggaaccacgctcattcttttactgacagggttttccaagggatgggacatgcatggaaataattaatagaggtgacgtagagattcccaggacctctgttggatccaatctgcaacctgccttggagacgtcatctgtgggtcttggaggtggagaggaaatgcctgggatcctaggactgcgtcacattgatgccctttcccctgcctgccccctccaagccttggccagcctgaaaggagcacattgagaagtaaaaccgcatcctcggctgcttgagtgcctttgcaagaccttctttttttattattattatttttttcttctgagacagagtctccctctaccgcccaggctggagtgcagtggcatgatcttggctcactgcaacctctgcctcccgggttcaagcaattctcctgcctcagcctcctgagtagctgagattacaggcacccaccaccacacccagctaattttttgtatttttagttgagacagggtttcgccatgttgtccaggctggtctcgaactcctgacctcatgatccacccacctcggcctcccaaagtgctgggattacaggcttgagccaccacacccggcctctttatgcactcagatggacagacgtgctgtgcagacagtggcgctgctgggctcttttagagagggactgtctccctaaattgaaaacaaattctccagaagtacaggaagcatacacaggaaccaacccagttaaatgaagaataacagtttactgtggctcctcagtgagaagcttcrgaggggatccagcagcaggctaagtcgtggcaaggttggatgagtaaaagagagaacgaagacagtctcataaccacagcctgtccctatgccacctccatgtcttgcccttccggactagtcacattctcacacactctggcacacacacactcatgctcatgctcacactcacacttacatgcacacacacacttttccagttcaatgccattcccccggattgctgcgggtatgtgccacccctcccccgccctttccctgcatcaaaccaaagaccacgtttactcacagcccaaccttcgggaaaacagacctcctgggctgcttccta

SEQ ID NO: 79191 - DNA, 610 bp, Homo sapiens
tttattaatgccatgttccctctttgcaaaatgctaattacttcatatgggaagcctgtgtttgcttaactttctgttaagtttatttatttaatttaatttaatttttttttcagatggagtctcrctctgttgcccaggctggagtgcaatggcacaatctcagctcaccacaagctccgcctcctgcgttcaagtgattctcctgccttagccttctgagtagctggtattacaggtgcctgctaccatggccagctaagttttgtatttttagtagagacagggtttcaccatgttggccaggctgttctcaaactcctgacctcaagtgatctgcccgcctaagcctcccaaagtgctgggattacaagcatgagccgccgcacccggcctctgctaagtttacaacctgcaaattctatccaaaatatatacatattttcttgtatttttcatttaatgcaccaaaataaaaaaaaaattgtttttcattttctgctggttattacttagaggctagatttattttgtaaactatgccctaaattgttcctttgactatttttaagtttatctacctactctgaagtgtggaaggtgagagtaa

SEQ ID NO: 79192 - DNA, 610 bp, Homo sapiens
tttattaatgccatgttccctctttgcaaaatgctaattacttcatatgggaagcctgtgtttgcttaactttctgttaagtttatttatttaatttaatttaatttttttttcagatggagtctcactctgttgcccaggctggagtgcaatggcacaatctcagctcaccacaagctccgcctcctgcgttcaagtgattctcctgccttagccttctgagtagctggtattacaggtgcctgctaccatggccagctaagttttgtatttttagtagagacagggtttcaccatgttggccaggctgttctcaaactcctgacctcaagtgatctgcccgcctaagcctcccaaagtgctgggattacaagcrtgagccgccgcacccggcctctgctaagtttacaacctgcaaattctatccaaaatatatacatattttcttgtatttttcatttaatgcaccaaaataaaaaaaaaattgtttttcattttctgctggttattacttagaggctagatttattttgtaaactatgccctaaattgttcctttgactatttttaagtttatctacctactctgaagtgtggaaggtgagagtaa

SEQ ID NO: 79193 - DNA, 747 bp, Homo sapiens
atgccaatcacagtcctggctccagacccaaaaatggccctgttcccctgtgtatttggctatagtcacatttggcattggccctactaaaagaactatctactaagagacccaaaataagtcaggcccacttgtgcctcaaatgtcacacctgcctatctcagtcctgactgtggagaaccccgaaatggttcagtaacttggctccagccctacttagtagttctgtacacacagggactttctgagagatacacttgtctgtgctgctgaaacatatttgctgaccttgatgccagcagatggcaaaacatttctgttattcaactatggcctttctcagctgccctctgagagtagttctgcacaccagggacctgaagggagatatgccaatctgtatccctgygcacactcccaacaaccttagtcccacagtaggtcatgaaacagttggataacttagctccagcccctctcatctatggactgagacatgttttcctggcccagatgcccagagagaaatacactagtccatgcccccagaggaagcctgcagatccaaatataagctgtagctgaagccggcttttgactcagttctagtccctctcatttgcagtctggggctagtaatacccacccagaaacccacacaataacccaatgggagttcttcccaggatctagaggaagccatatctgttcatgcacctggtaataggcatgccattaccagggtca

SEQ ID NO: 79194 - DNA, 1291 bp, Homo sapiens
tgtaaataattgtggcctactctcaattcatgtcrttaagaaaatgaaaacagctgatataatattctaggggtagtcaagaggaatggaaaagcagcatctatatattcttcatattataggcattatgtcacttaatgcatagaccaatttaatgaggtaaggatcctattccacaaatgagaaccctgagcccgaggtctcattaaaaaggtattgcatttgaactgtgtttggccttaactgtaaagccagagtatgttctctatgactatattgttttctaaccactctaatgtttttactgaaaaagtatgttaaagccatatgataaggagttatccttattttagattccttaagcatcaatctttgattttcataaagctccaagactactttcatgcacttatttgaatttcaacctttctattggttatatacaacttttactattggttactattttatatgtattcatttttaatttaaatttcttgaaataggaaaatttttatcactattatgaatgtaaaaacagtgtgtttgctagaaatagaaaaagagaaataattattgaaagatgtgagtttatgcaggtcttaagaggctctcaggcactatcagctgctcatggcgggaaggaggcaggagggagaaccctcccatgtgatactgggaagtcaggaagctccttgagtgtcagggagtggtcttcatcaggagtttcttgagggttacatcaggtctccttggtgttatgacttcattcactcttccacttttagacatcacagattcttggcattgtggcagaggcttagcccattatataattccttctcatttaaatattagaaaattatagtaagagcggcccatatgttactggagtgggagctttaaaattccagatataataatccaaataaatttggtttccagtgtgtacttattttggtgttcctgatataaaaaacttgaactgaatgcaaatctccataacacgcaatgatgtgtaatccaaggtcccaaaatgaacctttaaatatggtataccttcaatataaagccagtcaagtggccatttctcatggctcttggctccaaaagttatagttccagaacaagtaattcccattgatttggaaacttttgactaagaatttagatcggtaacctcttctttcacaatactttgaggtgggtaaaactttgcattccaaatgtgcaactggactctttctattgtaaaaacgtacatgaactttacagaatattggtgggataa

SEQ ID NO: 79195 - DNA, 727 bp, Homo sapiens
ctggcctggtttactaggtaatggtaacccccagggctatgccttcctgattttatgctgccgataattgaatgcttgctgtcctttaatttaatttaagcattcccacaacttttgtggttggtactaatatttttcccattttacaratgaggaaacagatattcagagattaaagagtactcaaaacactgacctagtcaatgtgagaataaggtttaaatccacagacaacactgtttacatgcattacgattctccacactggaactcctctcctatcagaaatatctgacttgcgaaaggaaactgtaagaatcaatgagacctaatacagaacatcagactgtaggcttgggagaaatgttagaatccacccttcaacttacatataaattctctacagtaatgttccgtaaaggatgttccagggaccactagtttcacagaatattaacaggcaggtacacacagagttccatggccaaataagtttgaaaaatggtggcttaaactttgctgagttaatttcttagcagcaggacttctcagtgctgttgatgaacgtgatcaggcatgaggtgacccaccacaggtacagtgcataccatatgtctcatgtttaattgactacggaactgtttgctcccagagcatttcttgattttgtaaggctgtagaataagattttggaagccccaacctacaatatgctttggaaggcagg

SEQ ID NO: 79196 - DNA, 727 bp, Homo sapiens
ctggcctggtttactaggtaatggtaacccccagggctatgccttcctgattttatgctgccgataattgaatgcttgctgtcctttaatttaatttaagcattcccacaacttttgtggttggtactaatatttttcccattttacaaatgaggaaacagatattcagagattaaagagtactcaaaacactgacctagtcaatgtgagaataaggtttaaatccacagacaacactgtttacatgcattacgattctccacactggaactcctctcctatcagaaatatctgacttgcgaaaggaaactgtaagaatcaatgagacctaayacagaacatcagactgtaggcttgggagaaatgttagaatccacccttcaacttacatataaattctctacagtaatgttccgtaaaggatgttccagggaccactagtttcacagaatattaacaggcaggtacacacagagttccatggccaaataagtttgaaaaatggtggcttaaactttgctgagttaatttcttagcagcaggacttctcagtgctgttgatgaacgtgatcaggcatgaggtgacccaccacaggtacagtgcataccatatgtctcatgtttaattgactacggaactgtttgctcccagagcatttcttgattttgtaaggctgtagaataagattttggaagccccaacctacaatatgctttggaaggcagg

SEQ ID NO: 79197 - DNA, 727 bp, Homo sapiens
ctggcctggtttactaggtaatggtaacccccagggctatgccttcctgattttatgctgccgataattgaatgcttgctgtcctttaatttaatttaagcattcccacaacttttgtggttggtactaatatttttcccattttacaaatgaggaaacagatattcagagattaaagagtactcaaaacactgacctagtcaatgtgagaataaggtttaaatccacagacaacactgtttacatgcattacgattctccacactggaactcctctcctatcagaaatatctgacttgcgaaaggaaactgtaagaatcaatgagacctaatacagaacatcagactgtaggcttgggagaaatgttagaatccacccttcaacttacatataaattctctacagtaatgttccgtaaaggatgttccagggaccactagtttcacagaatattaacaggcaggtacacayagagttccatggccaaataagtttgaaaaatggtggcttaaactttgctgagttaatttcttagcagcaggacttctcagtgctgttgatgaacgtgatcaggcatgaggtgacccaccacaggtacagtgcataccatatgtctcatgtttaattgactacggaactgtttgctcccagagcatttcttgattttgtaaggctgtagaataagattttggaagccccaacctacaatatgctttggaaggcagg

SEQ ID NO: 79198 - DNA, 739 bp, Homo sapiens
aataaaatcccatgtatcgaccaaaaatcatgtggttcataacccagaatctgcaaaaccaacggggccgagactacattctttttctttcaagtctccaagattactgaaacctaggaaagtataaacagttaagtataaaaaaacaaggaaggtataaaacaagtttgtgaataatggagacataaatccattgtataaatgctacttagtagcttaagtgtagaaataaaaattttgaatcccattgtgactgtgattttgattgtgtttgtgcatgcacatgtgggtgccatctgcttttaaagtttgtgaaacttaatgaaattggtaagtattttattaaaatacttaggagaatttgtctaattaaatttgtaatcagcatttaaatatctaagattattccattcataagatgtgttttattagtagcaasagcatttaaatgtttttctaaaaattaaaaattaataagattaaaatgcaagcattaaaaaggtacctataatagtgtttccctgcataaaatgttcttggtcataaaaacatcctagaaacaatgttattctctgattttttttcctcataggaatctagcccctgaacatctaagcatgcatccaaggatgggattttgattttccttgcctcctccagtaagcataaggctgggtgcacactactaatggcttaaaattccattggaaatctataaaatagtttcccttatctagtt

SEQ ID NO: 79199 - DNA, 739 bp, Homo sapiens
aataaaatcccatgtatcgaccaaaaatcatgtggttcataacccagaatctgcaaaaccaacggggccgagactacattctttttctttcaagtctccaagattactgaaacctaggaaagtataaacagttaagtataaaaaaacaaggaaggtataaaacaagtttgtgaataatggagacataaatccattgtataaatgctacttagtagcttaagtgtagaaataaaaattttgaatcccattgtgactgtgattttgattgtgtttgtgcatgcacatgtgggtgccatctgcttttaaagtttgtgaaacttaatgaaattggtaagtattttattaaaatacttaggagaatttgtctaattaaatttgtaatcagcatttaaatatctaagattattccattcataagatgtgttttattagtagcaacagcatttaaatgtttttctaaaaattaaaaattaataagattaaaatgcragcattaaaaaggtacctataatagtgtttccctgcataaaatgttcttggtcataaaaacatcctagaaacaatgttattctctgattttttttcctcataggaatctagcccctgaacatctaagcatgcatccaaggatgggattttgattttccttgcctcctccagtaagcataaggctgggtgcacactactaatggcttaaaattccattggaaatctataaaatagtttcccttatctagtt

SEQ ID NO: 79200 - DNA, 885 bp, Homo sapiens
catttagaagtgaatttaatttttaaaatattatttaaaaaataaaatatttacttttcatggtaggtggaacacattcttccaagaacataggcaataattgtgggaagcaggcgagagagaatgagaatagaccgaaatcacaaataaggacagtgaagttccaaaggtgaggtttaaattcgcaagccagtaagcaatcagacagggactgaagcccaagtgaggaagcagctgagcatggcagtgaagagcccaagctctggaatcaggacaacctgactgattcatccagctatgcccctcaccaactaggtggtctggcttagttacctaaccacttcatgcctcagtttctcgggtaggcaatgggggtaatgagagtacctactcatataatcactgtgatgattatgagccagtgcttgtaatgttttgcctaattcccagtctatagtaagtgctcaataactgttaacttgctattgcaagtattattgtcattttaatgacttcagggtagaaagtagaaaatgttctttctactatgcatgtcttgaagtccagggataatgtctgtgggacaataatctgtaccatggcaatcagggaatgactrttccatttgccacccagtccaaaatgaaatatcttagctcttgtctttgctgcacattttcatcaccctgaaatcccaggtgtggtggtagagaataccagggttttctcaaaagtgctttccactaaagtgacagatccagtttgattcggtttttgatggtctgaattattcttcttagttaatgagctcttcttgtcagtatttagagggatactcacctccctttggatgacatgagcttgatgatgcaaataagtggaaaa

SEQ ID NO: 79201 - DNA, 679 bp, Homo sapiens
tgtaatatattcacaaaaggtgagtcccgatttaacaggaaggcaaataaaaaagcatttgtgttgatctagcaggttgctacaacaaaaaagttaaaattaatttttttaaaaaaaggcatttgtgaaagtagcccagttttcttaatgaactcttaattatttaaggaaagttttccaggagatgaagctgtagaagtgattamggtgacctgagaaacaattgtaggcatatggcttaattatttttaaaggggcaaataagctgtgaacattggtatagaaatttaccccagaagaccagaaaaagccaaagcatttttatatttaacattgaaagggaagacaaagctctatatttaaaatgacaaaaatggagcatgagtacccccagtctcttaacccactcccatagcagacatcatgtgacattgtgatgtataatgggatttttatatatttggtcttcaccctgtttcttacatacagctcctaaaatccttgtaatctctggagtgatatgagtctcttctgtatattaatgagatgcctggtggctgggggtccctgggtggcttcaggatgggagctggtcacaaggaaaataaaggcacgattagagggttgagactttcagccctactccttaacccatagggaggagaaaggggctgaaggt

SEQ ID NO: 79202 - DNA, 679 bp, Homo sapiens
tgtaatatattcacaaaaggtgagtcccgatttaacaggaaggcaaataaaaaagcatttgtgttgatctagcaggttgctacaacaaaaaagttaaaattaatttttttaaaaaaaggcatttgtgaaagtagcccagttttcttaatgaactcttaattatttaaggaaagttttccaggagatgaagctgtagaagtgattacggtgacctgagaaacaattgtaggcatatggcttaattatttttaaaggggcaaataagctgtgaacattggtatagaaatttaccccagaagaccagaaaaagccaaagcatttttatatttaacattgaaagggaagacaaarctctatatttaaaatgacaaaaatggagcatgagtacccccagtctcttaacccactcccatagcagacatcatgtgacattgtgatgtataatgggatttttatatatttggtcttcaccctgtttcttacatacagctcctaaaatccttgtaatctctggagtgatatgagtctcttctgtatattaatgagatgcctggtggctgggggtccctgggtggcttcaggatgggagctggtcacaaggaaaataaaggcacgattagagggttgagactttcagccctactccttaacccatagggaggagaaaggggctgaaggt

SEQ ID NO: 79203 - DNA, 1546 bp, Homo sapiens
  misc_feature (1)...(1546): n = A,T,C or G
ctttaaaactatttggaacaatgactcaaaataagagaaggagaaaatggagtatattgttctctttttatcaaaattaataaaaataataatgtatattaagtgacaatgagtaaaaattaaatgttttaatatctaaaataactttaaaaataataatgtatacatagcaaattagtaaaataaaataacaattctataaattatttgaaaaatctgaatataggccagacaagaaatgaatagaagtataaagtaagtgagcctaacataggaacagtagaatttagttacaatattaattttaaagaaaacagtcaatgataagattaaacatgccctagaaatgccagttttctctttttttacacgttgaaaacatctgggcagnnnnnnnnnnnnnnnnnnnnnnnnnnnnnnnnnnnnnnnnnnnnnnnnnnnnnnnnnnnnnnnnnnnnnnnnnnnnnnnnnnnnnnnnnnnnnnnnnnnnaaactcatttcaattaaactcttttctaaaacaattatggagaatttatgtactgcccaaattctttgttattaagaaggcaatataataacattctgatttctgaagttgtagaatccatctttgaagcatttgaaaactaaaatgtttctccagaaagtgtatccgaatgttgcctaaaatactgagattattttagattagggcttctcagtcagtatgctgctaccatttcaggctcaataattctttattttgggggcctctcctgtgcattatgagatgtttagcaggatccctggcctccactcactaaatgttaatagcatcctcctagtcataacaagcaaactatgtctctagacattgtcaaaatttcccttgagggaaaaattacctcttgttgaaaacaattgccccagatgatctataatcatttactacagtgctgaagataactatcatctttagttccagggttgactgacttaattcatgttatgctaattctccaaaaacattagacatcttcattaaaatagcatataaattataaggcatccctgaactatttttacaaaaataacttattttgagaaggtgttgctttgatgttgaaagaataagagcataaattttttaaactatatgtagaaaatattctgcatttgaaaaakaaatagaacgaaaacatatttctacagaaattcttggaacttttctacttttgtgtaaagatcaattatgacagactaatatgaaatttgacctttatttggaagaaatctgtcacaggttgtcattgattacatgaaaaattataaacgttctgtactaaacaggaacactatcagcatttacagtgactgcacatctgcctagtgagattccagtcatacttaatatcaccctgatgcctgatttggaaacaaacttacactttctctaaaagcaagaacaaagaatttggactataaaaacaggttcctggaatcttaccatatttgtatttttttcaccggtaattttacttcaaacataatcttgttcattagc

SEQ ID NO: 79204 - DNA, 960 bp, Homo sapiens
tgcattaagctagatgctaaggaatagaagataaataggtgaccaagatactaccttcaatattgagcttgcattgtagtgaaggagactggataataaaaagaayatttcaataaagagacaggcgtattatggcaagattaaatgtatactgatacagtgaaggaaatcttaagctatacagttagggggctgtgaaaagcttttaggagtaaattatgtttgagctgagacctgcagaacgggtgagagaaagggaagacaaagaaagcagagaacagaaaattaaggagataaagaggagtgagcaggtgcaagctcaagtaaggagaacgagtagcttgtttttttatagactagcccaaaaccgtgaccacatggggctacaaaggcctgggtttgattggtagaaaaagaaaaacattcaataattacactatgaaataagtaaaggccatgttaccaagtttttgctagaaggaacccatcctatagggtaaagatgaaaatgaaaaaaaaaagaaagaaagcatgcgacaacacgtttggtttattgctgctttagtaacttcaaatccccacattttgaaaataggaagttaattcccaaatatctttaactacccttcccttcaagcttgagtattcagattaggagttcatgattttatttaggagaatagactccttaacaggatctctgtcgaggaatctactttctatacaaattatagtgttttgcagatgtgtattagttatacattgctgcatagcaagaacacgacaaacttgtgacttaaaataacatacatttgttactgcatagtttctgtgggtttggagcccaagcatgattgactttggtctccaggtaatggtttacttagagtctcaaaaattttcagtcatatttttggctgtggctgtgatctgagcctctatcagggaacttatgcagtt

SEQ ID NO: 79205 - DNA, 960 bp, Homo sapiens
tgcattaagctagatgctaaggaatagaagataaataggtgaccaagatactaccttcaatattgagcttgcattgtagtgaaggagactggataataaaaagaatatttcaataaagagacaggsgtattatggcaagattaaatgtatactgatacagtgaaggaaatcttaagctatacagttagggggctgtgaaaagcttttaggagtaaattatgtttgagctgagacctgcagaacgggtgagagaaagggaagacaaagaaagcagagaacagaaaattaaggagataaagaggagtgagcaggtgcaagctcaagtaaggagaacgagtagcttgtttttttatagactagcccaaaaccgtgaccacatggggctacaaaggcctgggtttgattggtagaaaaagaaaaacattcaataattacactatgaaataagtaaaggccatgttaccaagtttttgctagaaggaacccatcctatagggtaaagatgaaaatgaaaaaaaaaagaaagaaagcatgcgacaacacgtttggtttattgctgctttagtaacttcaaatccccacattttgaaaataggaagttaattcccaaatatctttaactacccttcccttcaagcttgagtattcagattaggagttcatgattttatttaggagaatagactccttaacaggatctctgtcgaggaatctactttctatacaaattatagtgttttgcagatgtgtattagttatacattgctgcatagcaagaacacgacaaacttgtgacttaaaataacatacatttgttactgcatagtttctgtgggtttggagcccaagcatgattgactttggtctccaggtaatggtttacttagagtctcaaaaattttcagtcatatttttggctgtggctgtgatctgagcctctatcagggaacttatgcagtt

SEQ ID NO: 79206 - DNA, 960 bp, Homo sapiens
tgcattaagctagatgctaaggaatagaagataaataggtgaccaagatactaccttcaatattgagcttgcattgtagtgaaggagactggataataaaaagaatatttcaataaagagacaggcgtattatggcaagattaaatgtatactgatacagtgaaggaaatcttaagctatacagttagggggctgtgaaaagcttttaggagtaaattatgtttgagctgagacctgcagaacgggtgagagaaagggaagacaaagaaagcagagaacagaaaattaaggagataaagaggagtgagcaggtgcaagctcaagtaaggagaacgagtagcttgtttttttatagactagcccaaaaccgtgaccacatggrgctacaaaggcctgggtttgattggtagaaaaagaaaaacattcaataattacactatgaaataagtaaaggccatgttaccaagtttttgctagaaggaacccatcctatagggtaaagatgaaaatgaaaaaaaaaagaaagaaagcatgcgacaacacgtttggtttattgctgctttagtaacttcaaatccccacattttgaaaataggaagttaattcccaaatatctttaactacccttcccttcaagcttgagtattcagattaggagttcatgattttatttaggagaatagactccttaacaggatctctgtcgaggaatctactttctatacaaattatagtgttttgcagatgtgtattagttatacattgctgcatagcaagaacacgacaaacttgtgacttaaaataacatacatttgttactgcatagtttctgtgggtttggagcccaagcatgattgactttggtctccaggtaatggtttacttagagtctcaaaaattttcagtcatatttttggctgtggctgtgatctgagcctctatcagggaacttatgcagtt

SEQ ID NO: 79207 - DNA, 960 bp, Homo sapiens
tgcattaagctagatgctaaggaatagaagataaataggtgaccaagatactaccttcaatattgagcttgcattgtagtgaaggagactggataataaaaagaatatttcaataaagagacaggcgtattatggcaagattaaatgtatactgatacagtgaaggaaatcttaagctatacagttagggggctgtgaaaagcttttaggagtaaattatgtttgagctgagacctgcagaacgggtgagagaaagggaagacaaagaaagcagagaacagaaaattaaggagataaagaggagtgagcaggtgcaagctcaagtaaggagaacgagtagcttgtttttttatagactagcccaaaaccgtgaccacatggggctacaaaggcctgggtttgattggtagaaaaagaaaaacattcaataattacactatgaaataagtaaaggccrtgttaccaagtttttgctagaaggaacccatcctatagggtaaagatgaaaatgaaaaaaaaaagaaagaaagcatgcgacaacacgtttggtttattgctgctttagtaacttcaaatccccacattttgaaaataggaagttaattcccaaatatctttaactacccttcccttcaagcttgagtattcagattaggagttcatgattttatttaggagaatagactccttaacaggatctctgtcgaggaatctactttctatacaaattatagtgttttgcagatgtgtattagttatacattgctgcatagcaagaacacgacaaacttgtgacttaaaataacatacatttgttactgcatagtttctgtgggtttggagcccaagcatgattgactttggtctccaggtaatggtttacttagagtctcaaaaattttcagtcatatttttggctgtggctgtgatctgagcctctatcagggaacttatgcagtt

SEQ ID NO: 79208 - DNA, 2213 bp, Homo sapiens
taccttatgaagagctctgaagttgagataatatcttagagttatgtaacttggggcaagtgggataggtttttataactccgtgtacttaagtaattgaatattggttgcctgaggaagggaacatgtctttgagtgaagtggctcacttcagttaaggtgccygaggaaggctgacaactgtgaattgtcaactggcagcagtccaagcagttaagggaatgaattcttcatttataaagagtaatctgaaagatattacaattaccactagtctaccacttaccctgctcacatccatttctttacatattcctgggatcatcaggtccaggattcccaagaaaattctgtctagggggaaacttaagaaaatgtcataatataaatcagccccacaacctcagctagtctaaggttcacaaccaacgcgctctgtctctctcctctactatacagttgaaattcccctgtacgtcacctagcaccgttgctaatctctgtggcatgcctacatataggtacaatctaaacactcatccatgaagggtcttctccttgatcactatgcccaactgtagcatggctgctacaattgtctatttattgtaaaaactgggtgagggaataccaaaagcttccaagcggatcacacctgtaccaaacatatgcttctttgcctcatggcaaaacagctcccctatctcttcctggtggtcaagactgattatctattacatgaaaggaaatacaattttttctttcaactattcacttagatatttagattattggccatccactttattttccaaaatcacagactatgacacatttttctattgcctgttttcaaatatttctgattctatctatcccatctggggacagggagataattaaattgttgaatgagttctgtcagggtaaatacgacaacattctccagtactcttattctgaatatctgacacagtaaatagtctataaagcacctgttgaatgaatagtatgctcatggtaacaaaataattctttatctctgtctctgtttttctgcatctctgtctcttctactctccttgtgtatgtgtgtgtatgcatgtgtaggggtaagctattgtgtgggggggttggtaaaagagaaagatgatgatggaagtgaaaggagagcgagaggagagagaaagagagagaggagagagagagagagaattggaagctggtttactctgagagtgaaatcagtttacagatagtatccctcaccaagttagcgttcatgtagctcagagatacatctaaaagtctcaacattaaaaatctgtcccatagctaccaaaagtataccaaaaaatcaccatgatgaaagaatgattcagtgctacaaagaaggattatactataaatagcagcttcttaattggtattagtgggattctgaaataattcctccaatgaagttaatatttcagcaaattaaagattacattttttttttctaagcataaaatctctctcacttcattagctgtgtcagtctacaggtcccaaagttatatttgcaataaaaagctatattttcaatcaaatttgttaaaacaaatcttagtagatgaatcaggttttgaccctaacaatattggtggtggttgttcttataaataaattctgttaggctgagtttctagacagttaagattacatccaaatataggggaggcaggcacaataggaaaaaagaaaatagaattatcagactacacgcagtattgcagtacacatataacttctggactatgacagacctcgaagtagtttctagctactatttcctacccattagtccattcatatgtaaaacacactcttcaggttaactgctttcaatttggttactcacttctgtcctgtgtcctcttctaagagattgtagggcagagaatgtaagaaatatcctaatttcaaatatagtttaaattaggaagcataggcctaatgtaattctcattcctcattgtaagttaatctacccagttgtcttttcttgtattttatagaagtttctgagttcttgggttaacaagacatattaataatatgctttggacatattacctgattttttttctatcaatatatatttaaatatgctttattggtatacagctatttggtaaaaccagtgtaatttacttttttccctaatatgc

SEQ ID NO: 79209 - DNA, 2213 bp, Homo sapiens
taccttatgaagagctctgaagttgagataatatcttagagttatgtaacttggggcaagtgggataggtttttataactccgtgtacttaagtaattgaatattggttgcctgaggaagggaacatgtctttgagtgaagtggctcacttcagttaaggtgcccgaggaaggctgacaactgtgaattgtcaactggcagcagtccaagcagttaagggaatgaattcttcatttataaagagtaatctgaaagatattacaattaccactagtctaccacttaccctgctcacatccatttctttacatattcctgggatcatcaggtccaggattcccaagaaaattctgtctagggggaaacttaagaaaatgtcataatataaatcagccccacaacctcagctagtctaaggttcacaaccaacgcgctctgtctctctcctctactatacagttgaaattcccctgtacgtcacctagcaccgttgctaatctctgtggcatgcctacatataggtacaatctaaacactcatccatgaagggtcttctccttgatcactatgcccaactgtagcatggctgctacaattgtctatttattgtaaaaactgggtgagggaataccaaaagcttccaagcggatcacacctgtaccaaacatatgcttctttgcctcatggcaaaacagctcccctatctcttcctggtggtcaagactgattatctattacatgaaaggaaatacaattttttctttcaactattcacttagatatttagattattggccatccactttattttccaaaatcacagactatgacacatttttctattgcctgttttcaaatatttctgattctatctatcccatctggggacagggagataattaaattgttgaatgagttctgtcagggtaaatacgacaacattctccagtactcttattctgaatatctgacacagtaaatagtctataaagcacctgttgaatgaatagtatgctcatggtaacaaaataattctttatctctgtctctgtttttctgcatctctgtctcttctactctccttgtgtatgtgtgtgtatgcatgtgtaggggtaagctattgtgtgggggggttggtaaaagagaaagatgatgatggaagtgaaaggagagcgagaggagagagaaagagagagaggagagagagagagagaattggaagctggtttactctgagagtgaaatcagtttacagatagtatccctcaccaagttagcgttcatgtagctcagagatacatctaaaagtctcaacattaaaaatctgtcccatagctaccaaaagtataccaaaaaatcaccatgatgaaagaatgattcagtgctacaaagaaggattatactataaatagcagcttcttaattggtattagtggrattctgaaataattcctccaatgaagttaatatttcagcaaattaaagattacattttttttttctaagcataaaatctctctcacttcattagctgtgtcagtctacaggtcccaaagttatatttgcaataaaaagctatattttcaatcaaatttgttaaaacaaatcttagtagatgaatcaggttttgaccctaacaatattggtggtggttgttcttataaataaattctgttaggctgagtttctagacagttaagattacatccaaatataggggaggcaggcacaataggaaaaaagaaaatagaattatcagactacacgcagtattgcagtacacatataacttctggactatgacagacctcgaagtagtttctagctactatttcctacccattagtccattcatatgtaaaacacactcttcaggttaactgctttcaatttggttactcacttctgtcctgtgtcctcttctaagagattgtagggcagagaatgtaagaaatatcctaatttcaaatatagtttaaattaggaagcataggcctaatgtaattctcattcctcattgtaagttaatctacccagttgtcttttcttgtattttatagaagtttctgagttcttgggttaacaagacatattaataatatgctttggacatattacctgattttttttctatcaatatatatttaaatatgctttattggtatacagctatttggtaaaaccagtgtaatttacttttttccctaatatgc

SEQ ID NO: 79210 - DNA, 2213 bp, Homo sapiens
taccttatgaagagctctgaagttgagataatatcttagagttatgtaacttggggcaagtgggataggtttttataactccgtgtacttaagtaattgaatattggttgcctgaggaagggaacatgtctttgagtgaagtggctcacttcagttaaggtgcccgaggaaggctgacaactgtgaattgtcaactggcagcagtccaagcagttaagggaatgaattcttcatttataaagagtaatctgaaagatattacaattaccactagtctaccacttaccctgctcacatccatttctttacatattcctgggatcatcaggtccaggattcccaagaaaattctgtctagggggaaacttaagaaaatgtcataatataaatcagccccacaacctcagctagtctaaggttcacaaccaacgcgctctgtctctctcctctactatacagttgaaattcccctgtacgtcacctagcaccgttgctaatctctgtggcatgcctacatataggtacaatctaaacactcatccatgaagggtcttctccttgatcactatgcccaactgtagcatggctgctacaattgtctatttattgtaaaaactgggtgagggaataccaaaagcttccaagcggatcacacctgtaccaaacatatgcttctttgcctcatggcaaaacagctcccctatctcttcctggtggtcaagactgattatctattacatgaaaggaaatacaattttttctttcaactattcacttagatatttagattattggccatccactttattttccaaaatcacagactatgacacatttttctattgcctgttttcaaatatttctgattctatctatcccatctggggacagggagataattaaattgttgaatgagttctgtcagggtaaatacgacaacattctccagtactcttattctgaatatctgacacagtaaatagtctataaagcacctgttgaatgaatagtatgctcatggtaacaaaataattctttatctctgtctctgtttttctgcatctctgtctcttctactctccttgtgtatgtgtgtgtatgcatgtgtaggggtaagctattgtgtgggggggttggtaaaagagaaagatgatgatggaagtgaaaggagagcgagaggagagagaaagagagagaggagagagagagagagaattggaagctggtttactctgagagtgaaatcagtttacagatagtatccctcaccaagttagcgttcatgtagctcagagatacatctaaaagtctcaacattaaaaatctgtcccatagctaccaaaagtataccaaaaaatcaccatgatgaaagaatgattcagtgctacaaagaaggattatactataaatagcagcttcttaattggtattagtgggattctgaaataattcctccaatgaagttaatatttcagcaaattaaagattacattttttttttctaagcataaaatctctctcacttcattagctgtgtcagtctacaggtcccaaagttatatttgcaataaaaagctatattttcaatcaaatttgttaaaacaaatcttagtagatgaatcaggttttgaccctaacaatattggtggtggttgttcttataaataaattctgttaggctgagtttctagacagttaagattacatccaaatataggggaggcaggcacaataggaaaaaagaaaatagaattatcagactacacgcagtattgcagtacacatataacttctggactatgacagacctcgaagtagtttctagctactatttcctacccattagtccattcatatgtaaaacacactcttcaggttaactgctttcaatttggttactcacttctgtcctgtgtcctcttctaagagattgtagggcagagaatgtaagaaatatcctaatttcaaatatagtttaaattaggaagcataggcctaatgtaattctcattcctcattgyaagttaatctacccagttgtcttttcttgtattttatagaagtttctgagttcttgggttaacaagacatattaataatatgctttggacatattacctgattttttttctatcaatatatatttaaatatgctttattggtatacagctatttggtaaaaccagtgtaatttacttttttccctaatatgc

SEQ ID NO: 79211 - DNA, 2213 bp, Homo sapiens
taccttatgaagagctctgaagttgagataatatcttagagttatgtaacttggggcaagtgggataggtttttataactccgtgtacttaagtaattgaatattggttgcctgaggaagggaacatgtctttgagtgaagtggctcacttcagttaaggtgcccgaggaaggctgacaactgtgaattgtcaactggcagcagtccaagcagttaagggaatgaattcttcatttataaagagtaatctgaaagatattacaattaccactagtctaccacttaccctgctcacatccatttctttacatattcctgggatcatcaggtccaggattcccaagaaaattctgtctagggggaaacttaagaaaatgtcataatataaatcagccccacaacctcagctagtctaaggttcacaaccaacgcgctctgtctctctcctctactatacagttgaaattcccctgtacgtcacctagcaccgttgctaatctctgtggcatgcctacatataggtacaatctaaacactcatccatgaagggtcttctccttgatcactatgcccaactgtagcatggctgctacaattgtctatttattgtaaaaactgggtgagggaataccaaaagcttccaagcggatcacacctgtaccaaacatatgcttctttgcctcatggcaaaacagctcccctatctcttcctggtggtcaagactgattatctattacatgaaaggaaatacaattttttctttcaactattcacttagatatttagattattggccatccactttattttccaaaatcacagactatgacacatttttctattgcctgttttcaaatatttctgattctatctatcccatctggggacagggagataattaaattgttgaatgagttctgtcagggtaaatacgacaacattctccagtactcttattctgaatatctgacacagtaaatagtctataaagcacctgttgaatgaatagtatgctcatggtaacaaaataattctttatctctgtctctgtttttctgcatctctgtctcttctactctccttgtgtatgtgtgtgtatgcatgtgtaggggtaagctattgtgtgggggggttggtaaaagagaaagatgatgatggaagtgaaaggagagcgagaggagagagaaagagagagaggagagagagagagagaattggaagctggtttactctgagagtgaaatcagtttacagatagtatccctcaccaagttagcgttcatgtagctcagagatacatctaaaagtctcaacattaaaaatctgtcccatagctaccaaaagtataccaaaaaatcaccatgatgaaagaatgattcagtgctacaaagaaggattatactataaatagcagcttcttaattggtattagtgggattctgaaataattcctccaatgaagttaatatttcagcaaattaaagattacattttttttttctaagcataaaatctctctcacttcattagctgtgtcagtctacaggtcccaaagttatatttgcaataaaaagctatattttcaatcaaatttgttaaaacaaatcttagtagatgaatcaggttttgaccctaacaatattggtggtggttgttcttataaataaattctgttaggctgagtttctagacagttaagattacatccaaatataggggaggcaggcacaataggaaaaaagaaaatagaattatcagactacacgcagtattgcagtacacatataacttctggactatgacagacctcgaagtagtttctagctactatttcctacccattagtccattcatatgtaaaacacactcttcaggttaactgctttcaatttggttactcacttctgtcctgtgtcctcttctaagagattgtagggcagagaatgtaagaaatatcctaatttcaaatatagtttaaattaggaagcataggcctaatgtaattctcattcctcattgtaagttaatctacccagttgtyttttcttgtattttatagaagtttctgagttcttgggttaacaagacatattaataatatgctttggacatattacctgattttttttctatcaatatatatttaaatatgctttattggtatacagctatttggtaaaaccagtgtaatttacttttttccctaatatgc

SEQ ID NO: 79212 - DNA, 2213 bp, Homo sapiens
taccttatgaagagctctgaagttgagataatatcttagagttatgtaacttggggcaagtgggataggtttttataactccgtgtacttaagtaattgaatattggttgcctgaggaagggaacatgtctttgagtgaagtggctcacttcagttaaggtgcccgaggaaggctgacaactgtgaattgtcaactggcagcagtccaagcagttaagggaatgaattcttcatttataaagagtaatctgaaagatattacaattaccactagtctaccacttaccctgctcacatccatttctttacatattcctgggatcatcaggtccaggattcccaagaaaattctgtctagggggaaacttaagaaaatgtcataatataaatcagccccacaacctcagctagtctaaggttcacaaccaacgcgctctgtctctctcctctactatacagttgaaattcccctgtacgtcacctagcaccgttgctaatctctgtggcatgcctacatataggtacaatctaaacactcatccatgaagggtcttctccttgatcactatgcccaactgtagcatggctgctacaattgtctatttattgtaaaaactgggtgagggaataccaaaagcttccaagcggatcacacctgtaccaaacatatgcttctttgcctcatggcaaaacagctcccctatctcttcctggtggtcaagactgattatctattacatgaaaggaaatacaattttttctttcaactattcacttagatatttagattattggccatccactttattttccaaaatcacagactatgacacatttttctattgcctgttttcaaatatttctgattctatctatcccatctggggacagggagataattaaattgttgaatgagttctgtcagggtaaatacgacaacattctccagtactcttattctgaatatctgacacagtaaatagtctataaagcacctgttgaatgaatagtatgctcatggtaacaaaataattctttatctctgtctctgtttttctgcatctctgtctcttctactctccttgtgtatgtgtgtgtatgcatgtgtaggggtaagctattgtgtgggggggttggtaaaagagaaagatgatgatggaagtgaaaggagagcgagaggagagagaaagagagagaggagagagagagagagaattggaagctggtttactctgagagtgaaatcagtttacagatagtatccctcaccaagttagcgttcatgtagctcagagatacatctaaaagtctcaacattaaaaatctgtcccatagctaccaaaagtataccaaaaaatcaccatgatgaaagaatgattcagtgctacaaagaaggattatactataaatagcagcttcttaattggtattagtgggattctgaaataattcctccaatgaagttaatatttcagcaaattaaagattacattttttttttctaagcataaaatctctctcacttcattagctgtgtcagtctacaggtcccaaagttatatttgcaataaaaagctatattttcaatcaaatttgttaaaacaaatcttagtagatgaatcaggttttgaccctaacaatattggtggtggttgttcttataaataaattctgttaggctgagtttctagacagttaagattacatccaaatataggggaggcaggcacaataggaaaaaagaaaatagaattatcagactacacgcagtattgcagtacacatataacttctggactatgacagacctcgaagtagtttctagctactatttcctacccattagtccattcatatgtaaaacacactcttcaggttaactgctttcaatttggttactcacttctgtcctgtgtcctcttctaagagattgtagggcagagaatgtaagaaatatcctaatttcaaatatagtttaaattaggaagcataggcctaatgtaattctcattcctcattgtaagttaatctacccagttgtcttttcttgtattttatagaagtttctgagttcttgggttaacaagacatattaataatatgctttggacatattacctgattttttttctatcaatatatatttaaatatgctttattggtatacagctatttggtaaaamcagtgtaatttacttttttccctaatatgc

SEQ ID NO: 79213 - DNA, 618 bp, Homo sapiens
tgtaaataaaaacctggaaagttttgctgggcccttgagtatgtgcttaaaaaaatctggaatgctggccgggcgcggtggctcacacctgtaatcccagcactttgggaggccaaggtgggcagatcacctgaggtcaggagtttaagactagcctggccaacatggtgaaacacgtctgtactaaaaacacaaaaaaattagccaggcatggtggcaggcgcctgtagtcccagctactcaggagggtgaggaaggagaatcgcttgaacccrggaggcagaggttgcagtgagctgagatcgcaccactgcactccagcctgggcgacatgagcgaaactctgtctcaaaaaaaaaaaaaaaaaaaaaaatggaatacttattgccaaattgtcccttacaaaagtagcatagcttttttaacaagctcattgatgtatgtgttgatatattatttgttattgctccttatttcatgagttttagcatttacaaatagttagatttgtttttttataaacagattctactaagaatttgtgagctccataaacagcaagttactgcccctgcccaagcccaggtgctgttctaatcctgacaagggcactgtcat

SEQ ID NO: 79214 - DNA, 2354 bp, Homo sapiens
catgtggggaaagatatcgagagatacaggtgggaaaccagaagagccaatgagtgatagaaatgggatgtgcagtggttcttcagaggatacaggttttactgtagtcttctgggaggagttgagggttgaggaaggcccctgaaaatgctgacattcataagtaggcagagaagaggaagaaaagaccagggaagggacatagaatattaagcaatggcataaaaagaagagtaagtctaatccggctacaatatccctgctgcacagtgtaagacaaacatttttcatttttagtttctgtcatttcaaatatttatttaatacaaatatttcttttcttttctttctttttttgtttttgagatagaatcttgctctgttgccaggctggagtgcagagtgcagtggtgcactctcatcttattacaacctccgcctcccgggttcaagtgattcttctgcctcagccccctgagtagctgggactacaggcacacacaaccacacccagctaatttttacatttttagtagagatggagtttcaccatgttggccaggatggtctcaatctcttgacctcgtgatcctcccgcctcagcctcccaaagtgctgggattacaggcgtgagccaccatgcccggttacaaatacttctttaatgcccagtctgcatctaatacctaagagtcatgcacctaagagccatgactccattcagaaccctttccttgagaaccacgtaaattattcaaataaatattttagggaaatatataaaattatataaggcttagtgtacagaatcgggtgaaataatggtggaaaagagctgagacatgtagaccaaacagaatcaaaatcaataattaatctgaattaaccaggtaatagaaaggagaggattatagggttaaaaataaaagacaaaaacctgatgaacttaaataatcatctcctcttgttttttgtctatgaagtgtcagagaagggtttcttcttttcttccttcttttcttttttttctttctcagtgtagacgttcctattagactataagcttgaggaatgccaggactacatctgtcttcattgctgctctacttccagtgcctagcaaattgaaaatgcaaaaatatttgctgaatcaaattgaaatcttaatcacaaatatgtatatgtatgcatttaagaatattacttgtgtaacacatataaatgcaaacccaaatatatataattaaaaataggctcataaacaaatttgattgcggaacaccaaattttaaaattttttgtacttatttaaacaatgactggaagcagctcagaaatgtttgactgtgtgcaggtcaatgataagaacacaatagttatattttactggtaaagtcattttaaacttgtgaatcatgtacctacatatgagtgtttaagaaactatttaaccttttacaaaatattgtctttgggtttattaatttattgtatctttactgtctttttaattaatttctgctattatttaaaatatttattatttcctttcttctgcttgtatagatttattttgctgttctttttcctaacttctgtaaactgataatgagatgattgattgattgattttttagcttctacaattttccattatatatgttagggctacaagttttattcaaatcatgactttagctgcattgccaaagtttcattatattgtatttcagttagttataatctatcaccgtgatttttattgtgatttcttctttgactcatgaactatttagaagtacattgcttaattccagatagggattttatgattttaatggattacctctttgatactaatttatagctaatgccattttttaattttaatttttgtgggtacatactaggtacatttaatattattcattaattctttattttttttttttttttttggcaaaagcagggtctccctatattgccaaggctggtcttgaattcctggactcaagcgatcttcttatttcagcctcccaaattgctggctttacaggtgtgagccaccatgcccggccagttaattttattttgatcagagatcattctgggactttaaaaatgttttaatcctttgaaatacgttaaatcatgctttatagttcatgagccatgcacatttttccagtttttccattcgtctttccttgaggctggatatattttattgtcctaactgcyagtttaccagtcctctctttcattgtatttaatctgccaataaacccatttataaaacccttactttctgtcactgagttttttcttctagaatttctatttcttttcttttt

SEQ ID NO: 79215 - DNA, 1703 bp, Homo sapiens
agtatataaaatcactctggaaatttaaaaacactggaagccaatattgtcataatttctctaactaaagacctaagtcttcatggcaaaggaggaaagagttaaatgccttcatagattagaaaaatagaataattcattttaagaaactgcttattttctagtccctgattatacatatagacgagtgacccacggcctgtggaggcttactgtcattgttttactagtaatatctaatatttcttgagcactttctatgttctgggtgctattctaagcactttatatatgctgtgtcatttaaacctcatggcaaccacatcaggtggtcactattatcatccccattttccagaaaaggcacagggagggtaatgtgcgtaaccaaagttacctaactagttagttgagtcagaatgcatgtccaatcaggaggaaatggaagtatgcaccaactgtgagtcacatttatatacatttttgccacatctagttatttactagagctaaattttctgtatggacataattggggtccatcagtaaaggaattgtcagaattctaaatctctaattctaacttctagttaggagttagacccatgagcaagattccatccacatcaaacattaaaatcagttccattgtctttctagaaagattagtttcacaaataccacttttatgatccacagtttttgactctagcttttaaaatcagttacatcattccaccatgaggtgatttcaatgccatttaagtataagtctctcccctccagcttcatggtcagattcaaattgaaattcctgggcaattcatccaattatttgaaacttagtttcctcatctatacaatggaaatatataaacttagctcatcatgttgttgtgaagattcagtgaggtaacgtaaaaacctgtgactgttataagtaactcaaaggatgcttcaaaattccacatataaaacagttggagttacttgaataagagctaggcttagcaaatccctctctagaaagaaaacaaattatttcaagaaaatactctttcaaacacttcaaaacttgaaggattgtgaaattagaagttattwtatatttttaccttttaatggtaacagtattcaacagccactatctggatattctctgtttgtgtggtttcaggtataccttaagtgactcagttccaagtgcgtttattttaaacaatactaaaatgcagattttcactagttcagactgtactcccccactatcaattcagatcagtgaggttttaaaacaaatcaaatcatcctgaaaagcacatcaccacccacccagcaggcactgaacaactgccacattcttgacacgagctggtaatgtacacaccgagaccaagccatcaaaatgtgccatcttggctttcatggaccctatgagctaagacaaacacactgacatgtcatggaaagtagtttgagaacaaatcagagcataaatgcagctagagtatgtgggagacagttccaattctcgtttttaaagtaattgttttcctgaattacaacataatacaaagaaagattttccaaagtcaaataaaacagaaagagctaaacataatttaaaagtctcctattaatctacctttctaagaccactaactataggactataatgctttctgtgtgtgtttgtgcatgca

SEQ ID NO: 79216 - DNA, 3480 bp, Homo sapiens
ataaataaaatacttttaagagatgagccctggaaggcaaacacaatattgagaagagttggtttatttagcctggtgatattgtggataacttttttttattctagggctgttataacatttcaggccatagaccttttgcttacttaaatctctcttaaagttgagtatctttccattgtaagagacataggatctcacaacagaaaattaggaaactagcgaagaactgaaaggataaattaatgcactcctagagctatcaccagtcaacaattgctattaataggctgtgtcttttgttggagtcttcctacattttttattttacattttagggggaggtattttacatctttgagttttatacctatcatttagatcttctttttctccactcaggagtaaaacgtcataaagaagagcttgtgtttggagtcatggagtttgagttcagttgcttgccagttcccacagcctgggccaagaactttctctctctgagtctcaggtttctcatttgttaaatgaccatattcttagtacctgtgtcataaataagttattgcatgtaaactgcaaactcaattccagacatacagtaggcactctagaagtgtgattttggaataaagaataaatgaatcaagtagaggaaattgacctggtcgagatcagggaaggcttcttgggagaagtgccatttgatctgggatttaaaggttacgaaggtgtttgccaagctgagaaggggaccaggtactgggggaagttgggagagaagaaggatcattcagatcaagggaatagcatctgccataactcaaatggataatcagaggcaggagggaagcaaaagaaggtcagtgagaaaagaggctaggaacaagggggagtgtggtgcagagagtccagggaagtcagcgaagacaagatggtgcagggctctaagtccatcacaaggaggctgggctttgtcctagagagcaatggggaagccatcagaaggttttaaggagggaaatgtctggtcagacatctatatttaggagagtgctctccctgcagtgtggggcatggattggggagtgagggcaaactagaatttgggagacctcataagaggctgtctccctgttcctggcaaggaatggtcagagcttgacctagttggacctttagccataagttttcccacacaagtaagcaaacaccaagaccgcttttgtgactggttgttgcctggctcttagttaccaatgcatctaaaaatgcaccttgcttggccaactttgcagcctactgtttagaatctgcaggtgtccaatgagctggaatgaaagagtaaggatgcataatttggcctggcctgaaaaaggtacagaaagtgctaccattgatagaggagaaggctgccctccaggcctgcagcaagcaccctaggtttatattccagaccaccagccactgtaattatacattcgcaggcctcagcaaggcatggtatagatgctcgcrgccagggtccctgttataaaggctctggtcttggttggttattaactatacagtacgaagcctcataaacacctttttacatgtacagtgcaacctttcaatacaacaatcaaatgcttttcaacaaattacagtctcctgggaaagagaccccttgattacttcccagaaagaggtggagggaaactttaggcagaacttgttcgaagcctgatatttagaactgtgtttgttttgggctggaaatgctagcctagagttcagaccttgaacagctctagggaaatcaatgccaattaatccaaatcttaccagaggaaaaatcaagccacagatataatttaaccaaccagttctactttacagatgagcaaaatgagcttagagaggggcagccccttctaaggtcacctgggaactccgaggtggaatgtggggactagctgcctaaatcctccttaggcagacaatggtgttcagatcctgccttgggtccactttatttgttcagagtttgtcatcttgtaataaaaatgttgactcctcatccacaataccatttccttttcatcatactttctctgatgttcccaatcaagcaaactctttctcctcttctagaaatagctctttagatttcatagactagtaaaatttgcagacctagggttgtgaactttttattttgccaagtaaagacattgaaaaaacaacaagcaaaagagacaactacccaataatgtgcgcaatttgtgatcaccagctttcacacagagaaaacacattatcatctaaggagaagaaaataaaagaggaagagaaggagagagaaaaggaaagatagaaattatatgggccataatggtggtggttacatgagcgtatacatttgtcaaaaaatcattgctgttcattagaaggtgtgcattttgacaaaacaaaaaacaaggcaagatatgaagaatgaaaagtcccatatcctaatcaggcatatctttcttgaacccaagagctgcgtctgcatttggaactatgcagaaggacacagaaggatggatgcatagacaatcccctaatgtcactttcctttagctccttccctatccacgtccacccaggaaaatgctgaccagagcatgtgtctactcagtatctctgatggaaatccaccaggacacagccaggaaatccctctgcctttgaaattgccaggagcgcttagggaaagagcacaattgttccaggctttagtgtcttcttttgctcattgagaaggtcatcaccctccagggatgaatgtgggaatctcaacagcatgtcttgagagttcgggctcttacaaagtcaaggggagctaaataaatccatccagacttgttttcttagttccagcctttactcttttgcttataaaacatgatgcttagaggaaactgagagaatgctgacttagggatcagaaagatctgggtatgaattctggcttggatagttaactagctgtgtgacatggggcaagtaacttcaccctgatgagcctctacttcctctgctgtaaaaaaaggggtcacaatatcgaccttacagaggtgttgtgaggatggaacaagataacatatggagggttgccagctcaatgtcttccaaatagtaggttttgaataaacgtatagatattatgatcacttctcccagacagttccttgtgtttcctagaagctagcagaaattggagagctttcacaagtaggatgcttgcagattcagtcttcttgactttaaagcagtgagaataaaatgaggtgacttattttatgtggaatgcttatctccatgcttggcatacagtaggaacttactaaatgagagccacaactgcactaacgggaagctcagctcccttttgcccaaatgtggctggccatagggtagtcactaattgtaccattttttaaatcaggc

SEQ ID NO: 79217 - DNA, 3480 bp, Homo sapiens
ataaataaaatacttttaagagatgagccctggaaggcaaacacaatattgagaagagttggtttatttagcctggtgatattgtggataacttttttttattctagggctgttataacatttcaggccatagaccttttgcttacttaaatctctcttaaagttgagtatctttccattgtaagagacataggatctcacaacagaaaattaggaaactagcgaagaactgaaaggataaattaatgcactcctagagctatcaccagtcaacaattgctattaataggctgtgtcttttgttggagtcttcctacattttttattttacattttagggggaggtattttacatctttgagttttatacctatcatttagatcttctttttctccactcaggagtaaaacgtcataaagaagagcttgtgtttggagtcatggagtttgagttcagttgcttgccagttcccacagcctgggccaagaactttctctctctgagtctcaggtttctcatttgttaaatgaccatattcttagtacctgtgtcataaataagttattgcatgtaaactgcaaactcaattccagacatacagtaggcactctagaagtgtgattttggaataaagaataaatgaatcaagtagaggaaattgacctggtcgagatcagggaaggcttcttgggagaagtgccatttgatctgggatttaaaggttacgaaggtgtttgccaagctgagaaggggaccaggtactgggggaagttgggagagaagaaggatcattcagatcaagggaatagcatctgccataactcaaatggataatcagaggcaggagggaagcaaaagaaggtcagtgagaaaagaggctaggaacaagggggagtgtggtgcagagagtccagggaagtcagcgaagacaagatggtgcagggctctaagtccatcacaaggaggctgggctttgtcctagagagcaatggggaagccatcagaaggttttaaggagggaaatgtctggtcagacatctatatttaggagagtgctctccctgcagtgtggggcatggattggggagtgagggcaaactagaatttgggagacctcataagaggctgtctccctgttcctggcaaggaatggtcagagcttgacctagttggacctttagccataagttttcccacacaagtaagcaaacaccaagaccgcttttgtgactggttgttgcctggctcttagttaccaatgcatctaaaaatgcaccttgcttggccaactttgcagcctactgtttagaatctgcaggtgtccaatgagctggaatgaaagagtaaggatgcataatttggcctggcctgaaaaaggtacagaaagtgctaccattgatagaggagaaggctgccctccaggcctgcagcaagcaccctaggtttatattccagaccaccagccactgtaattatacattcgcaggcctcagcaaggcatggtatagatgctcgcagccagggtccctgttataaaggctctggtcttggttggttattaactatacagtacgaagcctcataaacacctttttacatgtacagtgcaacctttcaatacaacaatcaaatgcttttcaacaaattacagtctcctgggaaagagaccccttgattacttcccagaaagaggtggagggaaactttaggcagaacttgttcgaagcctgatatttagaactgtgtttgttttgggctggaaatgctagcctagagttcagaccttgaacarctctagggaaatcaatgccaattaatccaaatcttaccagaggaaaaatcaagccacagatataatttaaccaaccagttctactttacagatgagcaaaatgagcttagagaggggcagccccttctaaggtcacctgggaactccgaggtggaatgtggggactagctgcctaaatcctccttaggcagacaatggtgttcagatcctgccttgggtccactttatttgttcagagtttgtcatcttgtaataaaaatgttgactcctcatccacaataccatttccttttcatcatactttctctgatgttcccaatcaagcaaactctttctcctcttctagaaatagctctttagatttcatagactagtaaaatttgcagacctagggttgtgaactttttattttgccaagtaaagacattgaaaaaacaacaagcaaaagagacaactacccaataatgtgcgcaatttgtgatcaccagctttcacacagagaaaacacattatcatctaaggagaagaaaataaaagaggaagagaaggagagagaaaaggaaagatagaaattatatgggccataatggtggtggttacatgagcgtatacatttgtcaaaaaatcattgctgttcattagaaggtgtgcattttgacaaaacaaaaaacaaggcaagatatgaagaatgaaaagtcccatatcctaatcaggcatatctttcttgaacccaagagctgcgtctgcatttggaactatgcagaaggacacagaaggatggatgcatagacaatcccctaatgtcactttcctttagctccttccctatccacgtccacccaggaaaatgctgaccagagcatgtgtctactcagtatctctgatggaaatccaccaggacacagccaggaaatccctctgcctttgaaattgccaggagcgcttagggaaagagcacaattgttccaggctttagtgtcttcttttgctcattgagaaggtcatcaccctccagggatgaatgtgggaatctcaacagcatgtcttgagagttcgggctcttacaaagtcaaggggagctaaataaatccatccagacttgttttcttagttccagcctttactcttttgcttataaaacatgatgcttagaggaaactgagagaatgctgacttagggatcagaaagatctgggtatgaattctggcttggatagttaactagctgtgtgacatggggcaagtaacttcaccctgatgagcctctacttcctctgctgtaaaaaaaggggtcacaatatcgaccttacagaggtgttgtgaggatggaacaagataacatatggagggttgccagctcaatgtcttccaaatagtaggttttgaataaacgtatagatattatgatcacttctcccagacagttccttgtgtttcctagaagctagcagaaattggagagctttcacaagtaggatgcttgcagattcagtcttcttgactttaaagcagtgagaataaaatgaggtgacttattttatgtggaatgcttatctccatgcttggcatacagtaggaacttactaaatgagagccacaactgcactaacgggaagctcagctcccttttgcccaaatgtggctggccatagggtagtcactaattgtaccattttttaaatcaggc

SEQ ID NO: 79218 - DNA, 3480 bp, Homo sapiens
ataaataaaatacttttaagagatgagccctggaaggcaaacacaatattgagaagagttggtttatttagcctggtgatattgtggataacttttttttattctagggctgttataacatttcaggccatagaccttttgcttacttaaatctctcttaaagttgagtatctttccattgtaagagacataggatctcacaacagaaaattaggaaactagcgaagaactgaaaggataaattaatgcactcctagagctatcaccagtcaacaattgctattaataggctgtgtcttttgttggagtcttcctacattttttattttacattttagggggaggtattttacatctttgagttttatacctatcatttagatcttctttttctccactcaggagtaaaacgtcataaagaagagcttgtgtttggagtcatggagtttgagttcagttgcttgccagttcccacagcctgggccaagaactttctctctctgagtctcaggtttctcatttgttaaatgaccatattcttagtacctgtgtcataaataagttattgcatgtaaactgcaaactcaattccagacatacagtaggcactctagaagtgtgattttggaataaagaataaatgaatcaagtagaggaaattgacctggtcgagatcagggaaggcttcttgggagaagtgccatttgatctgggatttaaaggttacgaaggtgtttgccaagctgagaaggggaccaggtactgggggaagttgggagagaagaaggatcattcagatcaagggaatagcatctgccataactcaaatggataatcagaggcaggagggaagcaaaagaaggtcagtgagaaaagaggctaggaacaagggggagtgtggtgcagagagtccagggaagtcagcgaagacaagatggtgcagggctctaagtccatcacaaggaggctgggctttgtcctagagagcaatggggaagccatcagaaggttttaaggagggaaatgtctggtcagacatctatatttaggagagtgctctccctgcagtgtggggcatggattggggagtgagggcaaactagaatttgggagacctcataagaggctgtctccctgttcctggcaaggaatggtcagagcttgacctagttggacctttagccataagttttcccacacaagtaagcaaacaccaagaccgcttttgtgactggttgttgcctggctcttagttaccaatgcatctaaaaatgcaccttgcttggccaactttgcagcctactgtttagaatctgcaggtgtccaatgagctggaatgaaagagtaaggatgcataatttggcctggcctgaaaaaggtacagaaagtgctaccattgatagaggagaaggctgccctccaggcctgcagcaagcaccctaggtttatattccagaccaccagccactgtaattatacattcgcaggcctcagcaaggcatggtatagatgctcgcagccagggtccctgttataaaggctctggtcttggttggttattaactatacagtacgaagcctcataaacacctttttacatgtacagtgcaacctttcaatacaacaatcaaatgcttttcaacaaattacagtctcctgggaaagagaccccttgattacttcccagaaagaggtggagggaaactttaggcagaacttgttcgaagcctgatatttagaactgtgtttgttttgggctggaaatgctagcctagagttcagaccttgaacagctctagggaaatcaatgccaattaatccaaatcttaccagaggaaaaatcaagccacagatataatttaaccaaccagttctactttacagatgagcaaaatgagcttagagaggggcagccccttctaaggtcacctgggaactccgaggtggaatgtggggactagctgcctaaatcctccttaggcagacartggtgttcagatcctgccttgggtccactttatttgttcagagtttgtcatcttgtaataaaaatgttgactcctcatccacaataccatttccttttcatcatactttctctgatgttcccaatcaagcaaactctttctcctcttctagaaatagctctttagatttcatagactagtaaaatttgcagacctagggttgtgaactttttattttgccaagtaaagacattgaaaaaacaacaagcaaaagagacaactacccaataatgtgcgcaatttgtgatcaccagctttcacacagagaaaacacattatcatctaaggagaagaaaataaaagaggaagagaaggagagagaaaaggaaagatagaaattatatgggccataatggtggtggttacatgagcgtatacatttgtcaaaaaatcattgctgttcattagaaggtgtgcattttgacaaaacaaaaaacaaggcaagatatgaagaatgaaaagtcccatatcctaatcaggcatatctttcttgaacccaagagctgcgtctgcatttggaactatgcagaaggacacagaaggatggatgcatagacaatcccctaatgtcactttcctttagctccttccctatccacgtccacccaggaaaatgctgaccagagcatgtgtctactcagtatctctgatggaaatccaccaggacacagccaggaaatccctctgcctttgaaattgccaggagcgcttagggaaagagcacaattgttccaggctttagtgtcttcttttgctcattgagaaggtcatcaccctccagggatgaatgtgggaatctcaacagcatgtcttgagagttcgggctcttacaaagtcaaggggagctaaataaatccatccagacttgttttcttagttccagcctttactcttttgcttataaaacatgatgcttagaggaaactgagagaatgctgacttagggatcagaaagatctgggtatgaattctggcttggatagttaactagctgtgtgacatggggcaagtaacttcaccctgatgagcctctacttcctctgctgtaaaaaaaggggtcacaatatcgaccttacagaggtgttgtgaggatggaacaagataacatatggagggttgccagctcaatgtcttccaaatagtaggttttgaataaacgtatagatattatgatcacttctcccagacagttccttgtgtttcctagaagctagcagaaattggagagctttcacaagtaggatgcttgcagattcagtcttcttgactttaaagcagtgagaataaaatgaggtgacttattttatgtggaatgcttatctccatgcttggcatacagtaggaacttactaaatgagagccacaactgcactaacgggaagctcagctcccttttgcccaaatgtggctggccatagggtagtcactaattgtaccattttttaaatcaggc

SEQ ID NO: 79219 - DNA, 3480 bp, Homo sapiens
ataaataaaatacttttaagagatgagccctggaaggcaaacacaatattgagaagagttggtttatttagcctggtgatattgtggataacttttttttattctagggctgttataacatttcaggccatagaccttttgcttacttaaatctctcttaaagttgagtatctttccattgtaagagacataggatctcacaacagaaaattaggaaactagcgaagaactgaaaggataaattaatgcactcctagagctatcaccagtcaacaattgctattaataggctgtgtcttttgttggagtcttcctacattttttattttacattttagggggaggtattttacatctttgagttttatacctatcatttagatcttctttttctccactcaggagtaaaacgtcataaagaagagcttgtgtttggagtcatggagtttgagttcagttgcttgccagttcccacagcctgggccaagaactttctctctctgagtctcaggtttctcatttgttaaatgaccatattcttagtacctgtgtcataaataagttattgcatgtaaactgcaaactcaattccagacatacagtaggcactctagaagtgtgattttggaataaagaataaatgaatcaagtagaggaaattgacctggtcgagatcagggaaggcttcttgggagaagtgccatttgatctgggatttaaaggttacgaaggtgtttgccaagctgagaaggggaccaggtactgggggaagttgggagagaagaaggatcattcagatcaagggaatagcatctgccataactcaaatggataatcagaggcaggagggaagcaaaagaaggtcagtgagaaaagaggctaggaacaagggggagtgtggtgcagagagtccagggaagtcagcgaagacaagatggtgcagggctctaagtccatcacaaggaggctgggctttgtcctagagagcaatggggaagccatcagaaggttttaaggagggaaatgtctggtcagacatctatatttaggagagtgctctccctgcagtgtggggcatggattggggagtgagggcaaactagaatttgggagacctcataagaggctgtctccctgttcctggcaaggaatggtcagagcttgacctagttggacctttagccataagttttcccacacaagtaagcaaacaccaagaccgcttttgtgactggttgttgcctggctcttagttaccaatgcatctaaaaatgcaccttgcttggccaactttgcagcctactgtttagaatctgcaggtgtccaatgagctggaatgaaagagtaaggatgcataatttggcctggcctgaaaaaggtacagaaagtgctaccattgatagaggagaaggctgccctccaggcctgcagcaagcaccctaggtttatattccagaccaccagccactgtaattatacattcgcaggcctcagcaaggcatggtatagatgctcgcagccagggtccctgttataaaggctctggtcttggttggttattaactatacagtacgaagcctcataaacacctttttacatgtacagtgcaacctttcaatacaacaatcaaatgcttttcaacaaattacagtctcctgggaaagagaccccttgattacttcccagaaagaggtggagggaaactttaggcagaacttgttcgaagcctgatatttagaactgtgtttgttttgggctggaaatgctagcctagagttcagaccttgaacagctctagggaaatcaatgccaattaatccaaatcttaccagaggaaaaatcaagccacagatataatttaaccaaccagttctactttacagatgagcaaaatgagcttagagaggggcagccccttctaaggtcacctgggaactccgaggtggaatgtggggactagctgcctaaatcctccttaggcagacaatggtgttcagatcctgccttgggtccactttatttgttcagagtttgtcatcttgtaataaaaatgttgactcctcatccacaataccatttccttttcatcatactttctctgatgttcccaatcaagcaaactctttctcctcttctagaaatagctctttagatttcatagactagtaaaatttgcagacctagggttgtgaactttttattttgccaagtaaagacattgaaaaaacaacaagcaaaagagacaactacccaataatgtgcgcaatttgtgatcaccagctttcacacagagaaaacacattatcatctaaggagaagaaaataaaagaggaagagaaggagagagaaaaggaaagatagaaattatatgggccataatggtggtggttacatgagcgtatacatttgtcaaaaaatcattgctgttcattagaaggtgtgcattttgacaaaacaaaaaacaaggcaagatatgaagaatgaaaagtcccatatcctaatcaggcatatctttcttgaacccaagagctgcgtctgcatttggaactatgcagaaggacacagaaggatggatgcatagacaatcccctaatgtcactttcctttagctccttccctatccacgtccacccaggaaaatgctgaccagagcatgtgtctactcagtatctctgatggaaatccaccaggacacagccaggaaatccctctgcctttgaaattgccaggagcgcttagggaaagagcacaattgttccaggctttagtgtcttcttttgctcattgagaaggtcatcaccctccagggatgaatgtgggaatctcaacagcatgtcttgagagttcgggctcttacaaagtcaaggggagctaaataaatccatccagacttgttttcttagttccagcctttactcttttgcttataaaacatgatgcttagaggaaactgagagaatgctgacttagggatcagaaagatctgggtatgaattctggcttggatagttaactagctgtgtgacatggggcaagtaacttcaccctgatgagcctctacttcctctgctgtaaaaaaaggggtcacaatatygaccttacagaggtgttgtgaggatggaacaagataacatatggagggttgccagctcaatgtcttccaaatagtaggttttgaataaacgtatagatattatgatcacttctcccagacagttccttgtgtttcctagaagctagcagaaattggagagctttcacaagtaggatgcttgcagattcagtcttcttgactttaaagcagtgagaataaaatgaggtgacttattttatgtggaatgcttatctccatgcttggcatacagtaggaacttactaaatgagagccacaactgcactaacgggaagctcagctcccttttgcccaaatgtggctggccatagggtagtcactaattgtaccattttttaaatcaggc

SEQ ID NO: 79220 - DNA, 3480 bp, Homo sapiens
ataaataaaatacttttaagagatgagccctggaaggcaaacacaatattgagaagagttggtttatttagcctggtgatattgtggataacttttttttattctagggctgttataacatttcaggccatagaccttttgcttacttaaatctctcttaaagttgagtatctttccattgtaagagacataggatctcacaacagaaaattaggaaactagcgaagaactgaaaggataaattaatgcactcctagagctatcaccagtcaacaattgctattaataggctgtgtcttttgttggagtcttcctacattttttattttacattttagggggaggtattttacatctttgagttttatacctatcatttagatcttctttttctccactcaggagtaaaacgtcataaagaagagcttgtgtttggagtcatggagtttgagttcagttgcttgccagttcccacagcctgggccaagaactttctctctctgagtctcaggtttctcatttgttaaatgaccatattcttagtacctgtgtcataaataagttattgcatgtaaactgcaaactcaattccagacatacagtaggcactctagaagtgtgattttggaataaagaataaatgaatcaagtagaggaaattgacctggtcgagatcagggaaggcttcttgggagaagtgccatttgatctgggatttaaaggttacgaaggtgtttgccaagctgagaaggggaccaggtactgggggaagttgggagagaagaaggatcattcagatcaagggaatagcatctgccataactcaaatggataatcagaggcaggagggaagcaaaagaaggtcagtgagaaaagaggctaggaacaagggggagtgtggtgcagagagtccagggaagtcagcgaagacaagatggtgcagggctctaagtccatcacaaggaggctgggctttgtcctagagagcaatggggaagccatcagaaggttttaaggagggaaatgtctggtcagacatctatatttaggagagtgctctccctgcagtgtggggcatggattggggagtgagggcaaactagaatttgggagacctcataagaggctgtctccctgttcctggcaaggaatggtcagagcttgacctagttggacctttagccataagttttcccacacaagtaagcaaacaccaagaccgcttttgtgactggttgttgcctggctcttagttaccaatgcatctaaaaatgcaccttgcttggccaactttgcagcctactgtttagaatctgcaggtgtccaatgagctggaatgaaagagtaaggatgcataatttggcctggcctgaaaaaggtacagaaagtgctaccattgatagaggagaaggctgccctccaggcctgcagcaagcaccctaggtttatattccagaccaccagccactgtaattatacattcgcaggcctcagcaaggcatggtatagatgctcgcagccagggtccctgttataaaggctctggtcttggttggttattaactatacagtacgaagcctcataaacacctttttacatgtacagtgcaacctttcaatacaacaatcaaatgcttttcaacaaattacagtctcctgggaaagagaccccttgattacttcccagaaagaggtggagggaaactttaggcagaacttgttcgaagcctgatatttagaactgtgtttgttttgggctggaaatgctagcctagagttcagaccttgaacagctctagggaaatcaatgccaattaatccaaatcttaccagaggaaaaatcaagccacagatataatttaaccaaccagttctactttacagatgagcaaaatgagcttagagaggggcagccccttctaaggtcacctgggaactccgaggtggaatgtggggactagctgcctaaatcctccttaggcagacaatggtgttcagatcctgccttgggtccactttatttgttcagagtttgtcatcttgtaataaaaatgttgactcctcatccacaataccatttccttttcatcatactttctctgatgttcccaatcaagcaaactctttctcctcttctagaaatagctctttagatttcatagactagtaaaatttgcagacctagggttgtgaactttttattttgccaagtaaagacattgaaaaaacaacaagcaaaagagacaactacccaataatgtgcgcaatttgtgatcaccagctttcacacagagaaaacacattatcatctaaggagaagaaaataaaagaggaagagaaggagagagaaaaggaaagatagaaattatatgggccataatggtggtggttacatgagcgtatacatttgtcaaaaaatcattgctgttcattagaaggtgtgcattttgacaaaacaaaaaacaaggcaagatatgaagaatgaaaagtcccatatcctaatcaggcatatctttcttgaacccaagagctgcgtctgcatttggaactatgcagaaggacacagaaggatggatgcatagacaatcccctaatgtcactttcctttagctccttccctatccacgtccacccaggaaaatgctgaccagagcatgtgtctactcagtatctctgatggaaatccaccaggacacagccaggaaatccctctgcctttgaaattgccaggagcgcttagggaaagagcacaattgttccaggctttagtgtcttcttttgctcattgagaaggtcatcaccctccagggatgaatgtgggaatctcaacagcatgtcttgagagttcgggctcttacaaagtcaaggggagctaaataaatccatccagacttgttttcttagttccagcctttactcttttgcttataaaacatgatgcttagaggaaactgagagaatgctgacttagggatcagaaagatctgggtatgaattctggcttggatagttaactagctgtgtgacatggggcaagtaacttcaccctgatgagcctctacttcctctgctgtaaaaaaaggggtcacaatatcgaccttacagaggtgttgtgaggatggaacaagataacatatggagggttgccagctcaatgtcttccaaatagtaggttttgaataaacgtatagatattatgatcmcttctcccagacagttccttgtgtttcctagaagctagcagaaattggagagctttcacaagtaggatgcttgcagattcagtcttcttgactttaaagcagtgagaataaaatgaggtgacttattttatgtggaatgcttatctccatgcttggcatacagtaggaacttactaaatgagagccacaactgcactaacgggaagctcagctcccttttgcccaaatgtggctggccatagggtagtcactaattgtaccattttttaaatcaggc

SEQ ID NO: 79221 - DNA, 3480 bp, Homo sapiens
ataaataaaatacttttaagagatgagccctggaaggcaaacacaatattgagaagagttggtttatttagcctggtgatattgtggataacttttttttattctagggctgttataacatttcaggccatagaccttttgcttacttaaatctctcttaaagttgagtatctttccattgtaagagacataggatctcacaacagaaaattaggaaactagcgaagaactgaaaggataaattaatgcactcctagagctatcaccagtcaacaattgctattaataggctgtgtcttttgttggagtcttcctacattttttattttacattttagggggaggtattttacatctttgagttttatacctatcatttagatcttctttttctccactcaggagtaaaacgtcataaagaagagcttgtgtttggagtcatggagtttgagttcagttgcttgccagttcccacagcctgggccaagaactttctctctctgagtctcaggtttctcatttgttaaatgaccatattcttagtacctgtgtcataaataagttattgcatgtaaactgcaaactcaattccagacatacagtaggcactctagaagtgtgattttggaataaagaataaatgaatcaagtagaggaaattgacctggtcgagatcagggaaggcttcttgggagaagtgccatttgatctgggatttaaaggttacgaaggtgtttgccaagctgagaaggggaccaggtactgggggaagttgggagagaagaaggatcattcagatcaagggaatagcatctgccataactcaaatggataatcagaggcaggagggaagcaaaagaaggtcagtgagaaaagaggctaggaacaagggggagtgtggtgcagagagtccagggaagtcagcgaagacaagatggtgcagggctctaagtccatcacaaggaggctgggctttgtcctagagagcaatggggaagccatcagaaggttttaaggagggaaatgtctggtcagacatctatatttaggagagtgctctccctgcagtgtggggcatggattggggagtgagggcaaactagaatttgggagacctcataagaggctgtctccctgttcctggcaaggaatggtcagagcttgacctagttggacctttagccataagttttcccacacaagtaagcaaacaccaagaccgcttttgtgactggttgttgcctggctcttagttaccaatgcatctaaaaatgcaccttgcttggccaactttgcagcctactgtttagaatctgcaggtgtccaatgagctggaatgaaagagtaaggatgcataatttggcctggcctgaaaaaggtacagaaagtgctaccattgatagaggagaaggctgccctccaggcctgcagcaagcaccctaggtttatattccagaccaccagccactgtaattatacattcgcaggcctcagcaaggcatggtatagatgctcgcagccagggtccctgttataaaggctctggtcttggttggttattaactatacagtacgaagcctcataaacacctttttacatgtacagtgcaacctttcaatacaacaatcaaatgcttttcaacaaattacagtctcctgggaaagagaccccttgattacttcccagaaagaggtggagggaaactttaggcagaacttgttcgaagcctgatatttagaactgtgtttgttttgggctggaaatgctagcctagagttcagaccttgaacagctctagggaaatcaatgccaattaatccaaatcttaccagaggaaaaatcaagccacagatataatttaaccaaccagttctactttacagatgagcaaaatgagcttagagaggggcagccccttctaaggtcacctgggaactccgaggtggaatgtggggactagctgcctaaatcctccttaggcagacaatggtgttcagatcctgccttgggtccactttatttgttcagagtttgtcatcttgtaataaaaatgttgactcctcatccacaataccatttccttttcatcatactttctctgatgttcccaatcaagcaaactctttctcctcttctagaaatagctctttagatttcatagactagtaaaatttgcagacctagggttgtgaactttttattttgccaagtaaagacattgaaaaaacaacaagcaaaagagacaactacccaataatgtgcgcaatttgtgatcaccagctttcacacagagaaaacacattatcatctaaggagaagaaaataaaagaggaagagaaggagagagaaaaggaaagatagaaattatatgggccataatggtggtggttacatgagcgtatacatttgtcaaaaaatcattgctgttcattagaaggtgtgcattttgacaaaacaaaaaacaaggcaagatatgaagaatgaaaagtcccatatcctaatcaggcatatctttcttgaacccaagagctgcgtctgcatttggaactatgcagaaggacacagaaggatggatgcatagacaatcccctaatgtcactttcctttagctccttccctatccacgtccacccaggaaaatgctgaccagagcatgtgtctactcagtatctctgatggaaatccaccaggacacagccaggaaatccctctgcctttgaaattgccaggagcgcttagggaaagagcacaattgttccaggctttagtgtcttcttttgctcattgagaaggtcatcaccctccagggatgaatgtgggaatctcaacagcatgtcttgagagttcgggctcttacaaagtcaaggggagctaaataaatccatccagacttgttttcttagttccagcctttactcttttgcttataaaacatgatgcttagaggaaactgagagaatgctgacttagggatcagaaagatctgggtatgaattctggcttggatagttaactagctgtgtgacatggggcaagtaacttcaccctgatgagcctctacttcctctgctgtaaaaaaaggggtcacaatatcgaccttacagaggtgttgtgaggatggaacaagataacatatggagggttgccagctcaatgtcttccaaatagtaggttttgaataaacgtatagatattatgatcacttctcccagacagttccttgtgtttcctagaagctagcagaaattggagagctttcacaagtargatgcttgcagattcagtcttcttgactttaaagcagtgagaataaaatgaggtgacttattttatgtggaatgcttatctccatgcttggcatacagtaggaacttactaaatgagagccacaactgcactaacgggaagctcagctcccttttgcccaaatgtggctggccatagggtagtcactaattgtaccattttttaaatcaggc

SEQ ID NO: 79222 - DNA, 639 bp, Homo sapiens
cttctttttgttggactacaaatcttatgttctacccaatgcctttccactcattctttatcttcgtgtctgcaactttttccagaaggggtctaaagaagcctgccttcccctatgaaagcaccttccatgctgatattatacctcattttccgaagggagtgtggtgtgatggcacctmagaatggcacccaggaacacctccgttcaaataccactcctcgctcttatcagtcaagtgagttggaatgagttacttcacttttcagaagtccagtttcttaatctataaaatgggaaaaatgcaacgtaattctgaggctgaggatgagataggtgcctcctgcaaagtggaggcttaataaatactagtcatttctcttcccctgaggaaacgttattacacattgtttatgtcactctaacattgtcctaagagatctatgaaaatacgcaactcaattaagcaaagtttgtctctgtaatgtaccttaaggagaaaaagatacattgtggggagtagaggaaagattagggaattttgtggttacagctcctggagttcatctctaccaggctgagatcatctacagcccaaccgtatacacctacatcatctactgtcatttggaaccttag

SEQ ID NO: 79223 - DNA, 639 bp, Homo sapiens
cttctttttgttggactacaaatcttatgttctacccaatgcctttccactcattctttatcttcgtgtctgcaactttttccagaaggggtctaaagaagcctgccttcccctatgaaagcaccttccatgctgatattatacctcattttccgaagggagtgtggtgtgatggcacctcaraatggcacccaggaacacctccgttcaaataccactcctcgctcttatcagtcaagtgagttggaatgagttacttcacttttcagaagtccagtttcttaatctataaaatgggaaaaatgcaacgtaattctgaggctgaggatgagataggtgcctcctgcaaagtggaggcttaataaatactagtcatttctcttcccctgaggaaacgttattacacattgtttatgtcactctaacattgtcctaagagatctatgaaaatacgcaactcaattaagcaaagtttgtctctgtaatgtaccttaaggagaaaaagatacattgtggggagtagaggaaagattagggaattttgtggttacagctcctggagttcatctctaccaggctgagatcatctacagcccaaccgtatacacctacatcatctactgtcatttggaaccttag

SEQ ID NO: 79224 - DNA, 669 bp, Homo sapiens
ttttttgattgcagatttctttcctgctccattgacagaattaatgtagctccaaatatgggaaaacttctatgcacatttcttctgcaaacttctgagactggraattttaatagccatcaaataacctcccttttcctcaccttcctgcccccagcctggaaaagctgcccatagggttatttatgaaagtggagtccatgccgagatgcaaattgcaactgtgtccgtagaaccaaatcagctcttttaacaaaatgtgtgctcttctctgattccctgaaatctgtatcaaaacccaactcctcaaatattttgatgggatttggcaccaacataagattcctctcctgctgcggttcggtgcctgggttctgtggtgtctggaggcacctttgtaggtagtctcggtcttcgtcagccggcaattaaatcagtgccgaagcggcttcatgttcagaacctgaactatgtgatgttttaagaaatgattgttcaagcttagtgggagtgggagaaatctgatgtttaattgtaggaaatttcacatgaaaggcattcagcaaactcataaggctcttccttccaaaactctcttctttatgccaggtgcaaagtggctttaacactcagaggcaaagtatctcttacaccataaaacactgttct

SEQ ID NO: 79225 - DNA, 669 bp, Homo sapiens
ttttttgattgcagatttctttcctgctccattgacagaattaatgtagctccaaatatgggaaaacttctatgcacatttcttctgcaaacttctgagactgggaattttaatagccatcaaataacctcccttttcctcaccttcctgcccccagcctggaaaagctgcccatagggttatttatgaaagtggagtccatgccgagatgcaaattgcaactgtgtccgtagaaccaaatcagctcttttaacaaaatgtgtgctcttctctgattccctgaaatctgtatcaaaacccaactcctcaaatattttgatgggatttggcaccaacataagattcctctcctgctgcggttcggtgcctgggttctgtggtgtctggaggcacctttgtaggtagtctcggtcttcgtcagccggcaattaaatcagtgccgaagmggcttcatgttcagaacctgaactatgtgatgttttaagaaatgattgttcaagcttagtgggagtgggagaaatctgatgtttaattgtaggaaatttcacatgaaaggcattcagcaaactcataaggctcttccttccaaaactctcttctttatgccaggtgcaaagtggctttaacactcagaggcaaagtatctcttacaccataaaacactgttct

SEQ ID NO: 79226 - DNA, 839 bp, Homo sapiens
tgtggctcaaacaaagatgtgcctctggcccaggtacatctgatgagctacccagtctgtgacctgagccagactctgaccaattccagtccacaacacacattttaagccagactggctaacatgaacacaaatggaacctagttacaataacagtagtgtcattctctcaagtctgaactataaatgtcaaaaaagggagagggagaaaatgtgaaccacagcattttctaaagttggccagtggtgtcccttaatataactccaatctaatcctttgagaccaacacttttcttcccatagtcatctgtcccaactgcccagtggatttgaccatcagaagtgtctaactttcatctttctcactacactgtaacgctcattctcatcctcctttgataaataatgggtgcttgagaaaataagatagaatggcaactcttacccttgaggtggagatgccacacgctctgccttcatcctgcccggtgggacgtccatcatcatccaagaagctctgcccttctcagcacactggaatgtgtggtgcacataggcatttggtggccaaaaagaagggaagaatcctgttctctggttgtacaggccaaagcaatcactggaaaatcactctcacctgcagaaaaaaccatcagccaagctgtaactgcaaggaagaaatacacccaagacattctacctcaggatcaacactctgggcactttrctgatgagactcaaatctgaaagccccacctaattctcagcaagtggggggtggtctcttccccctgtggaaccatcactgccattggacatgtgctaggtttaaggatcc

SEQ ID NO: 79227 - DNA, 547 bp, Homo sapiens
cccctcctatccatctgcctccccccaactccagatcccccacatgcacccatcacacacacacccactcttcatggtgccttgtcttagggtgggtatctgtagcacccacagtttagctcatttgaatggcacaggacattgaaaagggggctttgaattaaggaggttctgaaaactagtgagattttttaaggctgaatttttctccctatggttattaaccattagtatttgttgtacatgtctcctatcatcttttttctattggtgattttgttttctttttagtgacataaattacaaaagcagtagatgtgttctctacttctccattttttttttgctgatacaaacatatacaaatatatataacttgtccattttttttgctgatacaaacgtatacaaataaatgtaagcatacataaatgttaaagaaaaaaacctgaaaattccttttttaacttaacaatatayagtacaagttcttccaagttagcacaaataaatctgtggtgtaaataccattattaccttcatttta

SEQ ID NO: 79228 - DNA, 775 bp, Homo sapiens
ttttttttttttaaatggagtctcactctgtagcccaggctggagtgcagtggcatgatcttggctcactgcaacctccgcctcccaggtccaagcgattctcctgcctcagccttctgagtagctgcgattacaggtgcccaccaccacccctggctaattttttttatttttagtagaaacagagtttcaccatgttggccaggctggtctcaaactcctgacttcaagtgatctgcctgcctcggccttgaaaagtgctggaattacaggcgtgagccaccgtgcctggccaaccaccccgccaagtgtctggtatcatacagggggttaggatttcaacagatgaattttggagggacacacaaacattcagaccatagcggggctgagctgcctgtgatcctgtgatttgttgtcaggggtgtgtgactccccataggtcaagtagacgccacgggacatagctcaggttgggccaccttgcaggcacctcacatgggaggactgcccatctggcacaaggaccctaccarcaagaggccctgcctgggcactggtggcaggaactgaggggaagtggaagagttgggtctcccaaatgcagagactaagcaggggtgttctacggtgagcaggtctgtgcaaacactccaccaaaggccaaagaaagaggctgacaaatccagtttctcagaaagaaatctttattaaggatttatgaacagaagccatgtaccaggtgccacgagatgggatggcaagatgggatggt

SEQ ID NO: 79229 - DNA, 673 bp, Homo sapiens
gctacctcttactgggtatcagctgcatgccagctctctgctagttatcttatgcagtctatcctcttaaatgaattcaaggtactctagaattacccttggctttctttgtaggagttatgacattgaagatgcagaagctcagtcacctattagatgatagcttctaggtaactgactgtgtataggaatgagatcataaccacatygatttgaagttaaaagaagatcaaatctaccaagactagggagcctaaagtgtttttaaatttatagggttaagcaaatcttcttcccaaagatctctgttaagaaggaagttccattaatccccgtggacctgctctaggacaagccagaggactgggtggcggcggccttctctgaggcaagtgtgtggtaggaaagcccaggagattcttccattgagccgctgaatctcacctttaactaggatgggaacttgaggtcccattaaaaagcatggtcagatggagtttgggagttctcactatgaagtttcaagtgtcctcacacctgtgatttttagctcaggtgacttcaggggtggcttccatctggcagacggtcttttatgcaccagtcatgtggtgtttgatgctggtgcaggatgcccacagggctggctacagaatcaatgtgactgacacga

SEQ ID NO: 79230 - DNA, 1185 bp, Homo sapiens
gtgctgtgcatgctgacaaacagcttttacagtttataaataccatagcacgtgctccctactccaatgggaatatagctggcttgtctgctgcaacaaggcacaatttcatcagataattgctactggaaaaatagctctgtgtgtgcttcatacagctggccttacagcaccatggaactttgcagtaaaatgtatacccatgctggtatctggcaggattcatttggaaagaaagctatcttcaaataaagctacacaatgcttcaagaaacaaatgttctgctcactgatttttttaatgatgtaataaagtccatcgtggacacacatgtaattgcttctcctctttatctttcttatcagggacgagggacccctgatggctccttactatgaagtgtttatgggatatacttgaataatttttacatacttacagccatgatcttgttctttccttttcatacattaagacactgaagcttagaaagctaaagtaagtagtttccccaagcccatctagagagaaataaacagatctggaacacaaacaggtattctcggctgggtccagtggctcacayctgtaatctcagcactttgggaggctgaggcaggcagatcacttgaggccaggagttcaagaccagcttggccaacatggtgaaaccccatctctactaaaaatacaaaaattagccagtgtggtggtgtgcacctgtaatctcagctactttgggaggctgaggcacaagaatcacttgaacctgggaggcagaggttgcagtgagctgacatggcgccactgcactccagcctaggtgacagagcaagactctgtctcaaagtattctgactccagacccagtgctccatctcatcttcaaatcccttgccaatcagtgacattttttgttttgcaaaaatctttacaaatttcacttaaaagttgctccaatatgttctgtgattctattttagatttttatttcttaattcaaaatgatcatctttgtcttttcacacaataatacttcataaattacccttctattgactactgtaaatgtcttcacatcaaattgtttttggtttcattaatatattgcaaacagaaaatacctggttctgcatgggtaccacataagataagccaaaggattatctttatacccatatgca

SEQ ID NO: 79231 - DNA, 765 bp, Homo sapiens
ggatcctacatggagccaacacctccagtagctttccaagtggtgcagcccagtccactgaggaaggcttgctgtaaagcgtgaatcccaccggccaaacagtcaggcaagaaaactccctgccaggtctgttctgcgctggacatgttctgacagcatgggccacagttggacaacacatgaatgacacaggtccatacartttgcagggtcccagggtgctctattccagagcattcataaactgaatgcaacgtttcaatgttgaacttaacaaaacaaaaacagcatgtcctcttattcatgctgaattatcagcatcaactagcaaaaaagagggaaagactaggattctgaaaacttgtgtctgagctgcctcttcttatctgcatgaccttgggcaggtgaagtcttcatctatagaaggagtttataaacccaccttgaggataaaataacaaatgtaaaagtcttttgaaaacataaagcacaagccacatgtaaaactgtgttccaaaaataaaagactgatataatggtatttctaccttcccccacttccttcccctattcccttcccttctcttactcccaccaactagtacaatcacattaaagttgtactcactccctctggatctgtatttagtgtgactgctactctctggaaactccagggatctctgtaattcacacagctcatctccaagcagagagctgctcagaaggctgagtgatttagtgagccaaacaaccagaaagctg

SEQ ID NO: 79232 - DNA, 765 bp, Homo sapiens
ggatcctacatggagccaacacctccagtagctttccaagtggtgcagcccagtccactgaggaaggcttgctgtaaagcgtgaatcccaccggccaaacagtcaggcaagaaaactccctgccaggtctgttctgcgctggacatgttctgacagcatgggccacagttggacaacacatgaatgacacaggtccatacaatttgcagggtcccagggtgctctattccagagcattcataaactgaatgcaacgtttcaatgttgaacttaacaaaacaaaaacagcatgtcctcttattcatgctgaattatcagcatcaactagcaaaaaagagggaaagactaggattctgaaaacttgtgtctgagctgcctcttcttatctgcatgaccttgggcaggtgaagtcttcatctatagaaggagtttataaacccascttgaggataaaataacaaatgtaaaagtcttttgaaaacataaagcacaagccacatgtaaaactgtgttccaaaaataaaagactgatataatggtatttctaccttcccccacttccttcccctattcccttcccttctcttactcccaccaactagtacaatcacattaaagttgtactcactccctctggatctgtatttagtgtgactgctactctctggaaactccagggatctctgtaattcacacagctcatctccaagcagagagctgctcagaaggctgagtgatttagtgagccaaacaaccagaaagctg

SEQ ID NO: 79233 - DNA, 739 bp, Homo sapiens
aggagatcacaagagaaatagaccctcaaccttgatgcttctcaaaggtctgagacggtcctatttctcatgagacaggcttttaaaggagcatgaaccaccttccatgctgatttacctggtgtcatgtatcatggcaaatggctgggtttggagcagataattgcattggtgaaagtatttttgttaatcttggtaatatcaaaacatatccctatactctttcatactttccaaagtcaagtctcaattttttaatttttaaaaatgtcatagcaacacratatataagattcctaattttcacacaaggaaactgaggtccgcaaaggttgaatgactcactcaaatttccatagtaaagtagaggatttgggtgccttgagtgacagttccacatttctagactgaattccaagttctctttggcagtggtgtaccaaggatgggggtgttggtgggagtgggcttccctaaagaggagtcattttattattgtcattgtttagaattgccactacatggttataataagataaagaccaacttttagccaagcattatcactgttttaaaattatatgtagacaatacctccctttattgcctacaccagaggctgaaggttctcaccacccatccagggtacgccactactctggttccattaaaaaagaaagattacatttgaatggagggattttggtttctaagcaggggggacttgaggccaagagaa

SEQ ID NO: 79234 - DNA, 739 bp, Homo sapiens
aggagatcacaagagaaatagaccctcaaccttgatgcttctcaaaggtctgagacggtcctatttctcatgagacaggcttttaaaggagcatgaaccaccttccatgctgatttacctggtgtcatgtatcatggcaaatggctgggtttggagcagataattgcattggtgaaagtatttttgttaatcttggtaatatcaaaacatatccctatactctttcatactttccaaagtcaagtctcaattttttaatttttaaaaatgtcatagcaacacaatatataagattcctaattttcacacaaggaaactgaggtccgcaaaggttgaatgactcactcaaatttccatagtaaagtagaggatttgggtgccttgagtgacagttccacayttctagactgaattccaagttctctttggcagtggtgtaccaaggatgggggtgttggtgggagtgggcttccctaaagaggagtcattttattattgtcattgtttagaattgccactacatggttataataagataaagaccaacttttagccaagcattatcactgttttaaaattatatgtagacaatacctccctttattgcctacaccagaggctgaaggttctcaccacccatccagggtacgccactactctggttccattaaaaaagaaagattacatttgaatggagggattttggtttctaagcaggggggacttgaggccaagagaa

SEQ ID NO: 79235 - DNA, 665 bp, Homo sapiens
ctaaaagcgtgtactctataaggcaagtattagtatttcaattgcacagatgaagatgaagctgaagctgagaaagattgattcatgtgtcccaggtcacaataacagaggaggaaatgtaagatgtgacaggtttgacctggctcctattcctgcactcttgccactacccccatgttstatctgttcaccgatgttcaaacagccaccaaagtactaaaaatgctaacattgcagaggaggcacatcacaggggctcccagggccactgcttgaggagggtgcaccctgcacaaaggtgctgggctgaagaggcaagcagggctgaaataagccttagcttggttgttttgtaatttgcacaaaggagccgtatgggctggtaatggcatggaaccaccggtggccacagcttaaggaattccatcagcctcttgatttctgttttctgtctatcctttgagcactatttgccaatttcctggaagtggctctgcctcaagaaagcttcctggctcttaaatgtagagtttacaatcctctgaggccagtgtgaaatgcccagttgtcctgactgttgtcaggaacatgaccagcattccctcagaagctcatcattctgaaaattagacacagaccacttattaatatgtatggcaaatctg

SEQ ID NO: 79236 - DNA, 1588 bp, Homo sapiens
agatcactaaacagtgttttaaaaagaaaccaaacaaaagatcaaggtaattatgggattcaaaaggacatgcaactgattttctataaccttctatatatcatcttttatttaaattaaaaacttgacctgtaagtttgctatattctamgatgtacttgcataagataccctccactagaaaaataagtatgattataaaacttctattactttaatgggtaattagattaacctacctatcgtgataaggacacaagttagcagggtttgtcaatgaagtggctagaatggaaatataaaggtatctctttaggctgggcacggtggctcacgcctgtaatcctggcacttgtgggaggcttaggtgggaggactgcttgagcccaggagttcaaccagcctggacaacatagcaagaccccgtctttatacatatatacacatacacatatacaaatacatatacgtgtgtgtgtttttaaaaataatctttttaaactagaaaatcatacttgaatctttagtatcaaaatccttccagtttagatatagttaattatattagagaaagagtatagtagattttaatcacagaataattataatattaataaatatttatagaacattaaattattaatataaagtccaggtactcttcaaatatttggtgaattaattttatttttttctcatattttaggcctgattatacataaaccatcttggacacatgaaaatagattttaattttaaaggactctaaaaaaaatgactttaagaccttcttcactgatatatttttcaatgtttaatgattgttaaattctcttacatctattccgtagtccttaagcagggggaagaagtgcagctgcctctcatcttcaataggaaaatacagaaacgtagaaacaggatattttactttctctcattgtagtccaattaaatttcatatttatttgagaatctataattcatctcatggggatctggagttttttcttttgtattgaaggctcataactatttatgcatgcctattttgttattcttatagctactcaacgttattgtctctgatctcttttccaatataccaaaatcattctgaagctaaatctcattcacaggatgctaaatactaaacataccaccagaaaactaaatccatgtcccttgttatagatcatttaaatcaatgcttatcaagctgtgttccaaacagaaattccatggcatggcaggaccttctggggagtagagaagggaatttttaagtgggaacacaaccctgtacatccttcccaattcaaacagaactctgctattgcttgattttaaatattgggcttccatgaagagatctgcaggattgtactgctttaaaggaaaatagaagcctggaagtcatcgatttaggacaacaaaaatatttaacaccaaaattactatggaagtccattatgcagtaattattacccttcagttggttatgagctcaacagcagtacagttgagaggggtagctttgagaattgaaagggccaaggaaaaaggaaaggaaaaaagatttccttcg

SEQ ID NO: 79237 - DNA, 1588 bp, Homo sapiens
agatcactaaacagtgttttaaaaagaaaccaaacaaaagatcaaggtaattatgggattcaaaaggacatgcaactgattttctataaccttctatatatcatcttttatttaaattaaaaacttgacctgtaagtttgctatattctaagatgtacttgcataagataccctccactagaaaaataagtatgattataaaacttctattactttaatgggtaattagattaacctacctatcgtgataaggacacaagttagcagggtttgtcaatgaagtggctagaatggaaatataaaggtatctytttaggctgggcacggtggctcacgcctgtaatcctggcacttgtgggaggcttaggtgggaggactgcttgagcccaggagttcaaccagcctggacaacatagcaagaccccgtctttatacatatatacacatacacatatacaaatacatatacgtgtgtgtgtttttaaaaataatctttttaaactagaaaatcatacttgaatctttagtatcaaaatccttccagtttagatatagttaattatattagagaaagagtatagtagattttaatcacagaataattataatattaataaatatttatagaacattaaattattaatataaagtccaggtactcttcaaatatttggtgaattaattttatttttttctcatattttaggcctgattatacataaaccatcttggacacatgaaaatagattttaattttaaaggactctaaaaaaaatgactttaagaccttcttcactgatatatttttcaatgtttaatgattgttaaattctcttacatctattccgtagtccttaagcagggggaagaagtgcagctgcctctcatcttcaataggaaaatacagaaacgtagaaacaggatattttactttctctcattgtagtccaattaaatttcatatttatttgagaatctataattcatctcatggggatctggagttttttcttttgtattgaaggctcataactatttatgcatgcctattttgttattcttatagctactcaacgttattgtctctgatctcttttccaatataccaaaatcattctgaagctaaatctcattcacaggatgctaaatactaaacataccaccagaaaactaaatccatgtcccttgttatagatcatttaaatcaatgcttatcaagctgtgttccaaacagaaattccatggcatggcaggaccttctggggagtagagaagggaatttttaagtgggaacacaaccctgtacatccttcccaattcaaacagaactctgctattgcttgattttaaatattgggcttccatgaagagatctgcaggattgtactgctttaaaggaaaatagaagcctggaagtcatcgatttaggacaacaaaaatatttaacaccaaaattactatggaagtccattatgcagtaattattacccttcagttggttatgagctcaacagcagtacagttgagaggggtagctttgagaattgaaagggccaaggaaaaaggaaaggaaaaaagatttccttcg

SEQ ID NO: 79238 - DNA, 1588 bp, Homo sapiens
agatcactaaacagtgttttaaaaagaaaccaaacaaaagatcaaggtaattatgggattcaaaaggacatgcaactgattttctataaccttctatatatcatcttttatttaaattaaaaacttgacctgtaagtttgctatattctaagatgtacttgcataagataccctccactagaaaaataagtatgattataaaacttctattactttaatgggtaattagattaacctacctatcgtgataaggacacaagttagcagggtttgtcaatgaagtggctagaatggaaatataaaggtatctctttaggctgggcacggtggctcacgcctgtaatcctggcacttgtgggaggcttaggtgggaggactgcttgagcccaggagttcaaccrgcctggacaacatagcaagaccccgtctttatacatatatacacatacacatatacaaatacatatacgtgtgtgtgtttttaaaaataatctttttaaactagaaaatcatacttgaatctttagtatcaaaatccttccagtttagatatagttaattatattagagaaagagtatagtagattttaatcacagaataattataatattaataaatatttatagaacattaaattattaatataaagtccaggtactcttcaaatatttggtgaattaattttatttttttctcatattttaggcctgattatacataaaccatcttggacacatgaaaatagattttaattttaaaggactctaaaaaaaatgactttaagaccttcttcactgatatatttttcaatgtttaatgattgttaaattctcttacatctattccgtagtccttaagcagggggaagaagtgcagctgcctctcatcttcaataggaaaatacagaaacgtagaaacaggatattttactttctctcattgtagtccaattaaatttcatatttatttgagaatctataattcatctcatggggatctggagttttttcttttgtattgaaggctcataactatttatgcatgcctattttgttattcttatagctactcaacgttattgtctctgatctcttttccaatataccaaaatcattctgaagctaaatctcattcacaggatgctaaatactaaacataccaccagaaaactaaatccatgtcccttgttatagatcatttaaatcaatgcttatcaagctgtgttccaaacagaaattccatggcatggcaggaccttctggggagtagagaagggaatttttaagtgggaacacaaccctgtacatccttcccaattcaaacagaactctgctattgcttgattttaaatattgggcttccatgaagagatctgcaggattgtactgctttaaaggaaaatagaagcctggaagtcatcgatttaggacaacaaaaatatttaacaccaaaattactatggaagtccattatgcagtaattattacccttcagttggttatgagctcaacagcagtacagttgagaggggtagctttgagaattgaaagggccaaggaaaaaggaaaggaaaaaagatttccttcg

SEQ ID NO: 79239 - DNA, 522 bp, Homo sapiens
tcaggaatattagaccataaacttgttaagccgacttatttgtttgtaatgtaaagttacaatgccataaaagtgggttctggttgttatccaaatggtaatactatgagaacaataaaaataaaataatgaatatgtaataaatacctactgctgcagtctctgtgtatttaattaccaytgtatttgagtgagtgctgttgtctgcatccctctagctaacaaaggagggatgtccctttgaacagattggttaatgctctggggcaacagatgtctactggaactgcaggagaccagcaactggtggcctgcccatcttcggaaaactttcaatagacttatgcatatgttcgcacaatagggcatgtggtagaaatgaaaacctctttttaaccctttatgctctttctttccctcccaactgatagatgcacgtctttgtttcttcctcccttcccctttacagaactcttgaagaaaatagttcttggaatgacatcttccatctaatgtctgaaa

SEQ ID NO: 79240 - DNA, 767 bp, Homo sapiens
ggatccaagaatattaacattttaagaccaactactttcttgacaggttgtaacaatttccacagcagcctatgagtaactgcttcagggcactgaatgctatcagttttttactttccgctatttttttttttttttgagatggagtcttgctcagttgcccaggctggagtgcagtggcatgatctcggctcactgcaacccccacttcctgggttcaagcgattcttgaagcaattcttgtctcagcctccctaatagctgggattacaggtgcccgccaccaggcccagctaattttttgtgtttttagtggagacaggatttcaccatgttggccaggctggtcttgaactcctgacctcaagtgatccatctgcctcggtctcccaaagtgctgggattacaggcttgagccactgcatctggccatctctgctaatttgctgggtgaaaaataacattgtttagatttgcatttatttaattactaatggggttgaactttttttcttcttatttggygcttatattctgggagttgtctattcctagccttttgatgcttatatactggaaagaagtttttttttttttttttttaatcaagctgtatgagctctttgtattaagggcatgattctttgttggatttttttttccttaggcaacttgccaattatcatttttaagaaagtttctcaaaatgcaggagctttaattttgatataattttatctctcttttccttagtaatttcttctaaa

SEQ ID NO: 79241 - DNA, 697 bp, Homo sapiens
ttcatatcttttttgttcacctcttcctcctttactgccttcttttgccattccttcacttgttttttaactacatctatttagttattttattagcgatggctctagggcttacaatatattaggttgatgcaaaagtaattgcagtttttgccatgaaaagtaatgggaaaaaccacgattcttttgcaccaacctaatacatcttaatttatcagactacagatttatttttcaaaaatttagatcttatttgcttacccacaggatttgaggcagacttgactttttcccttaagtcttaatcacatttttgttaccattgttgatcagaaggtgccaagcaaaattctctaatattttgctctcatctagtcttctgacatatctcactgtctctgtaattcctcaacaatgattggtccttcaatcaaacctccaaattctgttagtaccctgaagtcatgaattcatttaaagtgattaattactttcttactattttcttacttatcattggttttgtattccttatattcatattcattataccctttataaagttacataaagacaaatatatrgagttgtttttaaaaatatttaataactaaagatttaaatttgaaattatacattataaagaaatcattaaatttataaaatgaattcatttttaaaagatttattgtaagga

SEQ ID NO: 79242 - DNA, 1209 bp, Homo sapiens
ttttatgttctgatgccaaattggttatcttatctttaactttttgtatatactttacatttcatgaatctaaggcaatcaatgtcaaaacacttgtccttttagcagttctcccttagtggtctcacagtcacatttttccacatgagcttggcaataggcttaaagacacataggctttaggtcacaatggagaaactaatgctccaaaactgttgacatgagagatactattcaccaaaagtactttgattttccctagtgaaaatacccaatatttttcactttaaatgattctgtaagtgctagtttttttttatttcttagacctcttctttgctcatcactttctggtgattgatgtgtaataaataaggacttgcctctataacattccatagttatttctcgagctaaatattttaggccgaaaaaaatgtgttggggctgggtgtggtggctcatgcctgtaatcccagcactttggaaggctgagtcaggtggatcacctgaggtcgggagtttgagaccagcctgaccaacatggagaaaccccgtttctactaaaaatataaaattagccaggtgtggtggtgcatgcctgtaatcccagcctcttgggaggctgaggcaggagaatcgcttgaacccgggaggtggaggttgtgttgagccgagatggtgccattgcactccagcctgggcaacaagagcaaactccatctctctctctctctttctctctctctctcacacacacacacacacacacacacacacacacacacacacacacacaaagtgttggggcatccattctgcaccttttcaattttgaccttcctggccctgcactgtactgcagttaccaaacattctggcattctattttatttgtaatttaatcartcacaaactccatgtgacacccaagtcagacatgaattgtgcccaggaaaatgccacatagctggacatcattgcatttagtcagatgttctttaagaatttaattcaatcatttttcccccaaaattttgatgttaggagacatggggaataaagagtcacacccatgttatagaataaagcaatggtgtatcattggtcctattataatttcaacagattctcccaaattttgtttacattagataaaattgaattggagaaatgaacatgatggtagtgtagtgtttgagcactatg

SEQ ID NO: 79243 - DNA, 723 bp, Homo sapiens
aagatggaccagcctcagcatgaagaaaggaggaagcttaagtatctgacattgttctttacaacccttcacccttcctgaaactggcttcaaattatttgttaaatacaaattcrtatgaaaaataaaattacataaaggctgaaaacagtctgcaatgtataatcatatcaatctacttatggaattttacatttactatggtgagttatattgttatgtttacgtataaggattttgaacaatctaatatttatcctaaaaagaaatatcagaatggaaaattgaaaaataaatagaagggcaatgcaaaatggatgtcactgtgaagaaacgttaaagaataagtcattttaaaccaatcattagtatataaaatgtattttatatagtcattttaaaccaatcattagtatataaaatgtatttagatatttagatattttactatttgtttttatctcccagagatgaccaaaaatttagtttcaaatgtatctcacctatatctcagaggaataaatcacattttgtctgatagaatgttattctttaatgctaaccttacttgttctggggaagaagctacacactggaagcaattttcaaatatgcaaatattttattccaatgctttccaaccttttttccaacttccattatttgtttaatgaccttattatttaatgacctctagacaagctaaatttcatggaatgaact

SEQ ID NO: 79244 - DNA, 1281 bp, Homo sapiens
atgcataatctacaaaactagtcaatgactactcttaggcattcaaaagaagatggcaattgtttgtcgaagtttttacattgagtcacttaatcatttcagtttgaagatgtaacacttaagagacattggcatatagatgatattgaaaccatgggagcaggggaaggtttgtagggagatggtgtgcatagggaagagacaccattgctgaagacaatgctctagaatacttcaacaactagaggtctgctagaggagaaggatctaaaaaagtgagactagtcaggagagaggcaaagcaggcaagtgtgtggtcatggaagcttggcaatgaaagcattgcaagaagcagcaacagacactgtcacatgctgttgagaggtcaagattaaagagacagttaaatgctggctttgataaagttagtttctagtgacctaagcagtttcataggaatgaaatctcctgtgatggtgatgttaatacatcaggctgtctttcgaattaacatgattaatttcaaggcttaggcacatagatatacaaagacactggtataaaataatagtttatgtgggtaataaggcacctattataactcatttaaagatggggatatatcttacaccttttcttaatcttttggttgagaagagagcttcacataaagtagtactatacaatttattgatattcatgtgtcttcaatttttccaccttaaaacatataaaaaagagaagaagagaagctaatttcttttagaaaataaagtccttttgcaagtctaacattttttgagcctatgttaaggcactttaaaaatatttgtacctggcaaaaagaccaaaataaatgtgatagagtgggaaaaataaagacaaggtaatcatagaaaaaattaattttacaaagaacaaaaaagataaagagaaaactcggcataattcttttaaggttgtctaccttttgtgcttttaaaatgtatttctaaatgtatttttataatttaagacttttcaaaatacttcaatttatattttcaaataaatacaaatgcgagacatataccacctcagtgcattaaaccatgtatgtttgagcrtaaagtgagcatgtattaatgagtaatttcattatatatatcagttttacctcttgcatttccatgctttatcatagtcatgggacctgagtcaagaggaagtttcctctttaatagcggaataaaaatgcttttacttgaaagtttgatttctttgtaactttgtgtttctgtg

SEQ ID NO: 79245 - DNA, 615 bp, Homo sapiens
tggatggtagataagatagatggatgawtataaaatgtatagaaagggagagtgctggaaaagcatcacaaaagtagaagctgaaattacctgaccatcaaattctaggaagtcaatctagtagacaccctattataatgttgtaggaatgatgacaatctttttgagccaggaatcatgcggtccttaagacaattaggtagtttgataagatgcaaagacctctgtaaacaataccaatgcaatagaataattctgatgcattggagaagattaatcacatatatatctttaaaaaccagaagatgggaggaaataatctcagaaggagtatcttctcatacagagaacaaaaacaacatgcttaatagtcattcaattttttaaggaaaaatttgagagcatcttaatagggcttgggagtcacccatctgaccatatccatcttcttgcagttatttaaaggtaacttctttccttcttatttttgttccttcttccctcaacccctctccttccctcctttcccttcctcttccttcaccaaatatttattacatttgcactctatgtcaagaacttcgctaaacagttcatatctttatgcaatgggtc

SEQ ID NO: 79246 - DNA, 615 bp, Homo sapiens
tggatggtagataagatagatggatgaatataaaatgtatagaaagggagagtgctggaaaagcatcacaaaagtagaagctgaaattacctgaccatcaaattctaggaagtcaatctagtagacaccctattataatgttgtaggaatgatgacaatctttttgagccaggaatcatgcggtccttaagacaattaggtagtttgataagatgcaaagacctctgtaaacaataccaatgcaatagaataattctgatgyattggagaagattaatcacatatatatctttaaaaaccagaagatgggaggaaataatctcagaaggagtatcttctcatacagagaacaaaaacaacatgcttaatagtcattcaattttttaaggaaaaatttgagagcatcttaatagggcttgggagtcacccatctgaccatatccatcttcttgcagttatttaaaggtaacttctttccttcttatttttgttccttcttccctcaacccctctccttccctcctttcccttcctcttccttcaccaaatatttattacatttgcactctatgtcaagaacttcgctaaacagttcatatctttatgcaatgggtc

SEQ ID NO: 79247 - DNA, 693 bp, Homo sapiens
tgttaaagggaaactattgttttcctttttttttgtttgttttttttttcacaaatacagaagccctaaagaagctaaataatttgcccaagctcatagaattagtcagagacctaggtgaaacatgcactaggccacctaatattcaaagagcacaccactgtttttctggtatgcatttgcttttgctggctttttaatggagtcttagagcaaataagacaatattctatgtacaagacatcataacaatcatgaatgcaatcatctttttatctttctgcaacctctgagwccgtactcttgaccaccctgccattctgactcccggaaacaccgcacagagtgttggcagaggaagcacagagaagggacacccaacagtgctgggggcaggcagggaaagggtttcagggggacgcatactccagcccctcaaggacacagaagctctcttgatctcatcatgacactgggactcatgcaggtacttcaaatcaggcttgatggatatcctagttctgagcgcagtggttcttagataccagtgtgtatagaattgcctggagagcatgttccagttgcagatccttggacctcatacccaggaaccctgctttgataggtcttggccaggctggagaaactgcaggtttattcagcatccaaaagattcttatgcgggtggtaccg

SEQ ID NO: 79248 - DNA, 693 bp, Homo sapiens
tgttaaagggaaactattgttttcctttttttttgtttgttttttttttcacaaatacagaagccctaaagaagctaaataatttgcccaagctcatagaattagtcagagacctaggtgaaacatgcactaggccacctaatattcaaagagcacaccactgtttttctggtatgcatttgcttttgctggctttttaatggagtcttagagcaaataagacaatattctatgtacaagacatcataacaatcatgaatgcaatcatctttttatctttctgcaacctctgagtccgtactcttgaccaccctgccattctgactcccggaaacaccgcacagagtgttggcagaggaagcacagagaagggacacccaacagtgctgggggcaggcagggaaagggtttcagggggacgcatactccagcccctcaaggacacagaagctctcttgatctcatcatgacactgggactcatgcaggtacttcaaatcaggcttgatggatatcctagttctgagcgcagtggttcttagataccagtgtgtatagaattgcctggagagcatgttccrgttgcagatccttggacctcatacccaggaaccctgctttgataggtcttggccaggctggagaaactgcaggtttattcagcatccaaaagattcttatgcgggtggtaccg

SEQ ID NO: 79249 - DNA, 1330 bp, Homo sapiens
gcatgggcagtgagcactgcttgttaatatactaccaaggttttgtagttgtctgtcacagagcaaaagctacctgatacattctcttcctttttcccaccatctacagagagtacccaggagatagagttctttgccttggtcttcactaaaagcaagcaatcccaaccagctttcacctttgtttttgaaggcaaacatatgcttgacatgcaaagactcttccaacctggcagaaaacactaaagagactagagatagcactgccttagaattcaagagctcattcttaccaatgctccaatcttccatactttgaacatggtattcctaggcctacagcaacagttagaacctgcctgtccaagttaaattccatgagtctccactcattcattcattcattcattcatccattcaacagatacttctttatagcccctatgtgccaatcactgcgctggaacattaacatgcagccatatcctcaaggagctcatctatggggtagattacatcctccagtctttgtttcctcctcaccagcactgtcatgttggggcaacaataaacagtatagttccacagctttattacaagctattatcagcagtgcaaatataaattctatatattcaaaaccatttggctatgttttgaattcatgaaaaaacttacacacacacacacacacacacacacacacacacacacacacacacacaatgcctcggcccagccaggtgcggtggctcacgcctgtaatcccagcactttaggaggccgaggcaggtggatcatgaggtcaggagtttgagaccagcctggtctacatggtgaaatcccgtctctactaaaaacacaaaaaattagctgggcatagtggcgggcacctgtaatcccagctactcaggaggctgaggcagaagaattgcttgaacccggaggcaraggttgcagtgagtcgagatcacgccactgcactccagccccagtgacagagtgagactctgtctcaaaaaaaaaaaaaaaaaaaaaaaagaaaaaagaaatgccttggcccccttaaaggtgattaaaggatgttggaggatagtctggggtgagagtgacaaagcctcatcttgttctcttcagatggaaatcaccagtacctgggaatatggatcaactgtgctattaactttacccaaaccaccttaaaactgaatcatgaatatacaacgccttctttgatgacatagtgtggtggttttgaaatatatccacaaattatttgatctttctcccttcaggacatagagtttaattcccttccctctgagtgtgg

SEQ ID NO: 79250 - DNA, 693 bp, Homo sapiens
gtctgttggcacaatgattgttaggagataaagaagaggtgctaggggaagcagtgtgaatacatagagacaaagggtggcacagytttttgtagtctgctcatccatcaaagaataacatcccttcgtaacctggtcccaccccaaggctgaaggtagaacctactcatgtctctattccaaatgcatgtgtcccaatatctttttaatatttccatgatactcaaaaggcacttcaaactcaacaggccctaaccaaactcatggtcatcttccctaaacctgggcccttctggcattctcatccttattaagttgagtggtgtaagccataaccctataagtcactcctgacacttccttcaccccaatgtctatacatacccaattgtcatagagtttatctactaaccatttccaattccatatacacctttccatctcctcactggaatacaagacaccatggcaactcatttggaatactgctatcaccttctagttggtctctatggtccctcttttttctcattttctggacactgtagttcagaggctctttcaatggaaaaatgcacccttattttcattaccctctaacgaaaattaagcaggttcttcaactatgaatgtagataacaaatcacaatagtattagcagaacctgtgtttgtcaccagttataggaaaaaa

SEQ ID NO: 79251 - DNA, 693 bp, Homo sapiens
gtctgttggcacaatgattgttaggagataaagaagaggtgctaggggaagcagtgtgaatacatagagacaaagggtggcacagctttttgtagtctgctcatccatcaaagaataacatcccttcstaacctggtcccaccccaaggctgaaggtagaacctactcatgtctctattccaaatgcatgtgtcccaatatctttttaatatttccatgatactcaaaaggcacttcaaactcaacaggccctaaccaaactcatggtcatcttccctaaacctgggcccttctggcattctcatccttattaagttgagtggtgtaagccataaccctataagtcactcctgacacttccttcaccccaatgtctatacatacccaattgtcatagagtttatctactaaccatttccaattccatatacacctttccatctcctcactggaatacaagacaccatggcaactcatttggaatactgctatcaccttctagttggtctctatggtccctcttttttctcattttctggacactgtagttcagaggctctttcaatggaaaaatgcacccttattttcattaccctctaacgaaaattaagcaggttcttcaactatgaatgtagataacaaatcacaatagtattagcagaacctgtgtttgtcaccagttataggaaaaaa

SEQ ID NO: 79252 - DNA, 693 bp, Homo sapiens
gtctgttggcacaatgattgttaggagataaagaagaggtgctaggggaagcagtgtgaatacatagagacaaagggtggcacagctttttgtagtctgctcatccatcaaagaataacatcccttcgtaacctggtcccaccccaaggctgaaggtagaacctactcatgtctctattccaaatgcatgtgtcccaatatctttttaatattwccatgatactcaaaaggcacttcaaactcaacaggccctaaccaaactcatggtcatcttccctaaacctgggcccttctggcattctcatccttattaagttgagtggtgtaagccataaccctataagtcactcctgacacttccttcaccccaatgtctatacatacccaattgtcatagagtttatctactaaccatttccaattccatatacacctttccatctcctcactggaatacaagacaccatggcaactcatttggaatactgctatcaccttctagttggtctctatggtccctcttttttctcattttctggacactgtagttcagaggctctttcaatggaaaaatgcacccttattttcattaccctctaacgaaaattaagcaggttcttcaactatgaatgtagataacaaatcacaatagtattagcagaacctgtgtttgtcaccagttataggaaaaaa

SEQ ID NO: 79253 - DNA, 693 bp, Homo sapiens
gtctgttggcacaatgattgttaggagataaagaagaggtgctaggggaagcagtgtgaatacatagagacaaagggtggcacagctttttgtagtctgctcatccatcaaagaataacatcccttcgtaacctggtcccaccccaaggctgaaggtagaacctactcatgtctctattccaaatgcatgtgtcccaatatctttttaatatttccatgatactcaaaaggcacttcaaactcaacaggccctaaccaaactcatggtcatcttccctaaacctgggcccttctggcattctcatccttattaagttgagtggtgtaagccataaccctataagtcactcctgacacttccttcaccccaatgtctatacatacccaattstcatagagtttatctactaaccatttccaattccatatacacctttccatctcctcactggaatacaagacaccatggcaactcatttggaatactgctatcaccttctagttggtctctatggtccctcttttttctcattttctggacactgtagttcagaggctctttcaatggaaaaatgcacccttattttcattaccctctaacgaaaattaagcaggttcttcaactatgaatgtagataacaaatcacaatagtattagcagaacctgtgtttgtcaccagttataggaaaaaa

SEQ ID NO: 79254 - DNA, 749 bp, Homo sapiens
cagggatcaagcagacatcaatcatttagagatggcaaatatgtgagagcaaggtcagaagccaaattcacttggattagtttgattagaaacttaaagacaggcttaaccaggacccactgaaaccatcaaggcagtcaaaaaagaggagaaaaattggagggggaaatgtagattgtagaactgaaaacatttgtgttagtatagtgagatgagaggaacctttaaaaaatatctgtcagtgctattgtasaccttatagtgtattgtgttttgtgagtctggagacccgggtcagagtcctgcctctgatacttctaaacccttaagttagaatgagctctgatttcctcactgttgaaagaacctaatcctatctgccttatctacacagcagtaatttagtcgttatttattaattacttcaaaggtgttcagcattgtgctcagcagtggggatttcataatgagttaaaaaccaaaaaaaaaaaaaaaaaggcagaagagtcctttcctttgtatagctttgaatctcagtagggaaaatacaataatcacatattccccataaataaatgggaattgtaaacacctgggctaggaagaagaggtataaaacagaagagggaataagaggggtatcagatctagactgaggggtgatgtttcccaaagaagtggcaatagacctgaaatacaaaggatgaatgagtctgcattacctttctccgtacagagagcaatatgca

SEQ ID NO: 79255 - DNA, 749 bp, Homo sapiens
cagggatcaagcagacatcaatcatttagagatggcaaatatgtgagagcaaggtcagaagccaaattcacttggattagtttgattagaaacttaaagacaggcttaaccaggacccactgaaaccatcaaggcagtcaaaaaagaggagaaaaattggagggggaaatgtagattgtagaactgaaaacatttgtgttagtatagtgagatgagaggaacctttaaaaaatatctgtcagtgctattgtacaccttatagtgtattgtgttttgtgagtctggagacccgggtcagagtcctgcctctgatacttctaaacccttaagttagaatgagctctgatttcctcactgttgaaagaacctaatcctawctgccttatctacacagcagtaatttagtcgttatttattaattacttcaaaggtgttcagcattgtgctcagcagtggggatttcataatgagttaaaaaccaaaaaaaaaaaaaaaaaggcagaagagtcctttcctttgtatagctttgaatctcagtagggaaaatacaataatcacatattccccataaataaatgggaattgtaaacacctgggctaggaagaagaggtataaaacagaagagggaataagaggggtatcagatctagactgaggggtgatgtttcccaaagaagtggcaatagacctgaaatacaaaggatgaatgagtctgcattacctttctccgtacagagagcaatatgca

SEQ ID NO: 79256 - DNA, 749 bp, Homo sapiens
cagggatcaagcagacatcaatcatttagagatggcaaatatgtgagagcaaggtcagaagccaaattcacttggattagtttgattagaaacttaaagacaggcttaaccaggacccactgaaaccatcaaggcagtcaaaaaagaggagaaaaattggagggggaaatgtagattgtagaactgaaaacatttgtgttagtatagtgagatgagaggaacctttaaaaaatatctgtcagtgctattgtacaccttatagtgtattgtgttttgtgagtctggagacccgggtcagagtcctgcctctgatacttctaaacccttaagttagaatgagctctgatttcctcactgttgaaagaacctaatcctatctgccttatctacacagcagtaatttagtcgttatttattaattacttcaaaggtgttcagcattgtgctcagcagtggggatttcataatgagttaaaamccaaaaaaaaaaaaaaaaaggcagaagagtcctttcctttgtatagctttgaatctcagtagggaaaatacaataatcacatattccccataaataaatgggaattgtaaacacctgggctaggaagaagaggtataaaacagaagagggaataagaggggtatcagatctagactgaggggtgatgtttcccaaagaagtggcaatagacctgaaatacaaaggatgaatgagtctgcattacctttctccgtacagagagcaatatgca

SEQ ID NO: 79257 - DNA, 749 bp, Homo sapiens
cagggatcaagcagacatcaatcatttagagatggcaaatatgtgagagcaaggtcagaagccaaattcacttggattagtttgattagaaacttaaagacaggcttaaccaggacccactgaaaccatcaaggcagtcaaaaaagaggagaaaaattggagggggaaatgtagattgtagaactgaaaacatttgtgttagtatagtgagatgagaggaacctttaaaaaatatctgtcagtgctattgtacaccttatagtgtattgtgttttgtgagtctggagacccgggtcagagtcctgcctctgatacttctaaacccttaagttagaatgagctctgatttcctcactgttgaaagaacctaatcctatctgccttatctacacagcagtaatttagtcgttatttattaattacttcaaaggtgttcagcattgtgctcagcagtggggatttcataatgagttaaaaaccaaaaaaaaaaaaaaaaaggcagaagagtcctttcctttgtatagctttgaatctcagtagggaaaatacaataatcacatattccccataaataaatgggaattgtaaacacctgggctaggaagaagaggtataaaacagaagagggaataagaggggtatcagatctagactgaggggtgatgtttcccaaagaagtrgcaatagacctgaaatacaaaggatgaatgagtctgcattacctttctccgtacagagagcaatatgca

SEQ ID NO: 79258 - DNA, 1101 bp, Homo sapiens
tgaaggggcaggggaaaggggcaggctaggacagcttcagacctggacgtgggtctgggatccaggaggggacagagagaaggaaggattttgtaggaagagcctccaagcacagtggattccttagaaaatctcaaccaagccagtgtaggggtcccaaacaatttgcctgttagagagatcctgcctctgccatgcttgctcagtggccagsagcagtctacacaaagcatggggtcggctttccgggggcagtgacggagatcctcagtctgctctgctcactgcagtaggggagatgtgagaccctgacggagatttgcatggcccacctgcatggttaccctcagtcccaattactgcaaaatttccctaagtctggattatttggtcttcaatagcatcacacatgggctgtcaatagcctggtctaggttgactgtgtcaaatgcagttcatttatttttcagtctctcttccttgaaagtatgtgttagtttctgtgcaataatagagaagctcaatgatctcaggtggcttcccaaaattaattttatttctggctttaaaaagctgacttttgtccaggtaactcctagatcagctgtcttcccggtgggggatcagcggtccagccggcttgcttgcatcacctcattctcaagccatggtccggttcctgtgctggggaacagtgcacaggaaggtcctcaactcggaaggtgtgcacagcacttgcacgtaaattcccttcaccagaacaagccaggtgtctggtatggacatattaagataccatccacatctgctctctgaaggagatgagaactggttacagctgagcctaccctgtctctggagtcaaaaacctgtaagacccagtttatacccaggctacattagtaggccttagataggaatcttcaggaaatcaggccatactatggttccagcttttctagaaaacatctagaaaaggcctgtcatgctgatgctagagggttagttacctggaggctcctcagaaaacacaacatgcacttataataatccatgacaagtactgcaaagaaatgttattggagagctaagaggaacaaa

SEQ ID NO: 79259 - DNA, 577 bp, Homo sapiens
agctttgcatcagctggacagtggattgagaaaatgtgatatagccatatgctggaatactattcagccataaaaaagcaaactactgacacatgctacatcctgtgtgaaactcaaactcataatgctaagtaagcgaaaccacacacacacaaatacataycgtatgaatccatttatatgaaatgttcacaaagagcgaatgtatagagaaagtagattagtggttagctgatgcttgaagtaggattagaagtaaactcgaaatgggtttgagggatctccttggaagcatgaaaatgttaaaaaagcaatatatggtgagggttgctttccatgaattttgcttattttactcagtaaaataagtaaaaagtaatcacttaaatacacttgaaattggtgtatctttttataccatatgtccctcaataaaggtgttaaaaaaaaagtgacaattgggaggctgaggcaggaggatggcttgattctagaaggttgaagctgtagtgagctctgctctaccactgcactccagcctcggtgacagactaagaccctatctctaaaaaataca

SEQ ID NO: 79260 - DNA, 577 bp, Homo sapiens
agctttgcatcagctggacagtggattgagaaaatgtgatatagccatatgctggaatactattcagccataaaaaagcaaactactgacacatgctacatcctgtgtgaaactcaaactcataatgctaagtaagcgaaaccacacacacacaaatacataccgtatgaatccatttatatgaaatgttcacaaagagcgaatgtatagagaaagtagattagtggttagctgatgcttgaagtaggattagaagtaaactcgaaatgggtttgagggatctccttggaagcrtgaaaatgttaaaaaagcaatatatggtgagggttgctttccatgaattttgcttattttactcagtaaaataagtaaaaagtaatcacttaaatacacttgaaattggtgtatctttttataccatatgtccctcaataaaggtgttaaaaaaaaagtgacaattgggaggctgaggcaggaggatggcttgattctagaaggttgaagctgtagtgagctctgctctaccactgcactccagcctcggtgacagactaagaccctatctctaaaaaataca

SEQ ID NO: 79261 - DNA, 1414 bp, Homo sapiens
gaattttcttttgtggaaggtttttactacaaattccacttacttagtagaattaagattattcaagttatctaattttttactgagtaattctggtctcattatgtctttcaagggaatttttttcattttttaatatcattttatagctttatattaaaagttctgaatatgagtggctctctgcctgctccctttcaccaccttaatatcttaagtgaataatgcattctcatcaagagggttaaaactaatcatcagctgatggcagttcactttttgaattacaaaaaactttccccctcaggccatttattttactcataagcaacctaactatattatagattctaaaatattatctccaaagcccctagaagatgcatacatttagtccaaaaggtttaataactccccaagctgatatttccctttctcctttgatatttccataatttggagtgcccattgtctgttttatttcatattgggacaagctgaacagggactaaggtgaaggcagagaggcattcagggcaaatcgtttaaggaggtactacaaatacaaggtcaacacttgcaggaaactaagaaagagtgtctccttaaaatttgtgtcctaggtgtcttatctagttctggcctttttaatgtgaattctttttttttttttttttgagatgaagtctggctctgtcacccaggctagagtgcactggtgcgatctcgcctgactgcaacctccacctcctgggttcaagggattctcctgcctcagcctcccaagtagctgggattacaggcatgcaccaccacacctggctaatttttgtatttttagtggagacagggtttcaccatgttggccaggctggtcttgaactcctgacctgaggtgatccacccacctcggcctcccaaagtgctgtgattacaggcatcaaccactgcacccagcttgaattctttgtgtcctctaaaaactcaaaattattttttagtattttaccagaaacatgggaggcatcaatttaaaaggaatgcacagaagacacttcatcactacttccaaccaagcagtaatgggctggagatcctagattaagctactggcagatctggtgtctggcgagggctctgctcctggtttgcagatgggtgtcctctcattatgccctygcatggttgagagaaaaatcatcgttcttctgtttcttcttagaagggcactaattttattcatgagctccatcctcatgacctaatcacagcctaaaggcctcacctcctaatactattatattgggggtttagattgcaacgtatgtatttgggggggtcggcacaaacattcagctcataacatcttgtgaatcacttttaattgcaatgttggaacattgctttaaaatga

SEQ ID NO: 79262 - DNA, 2643 bp, Homo sapiens
tcctcgttccatgtacagacatagagccctttccacttcctttttgtaagaaatagtattctttcccacaggtgagacctggagaaacatttgagtcctctttgatcatatccttagtcatttcccacttctgataatgtgtttgtaagattaatatgagaacttcagtaagactgcacttgcaggggtgcagctacatacaccaagcttctatgtcactggtgaggaatccacaaagcactgacatgagtggagtgatttccatttctcttcagcagcgatctcgtgtcaaagaccatctggcaattcaaatcctgagttattaaggctaaagaattatggccatatctagtttctatgcacagactttccctgagtagaaggctcaattaattaccagatcaaaattgggctgggatttgctttgtaaactgctaagcagtttaactgggttgtagagaaagactctatatgacattaaatgaccttcctaaaagcttatttctcccccaactgctcatgttggaatcaatttcaggagtcattcacaatgagtggtttattagctttctcaatgcatttactacatgccagatgtccagctcacaccagcctgctgcttgcctttcactgaccccttcgatggatgctacggacttggatccactgccaaggaaacacgtcacagagcagtgtgtggttggcatactaagctccaccaagaaagaagacatcacccaggtgtgggcaaaagggatgatattaccaagcaaggtcataatgatgacacaaaatagatttttccccgttgaatttagaaatacgttgtgtcctcagacctctcagtgtgtttcaagcgttgaaaaatccctttgattggaaccaaattgattaaaactaaatgtagaaaagaccttcttgacagttccagggctattctatagctggcttgaatttgatttttaaaaaacatctcattaatccaaagtgttctgcataagagatctgtacatctgttttttcacttatatgattgrataattatcatttattttcagtaggtcattctgaacaaaatgcaagttaatcattaaatgatttctacattggaacatgacatattttgataaaaaggcatggcttaaataatacttcttatcaagcaagtttcttgattctttaattgttttactaatagaactaacaattgcccagattttcatgaaaagaaaaacagcaaatcattggttttctatattgcctttctatgtgcatatgacaatgtagccattgttcagattctcctaaaaagtttaattgacaatgacatcaaaattattcaaatattcttaaaaaatatgtgtgtgacagtataagcaacagtagaactggtcaaaataattatggattattaaatatttactatgaaataaatgcaaatgcattcaaaatacatagaaaaatattggttaaatataattttgcaataaagatgacaaatgctttatttgtgctttttattatgttattactataataagaagcacaaatataaaatatgtatttattttgtagaaatatattataaagggaaaaggtagacatcaataaatacaggtaaaatgaaacatccacagaatgcaaataaatacaaatgcaacatttctaatatcaaacatcacatctgaatgttttcctgatgtcacaatgagacattttctttatatctgttggatctaataaaatgcaatagttaataatcatattttttggatggcatggggtaaactgaattatgtagttaaccataatgagcattgttagactatttctaaatttcacagggaaacaaattactttgttggttgccaaattgcaaccaacacaagtacttagtcaaaactccttaatggtgatgataaaaaatttggaaattattcagattaatttgaataagttaaaaatgtttttcaacaacagtaagaaaaccacatgtatataaaacaacatatctaatagatatgtaatataattataatataatatatgtaatatacgtgtactgactcatgcaattgtggaggctgagaagttccatagtccatctgcaagctggaaaaccatcaaagctggtggtgtaattcggtcccagtccaaagacttgaccgggagctctgatgcctgagggagggcacaagatggaagtcccagctcaaaacagagggaaaattcacccttcctttacatttttgttctattcaggtcctcaggggattggatgagggccttcaacattggtgaggatagatattgtttgcacagtctaccaattcatgtgccaatttcttccagaaacaccctcacagatatacccagaaataatgttttaccagctgtctgggcatcccttagactagtcaagttgacacataaaattaaacatcactccaagtaaaactagttttgccttctcttgaaatgtttaaggagagaaaggtaacattgagcagaacgatgtagaggaaagggccatgcacatcacaaaagcctatcaataacatttgtgagccgccacttaattgtctgcaaaatggatggcatggcggggttgtggtgaagcatagattcaacatacaaacatga

SEQ ID NO: 79263 - DNA, 2643 bp, Homo sapiens
tcctcgttccatgtacagacatagagccctttccacttcctttttgtaagaaatagtattctttcccacaggtgagacctggagaaacatttgagtcctctttgatcatatccttagtcatttcccacttctgataatgtgtttgtaagattaatatgagaacttcagtaagactgcacttgcaggggtgcagctacatacaccaagcttctatgtcactggtgaggaatccacaaagcactgacatgagtggagtgatttccatttctcttcagcagcgatctcgtgtcaaagaccatctggcaattcaaatcctgagttattaaggctaaagaattatggccatatctagtttctatgcacagactttccctgagtagaaggctcaattaattaccagatcaaaattgggctgggatttgctttgtaaactgctaagcagtttaactgggttgtagagaaagactctatatgacattaaatgaccttcctaaaagcttatttctcccccaactgctcatgttggaatcaatttcaggagtcattcacaatgagtggtttattagctttctcaatgcatttactacatgccagatgtccagctcacaccagcctgctgcttgcctttcactgaccccttcgatggatgctacggacttggatccactgccaaggaaacacgtcacagagcagtgtgtggttggcatactaagctccaccaagaaagaagacatcacccaggtgtgggcaaaagggatgatattaccaagcaaggtcataatgatgacacaaaatagatttttccccgttgaatttagaaatacgttgtgtcctcagacctctcagtgtgtttcaagcgttgaaaaatccctttgattggaaccaaattgattaaaactaaatgtagaaaagaccttcttgacagttccagggctattctatagctggcttgaatttgatttttaaaaaacatctcattaatccaaagtgttctgcataagagatctgtacatctgttttttcacttatatgattgaataattatcatttattttcagtaggtcattctgaacaaaatgcaagttaatcattaaatgatttctacattggaacatgacatattttgataaaaaggcatggcttaaataatacttcttatcaagcaagtttcttgattctttaattgttttactaatagaactaacaattgcccagattttcatgaaaagaaaaacagcaaatcattggttttctatattgcctttctatgtgcatatgacaatgtagccattgttcagattctcctaaaaagtttaattgacaatgacatcaaaattattcaaatattcttaaaaaatatgtgtgtgacagtataagcaacagtagaactggtcaaaataattatggattattmaatatttactatgaaataaatgcaaatgcattcaaaatacatagaaaaatattggttaaatataattttgcaataaagatgacaaatgctttatttgtgctttttattatgttattactataataagaagcacaaatataaaatatgtatttattttgtagaaatatattataaagggaaaaggtagacatcaataaatacaggtaaaatgaaacatccacagaatgcaaataaatacaaatgcaacatttctaatatcaaacatcacatctgaatgttttcctgatgtcacaatgagacattttctttatatctgttggatctaataaaatgcaatagttaataatcatattttttggatggcatggggtaaactgaattatgtagttaaccataatgagcattgttagactatttctaaatttcacagggaaacaaattactttgttggttgccaaattgcaaccaacacaagtacttagtcaaaactccttaatggtgatgataaaaaatttggaaattattcagattaatttgaataagttaaaaatgtttttcaacaacagtaagaaaaccacatgtatataaaacaacatatctaatagatatgtaatataattataatataatatatgtaatatacgtgtactgactcatgcaattgtggaggctgagaagttccatagtccatctgcaagctggaaaaccatcaaagctggtggtgtaattcggtcccagtccaaagacttgaccgggagctctgatgcctgagggagggcacaagatggaagtcccagctcaaaacagagggaaaattcacccttcctttacatttttgttctattcaggtcctcaggggattggatgagggccttcaacattggtgaggatagatattgtttgcacagtctaccaattcatgtgccaatttcttccagaaacaccctcacagatatacccagaaataatgttttaccagctgtctgggcatcccttagactagtcaagttgacacataaaattaaacatcactccaagtaaaactagttttgccttctcttgaaatgtttaaggagagaaaggtaacattgagcagaacgatgtagaggaaagggccatgcacatcacaaaagcctatcaataacatttgtgagccgccacttaattgtctgcaaaatggatggcatggcggggttgtggtgaagcatagattcaacatacaaacatga

SEQ ID NO: 79264 - DNA, 1124 bp, Homo sapiens
attgtaagttcattcattcaggtaacaattatttatggaattctcacttgatccctggttcctactgggcactggtaatagaaatgctagataatagagactttgtttctttcatcaagaaacatactagctagtgaccaaatcttttaaaatgatagtttcaaaggaaaaaaatcatatgaagtttgcaatcatcacgtgaatataacaagtaaatgtggtctgttcattatccctatatgaagacaaattccacacaatatatttttccggaataaaattattttttctttctaccctgttagattatcaactctttcagaatagtgattttatattccagatttaactgtcatttgtgtactgtaaatgttcagaaatggtagttaaatgaaatagaaagagtgagaaaaaagtccttttggtttatttggtttttgtttggttttgtttttgagacacagtctcattctgtggctcagacgggagtgcagtggtgtgttcatagctcactgcttacaaaaaggttgggattacaggcatgagcccctgcgcccaaccgaaacttcttgccttcaagaagagttgctgttcaacgggcataaagtttcaattataaaagctgaatacgttttagagatctgctgaacaatattgttcctatagctaataatactttattctgcacttaaaaatggattcagagagtagaactcatgtgaaatgtatgctatggtctgaatcatagtgtccccctgaaattcatcacggtgaaaccaaactccccacataaagtggaagttttgggaggtgatgagatcgtgagggtggagcccttgtgaatgggactagtgtccttgtaaaagaggatccagagacagctgtcttgccccttccaccatgtgagaactcagtaagaaagcactgtctatgaacccgaaaatggcccctcaccagacacagaatctgcgaatctgccggcactttgatcttggacttccagcttccagaactgtaagaaataaatttcagttgtttaaaagcatctagttgatggyacattgttatataagccggtacaggcataaacagtgttcttaagacaacaataaaaatgtaataga

SEQ ID NO: 79265 - DNA, 567 bp, Homo sapiens
aggaggctgaggcaagagaatcacttgaacccaggaggcggaggttgcagtgagctgagattttgcctttgcacttcagcctgggcaagagtgaaactccctctcaacaaaacaaacaaacaagcaaacaaacaaacaaaaacttaaacctttgtgtcatttttaaaaacttagaagactagagaggaatgtatttatacaaatgtgtatataaaataaatatagaattttaaatatataaaaatacataaaaataagcgtacatatacaaatatagaatataaatcttacgataaatgttatatacaacggtgacagtttagatccatttctcttaaaatatttactgctcagcatagcattgtagggcctagatatttttaaaaatgaagataattttttaaaaaagattggtttaagyatgcacatggttgaatactacatttttgtgtctctctctcacacacatattctttttctgagcattttgtatatttcttctggcacttaatgttgttttggataactttgaagtcagtctaattttctctttgtagataacttaat

SEQ ID NO: 79266 - DNA, 567 bp, Homo sapiens
aggaggctgaggcaagagaatcacttgaacccaggaggcggaggttgcagtgagctgagattttgcctttgcacttcagcctgggcaagagtgaaactccctctcaacaaaacaaacaaacaagcaaacaaacaaacaaaaacttaaacctttgtgtcatttttaaaaacttagaagactagagaggaatgtatttatacaaatgtgtatataaaataaatatagaattttaaatatataaaaatacataaaaataagcgtacatatacaaatatagaatataaatcttacgataaatgttatatacaacggtgacagtttagatccatttctcttaaaatatttactgctcagcatagcattgtagggcctagatatttttaaaaatgaagataattttttaaaaaagattggtttaagcatgcacatggttgaatactacatttttgtgtctctctctcacacacatattctttttctgagcattttgtatatttcttctrgcacttaatgttgttttggataactttgaagtcagtctaattttctctttgtagataacttaat

SEQ ID NO: 79267 - DNA, 962 bp, Homo sapiens
tatgtcactcttcattgagtgtgttaggtcctatattaagcattttgcattaagttctatttaattcttacgagaaccaagtatactgtgtattaacaggtcaatattacaaataaagaaacaaagtctcacaggtgcatttcagttacctgcatggccacaaaaccaggagtagtaatggagycagcatttattctacattggtctgacttcagcaactgcattcttccaaataaagcagttaataataaaataatacaaataactggtaaaatatacttaaataattatctccatctatttaaataaaataatttacataaagtgcttggtacggtgtctaatataatcatataattaaaacaaaaagtggtcacaacttctatttgaacagttacaaaaactgggttttacagttgtatttaccagaaaaggtcaattgctataacaacacatccacaatctcaattatttaacaaaataaaggtttgattcttgcagccgttagagtccaatggctatcaacaaggtcagaatgaaggggggaggcttgccaagcagttactcagggacttaggttccttccacagagaggacctgaaatccttgaaaccctccactgaaagattctatcttttcccagcagatatggaatcacaggacatcttgcgagacattgtaggggtcaggcctgaaagtagtatatatcactcccactcatatcacattggatggaattcagttgtatggcctgccctagctgaaagcaaagctcagataccttgtgtaaacatagagctttgtgtctgccccagtaagcaaaatacatcatcctccaaatgagtggcgattggagttttggcagtgtagttgaaaccttagtgaatagaaattatgttagagataaaaaaaaaattcccccctttgagaagaaacttagtttcagcacccaaattacaaaa

SEQ ID NO: 79268 - DNA, 962 bp, Homo sapiens
tatgtcactcttcattgagtgtgttaggtcctatattaagcattttgcattaagttctatttaattcttacgagaaccaagtatactgtgtattaacaggtcaatattacaaataaagaaacaaagtctcacaggtgcatttcagttacctgcatggccacaaaaccaggagtagtaatggagtcagcatttattctacattggtctgacttcagcaactgcattcttccaaataaagcagttaataataaaataatacaaataactggtaaaakatacttaaataattatctccatctatttaaataaaataatttacataaagtgcttggtacggtgtctaatataatcatataattaaaacaaaaagtggtcacaacttctatttgaacagttacaaaaactgggttttacagttgtatttaccagaaaaggtcaattgctataacaacacatccacaatctcaattatttaacaaaataaaggtttgattcttgcagccgttagagtccaatggctatcaacaaggtcagaatgaaggggggaggcttgccaagcagttactcagggacttaggttccttccacagagaggacctgaaatccttgaaaccctccactgaaagattctatcttttcccagcagatatggaatcacaggacatcttgcgagacattgtaggggtcaggcctgaaagtagtatatatcactcccactcatatcacattggatggaattcagttgtatggcctgccctagctgaaagcaaagctcagataccttgtgtaaacatagagctttgtgtctgccccagtaagcaaaatacatcatcctccaaatgagtggcgattggagttttggcagtgtagttgaaaccttagtgaatagaaattatgttagagataaaaaaaaaattcccccctttgagaagaaacttagtttcagcacccaaattacaaaa

SEQ ID NO: 79269 - DNA, 962 bp, Homo sapiens
tatgtcactcttcattgagtgtgttaggtcctatattaagcattttgcattaagttctatttaattcttacgagaaccaagtatactgtgtattaacaggtcaatattacaaataaagaaacaaagtctcacaggtgcatttcagttacctgcatggccacaaaaccaggagtagtaatggagtcagcatttattctacattggtctgacttcagcaactgcattcttccaaataaagcagttaataataaaataatacaaataactggtaaaatatacttaaataattatctccatctatttaaataaaataatttacataaagtgcttggtacggtgtctaatataatcatataattaaaacaaaaagtrgtcacaacttctatttgaacagttacaaaaactgggttttacagttgtatttaccagaaaaggtcaattgctataacaacacatccacaatctcaattatttaacaaaataaaggtttgattcttgcagccgttagagtccaatggctatcaacaaggtcagaatgaaggggggaggcttgccaagcagttactcagggacttaggttccttccacagagaggacctgaaatccttgaaaccctccactgaaagattctatcttttcccagcagatatggaatcacaggacatcttgcgagacattgtaggggtcaggcctgaaagtagtatatatcactcccactcatatcacattggatggaattcagttgtatggcctgccctagctgaaagcaaagctcagataccttgtgtaaacatagagctttgtgtctgccccagtaagcaaaatacatcatcctccaaatgagtggcgattggagttttggcagtgtagttgaaaccttagtgaatagaaattatgttagagataaaaaaaaaattcccccctttgagaagaaacttagtttcagcacccaaattacaaaa

SEQ ID NO: 79270 - DNA, 962 bp, Homo sapiens
tatgtcactcttcattgagtgtgttaggtcctatattaagcattttgcattaagttctatttaattcttacgagaaccaagtatactgtgtattaacaggtcaatattacaaataaagaaacaaagtctcacaggtgcatttcagttacctgcatggccacaaaaccaggagtagtaatggagtcagcatttattctacattggtctgacttcagcaactgcattcttccaaataaagcagttaataataaaataatacaaataactggtaaaatatacttaaataattatctccatctatttaaataaaataatttacataaagtgcttggtacggtgtctaatataatcatataattaaaacaaaaagtggtcacaacttctatttgaacagttacaaaaactgggttttacagttgtatttaccagaaaaggtcaattgctataacaacacatccacaatctcaattatttaacaaaataaaggtttgattcttgcagccgttagagtccaatggctatcaacaaggtcagaatgaaggggggaggcttgccaagcagttactcagggacttaggttccttccacagagaggacctgaaatccttgaaaccctccactgaaagattctatcttttcccagcagatatggaatcacaggacatcttgcgagacattgtaggggtcaggcctgaaagtagyatatatcactcccactcatatcacattggatggaattcagttgtatggcctgccctagctgaaagcaaagctcagataccttgtgtaaacatagagctttgtgtctgccccagtaagcaaaatacatcatcctccaaatgagtggcgattggagttttggcagtgtagttgaaaccttagtgaatagaaattatgttagagataaaaaaaaaattcccccctttgagaagaaacttagtttcagcacccaaattacaaaa

SEQ ID NO: 79271 - DNA, 962 bp, Homo sapiens
tatgtcactcttcattgagtgtgttaggtcctatattaagcattttgcattaagttctatttaattcttacgagaaccaagtatactgtgtattaacaggtcaatattacaaataaagaaacaaagtctcacaggtgcatttcagttacctgcatggccacaaaaccaggagtagtaatggagtcagcatttattctacattggtctgacttcagcaactgcattcttccaaataaagcagttaataataaaataatacaaataactggtaaaatatacttaaataattatctccatctatttaaataaaataatttacataaagtgcttggtacggtgtctaatataatcatataattaaaacaaaaagtggtcacaacttctatttgaacagttacaaaaactgggttttacagttgtatttaccagaaaaggtcaattgctataacaacacatccacaatctcaattatttaacaaaataaaggtttgattcttgcagccgttagagtccaatggctatcaacaaggtcagaatgaaggggggaggcttgccaagcagttactcagggacttaggttccttccacagagaggacctgaaatccttgaaaccctccactgaaagattctatcttttcccagcagatatggaatcacaggacatcttgcgagacattgtaggggtcaggcctgaaagtagtatatatcactcccactcatatcacattggatggaattcagttgtatggcctgccctagctgaaagcaaagctcagataccttgtgtaaacatagagctttgtgtctgccccagtaagcaaaatacatcatcctccaaatgagtggcgattggagttttggcagtgtagttgaaaccttagtgaatagaaattatgttagagataaaaaaaaaawtcccccctttgagaagaaacttagtttcagcacccaaattacaaaa

SEQ ID NO: 79272 - DNA, 777 bp, Homo sapiens
atgcattaaaattaaccaaattttctcttttctaggcactgtcctaattgtagatgcttgagaaaatagagatgtaatcatggatacccaccaggtatttgagtcaggttcttcaatgcaaaagtcacatagaagctgctgctttaatgtttgtaayagacttccaaactaatgtctcttataatgtccctgtgtattaagatttccataaaaccattacaatttctatttattttgtctagatgtaaagcagacggcatatcatattacatatattgctaaaattcttgcagcctaatgtatacagatttgtgaattttgagtgatctgaagttcatgaatattttgaggttggtttgttttgtcttgttcaaagcctagatatcatgttttttcagtttaacatatttcttgagggaaaagaaatgtttagatttccagctagttataaaattgtcagaaagaatagaagttaaacatacagagaaacaaaggttacacatctgggaaaatagtagaaaagcctttatatagtcttggcaaatgaattcagaggttttatttttaatcacaactgtgaagaaagaaagattaccttttggggaaattaatgaatattgtgggcttagacataaaataattgttaattgctccatttattagaaatcatatgtcaaaagtgttttatcatcagtaatacaatagcaatagagataaaaatatatacggatatttgattttgatgattttaatctcctatgccatttccataacaac

SEQ ID NO: 79273 - DNA, 777 bp, Homo sapiens
atgcattaaaattaaccaaattttctcttttctaggcactgtcctaattgtagatgcttgagaaaatagagatgtaatcatggatacccaccaggtatttgagtcaggttcttcaatgcaaaagtcacatagaagctgctgctttaatgtttgtaacagacttccaaactaatgtctcttataatgtccctgtgtattaagatttccataaaaccattacaatttctatttattttgtctagatgtaaagcagacrgcatatcatattacatatattgctaaaattcttgcagcctaatgtatacagatttgtgaattttgagtgatctgaagttcatgaatattttgaggttggtttgttttgtcttgttcaaagcctagatatcatgttttttcagtttaacatatttcttgagggaaaagaaatgtttagatttccagctagttataaaattgtcagaaagaatagaagttaaacatacagagaaacaaaggttacacatctgggaaaatagtagaaaagcctttatatagtcttggcaaatgaattcagaggttttatttttaatcacaactgtgaagaaagaaagattaccttttggggaaattaatgaatattgtgggcttagacataaaataattgttaattgctccatttattagaaatcatatgtcaaaagtgttttatcatcagtaatacaatagcaatagagataaaaatatatacggatatttgattttgatgattttaatctcctatgccatttccataacaac

SEQ ID NO: 79274 - DNA, 777 bp, Homo sapiens
atgcattaaaattaaccaaattttctcttttctaggcactgtcctaattgtagatgcttgagaaaatagagatgtaatcatggatacccaccaggtatttgagtcaggttcttcaatgcaaaagtcacatagaagctgctgctttaatgtttgtaacagacttccaaactaatgtctcttataatgtccctgtgtattaagatttccataaaaccattacaatttctatttattttgtctagatgtaaagcagacggcatrtcatattacatatattgctaaaattcttgcagcctaatgtatacagatttgtgaattttgagtgatctgaagttcatgaatattttgaggttggtttgttttgtcttgttcaaagcctagatatcatgttttttcagtttaacatatttcttgagggaaaagaaatgtttagatttccagctagttataaaattgtcagaaagaatagaagttaaacatacagagaaacaaaggttacacatctgggaaaatagtagaaaagcctttatatagtcttggcaaatgaattcagaggttttatttttaatcacaactgtgaagaaagaaagattaccttttggggaaattaatgaatattgtgggcttagacataaaataattgttaattgctccatttattagaaatcatatgtcaaaagtgttttatcatcagtaatacaatagcaatagagataaaaatatatacggatatttgattttgatgattttaatctcctatgccatttccataacaac

SEQ ID NO: 79275 - DNA, 777 bp, Homo sapiens
atgcattaaaattaaccaaattttctcttttctaggcactgtcctaattgtagatgcttgagaaaatagagatgtaatcatggatacccaccaggtatttgagtcaggttcttcaatgcaaaagtcacatagaagctgctgctttaatgtttgtaacagacttccaaactaatgtctcttataatgtccctgtgtattaagatttccataaaaccattacaatttctatttattttgtctagatgtaaagcagacggcatatcatattacatayattgctaaaattcttgcagcctaatgtatacagatttgtgaattttgagtgatctgaagttcatgaatattttgaggttggtttgttttgtcttgttcaaagcctagatatcatgttttttcagtttaacatatttcttgagggaaaagaaatgtttagatttccagctagttataaaattgtcagaaagaatagaagttaaacatacagagaaacaaaggttacacatctgggaaaatagtagaaaagcctttatatagtcttggcaaatgaattcagaggttttatttttaatcacaactgtgaagaaagaaagattaccttttggggaaattaatgaatattgtgggcttagacataaaataattgttaattgctccatttattagaaatcatatgtcaaaagtgttttatcatcagtaatacaatagcaatagagataaaaatatatacggatatttgattttgatgattttaatctcctatgccatttccataacaac

SEQ ID NO: 79276 - DNA, 777 bp, Homo sapiens
atgcattaaaattaaccaaattttctcttttctaggcactgtcctaattgtagatgcttgagaaaatagagatgtaatcatggatacccaccaggtatttgagtcaggttcttcaatgcaaaagtcacatagaagctgctgctttaatgtttgtaacagacttccaaactaatgtctcttataatgtccctgtgtattaagatttccataaaaccattacaatttctatttattttgtctagatgtaaagcagacggcatatcatattacatatattgctaaaattcttgcagcctaatgtrtacagatttgtgaattttgagtgatctgaagttcatgaatattttgaggttggtttgttttgtcttgttcaaagcctagatatcatgttttttcagtttaacatatttcttgagggaaaagaaatgtttagatttccagctagttataaaattgtcagaaagaatagaagttaaacatacagagaaacaaaggttacacatctgggaaaatagtagaaaagcctttatatagtcttggcaaatgaattcagaggttttatttttaatcacaactgtgaagaaagaaagattaccttttggggaaattaatgaatattgtgggcttagacataaaataattgttaattgctccatttattagaaatcatatgtcaaaagtgttttatcatcagtaatacaatagcaatagagataaaaatatatacggatatttgattttgatgattttaatctcctatgccatttccataacaac

SEQ ID NO: 79277 - DNA, 456 bp, Homo sapiens
acttttgtctctgaattacactgaggaagaaaactgcctgtcaagaaaaaatttacacttggattatcatgtgaatcagcagtaagtatctattacattaggacactgaaatttgtggatctcctggttttagtaactagcattcaagtaactaatacagatgttgggctgcttaatacagaatatcactaatatcaataatttataaaataaattatttcccaagattaaatcttaactagatgtggctgagataagttgttttctcccactcaccactgtcttcttccacattartaaaatgtctgattttatttgggaggatgatggctcagaacaaacatggcatgacatttcccagccttcattgtgtgtcatgggtatgatcgtgtgataacattctagccaagtggctaattctaggatataagcagaagcatcatgtggtagcgactg

SEQ ID NO: 79278 - DNA, 738 bp, Homo sapiens
aaaaattagctgggcatcgtggcacatgcctctagtcccagctactcgggatgctgaggcaggacaatcgctcgaacccaggaggtggaggttgcagtaagtggagactgtgccactgcattccagcctgggtgagagagcaagactctgtctcaaatatatatatacgtatatatgtgtatatatatatatgtatatgtgtgtgtgtatatatatatatatacatacgtatatgtatatatctacaaatggaaactataataattaaaattgaaaactcaatgaatagatttgcagaaggttcaacacagttacagagtgaatcagtgactaggaagaataatataaagaaattagctagaatgaagctaaaatatacaagacatgcagagataagcaaggtagagatgattaacatgtcaaattatagttctagttttcgctactttccaaattttcttttaaaattctatttttataatcagaaaaatcttartaatatttaaaacaaatgcaagctttgcagatactgacatggaaggtgcccactcttggggctcagaaaatgaaaccaaaaatgtgctgctttgaacttcaaactgagagtacctggggagcagcaaatgcagggaagagctttctctaaagttcacctgtctacctaaaggctggatcctccagaagatattcaactgttgtgaatcccttccccagatatctcatcaaccaggagaaact

SEQ ID NO: 79279 - DNA, 738 bp, Homo sapiens
aaaaattagctgggcatcgtggcacatgcctctagtcccagctactcgggatgctgaggcaggacaatcgctcgaacccaggaggtggaggttgcagtaagtggagactgtgccactgcattccagcctgggtgagagagcaagactctgtctcaaatatatatatacgtatatatgtgtatatatatatatgtatatgtgtgtgtgtatatatatatatatacatacgtatatgtatatatctacaaatggaaactataataattaaaattgaaaactcaatgaatagatttgcagaaggttcaacacagttacagagtgaatcagtgactaggaagaataatataaagaaattagctagaatgaagctaaaatatacaagacatgcagagataagcaaggtagagatgattaacatgtcaaattatagttctagttttcgctactttccaaattttcttttaaaattctatttttataatcagaaaaatcttaataatatttaaaacaaatgcaagctttgcagatactgacatgraaggtgcccactcttggggctcagaaaatgaaaccaaaaatgtgctgctttgaacttcaaactgagagtacctggggagcagcaaatgcagggaagagctttctctaaagttcacctgtctacctaaaggctggatcctccagaagatattcaactgttgtgaatcccttccccagatatctcatcaaccaggagaaact

SEQ ID NO: 79280 - DNA, 1920 bp, Homo sapiens
gactcaggatccaacaaggatcagcctcgttcctggaccacagacacggtgtccgacgctctggcaccctctgccctatagcaagccctcatcacccaagccccaaacctaactctgctctgaatgatgtccagggagtggagagcattttcccagggtctcagagcacaatgggcactgatggataagccatatcaacagacactttctgagtatgtggaacccttggggtcactcacccaagcaccccaattaatacaggaggaaacggaggctttctctcccatagtctctgtccgcactagcagggagggctcatcctacttccaggtgcccagaccaatggcctgaggaccccggccctggcctctcaaggctgtgctggggcccttagggagccctatgtctgccctgctcatgccctgggttcctgmgcatgttgccgatgccactgactcataacagagctgcctccaacctctttcttctttccctctgggaggaggctcagcactggcctaggaagctggagccctcccttaccttttagactctgtgcattttctgtggtctaagccaggccctgtctctttctggaattcggtttcccaaatgcacaatgaggggatgggtgtgaaactgcctcagtgtgctcagtgaggatgcagcgtcaagttccatcaatacaggacggggtgtcagggtggggtggctcaggtgcatatggtgaagaagcctccctaactcgggcagatgctgagggacaccacatataacagccaggcctagtgcccatggccaggcatgctcaaggggccctgtgtctggaccaagaagagaacatgctggtgagttcctccttcactgtgtccacaagtgcagtacacaagggagccccaggcaaggttggtctcatgcagccagctctgtgcctcccacacttgcaggggcctgggtcacatgttcaccactggagccaagaagtggtgtcagtctcacttaagcactaagagtgagggcagggaggggtagtttcttaagaaaaaaactgaggtgctgtcttcaatagaagatgagttggatgtcagaaagataaaagcacccgatctcagaatcatacatatagaccccatatctacctctgccactaggcacacggggatatatatgtcccagagaaggtaggtgtcttgtccaaagtcacacaatgagcaatggcaaaactcataatttggttaacattcactatggctacatatactagaatccctaaaataatagtgacatgtattagttagggttctctagagggacagaactaataggatagatgtatacataaaggggagtttattaagcattaacttacacaatcacaaggtcccacaataggctgtctgcaagctaagagtgaggagagccagtccaaattccaaaactgaagaactaggaatctgatgtttgagggcaggaagcatccagcataggagaaagatgcaggctgggaggctaggccagtctctcttttcacatttttctgcctgctttatattctagctgtgctggcagctgattagatggtgcccacccagattaagggtgggtctgcctttcccagcccactgactcaaatgttaatctcctttggcaacaccctcacagacacacccaggatcaatactttacagagacaggccatccatactgaccttgaactgaccaccacagaagtttataaatcatgtgtttctgttcgagcatcttgtatgtgctttccatcctcaatgcggtctcatggtccaatgtggctgctggagctccagcctcgaccggccaccatttttgcatttcagagagcaggcaaggcagggcaaagggggccctctcagctgggtcacttccatctgagcagtctcccca

SEQ ID NO: 79281 - DNA, 1723 bp, Homo sapiens
tctgtaaagtgagaaacacacaagagccaaaaattaagtgaaaatagaaactctgagtgataaattgagtagtaaccctggttattgccctaggggcatttgctgactcccaggtgaacttgagcctctattttcatggcctccagggtattgggaacaagagacaaatccacagacctccaaagtgggaagtctaaaaggagcaagccacctatagctggaacccaacagggcttcctgagtaaggcaaatgagacggaaaccaagctcctccctctgtccctccataagacagaaggaaactgtcttatcaaaaaccatggtactgggtgaagaaaaaaaactccaaagagaaatccagaactatatgccagtccctgtgtggtttctaaatttatgtttagataattcacacttatctaaacatgaattcaattttgcttttgtggctcatccaaaacacctccagctaatacctgagcttaaaatgatcttgagttggtggtgttcagaagcttgcttgttggacatataacaaattctctctaggaaaatctatcttcagttcaggcctcaaaggattcccacaaataaaatgcccagactaagagctcacagtaataaacaaagagcaacaaaatccccataaacacaaggaaacaaaatgccttgagcaagaggcagcaggagaccagcaaagacttggcagatattaaaagtattggacacagaacatagaataatatacttctagttaaataaaagagggaattggaaacatgaataagaagcaaaagactatgaaaatgaccaagcagctataaaagagaataaaataaaactttcatgaaggaaaaattaagagttgaaattttaaaactatgcatgactttactaccaggttacatatagctgaaagtagaattggtgaactggaaggcaaatccaaagaaaataaccagaatataacacagaaatataaagagatgaaaatatgggagagaggtaaagggatgtgaatgaaagagcaggtctaacatacggccatttggagatacagagaaagagggagacctagaatcaaggcaatagttgaaataatggatgagaacttgcccaaaatgccaagagacacagtgcattttaaatgagatgagaagtccgcagagtatataggagaagccctttgaatttatttaagcctttattttatgttatgttatgttatgttatgttatgttatgttatgttatgttatgttatgttagaaagagggtcttgctctgtggcccaggctagagtgtggtgcaattatagttcaccatagcctcaaactcctgggcttaagcartcctcccacttcagcctcctgagtagctggcatgtaccaccatgcctggctaatgtttaaatatttttttagagacagggtcttgcccaagctggtcttgaactcctggcctcaagcaatcctcccacctcagcctcccaaagtgctgggattacaggtgtaagccactgcagctggctaaccctgtattttctatactggtttgacctcaggacctcttttgatggaatagctcttaccacgttggagaccaagattttctctttgggaagctgctttgggcctttgttgtagagatcgcctctgcaagttgattctaatctgttccctcccttggcctcttacccgcacttctggcagaattacggatcc

SEQ ID NO: 79282 - DNA, 2007 bp, Homo sapiens
caatgctttacaaagcagtattgctgcccgcaggtcccacctccagccctaaggcggtttttccctatctcagtagatggrgcatacaatcgggttttataccgagacattccattgcccagggacaggcaggagacagatgccttcctcttgtctcaactgcaagaggcattccttcctcttttactaatcctcctcagcacagaccctttacgggtgtcgggctgggggacggtcaggtctttcccttcccacgaggccatatttcagactatcacatggggagaaaccttggacaataactggctttcctaggcagaggtccctgcggccttccgcagtttttgtgtccctgggtacttgagattaaggagtggtgatgactcttaaggagcgtgctgccttcaagcatctgtttaacaaagcacatcctgcaccgcccttaatccattcaactctgagttgacacagcacacgtttcagagagcatggggttgggggtaaggttatagattaacagaatctcaaggcagaagaatttttcttagtacataacaaaatggagtctcctatgtctacttctttctacacagacacagtaacaatctgatctctcttgcttttccccacacacactccagcccagctgtctacagtgataaatgatgggcctttctttaaatttcctttctgctctgcgtgaggactggccagtgtggatatgtactcgacacggataaatggctctggcaagcccaccagactgtccacgtggcaacagatggtccagctcaaagcttttgttgtgctaatgttggaacttgctgctacctgaagcagttatcgtttcataaacaatgatgctgccactgctctgtggataaactgtcctttatactttgcagggcccaccatgggtgttgacggcttcatgatggtaagaagagaacccccagtcatccagctggcgtggcagccaaagagaaacacttaatcggatggagatggtgaggttggagatgatatttggcttctgttcatgtgccatgcataagtccagatgtctgccctgaattatggttgatgagaaggagtaaagttccactgtgtttcagagtcagaagtgagattggagacaaattgttccctcggagtcttgacgtttacacagattcccttagacctttggtagaaattgtaataatgaatatatagggaagcggtaataatgaatatatagagaaggggtaataatgaatatatagagaaggggtaaaaatgaatatatacagaaggggtaataatgaatatatagagaaggggtaataatgaatatatagggaaggggtaataatgaatacatagagaaggggtaataacgaatgtacagggaaggggtaataatgaatatacagggaaggggtaataatgaatatatagggaaggggtaacaatgaataaatagggaagggtttgagatttttcaaggacttactatgttcaagatcttataatgacataattattgtttaattattgttggtagtagtatagtagtaattgtagcaactatcttttaatgagagccttcttaaaggccaggcactgtgctgagacgtttacacaaattatctgattataattattgcaagaaattcacaaaggaactgaagaatagtgtgctggtgaatcagttctctgttggggaggtgggggcagagccctgctgtgtagtgtttgctgatttctctagtgtaaatgctcccaccgtggccaattttaagctgccaacaatgtaacaacctgctcacaaaatttatgagtatacaacaatcagccttcgtgaaccagtgcaagctggttccagcacatcactgaaactcaggtacagaaggtttgaccaagatcacccaactattaagggacagaactgagatatctgctcaagaactcaatatactgctctaaatctataaacccatcagctatttcaatccacataacaaa

SEQ ID NO: 79283 - DNA, 2007 bp, Homo sapiens
caatgctttacaaagcagtattgctgcccgcaggtcccacctccagccctaaggcggtttttccctatctcagtagatggggcatacaatcgggttttataccgagacattccattgcccagggacaggcaggagacagatgccttcctcttgtctcaactgcaagaggcattccttcctcttttactaatcctcctcagcacagaccctttacgggtgtcgggctgggggacggtcaggtctttcccttcccacgaggccatatttcagactatcacatggggagaaaccttggacaatamctggctttcctaggcagaggtccctgcggccttccgcagtttttgtgtccctgggtacttgagattaaggagtggtgatgactcttaaggagcgtgctgccttcaagcatctgtttaacaaagcacatcctgcaccgcccttaatccattcaactctgagttgacacagcacacgtttcagagagcatggggttgggggtaaggttatagattaacagaatctcaaggcagaagaatttttcttagtacataacaaaatggagtctcctatgtctacttctttctacacagacacagtaacaatctgatctctcttgcttttccccacacacactccagcccagctgtctacagtgataaatgatgggcctttctttaaatttcctttctgctctgcgtgaggactggccagtgtggatatgtactcgacacggataaatggctctggcaagcccaccagactgtccacgtggcaacagatggtccagctcaaagcttttgttgtgctaatgttggaacttgctgctacctgaagcagttatcgtttcataaacaatgatgctgccactgctctgtggataaactgtcctttatactttgcagggcccaccatgggtgttgacggcttcatgatggtaagaagagaacccccagtcatccagctggcgtggcagccaaagagaaacacttaatcggatggagatggtgaggttggagatgatatttggcttctgttcatgtgccatgcataagtccagatgtctgccctgaattatggttgatgagaaggagtaaagttccactgtgtttcagagtcagaagtgagattggagacaaattgttccctcggagtcttgacgtttacacagattcccttagacctttggtagaaattgtaataatgaatatatagggaagcggtaataatgaatatatagagaaggggtaataatgaatatatagagaaggggtaaaaatgaatatatacagaaggggtaataatgaatatatagagaaggggtaataatgaatatatagggaaggggtaataatgaatacatagagaaggggtaataacgaatgtacagggaaggggtaataatgaatatacagggaaggggtaataatgaatatatagggaaggggtaacaatgaataaatagggaagggtttgagatttttcaaggacttactatgttcaagatcttataatgacataattattgtttaattattgttggtagtagtatagtagtaattgtagcaactatcttttaatgagagccttcttaaaggccaggcactgtgctgagacgtttacacaaattatctgattataattattgcaagaaattcacaaaggaactgaagaatagtgtgctggtgaatcagttctctgttggggaggtgggggcagagccctgctgtgtagtgtttgctgatttctctagtgtaaatgctcccaccgtggccaattttaagctgccaacaatgtaacaacctgctcacaaaatttatgagtatacaacaatcagccttcgtgaaccagtgcaagctggttccagcacatcactgaaactcaggtacagaaggtttgaccaagatcacccaactattaagggacagaactgagatatctgctcaagaactcaatatactgctctaaatctataaacccatcagctatttcaatccacataacaaa

SEQ ID NO: 79284 - DNA, 2007 bp, Homo sapiens
caatgctttacaaagcagtattgctgcccgcaggtcccacctccagccctaaggcggtttttccctatctcagtagatggggcatacaatcgggttttataccgagacattccattgcccagggacaggcaggagacagatgccttcctcttgtctcaactgcaagaggcattccttcctcttttactaatcctcctcagcacagaccctttacgggtgtcgggctgggggacggtcaggtctttcccttcccacgaggccatatttcagactatcacatggggagaaaccttggacaataactggctttcctaggcagaggtccctgcggccttccgcagtttttgtgtccctgggtacttgagattaaggagtggtgatgactcttaaggagcgtgctgccttcaagcatctgtttaacaaagcacatcctgcaccgcccttaatccattcaactctgagttgacacagcacacgtttcagagagcatggggttgggggtaaggttatagattaacagaatctcaaggcagaagaatttttcttagtacataacaaaatggagtctcctatgtctacttctttctacacagacacagtaacaatctgatctctcttgcttttccccacacacactccagcccagctgtctacagtgataaatgatgggcctttctttaaatttcctttctgctctgcgtgaggactggccagtgtggatatgtactcgacacggataaatggctctggcaagcccaccagactgtccacgtggcaacagatggtccagctcaaagcttttgttgtgctaatgttggaacttgctgctacctgaagcagttatcgtttcataaacaatgatgctgccactgctctgtggataaactgtcctttatactttgcagggcccaccatgggtgttgacrgcttcatgatggtaagaagagaacccccagtcatccagctggcgtggcagccaaagagaaacacttaatcggatggagatggtgaggttggagatgatatttggcttctgttcatgtgccatgcataagtccagatgtctgccctgaattatggttgatgagaaggagtaaagttccactgtgtttcagagtcagaagtgagattggagacaaattgttccctcggagtcttgacgtttacacagattcccttagacctttggtagaaattgtaataatgaatatatagggaagcggtaataatgaatatatagagaaggggtaataatgaatatatagagaaggggtaaaaatgaatatatacagaaggggtaataatgaatatatagagaaggggtaataatgaatatatagggaaggggtaataatgaatacatagagaaggggtaataacgaatgtacagggaaggggtaataatgaatatacagggaaggggtaataatgaatatatagggaaggggtaacaatgaataaatagggaagggtttgagatttttcaaggacttactatgttcaagatcttataatgacataattattgtttaattattgttggtagtagtatagtagtaattgtagcaactatcttttaatgagagccttcttaaaggccaggcactgtgctgagacgtttacacaaattatctgattataattattgcaagaaattcacaaaggaactgaagaatagtgtgctggtgaatcagttctctgttggggaggtgggggcagagccctgctgtgtagtgtttgctgatttctctagtgtaaatgctcccaccgtggccaattttaagctgccaacaatgtaacaacctgctcacaaaatttatgagtatacaacaatcagccttcgtgaaccagtgcaagctggttccagcacatcactgaaactcaggtacagaaggtttgaccaagatcacccaactattaagggacagaactgagatatctgctcaagaactcaatatactgctctaaatctataaacccatcagctatttcaatccacataacaaa

SEQ ID NO: 79285 - DNA, 2007 bp, Homo sapiens
caatgctttacaaagcagtattgctgcccgcaggtcccacctccagccctaaggcggtttttccctatctcagtagatggggcatacaatcgggttttataccgagacattccattgcccagggacaggcaggagacagatgccttcctcttgtctcaactgcaagaggcattccttcctcttttactaatcctcctcagcacagaccctttacgggtgtcgggctgggggacggtcaggtctttcccttcccacgaggccatatttcagactatcacatggggagaaaccttggacaataactggctttcctaggcagaggtccctgcggccttccgcagtttttgtgtccctgggtacttgagattaaggagtggtgatgactcttaaggagcgtgctgccttcaagcatctgtttaacaaagcacatcctgcaccgcccttaatccattcaactctgagttgacacagcacacgtttcagagagcatggggttgggggtaaggttatagattaacagaatctcaaggcagaagaatttttcttagtacataacaaaatggagtctcctatgtctacttctttctacacagacacagtaacaatctgatctctcttgcttttccccacacacactccagcccagctgtctacagtgataaatgatgggcctttctttaaatttcctttctgctctgcgtgaggactggccagtgtggatatgtactcgacacggataaatggctctggcaagcccaccagactgtccacgtggcaacagatggtccagctcaaagcttttgttgtgctaatgttggaacttgctgctacctgaagcagttatcgtttcataaacaatgatgctgccactgctctgtggataaactgtcctttatactttgcagggcccaccatgggtgttgacggcttcatgatggtaagaagagaacccccagtcatccagctggcgtggcagccaaagagaaacacttaatcggatggagatggtgaggttggagatgatatttggcttctgttcatgtgccatgcataagtccagatgtctgccctgaattatggttgatgagaaggagtaaagttccactgtgtttcagagtcagaagtgagattggagacaaattgttccctcggagtcttgacgtttacacagattcccttagacctttkgtagaaattgtaataatgaatatatagggaagcggtaataatgaatatatagagaaggggtaataatgaatatatagagaaggggtaaaaatgaatatatacagaaggggtaataatgaatatatagagaaggggtaataatgaatatatagggaaggggtaataatgaatacatagagaaggggtaataacgaatgtacagggaaggggtaataatgaatatacagggaaggggtaataatgaatatatagggaaggggtaacaatgaataaatagggaagggtttgagatttttcaaggacttactatgttcaagatcttataatgacataattattgtttaattattgttggtagtagtatagtagtaattgtagcaactatcttttaatgagagccttcttaaaggccaggcactgtgctgagacgtttacacaaattatctgattataattattgcaagaaattcacaaaggaactgaagaatagtgtgctggtgaatcagttctctgttggggaggtgggggcagagccctgctgtgtagtgtttgctgatttctctagtgtaaatgctcccaccgtggccaattttaagctgccaacaatgtaacaacctgctcacaaaatttatgagtatacaacaatcagccttcgtgaaccagtgcaagctggttccagcacatcactgaaactcaggtacagaaggtttgaccaagatcacccaactattaagggacagaactgagatatctgctcaagaactcaatatactgctctaaatctataaacccatcagctatttcaatccacataacaaa

SEQ ID NO: 79286 - DNA, 2007 bp, Homo sapiens
caatgctttacaaagcagtattgctgcccgcaggtcccacctccagccctaaggcggtttttccctatctcagtagatggggcatacaatcgggttttataccgagacattccattgcccagggacaggcaggagacagatgccttcctcttgtctcaactgcaagaggcattccttcctcttttactaatcctcctcagcacagaccctttacgggtgtcgggctgggggacggtcaggtctttcccttcccacgaggccatatttcagactatcacatggggagaaaccttggacaataactggctttcctaggcagaggtccctgcggccttccgcagtttttgtgtccctgggtacttgagattaaggagtggtgatgactcttaaggagcgtgctgccttcaagcatctgtttaacaaagcacatcctgcaccgcccttaatccattcaactctgagttgacacagcacacgtttcagagagcatggggttgggggtaaggttatagattaacagaatctcaaggcagaagaatttttcttagtacataacaaaatggagtctcctatgtctacttctttctacacagacacagtaacaatctgatctctcttgcttttccccacacacactccagcccagctgtctacagtgataaatgatgggcctttctttaaatttcctttctgctctgcgtgaggactggccagtgtggatatgtactcgacacggataaatggctctggcaagcccaccagactgtccacgtggcaacagatggtccagctcaaagcttttgttgtgctaatgttggaacttgctgctacctgaagcagttatcgtttcataaacaatgatgctgccactgctctgtggataaactgtcctttatactttgcagggcccaccatgggtgttgacggcttcatgatggtaagaagagaacccccagtcatccagctggcgtggcagccaaagagaaacacttaatcggatggagatggtgaggttggagatgatatttggcttctgttcatgtgccatgcataagtccagatgtctgccctgaattatggttgatgagaaggagtaaagttccactgtgtttcagagtcagaagtgagattggagacaaattgttccctcggagtcttgacgtttacacagattcccttagacctttggtagaaattgtaataatgaatatatagggaagcggtaataatgaatatatagagaaggggtaataatgaatatatagagaaggggtaaaaatgaatatatacagaaggggtaataatgaatatatagagaaggggtaataatgaatatatagggaaggggtaataatgaatacatagagaaggggtaataacgaatgtacagggaaggggtaataatgaatatacagggaaggggtaataatgaatatatagggaaggggtaacaatgaataaatagggaagggtttgagatttttcaaggacttactatgttcaagatcttataatgacataattattgtttaattattgttggtagtagtatagtagtaattgtagcaactatcttttaatgagagccttcttaaaggccaggcactgtgctgagacgtttacacaaattatctgattataattattgcaagaaattcacaaaggaactgaagaatagtgtgctggtgaatcagttctctgttggggaggtgggggcagagccctgctgtgtagtgtttgctgatttctctagtgtaaatgctcccaccgtggccaattttaagctgccaacaatgtaacaacctgctcacaaaatttatgagtatacaacaatcagccttcgtgaaccagtgcaagctggttccagcacatcactgaaactcaggtacagaaggtttgwccaagatcacccaactattaagggacagaactgagatatctgctcaagaactcaatatactgctctaaatctataaacccatcagctatttcaatccacataacaaa

SEQ ID NO: 79287 - DNA, 625 bp, Homo sapiens
ctgaggtcagaagttcaagaccagtgtagcaaaaccctgtctctactacaaatgcaatgcaaaaaaaaaaaaaaaagaaagaaattagccagcatggtggcacgcacctgcaggctcagctacttgggaaactaaggcaggggaatwgcttgaacccaggaggcagaggttgcagtgagctgagatcgggccactgcactccagcctgggcaacagagcaaaactccacctccaaaaataaaaataaaataaaaacgaagtgtttgagtgacttgcttgaggacaccgcaccgacagatgctttagttgtgcttcaaactctatgtataattggccccaaagccagcgcttcttgcactgttctgcgctacccattaccagctccacccggtgggcatctctgcatgagagctgaaattagaaggtagagcaaacttccctgggaatgtgtgcatcaggcaactcaaatttggggttactatatgcacgtctgcacaaataaccctaaaagagccataagaactgatttgaaggttacagatagatttcagcaaaaaggcaaatttacaaatacagaatctatgcatgaggaggatcaatggcacctaggtgtgcaattgctgag

SEQ ID NO: 79288 - DNA, 535 bp, Homo sapiens
gtagatacttcggagaccaggtaactctgggcacagaccaaggtaagaaaagcacgggggcagtgaagtatttcttggttgggactgaggtaagaaaagctgcagggttggtgaagtattccgtaggacataccaaggcaagaaaagccacaggggtgttaaagtattccttgggtgtgacatcaagagacctctggtagagggggttaaccctttaagagaagggaaaacaaraaatccctaatacaagggattgaccctcagccagtctctagagaggagagggcaagaaatccctaatatgagggattgagcctcagcagccttcaaaataggaaataccccaggtaaagtaggaaacaaaaagggccaaaggggtagtaaaattccccctgacagtcccctaggcctcatgctaaaatattggagggataatgaaaggcctaaacacaagaaaaaaaaaaacagcaaatgataaaatattgtttcatttggaccaaagaacccattctcacaccctcagttttctggccaa

SEQ ID NO: 79289 - DNA, 1737 bp, Homo sapiens
tgctctctgttaatatccaaggtaattttcacagacatggatgcttttcttccatctataattacttctcctatcttgggcatgcagattactaaataccccattgtctgagattatctaccatagatactgtcaagttttactcctgagagaagtacaatctgaaacgacttttctttgtttctcaaacatacgctggctgcacattgataccaattaaaaagatatccatatacctatagaaagcaaagtataggatcatttctctatttttcatcactcatcacatggaagtcaaggtaaggttcatttattttaggagcttttccactttcaatgatcaaagttctgagtgttttctctttcttctgttaaccttaatagaaacacagcaaggctctcaagaagaaaatggtatttctttgggaacaaggcattgcattgaaatatgtgtgccttagtaaactattagtttactaagtattcatggaggtaataaaagacaaaggattttatagagaaaatgaggaggattacataattgttctgaaataattattcttgattacaagaatcaataacaagggtaacactactctgacactgtgcaggcaactactacaaaaatgtccttgcagaaatagtttttgtgtaaggtggtggtagcctttttcaagagtgtggttttggagaatcttttgtgatacttttcattgtcagacattaatgcatgagtaatcctctctttatagctttccctagctttatttgtcagagttttgcttttgtgtttctctaacacatgtgactccattttgattttgacagctttaacacttgtttatatcacttaatttttctggatctttcaatcattttaccatatcatttttaccaactcatatatctaagagtttccaatatgaatttaggaataaactcagaaggcttctaccagaatttcaggttttctatgtttacatctaatttattgtggttgtgttcttctcatgcttctaatgtctggtggtctttgctctctatagaagctgggatagtagcaacaaaatctgtctaccaatgcctgtcaaaacatgagtcacctcttttcttcttgtctttgtttttatattattcttgaagttttatttaaatcattttttgtctttkatttgagacaataaacttttttgttcaattattagatatttctgcaattcctgaattttcctttctctctttctctttctctttcttttcttttcttttcttttcttttcttttcttttcttttcttttcttttctttcttttttttgagatgaagtcttgctctgtcacccaggctggagtgcagtagtacgatctcagctcactgcaacctctgactcgtgggttcaagccattctcctgcctcagcctccccagtagctgggattacaggcactcaccaccacgcccagctaattttgtatttttttagtagagacagggtttcaccatgttggccaggctggtctcaaactcctgaccttgtgatccgctcacctcggcctcctaaagtgctgggattacaggcttgagccactgtgcctggccgaatcttccttttttaaccatcacaaacctcaattgttgaagacttgccaccactaactttctgtaacactcaaagtgagcacatggggtacctataagaaacagcacaaagtctctattaaaatgtaattttaagtca

SEQ ID NO: 79290 - DNA, 750 bp, Homo sapiens
ttgcagcactactcaaaatagcaaagacatgtaatcaacctaaatgatcatcaattgcagactcagtaaagaaaatgtagtacatatacaccacagaatactatacagccataaaaagaacaaagtctacttgggaggctgaggcaggagaatggcatgaacccgggaggcggagcttgcagtgagccgagatcccgccattgcactccagcctgggtgacagagygagactccgtctcaaaaaaaaaaaaaaaagaacaaagtcatgttctttgcaggaacatggaatggaacatggagggaaatgaatgccattgtcctttgcaaactaacacaggaacagaaaaccaaataccacatatattctcacttataagtgggcgttaaattgtgagaacacatggacacatagagggaaacaacagacactggggcctatcagaaagtggaggggggaggaaggagaagatcaggaaaactaactaatgagtactaagcttaataactgagtgatgaaataatctgtacaacaaacccccatgacacaagtttacctatgtatcaaacctgcacatgtacccttgaacttaaaataaaaatttgacaaaataattttaaatttaataactgtttttattaattgctatgacaaatagatgaagaatatagagtacttgtacaccactatcaaccacatctcttcaaaattttactagatgttccagccattgcaaaaataagtaaaatgca

SEQ ID NO: 79291 - DNA, 733 bp, Homo sapiens
ctggagatagggctttcccgatattggagggaactttgcatcaagtcaaataatggcaatattctataaatgaggatgttctaagcagttataagaaagrtgaaatcatgtcatgctctgtggataaaaatctttgaagaactccaaaccaatcttccctgtcaattgctgcaagtctggttttcacagccactatggttgtgaggttgcttctcttcaaggtttgtatggagatggggagaggaagatgtgactaagtcaagttaaaaggccatgaagttatctgtacttagtggccatgcaatctttctttagtaaacacctctcagaatttaccaagcctttgtataacttctagagtatagtaaaagttgattttgataatttttgacagtgttcttgttactttaatagaggaatgggtttaaaaaggctctcactttgccatcctggaagtgctttatatcatttagcataattgccaaaaacaaataaaaagtagaaacaattttaattttaaagatattcaaattcaccaaagcatttaatatgtaagctcaaatgtgtacgtagtgattacaaattcataatatctcatgggtagttctcactacgtttctctggttcaaattttaaaagcaaatttctaagtggtcacactgagtaaattgaataattctagttatatttcttgtctttacaaccattaacattacttactttgcactgtaac

SEQ ID NO: 79292 - DNA, 990 bp, Homo sapiens
actatataacctcattgacytcaatgtctcttctataaaatgggcttcatactgttagatacctcatagggttgttgaaaaaaagaagtaaatatactttagcacttagaacttgacatagagtattagctgaatgtttcttctcttcctgcttctcctcgtcctcattccatcacatgatagatatgaatagaacagaaaatagaaatgaaaacattctctgttaggcctgagacacctcataaatgttattaagaaatacattatgaaattcaaagaagctaattgatttttccaagatcaacctgatctcaaagtcacatgagaactccatgtgactttctttgctcattctacttgttacttcacaatgttgcacacattccaatgattgctttgccaggcaaggtttgagtcttttgcttccacttggcattgaagtatttttatttagctcagtttcatttttttcttctctctgtctctatttctattccagtatttccattatgctccatctctcagcagaagggattagttttttgttttgttttgttttgatttttatactttcagttctgggatacattgaagaacgtgcaggtttgttacatagctatacacgtgccatggtggtttgatgcacccatcaacccatcatctacattaggtatttcttctaatgctatccctcccctaactcctcaactccagacaggccccagtatgtgatgttcccctccctgtgtccatctgttctcgttgttcaactaccacttatgagcgagaacatgtggtgtttggttttctgttcctgtgttaatttgctgagaatggtttccagcttcatccatgtccctacaaaggacataaactcattcttttttatggctgcgtagtattccatggtgtatatgtgccaaatttcctttatctagcctatcattgatgggcattgcggttggttccaagtctttgctattgtgaaca

SEQ ID NO: 79293 - DNA, 990 bp, Homo sapiens
actatataacctcattgacttcaatgtctcttctataaaatgggcttcatactgttagatacctcatagggttgttgaaaaaaagaagtaaatatactttagcacttagaacttgacatagagtattagctgaatgtttcttctcttcctgcttctcctcgtcctcattccatcacatgatagatatgaatagaacagaaaatagaaatgaaaacattctctgttaggcctgagacacctcataaatgttattaagaaatacattatgaaattcaaagaagctaattgatttttccaagatcaacctgatctcaaagtcacatgagaactccatgtgactttctttgctcattctacttgttacttcacaatgttgcacacattccaatgattgctttgccaggcaaggtttgagtcttttgcttccacttggcattgaagtatttttatttagctcagtttcatttttttcttctctctgtctctatttctattccagtatttccattatgctccatctctcagcagaagggattagttttttgttttgttttgttttgatttttatactttmagttctgggatacattgaagaacgtgcaggtttgttacatagctatacacgtgccatggtggtttgatgcacccatcaacccatcatctacattaggtatttcttctaatgctatccctcccctaactcctcaactccagacaggccccagtatgtgatgttcccctccctgtgtccatctgttctcgttgttcaactaccacttatgagcgagaacatgtggtgtttggttttctgttcctgtgttaatttgctgagaatggtttccagcttcatccatgtccctacaaaggacataaactcattcttttttatggctgcgtagtattccatggtgtatatgtgccaaatttcctttatctagcctatcattgatgggcattgcggttggttccaagtctttgctattgtgaaca

SEQ ID NO: 79294 - DNA, 1080 bp, Homo sapiens
aattactagttagtatttgtccttatatttgcaaaatgctttatgagaaattttcataaccatacatctcaaatctatattcatatagcaaatgtacatggttacatttattagattcaatgttctcatttgtactagcctctaagataaaacaaagtgacataattatcaaaaataagtaaattactaatctatataatgttgaattcctcaatatcaaaatgtgacttttattttttaagaaatattagaaaataatataaaataatatgtaagtctgaagtatcttatttcttgaagaaacattaaggtaaaattggacaggttgatgaaaaattaatggtcattaacataggcgacaagcctgcatcaggattcaaagagctcaaaaacaaattttaagaggagatttataaactacctgaaccttaccttttccacaaccagtgaaaggccaggcacaattgacatccaaatagctgatattggtagaaaaatgtgaggtctagagcttaatgagtctatatagtttaacagaaaaactaggaatgcctgagattggtgacatgcacaatcattcacggtagagtgctgagacacattcgaagctgtcaatgtgtctaaggaaaaaattcagaaatacgaataaaaggtcaaaggatcaggatttgattattaactaagaatcattattggtccccttttctaatcgaattcaacattttagtccattaacaaagcgtgacttaaaatgactgtggagatcatttgcaaactaatatggattgttaaaccatgtaacgagtttatttgttcaagactattctaggaatgacggataatcaaaatgagtgtgtgcttgtgtgtgggtaggacaatgactctaaaatgctgtgaagaaagatttcatgttttgaataatattcatctattaagataacctgcatctatcacttaatacattttaaagcttgattacatgtttgtttttataccgaacagatatcttagcaaagaataggtgtgaagcaaagactgtygttctttcaataaagctttagaaagcactgaaattagcac

SEQ ID NO: 79295 - DNA, 818 bp, Homo sapiens
cataatgctctccctccccttgctccccacccctgacaggccccagtgtccctgcatgtcccatccatgtccctacaaaggaaatgaactcattcttttttatggctgctcttatgatgagtttgcatattgccctgcttccattctctatttgattctctttttggctgcttggtaagcacagggtaagaccaagaagtccactcttttaaaaacatatccagttkaggaatagactattatattctcattcttttagttaagaccttttcagcaaataatttttttagccacatttggcttggtatgcaagtgcaaacttccccctccccttccctatgtggaataaggagaaatgtctctgatcgcaatcttgtactccccatagaaccaagtataagataattatttccttctcttccctatgccggggaacttctcatatagacccaggtaggcgtgtataggttggtggtgggaggtttggtgtttgttgatattaagtcataggaatataaacatgctcctgaatgttgccagcttcctttaaattatgtgtattagctatgcttgtcactaccattggttcctatcttgagacagtaaggcaggaacagttccatttaatatcccattaagtaaatatttcaagtgttcaaactgtagtttagaatatgctaaaacacttcattcaaggataacttcttggtcagtatcctttcaaaatacttggtcagtatcctttatgccctaaaataagaatgtgggtgttggtaatatatttggtagttgtttcaagaagcacaagttaggagcat

SEQ ID NO: 79296 - DNA, 1028 bp, Homo sapiens
aaattatccctgggtgtttgagttcttgagaagctgttgggaatctacatttcttgatgacttgtaatttctacggtgtgcctaattaggacttgtcatgtcagactcctattgactctaatagggatggcaccgtgtctgagaggccaaagaagagacttggagatagccaacaagacatatcgtgttttaggggtacttacatatagggacagtccagtggcagctggctggacagaagaaccactactgtttgtgaaaagcatgcagtttatatagaattttcacttagctccctccacctagcaaccactatctaacccaaacaatgagcctctatctcctgcatgacccatgtttcaagcaatgggccaggggttcagatgttcttcatagataaggagtgaatctctgggttggccactgctggattctataacttgggacttcaaacacacatccttcttagaccccaggstcttgcagagtaagcttaagttattgctgtgaggtgcatctgccatacaggagtaagtgaggtggaagacactaatcagcgaatgggatcctgggggtatttgaagaatgagtaagatattcttaaccttggaagtagagtgtgtttatgacccaagttaaataactgatgagaaaaactcagtttgaagttagatacgggaagacaatctgacatcttctttataaaaaggaaacctatagctagatttttaaattgtaacatgagtggaaattattctactcaaactgtggatagcaataggtaaaataggcaaaaggaggctcctgtctcataaagtggatgagaaaaaaaaaaaacaaggctgaattatgggctaaagcaagagacaatataaaagaaaaatagaccttttgtgattgcggtaaagggatagtgagatggattaagcaggagtattccttaatttcttaattaatttattcgttcaagacattaattgaacaaatgccacgtgaagattctttgtcaaacagatcccgtagctgag

SEQ ID NO: 79297 - DNA, 1028 bp, Homo sapiens
aaattatccctgggtgtttgagttcttgagaagctgttgggaatctacatttcttgatgacttgtaatttctacggtgtgcctaattaggacttgtcatgtcagactcctattgactctaatagggatggcaccgtgtctgagaggccaaagaagagacttggagatagccaacaagacatatcgtgttttaggggtacttacatatagggacagtccagtggcagctggctggacagaagaaccactactgtttgtgaaaagcatgcagtttatatagaattttcacttagctccctccacctagcaaccactatctaacccaaacaatgagcctctatctcctgcatgacccatgtttcaagcaatgggccaggggttcagatgttcttcatagataaggagtgaatctctgggttggccactgctggattctataacttgggacttcaaacacacatccttcttagaccccagggtcttgcagagtaagcttaagttattgctgtgaggtgcatctgccatacaggagtaagtgaggtggaagacactaatcagcgaatgggatcctgggggtatttgaagaatgagtaagatattcttaaccttggaagtagagtgtgtttatgacccaagttaaataactgatgagaaaaactcagtttgaagttagatacgggaagacaatctgacatcttctttataaaaaggaaacctatagctagatttttaaattgtaacatgagtggaaattattctactcaaactgtggatagcaataggtaaaataggcaaaaggaggctcctgtctcataaagtggatgagaaaaaaaaaaaacaaggctgaattatgggctaaagcaagagacaatataaaagaaaaatagaccttttgtgattgcggtaaagggatagtgagatggattaagcaggagtattccttaatttcttaattaatttattcgttcaagacattaattgaacaaatgccacgtgaagattctttgtcaaacagatccygtagctgag

SEQ ID NO: 79298 - DNA, 1222 bp, Homo sapiens
ttgagacccaggctttccttccgcagcattgtgacctcaggtaatttatttaatcaatccttgactctatttcttcatcaataataaagatatcatactaatacctaaatcataggctgtttgccagaattaaataataataattcataggaagcgagggccttggcataaagtatgcttcagaaaatattaggtgctgttttgtttattaacattaattatcaaagaatactctgagagagtatttccaatatatttcccttcatcagtgagcccaattcttgatattctgtatttctatatggggtattgcaggtgtacagagaaaagaacgatctaattatagtcaacagttgaaacctccaggagttgcagactatgtagcaggaaagagtagaaaatgagcgtggtaaggtggtattacctgaaaattgtttctagtagattctatccactgatcttctcagtggactctcctgtaattgtcagacaaggttgactctatcaaagtaaacatctataaagttacttagaattttaattaatacagaatgacccacataactgaaaattaataaagaatagctgaatccacatgaaaaaatgattgccatagacttattatgtaatttttatacattatcataaccatgattttatattaaattcagacatgtcatattgtactaattacaaatttatttcttattaaaytattactttttaaaaactactggtattagttcaatttttctcctctgttcaattttggatattgtttttgcctcgctttgcctcatacctttttattaaacaatttcacttctctgtatcagggtcctgattacttttcttcagaaaaacatttgtatttgtttaactgcttaattaaaaatttggcagagcaaaatttcgtcttcaaataaaaaaaagtttcctttaagcacaagtttttatcaataatgttgttaaaaaggctttgcttttctcctatgtactttgaaaacaccatttcaattttagacaagcaattttttttcatttttatctccctctccttcccacctccccgcctgccatacttcccctctcccttactacctccccactactttccttcatttttgtttgtttgtttgtttgttttttcttactgattgcccaattcataagctctagctttcacgtgatcctgggtgcctcttagctgtggctttgtaat

SEQ ID NO: 79299 - DNA, 1222 bp, Homo sapiens
ttgagacccaggctttccttccgcagcattgtgacctcaggtaatttatttaatcaatccttgactctatttcttcatcaataataaagatatcatactaatacctaaatcataggctgtttgccagaattaaataataataattcataggaagcgagggccttggcataaagtatgcttcagaaaatattaggtgctgttttgtttattaacattaattatcaaagaatactctgagagagtatttccaatatatttcccttcatcagtgagcccaattcttgatattctgtatttctatatggggtattgcaggtgtacagagaaaagaacgatctaattatagtcaacagttgaaacctccaggagttgcagactatgtagcaggaaagagtagaaaatgagcgtggtaaggtggtattacctgaaaattgtttctagtagattctatccactgatcttctcagtggactctcctgtaattgtcagacaaggttgactctatcaaagtaaacatctataaagttacttagaattttaattaatacagaatgacccacataactgaaaattaataaagaatagctgaatccacatgaaaaaatgattgccatagacttattatgtaatttttatacattatcataaccatgattttatattaaattcagacatgtcatattgtactaattacaaatttatttcttattaaattattactttttaaaaactactggtattagttcaatttttctcctctgttcaattttggatattgtttttgcctcgctttgcctcatacctttttattaaacaatttcacttctctstatcagggtcctgattacttttcttcagaaaaacatttgtatttgtttaactgcttaattaaaaatttggcagagcaaaatttcgtcttcaaataaaaaaaagtttcctttaagcacaagtttttatcaataatgttgttaaaaaggctttgcttttctcctatgtactttgaaaacaccatttcaattttagacaagcaattttttttcatttttatctccctctccttcccacctccccgcctgccatacttcccctctcccttactacctccccactactttccttcatttttgtttgtttgtttgtttgttttttcttactgattgcccaattcataagctctagctttcacgtgatcctgggtgcctcttagctgtggctttgtaat

SEQ ID NO: 79300 - DNA, 867 bp, Homo sapiens
tgcattaagattttaattataaacagatttagtcaccactgtttatgttcttttagtctgcattagcacggtcatttaaataaaacatttgtttgtaaatgtgtgtgtttcacttgatatagctaattacaaacctggctgggatttttacgatacctcttttaaagcatagtttttatgtaaatttgaacatttcatcttaaaaatgcctcgtgtttgatttaatatgcttgaattaaatatattctatctacttgaatctctctctatttaaaggaatttttctgaaaaacaggcatggcagttaacttcctgtctgtggctttccaagaatgaattaaaatgtgcaaaatgatttgagattcacggtgaaaggatgctttagagtgttaatcccccatgaattctgcctccaggattctgcctaaatgagcaggaaacttctggaattgaacaagcatygtgggtggccatgctatggttaacaggaagagaagggagatttcaattaaagatgtgagttaactcatataaatactattatttgtgggtgcttgtccatgtgtgtgagtataggcctgcacgctgatagaacagagagaccaaaaggactgaaatataaattctcccatctgtcaggagaaatgctcttgggagaggatagatattttcaggaatttattttgtatctcttaacatacttcagtgatttaaaataccattgaatttggctatgatcaggattttggagacttgtagataaattaaagggcagcactctgttttgctttactgttgaaattttatagcctaaattgtttttccatttctatttccatgttctgggtttgggaaggaatgtaacat

SEQ ID NO: 79301 - DNA, 652 bp, Homo sapiens
cagttttatctttctggaaaaaaatgggaatgaatcataaagttatgttgctataaagcagcctgtttttggtctgataagtaatgaaactgtacgtagtcttggttctcaaacaaattatctcataataactacatattttcataatttcaatattttattttattaaaacagtttctttaaggtataattgatatacaaagaactccacatatttaatgtatatgattcatgagtttgggcaaattcaaacacttatagcttcattacaatcaaagtaatagtcacatcaagcacctccacagttttctttttttgttgttgtttaaatattgttttttttttttctttttttttttctttttaaattgatcatacttgggtrtttctcacagagggggatttggcagggtcataggacaatagtggagggaaggtcagcagataaacaagtgaacaaaggtctctggttttcctaggcataggaccctgcggccttccgcagtgtttgtgtccctgggtacttgagattagggagtggtgatgactcttaacgagcatgctgccttcaagcatctgtttttaacaaagcacatcttgcactgccctcaatccatttaaccctgagtgtacacagcacatgtttcagaga

SEQ ID NO: 79302 - DNA, 1067 bp, Homo sapiens
  misc_feature (1)...(1067): n = A,T,C or G
gggaaccagcagctcaatgaatggcaaggataatcatgatggcaagggtaatggttaagattgaagatgatgacagaaataatgcagtgttggcttattgaaaatctaaatagggctatttaagttaaattctcagtgaataaatttataaacatggacagtgattcctcaagaaggtaaacatctgtcatgaatgtatgtcttttaagctagatnnnnnnnnnnnnnnnnnnnnnnnnnnnnnnnnnnnnnnnnnnnnnnnnnnnnnnnnnnnnnnnnnnnnnnnnnnnnnnnnnnnnnnnnnnnnnnnnnnnnactgtgatcaaaatgttcaaaagtccaggcagatgttaacaaatgattgttggttggaggatgattgaatcgtttactattttctcagcctttcattttgatggatctttgctcattcgcttttgttcattttttatttaacaattaacaacatgcatcaagtatctcatgtttgctacaggttctctgaacaccaagatgaacactacattgctgtgccttggggtttgtaaagcaagctgacaagagttagtaatacataccaagaagttgcaatgtacagcattttatgcagtgtgaaggagatggaatgagagaatatgctttattctgcttgaagaaatcagttattagagtcaaaatggcatgttacctgaacctggtaggctgaaatagctctgacaattgggcaggacatgaaggtaacactggagaaagaggatgaagggaaaggtttgtgaaagaacatagtgattacatgaaaarcaaataaattggtgttgcagagcaaaaatgtcataagcacacactcaagaattagtcactttcaagctgcacttaagatctgaatagctaaggacaagctacttagcatatctaattctcagcaaactcatttcaaaattgaggataatcataacaactttctcaatatggaatggtttaatttaagcatttggcacatttcttgtcatgctaagtgtttaacaaatattagcacatcttcttccctttttttgctttttaatttg

SEQ ID NO: 79303 - DNA, 687 bp, Homo sapiens
gcatggctaattttatttatttatttatttgtttgtttstttatttatttattggagagaagagagaggtgtctcgctatgttagccaggctggcttcaaagtcttgagctcaagcaatcctccctgctctgtctcccaaagtgttgggattacaggggtgagccactgtgcctggcccctgagattcttaaatattgtttttaattttgaatcctaacttcagaaatctaaagaatcttagattatttagttcagggcttctcaaagtttttattttgaacgtgtaacctaacaaacaaaggcaaataaatagggagtttaaaaatgagctggtggaactgagggagcagggcaataaaaatgaggcctcaccagccaatggtgatgctcaagtggaaggcctgaggtcaaagctgcagagagccaagatcgtgccactgcactccagcctgggcgacaaagtgagcccctgtctcaaaaaaaaaaaaaaaaaaaatctcagaacacaaggaaaaaagtcttatgtaaaacattactagtggcctacctaaaggcctttttatttatttattttttcttgctaaaagtccattctagtttacctagcccaaggaacaaatgtggtgccctaagccaattatctcatttttcgttccaaattgatctgaggtgtgcttttcactgaa

SEQ ID NO: 79304 - DNA, 687 bp, Homo sapiens
gcatggctaattttatttatttatttatttgtttgtttctttatttatttattggagagaagagagaggtgtctcgctatgttagccaggctggcttcaaagtcttgagctcaagcaatcctccctgctctgtctcccaaagtgttgggattacaggggtgagccactgtgcctggccccygagattcttaaatattgtttttaattttgaatcctaacttcagaaatctaaagaatcttagattatttagttcagggcttctcaaagtttttattttgaacgtgtaacctaacaaacaaaggcaaataaatagggagtttaaaaatgagctggtggaactgagggagcagggcaataaaaatgaggcctcaccagccaatggtgatgctcaagtggaaggcctgaggtcaaagctgcagagagccaagatcgtgccactgcactccagcctgggcgacaaagtgagcccctgtctcaaaaaaaaaaaaaaaaaaaatctcagaacacaaggaaaaaagtcttatgtaaaacattactagtggcctacctaaaggcctttttatttatttattttttcttgctaaaagtccattctagtttacctagcccaaggaacaaatgtggtgccctaagccaattatctcatttttcgttccaaattgatctgaggtgtgcttttcactgaa

SEQ ID NO: 79305 - DNA, 683 bp, Homo sapiens
tataggtctttataatccaaggtgagatgtttagatttcattctagggtgctagaaaccattagaggattatatgcaggcaagagaaactgtgtggttttgctataaagtagtctttcttaatttcttctcactgtacctttccaagaagaaaaattaaattaaaattaattaattaaaaacttaatttctccccaacaagagagtactgcttaaatgctaagaagattttgttgggtagagttgaagtttggagggccacagacaattgtaatatgcaatattttttcacctgccaagaagcaactgtgggtgatattgctctcattgagaatacatgccatcaaagattatgctggctgctacaagtaaacagaatatgggaagtgggagttagttagtctgttttggttgcccaaccaagaacttattattgaatggacaaccattgtattaaagatagaaaaaagtggcctgggcgtggtggcttatgcctgtaatcccagcactttgggaggctgaggcgggtgaatcacatgargccaggagttcgagaccagcctggccaatatggcaaaactccatctctactaaatatacaaaaaaaaaaaagccgggcatggtggcacatgcctgtaatcccagctactagggaggctgaggcaggagccttgaacctgggag

SEQ ID NO: 79306 - DNA, 694 bp, Homo sapiens
ggtttggctgaggatacagacttaggaattatttgcatataggttatatttgatactggatggagttacctacagagaatgtatatagagagaagcaggccattgagcaactattatatagaagagaaggaggagttgccagtgggatgggatggaaagcagaagagcgtggtgtctctgaggctaagaattcaaaagatattaaaaaagasacggttctactatgttaattatagagattacatttggtgaaatgaggtcatttgtgattttgacaatttgacatatagtttaagaagaggctgggacaaagtttattggattaaattgtggaagtggagacagttcttatagacaactctttttttttttttttttattgctcattcttgggtgtttctcgcagagggggatttggcagggtcacaggacaatagtggagggaaggtcagcagataaacaagtgaacaaaggtctctggttttcctaggcagaggaccctgcggccttccgcagtgtttgtgtccctgggtacttgagattagggagtggtgatgactcttaacgagcatgctgccttcaagcatctgtttaacaaagcacatcttgcaccgcccttaatccatttaaccctgagtggacacagcacatgtttcagagagcacagggttgggggtaaggtcacagatcaaca

SEQ ID NO: 79307 - DNA, 694 bp, Homo sapiens
ggtttggctgaggatacagacttaggaattatttgcatataggttatatttgatactggatggagttacctacagagaatgtatatagagagaagcaggccattgagcaactattatatagaagagaaggaggagttgccagtgggatgggatggaaagcagaagagcgtggtgtctctgaggctaagaattcaaaagatattaaaaaagagacggttctactatgttaattatagagattacatttggtgaaatgaggtcatttgtgattttgacaatttgacatatagtttaagaagaggctgggacaaagtttattggattaaattgtggaagtggagacagttcttatagacaactctttttttttttttttttattgmtcattcttgggtgtttctcgcagagggggatttggcagggtcacaggacaatagtggagggaaggtcagcagataaacaagtgaacaaaggtctctggttttcctaggcagaggaccctgcggccttccgcagtgtttgtgtccctgggtacttgagattagggagtggtgatgactcttaacgagcatgctgccttcaagcatctgtttaacaaagcacatcttgcaccgcccttaatccatttaaccctgagtggacacagcacatgtttcagagagcacagggttgggggtaaggtcacagatcaaca

SEQ ID NO: 79308 - DNA, 694 bp, Homo sapiens
ggtttggctgaggatacagacttaggaattatttgcatataggttatatttgatactggatggagttacctacagagaatgtatatagagagaagcaggccattgagcaactattatatagaagagaaggaggagttgccagtgggatgggatggaaagcagaagagcgtggtgtctctgaggctaagaattcaaaagatattaaaaaagagacggttctactatgttaattatagagattacatttggtgaaatgaggtcatttgtgattttgacaatttgacatatagtttaagaagaggctgggacaaagtttattggattaaattgtggaagtggagacagttcttatagacaactctttttttttttttttttattgctcattcttgggtgtttctcrcagagggggatttggcagggtcacaggacaatagtggagggaaggtcagcagataaacaagtgaacaaaggtctctggttttcctaggcagaggaccctgcggccttccgcagtgtttgtgtccctgggtacttgagattagggagtggtgatgactcttaacgagcatgctgccttcaagcatctgtttaacaaagcacatcttgcaccgcccttaatccatttaaccctgagtggacacagcacatgtttcagagagcacagggttgggggtaaggtcacagatcaaca

SEQ ID NO: 79309 - DNA, 694 bp, Homo sapiens
ggtttggctgaggatacagacttaggaattatttgcatataggttatatttgatactggatggagttacctacagagaatgtatatagagagaagcaggccattgagcaactattatatagaagagaaggaggagttgccagtgggatgggatggaaagcagaagagcgtggtgtctctgaggctaagaattcaaaagatattaaaaaagagacggttctactatgttaattatagagattacatttggtgaaatgaggtcatttgtgattttgacaatttgacatatagtttaagaagaggctgggacaaagtttattggattaaattgtggaagtggagacagttcttatagacaactctttttttttttttttttattgctcattcttgggtgtttctcgcagagggggatttggcagggtcayaggacaatagtggagggaaggtcagcagataaacaagtgaacaaaggtctctggttttcctaggcagaggaccctgcggccttccgcagtgtttgtgtccctgggtacttgagattagggagtggtgatgactcttaacgagcatgctgccttcaagcatctgtttaacaaagcacatcttgcaccgcccttaatccatttaaccctgagtggacacagcacatgtttcagagagcacagggttgggggtaaggtcacagatcaaca

SEQ ID NO: 79310 - DNA, 666 bp, Homo sapiens
catgtgtacatacacatctgtgtatatatgaaagctttatgttttattttacactgcatgagcatgattctccaacagaacacgtagatttttcgagcaccctaggcattaaattgacacrtagggtcccaaagacttctttaacaagagatcaatattctttaagcctatactttttacacaataattggagaataatggtctgttcttatctggttttcactgagatcttctcatacaatgactggtgagatgtgcagtcctgggcagaggcacaatgtgcagccagcagctaatatgttccttggcataataactcaccttgccagaatgacccaaagaagctctgcctggtgaattcccctgagccatatgggctgttagttgaccttgtactggctgcttacattttcttagcttcattaactttgcttacatagttggggaaggttcaaatgaggtaatccaggtaaaaaccatttgtaaactactaaaagctacagaaacacgagctattaatataaacacactctaataacgtaccaataggagaaaccaacataattatttaaaatttttaataattaggttcataaaaattcaaggattttggaatcactctctgtaccttttctgtatctttaggtttagcaatactcaagaaat

SEQ ID NO: 79311 - DNA, 1291 bp, Homo sapiens
ttgcttataatactaggataaaatttgaggacctctggctcccaggcaggcatttgccccacagtaccatgctgtttccacaaaagtgtgagaatgtgaaaatatgtaatgaacctggtctcttaatgcaaaaggtgaagaaacgtgaaattcaaatatgtcttgtataattcaacccattctcacttgagaagcagtgtaatgcagtagttacaatctaggaccccaaagctcgattgcctatatgcaaatcccatgtctactacttcccagcaaaatgactctagacaagttacttaaccttaccattcctctatttcctcatctgtaaaatggagatgataataatagtattgaactcatagggttatggggaggtttgaatacattagtaggtcaggtgccrtggctcatgcctgtaatcccagcactctgagaggccgagatggtgggttgcttgtggtcaggagttcaagaccagtctgggcaacatggcggaaacccatctctactaaaaatacaaaaatgagctgggcgtggtggcgggtgcctgtagtccaagctacttgaggggctgaggtggaaggattgcttgagcccaggaggcagagattgcagtgagccgagatcacgccactgcactccagcctgggcagcagagcaagactctgtcttaaaataaataaatacatacgtatagtaatattaagttggtgcaaaagtaattgcggtttttgttattacttttaatggcaaaactgcagttacttttgcaccaacctgttaactgtaagcctcatagaaaaggctttggactaaatttagtaataaataattataagcaatgatcattattagtggtagactgcataataaagacaaattatttcagttaaacaaagtaacacttttattaatattattattaatatttgttcctactgtacctattagccacctcttatggtgaagtcatgaacatttaatcctaatacagggcccaaatgttctggtgaactgcctgtagattgaaaatcatgtacttttctatgccagcagacattttgtggacagttagcacatgacagtcatgagtgttcttgctaaagtcacattaataccaaagaactgtacagtgactcgttctatactgtcatttctttaagttgcattgtttcaagaactaagtggctgatgtactgtttcgtttctttcataatgctgagcatgggtatctaatagacttgcttaggctggcacatttttgcgtagaagtgctagatttgtatgc

SEQ ID NO: 79312 - DNA, 463 bp, Homo sapiens
  misc_feature (1)...(463): n = A,T,C or G
tctgtttatacttcttttcctaaccttgcagatataagaggagatcctgtggaaaaatgcatgaagcaccaccattctgttgaaatattasaagcattcctcttaatcaattccaacattttgagagtttccctacctctctactcttgccatccacagtgtacatcatgctaagcaaaccttgcaaaaatatataaaacttgtctgctttgagatatatagctaagggagacactaatatcatgtataatagagatggcttaaagaatgggtagaacattcacaagtagaaatatgggatatggtagaaatgaagcaacacaacttcataaaaccattaagagatatgagaacagaaatatnnnnnnnnnnnnnnnnnnnnnnnnnnnnnnnnnnnnnnnnnnnnnnnnnnnnnnnnnnnnnnnnnnnnnnnnnnnnnnnnnnnnnnnnnnnnnnnnnnnna

SEQ ID NO: 79313 - DNA, 1148 bp, Homo sapiens
gttcacatatgaaagatgtaagattttctcaatctgacaataatcctaagtatacatattatatacacattgagttgtgaggccaaaagaaatttgtatgttatcaatacaaatttcaaataatttactagaggacatattgaattaagctttcaatcttttcataaatgtattagtaatggtcaaatgcagctagaaaatataaagaagaaagaatataaagatggattaggcaattaaaaatttyttttaaagcttgtgatgtaaatgctgtttattagctacttatagtttgcaatttattttctttttcattctaaacaagtatttgctttatctctaatttgtattcataatctatttccttttttttttgttaatgaatgaacgaacaatgtgaatgaatgaaaaggttggacagatgtcttagtgagtttgggctgctgtaactaagtactataggctggtggcttataaacaacagaaatttatttctcataattctggaggctggaagtagtagatcaaagtggtataggttgggttctggtgaggatcctcttccagttgcagactgccaacttcacattatattttcatgtagtaaaaagagggccagagtattctccggggtctctttttataatggtattcacctacttataagagtttcacctttatgacctagttatctcccaaagccccacctcctaataccatcaccttgggggttagaatttcaacatatgaattttgggagcacacaaacattcagtctataacaataagtgaagcaaagctttttaaaaagctttccaaagtgctttatcaactggaattagtagtttcataaataaataacccataatgtaattactaaagttgattgctcactttcgaaattaaaaaaaaaatctgtttaatggataaaggagtcatccattaaaagtacaagatgaatttaacctgaaatagagttggctgttgtgatataaatgattaaataatctatatatttagctaaatatgtgcttcatgcatttctgtaaaccttgtaaaccacacaaactactgttaagtaaactgggcaaaggaagtaacaacattgctcccatcattatgccttttaaatgaatagacaggaattt

SEQ ID NO: 79314 - DNA, 1182 bp, Homo sapiens
tgactgatcatgcactatatatttgagaaaacttaacttgatatgaacagaattaaactttttatatcataaagaaattatttcacagatatcaggattactattcacttaactcctgaatcttcacagaattacattctcttgacttaaggagagatctatattgaaataatctacattttgactatgcagctttttgcagcaacataactagaatacaattcttaaaatttgattatctacttttacccttaatgatacttcctgtaaaaataaagttcttgtatttaaaggcaatcctttagatttatcctgtatttattatttcttattttactgttcagagaaggggcaaaattgatcatcatattttaaataggtttgcatattaagatcataattgaattacttttctgcttatattactgaatgataactagtacaaaataaattattactattattccctttgtatgattggtactttaaaaaataattatgttctaaatatgtgcagaatcaaaagctagaaaatcactcttctgcacacctctatagccacaataaaaattacacagatcacctcagctttactaaaatatctacacaagaagaaggaaatccttttaatttgaggacatttataaattcactctaatttgcaatgccttatattgtattcctatatggaaaatacctcacaaggaaaattcttcaggaactgaaaaacaactttagcaaaaattttaatatcattagaaattaaattagataattgaaaaattatctttttaaaaattattgcatatactagaaagaaagaattatactggtcattataaaacaaacaaacaaaaaatcagtgtctctcaattagtttcattcaagttsctatggggaaaatgtaattataattcagacttttctatctaaatacaaagtagtttccttagtcttctttcagaatatgtagtattcaagtaaaattacgttagtacattttctaactttattgtatactttaaaaactctgaatttgctgcattggattttttttttttttttgcctattcagttttagtttttacttagtttgccattatagacttaacttttgagggataattattatatacagtataatatactgtttttttctagcaaaaactttcttagtgaaaa

SEQ ID NO: 79315 - DNA, 925 bp, Homo sapiens
caagacgtttaattttgacaatactagaatccagttttcaacattactatggaagtaatgttgataaactaaaattgcatagttctggtctgctctggctagtgttttccattagtcaaatatttacaagattctattttgattatcaacatcacttctatagtcaatgggtttgtatatgtgttaatttttgcttatgttattaatttgatatatatgtaaataagctgttgattaaatcaacttaaaccttttaaaattactgatgagataaagaactatcaaaacaaggctatctttgaattttagtttacctagtctatgagtactaaattttacttgaaaattcttttttcataaaacatgtccttatttctagattcactttaaaagggcaaatacaaaagtggagataatgtaaagtagatcatttttattaaaaattttaatcctaaatataatctttaaaaaattaaaaaacttcaataagaaaggactggcatccaaacttctaaatatttcacatatcaagcacttaaggtttcttactgtcacctcagagctctcacataatggccctcataattcatgtcagctggggctgcttgagagggttgtcaaagctctaaagtgtcattcttcagtctactcaagtgttcatggagtagaaggaataagtcttctaggtgtccatattagacccagaaagccagtataaagaaacaagtttttatcagaaaaaaaaaaaaataaagatgtttctggctacatacctgtaactacagacattatatatttaaaaaaatactcccatgccaaaatttaaataaatgcaattctaaacctactgtatgccagcttctaggaatgctaaacttgacatttacrgtataattatcttagtcatttagagataaatatttgt

SEQ ID NO: 79316 - DNA, 662 bp, Homo sapiens
taaggatgaacacccgtctctctcatgcgttaatatcaaatagtgaagatagccctaatacattttatcactgagaaaaaaagttctgtgccctctcttatgggctgaaagagcatgagaaatacacttctggctgggacacaagctgtatgatcaagggcaaaatactctggctgggtctcattttccttgtttttaaagtctgtttccttctctacaggcagttgtgagaatcaaatagtgcaaagtttatgaaargtgctttaaagatggcacccacacaatgaaaagtgttgatgccatctataggagagcaggtgaagcgggaattgattctggcaaaggacacactttgggagtcccatgaaactgcagcatggccagagtgcttgaccacccagaatgtgctgagtttaggacttaatctgatcctgtggatcaattgtaattgacttatgtcacacaaattttgccatttctgcaggagcctttgatggaaagtcattgggacattacgtggtttcttaacgtggacaacattaagggacttttttttgcccaatattactaaactcttggtgattgcattttaaatgagcacctttcagtccttcttccatattgctgaggcatcttcaatgcatttgtaaaaaagcatgtaa

SEQ ID NO: 79317 - DNA, 775 bp, Homo sapiens
aacatttttgctcatcctttataatctgatagattaaccattttaagctcttcctatatgaatttgcattccttgataactagtgaattaaatttttttcccacaagttcattgatcatttgtagaatggaaatattttcctgaaaataataggcacagattttctgcaaaacactaactttcactgatctaattaaaagagtattgaaaggatgaattaaccagtttattaaacccagtacacataagctagtgatttcattcttcattgcccttcaagattctttgagactgaaaactaagaagaaacaaatgaacccatgtgaatagcaaggtgcctttatattcctaaagctgcacaggaattggcttacacacagaagtttacagcataactagattgatatgattcttattttgttttgttttactgtttcctggacaataacaattatgatttaaaacttggccaaatcctatagaggcccctctgatactgtttctttctgtgggcataacacctggatgagtcagttaactttccacttctaccaagwctataatcacttgaatgctatcctttggccggctacagccaattgcagctgatcaacatttttctaagcacactaaattatgtgcataaaaaataatagccacccatctttgtccaagtagacttttcttacttagcctgtatataattctctatcaaatagtcactatggagatgtgtatattaaatagacatgtgtatctatttatgcctggatcc

SEQ ID NO: 79318 - DNA, 775 bp, Homo sapiens
aacatttttgctcatcctttataatctgatagattaaccattttaagctcttcctatatgaatttgcattccttgataactagtgaattaaatttttttcccacaagttcattgatcatttgtagaatggaaatattttcctgaaaataataggcacagattttctgcaaaacactaactttcactgatctaattaaaagagtattgaaaggatgaattaaccagtttattaaacccagtacacataagctagtgatttcattcttcattgcccttcaagattctttgagactgaaaactaagaagaaacaaatgaacccatgtgaatagcaaggtgcctttatattcctaaagctgcacaggaattggcttacacacagaagtttacagcataactagattgatatgattcttattttgttttgttttactgtttcctggacaataacaattatgatttaaaacttggccaaatcctatagaggcccctctgatactgtttctttctgtgggcataacacctggatgagtcagttaactttccacttctaccaagtctataatcacttgaatgctatcctttggccggctacagccaattgcagctgatcaacatttttctaagcacactaaattatgtgcataaaaaataatagccacccatctttgtccaagtagacttttcttacttagcctgyatataattctctatcaaatagtcactatggagatgtgtatattaaatagacatgtgtatctatttatgcctggatcc

SEQ ID NO: 79319 - DNA, 758 bp, Homo sapiens
ctgttctgctttgagtgtattcagggtcagttggagatatgggcagaagagattggggatcctttctctggtttttaccattccagaatttccacacttcttcaatatttgccattgtctggctttacttttcagttctccagaccagaaasactgcacattttcccatgagagcccctctcaacactctatgcagcatgtggaatgcacttggcctcaggctaaaagccagaaaagatgggaactaatttgtggaacatacccttttcctgactccatgagagtgtatacttcctatcagatatgatgtgttctgttcattctccagtaccttcagatagttgctttttaaatgtctctcaaagttctaagttgctttctgcagaggagtccatctagtagactaaatttgtcctacttggaggtggaaagttccaatgtaatctgaaccttggctgttaaggacacagtggtcactattggtttcatttttatttccctctcagagaaaggcaatattctcaggatcataggctcccggcacatcctgcagttccactatacagagaggccatgggtaccatatgctgccagtggtatccctcttgagatttaggcataaactctacaattacaaaaattctgggcgttattttcttcacctacttagtagtagaattgtagttcacattattttcattttttcatttaacaaatattgagattctactaagtgtctggcatgatgctatattttg

SEQ ID NO: 79320 - DNA, 706 bp, Homo sapiens
ccaccttacaagggaggtgaaggacctcttcaaggagaactacaaaccactgctcaatgaaataaaagaggatacaaacaaatggaagaacattccatgctcatgggtaggaagaatcaatatcrtgaaaatggccatactgcccaaggtaatttatagattcaatgccatccccatcaagctaccaatgactttcttcacagaattggaaaaaactactttaaagttcatatggaaccaaaaaagagcccacatcgccaagtcaatcctaagccaaaagaacaaagttgactgtatttaaactgggacacgggtcttctgccttcacacacgcattcagcctagaacttacaccatcagctttcctgggtctcaagtttgctgactgcagatcttgggaattctcagcctccatggccacagaagccaatttcttataataaatatctgtctctctctctccattttttgtaatgaacatgtgttatttagtaatcagaaaaattattttaatgactcaatttttcagtgtatccatattatttcagatgtaaaacattgtatttatgtattctttaaatatatatatatatatatatatacacacacacacacacacatacacatatatatatgcatatattctattcattctggtttcttggagaaccttgactaatacagttgtggtgagtgagggggaaaa

SEQ ID NO: 79321 - DNA, 706 bp, Homo sapiens
ccaccttacaagggaggtgaaggacctcttcaaggagaactacaaaccactgctcaatgaaataaaagaggatacaaacaaatggaagaacattccatgctcatgggtaggaagaatcaatatcatgaaaatggccatactgcccaaggtaatttatagattcaatgccatccmcatcaagctaccaatgactttcttcacagaattggaaaaaactactttaaagttcatatggaaccaaaaaagagcccacatcgccaagtcaatcctaagccaaaagaacaaagttgactgtatttaaactgggacacgggtcttctgccttcacacacgcattcagcctagaacttacaccatcagctttcctgggtctcaagtttgctgactgcagatcttgggaattctcagcctccatggccacagaagccaatttcttataataaatatctgtctctctctctccattttttgtaatgaacatgtgttatttagtaatcagaaaaattattttaatgactcaatttttcagtgtatccatattatttcagatgtaaaacattgtatttatgtattctttaaatatatatatatatatatatatacacacacacacacacacatacacatatatatatgcatatattctattcattctggtttcttggagaaccttgactaatacagttgtggtgagtgagggggaaaa

SEQ ID NO: 79322 - DNA, 2378 bp, Homo sapiens
cgtgacatcactctggtcaagagattgaacattatcgtactccagaggcctgcttctcatattccccatccccaaccctatgtctccttccttccccttaattactatcctgatttttacgtaatcacttcttttattttcataattcataacatgttcgttggaagagcttctacagaaattttaatttygccaatttaggtcgtgtgtgcaaatgaaatcatatagtgtctaaatattattttgtatatgggctctttcactcaatgttatccttatatgatcatatcatgcatgtggctgcagttcatactgcattgtataaatatataaattaatttcacattttactattgatcatttgggttgtttctattttataactattgtgaacaatttcattatgaacactcttctaaatagtttttagtgtcctgctgaacaaataaatatataatttttatatatttatacaatgcagtatagaagtggaattgcttggtcatagggaatgcacagttcaaacttgttaaactttagtaaataatgccaagtttttttcccaacagttgtcccatcatcagtatatatgagttcctgtagcttcaatacttgacagcagttggtattattggtcttttttattgtatctatttagtgggcagtggttgcttctccctgcggttttaatgtgcatttttttatttctcttgagacggttacattttcatatttacgagctattaatatccctctatataaagtgcctattcaagtcttctctctctctctctgtcttttaatggaaaatctgtctcttgtgtttttcttattgatttgtacttctttacaaaatctggatacaaactccttgtctgttacagggttacaaatttttactgatatgtggcttgccttttcatactctcagttgttctttttaaaagttcgtaatttgaatgtggccaaatgggaaaggttttcccttgattgttagtgtgctttgtgtcctagttaagaaatctttctctagaatgatgacatgaagatattcgcttatattatcttctaaaagcattatgttctatgcttcacataagagtctatatgcttcacataagagtctataatgtgtggaatttattgttaagtgagtgatgtgatatagggtccaattctctttttatctagacagatttctaaatgtctaagcacaagtttttgaaaacagtctacttgttcttcctccactgctcagctgtgccatctttgctttaaatcacgtatcattatacgtgtgggtattctcactaggttttaaaattttgtctattcttgaatccatggccatagttaattactctagcattttttctttgtaaaattgaacttaatttttactttatttttgattcagggagtacatgtacatgtttcttacatggatacaatatgtactggtggggattgggcttctagtgtacccattatccagacagtaaacattgtacatattagataattttccagctctcactccacttctacactccttaattttggagtccccagttctattatttccatctttatgtccatatgcatccattggttagctctccatttttggtatttacccagtaggctactaagaactatatagatgagtgttcataatggaatttttcacaagtcataaaatagaaacaactcaaataatcaatggtagaatgtgaaaataatttttatatatttatagaatgcagtatggatgaactgcagccacatcatggtgtgatcatataaacctaacatcgagtgaaagatactacacagaaaataatatgtatgcactatatgatttcattgatacacactacacaaattctacattttcatactagaatgtgaaacaacattgacttttaatttatttttatttatttattttttaattttcatgaatttggggtacaagtgcagttgttttacaagatatattgggtagtggtgaaatctgggcttttaaagtacattgtacccaacaggtacaatggaataatgtacattgtacccagtaggtagtatttcagttctcacccccctctcatcctcccatcttttggaatcttcagtatctattattccactctatatgtctgtgtgcacccattgtttagctccaacttataagtgagaacaggcaacttttaactttctgcttcttagtcatttctctaaggataatgatgaccagctccatccatgttgctgcaaatgacatgattttattttattttttttaatttccaacttttattttaagttgtggggtacatgtgcaggatgttcaggtttgttacataggtaaatgtgtg

SEQ ID NO: 79323 - DNA, 2378 bp, Homo sapiens
cgtgacatcactctggtcaagagattgaacattatcgtactccagaggcctgcttctcatattccccatccccaaccctatgtctccttccttccccttaattactatcctgatttttacgtaatcacttcttttattttcataattcataacatgttcgttggaagagcttctacagaaattttaattttgccaatttaggtcgtgtgtgcaaatgaaatcatatagtgtctaaatattattttgtatatgggctctttcactcaatgttatccttatatgatcatatcatgcatgtggctgcagttcatactgcattgtataaatatataaattaatttcacattttactattgatcatttgggttgtttctattttataactattgtgaacaatttcattatgaacactcttctaaatagtttttagtgtcctgctgaacaaataaatatataatttttatatatttatacaatgcagtatagaagtggaattgcttggtcatagggaatgcacagttcaaacttgttaaactttagtaaataatgccaagtttttttcccaacagttgtcccatcatcagtatatatgagttcctgtagcttcaatacttgacagcagttggtattattggtcttttttattgtatctatttagtgggcagtggttgcttctccctgcggttttaatgtgcatttttttatttctcttgagacggttacattttcatatttacgagctattaatatccctctatataaagtgcctattcaagtcttctctctctctctctgtcttttaatggaaaatctgtctcttgtgtttttcttattgatttgtacttctttacaaaatctggatacaaactccttgtctgttacagggttacaaatttttactgatatgtggcttgccttttcatactctcagttgttctttttaaaagttcgtaatttgaatgtggccaaatgggaaaggttttcccttgattgttagtgtgctttgtgtcctagttaagaaatctttctctagaatgatgacatgaagatattcgcttatattatcttctaaaagcattatgttctatgcttcacataagagtctatatgcttcacataagagtctataatgtgtggaatttattgttaagtgagtgatgtgatatagggtccaattctctttttatctagacagatttctaaatgtctaagcacaagtttttgaaaacagtctacttgttcttcctccactgctcagctgtgccatctttgctttaaatcacgtatcattatacgtgtgggtattctcactaggttttaaaattttgtctattcttgaatccatggccatagttaattactctagcattttttctttgtaaaattgaacttaatttttactttatttttgattcagggagtacatgtacatgtttcttacatggatacaatatgtactggtggggattgggcttctagtgtacccattatccagacagtaaacattgtacatattagataattttccagctctcactccacttctacactccttaattttggagtccccagttctattatttccatctttatgtccatatgcatccattggttagctctccatttttggtatttacccagtaggctactaagaactatatagatgagtgttcataatggaatttttcacaagtcataaaatagaaacaactcaaataatcaatggtagaatgtgaaaataatttttatatatttatagaatgcagtatggatgaactgcagccacatcatggtgtgatcatataaacctaacatygagtgaaagatactacacagaaaataatatgtatgcactatatgatttcattgatacacactacacaaattctacattttcatactagaatgtgaaacaacattgacttttaatttatttttatttatttattttttaattttcatgaatttggggtacaagtgcagttgttttacaagatatattgggtagtggtgaaatctgggcttttaaagtacattgtacccaacaggtacaatggaataatgtacattgtacccagtaggtagtatttcagttctcacccccctctcatcctcccatcttttggaatcttcagtatctattattccactctatatgtctgtgtgcacccattgtttagctccaacttataagtgagaacaggcaacttttaactttctgcttcttagtcatttctctaaggataatgatgaccagctccatccatgttgctgcaaatgacatgattttattttattttttttaatttccaacttttattttaagttgtggggtacatgtgcaggatgttcaggtttgttacataggtaaatgtgtg

SEQ ID NO: 79324 - DNA, 2209 bp, Homo sapiens
tcccttgaggtcaggagtttgagaccagcctggccaacatggtaaaaccccgtctctactaaaaatacaaaaattagccaggcatggtggcacatgcctgtaatcccagctactcaggaggccgaggcaggagaatcacttgaacccaggaggcggaggttgcagtgagccaagattgcaccactgcactccagcctggtcaacagagcaagactctgtatcaaaaaaaaaaaagaaagaaagaaatccttcacatacactactcttcaatccatttatgtggcctgatttttcctggacgcaacacaagaacctgagtgtcaagagggcaggggcttggatgctgctgcggaggctgcacagagccgggtcccatcagagaggagcaatgtgctggttctagtgctcattctctctggttcccacacttgcttcctcgcacattccctcttccaaggagtggccagtggtgggctgagagaaaggaacactccagttcccattcacgaccggagtcgaggtcaagggaaygatcccgtctcaatactatctagaaatgttttcatactgaaggccacataaggataggacaaaagcaggaaaaccttaatctctgacagcttagcaattttaaacatcttaaactggccctgattatgacttttacttactttacgtgattgttataagacatatatacatacatatatatgagaaatgttaaatgattcatcagtgttcttttagtcacaatgttaaagtagttaaaatttagcttttaaaagagaaaagataaatgtcatttttatatattaatacatatatataaaattcctggaactggtgagattgcaaacccctgtgcatgcttgcacccttgtatgcttgcatgtgctaaaatacactgattaagaatgtagcctctggacttagaagacagtttcaatttggttctgtcacataatattatagttgtatgaccttggaaaactttcttcacattttagagtttcagttttctcatctgcaaaatagagataatgttagtacttctcatgaaattagtgtgaaagattaactgaaataattcatgtaaagcatttaaaacattgcctggcccatagcaagttttccaaactagtagttttaaaaaaaataacaagcaattgttactgtggcaaatgcacatggatttgcagcaacctcaattcttgcttctgcagaagaaagaattcaactgaggggcctaaggcacaaggagagaccaagacaagttttagagcaggagtgaaagtttattaaaaagctttagagcaggaatgaaagtaaagtacacttggaagagggtcaaatgggtgacttgggagattagtggggtttgatccaacttgaggttttatatcttggcatgcttccggggtcttgcatctcttctcctctgattcttcctttgcggcgggctatccacatgtgcagtagtctgctagtgcttgggaggtgccccatgctcagtgtgtttactggtattgtacacatgctcacttgaggcatttttcccttatcagtccagtgttcccagaggaaggtctttggccattttccctcttaatgtgcatgcttgagcccacccagccaactcttgagatcttatctggaagctgttgatcactagtttcaggtatttctatctattgagagactgcctttccctggcactggctgcaaccaattaattattattttagagaaacagtgtaaaactgcctgaccatcacctgatagttgcctgacatttctggtagtgggtgggaagggctgttgggagcaggggtctcctgccctgctctgactagctgcctattgtaacataatgagttaatgattactttatatttatggaaggtaatattgaagcatgtaactaaagcatcaaaatatacatgacaaaaattgacaacacagataaccattgctgtgttttttttataatagctacagttaggaagatctcatgggggctaagggagagctttcaccttgggcctctgaaggttcactgagaagtcaactcacaaaaggcagattaataggacaaaaggcatatacatttatttcatatgtatacatggaaaccttcagaataaagatccaagttcccaatgagtttgagaagccatcctgagttacagagagaatgggggcttggatc

SEQ ID NO: 79325 - DNA, 2209 bp, Homo sapiens
tcccttgaggtcaggagtttgagaccagcctggccaacatggtaaaaccccgtctctactaaaaatacaaaaattagccaggcatggtggcacatgcctgtaatcccagctactcaggaggccgaggcaggagaatcacttgaacccaggaggcggaggttgcagtgagccaagattgcaccactgcactccagcctggtcaacagagcaagactctgtatcaaaaaaaaaaaagaaagaaagaaatccttcacatacactactcttcaatccatttatgtggcctgatttttcctggacgcaacacaagaacctgagtgtcaagagggcaggggcttggatgctgctgcggaggctgcacagagccgggtcccatcagagaggagcaatgtgctggttctagtgctcattctctctggttcccacacttgcttcctcgcacattccctcttccaaggagtggccagtggtgggctgagagaaaggaacactccagttcccattcacgaccggagtcgaggtcaagggaatgatcccgtctcaatactatctagaaatgttttcatactgaaggccacataaggataggacaaaagcaggaaaaccttaatctctgacagcttagcaattttaaasatcttaaactggccctgattatgacttttacttactttacgtgattgttataagacatatatacatacatatatatgagaaatgttaaatgattcatcagtgttcttttagtcacaatgttaaagtagttaaaatttagcttttaaaagagaaaagataaatgtcatttttatatattaatacatatatataaaattcctggaactggtgagattgcaaacccctgtgcatgcttgcacccttgtatgcttgcatgtgctaaaatacactgattaagaatgtagcctctggacttagaagacagtttcaatttggttctgtcacataatattatagttgtatgaccttggaaaactttcttcacattttagagtttcagttttctcatctgcaaaatagagataatgttagtacttctcatgaaattagtgtgaaagattaactgaaataattcatgtaaagcatttaaaacattgcctggcccatagcaagttttccaaactagtagttttaaaaaaaataacaagcaattgttactgtggcaaatgcacatggatttgcagcaacctcaattcttgcttctgcagaagaaagaattcaactgaggggcctaaggcacaaggagagaccaagacaagttttagagcaggagtgaaagtttattaaaaagctttagagcaggaatgaaagtaaagtacacttggaagagggtcaaatgggtgacttgggagattagtggggtttgatccaacttgaggttttatatcttggcatgcttccggggtcttgcatctcttctcctctgattcttcctttgcggcgggctatccacatgtgcagtagtctgctagtgcttgggaggtgccccatgctcagtgtgtttactggtattgtacacatgctcacttgaggcatttttcccttatcagtccagtgttcccagaggaaggtctttggccattttccctcttaatgtgcatgcttgagcccacccagccaactcttgagatcttatctggaagctgttgatcactagtttcaggtatttctatctattgagagactgcctttccctggcactggctgcaaccaattaattattattttagagaaacagtgtaaaactgcctgaccatcacctgatagttgcctgacatttctggtagtgggtgggaagggctgttgggagcaggggtctcctgccctgctctgactagctgcctattgtaacataatgagttaatgattactttatatttatggaaggtaatattgaagcatgtaactaaagcatcaaaatatacatgacaaaaattgacaacacagataaccattgctgtgttttttttataatagctacagttaggaagatctcatgggggctaagggagagctttcaccttgggcctctgaaggttcactgagaagtcaactcacaaaaggcagattaataggacaaaaggcatatacatttatttcatatgtatacatggaaaccttcagaataaagatccaagttcccaatgagtttgagaagccatcctgagttacagagagaatgggggcttggatc

SEQ ID NO: 79326 - DNA, 2209 bp, Homo sapiens
tcccttgaggtcaggagtttgagaccagcctggccaacatggtaaaaccccgtctctactaaaaatacaaaaattagccaggcatggtggcacatgcctgtaatcccagctactcaggaggccgaggcaggagaatcacttgaacccaggaggcggaggttgcagtgagccaagattgcaccactgcactccagcctggtcaacagagcaagactctgtatcaaaaaaaaaaaagaaagaaagaaatccttcacatacactactcttcaatccatttatgtggcctgatttttcctggacgcaacacaagaacctgagtgtcaagagggcaggggcttggatgctgctgcggaggctgcacagagccgggtcccatcagagaggagcaatgtgctggttctagtgctcattctctctggttcccacacttgcttcctcgcacattccctcttccaaggagtggccagtggtgggctgagagaaaggaacactccagttcccattcacgaccggagtcgaggtcaagggaatgatcccgtctcaatactatctagaaatgttttcatactgaaggccacataaggataggacaaaagcaggaaaaccttaatctctgacagcttagcaattttaaacatcttaaactggccctgattatgacttttacttactttacgtgattgttataagacatatatacatacatatatatgagaaatgttaaatgattcatcagtgttcttttagtcacaatgttaaagtagttaaaatttagcttttaaaagagaaaagataaatgtcatttttatatattaatacatatatataaaattcctggaactggtgagattgcaaacccctgtgcatgcttgcacccttgtatgcttgcatgtgctaaaatacactgattaagaatgtagcctctggacttagaagacagtttcaatttggttctgtcacataatattatagttgtatgaccttggaaaactttcttcacattttagagtttcagttttctcatctgcaaaatagagataatgttagtacttctcatgaaattagtgtgaaagattaactgaaataattcatgtaaagcatttaaaacattgcctggcccatagcaagttttccaaactagtagttttaaaaaaaataacaagcaattgttactgtggcaaatgcacatggatttgcagcaacctcaattcttgcttctgcagaagaaagaattcaactgaggggcctaaggcacaaggagagaccaagacaagttttagagcaggagtgaaagtttattaaaaagctttagagcaggaatgaaagtaaagtacacttggaagagggtcaaatgggtgacttgggagattagtggggtttgatccaacttgaggttttatatcttggcatgcttccggggtcttgcatctcttctcctctgattcttcctttgcggcgggctatccacatgtgcagtagtctgctagtgcttgggaggtgccccatgctcagtgtgtttactggtattgtacacatgctcacttgaggcatttttcccttatcagtccagtgttcccagaggaaggtctttggccattttccctcttaatgtgcatgcttgagcccacccagccaactcttgagatcttatctggaagctgttgatcaytagtttcaggtatttctatctattgagagactgcctttccctggcactggctgcaaccaattaattattattttagagaaacagtgtaaaactgcctgaccatcacctgatagttgcctgacatttctggtagtgggtgggaagggctgttgggagcaggggtctcctgccctgctctgactagctgcctattgtaacataatgagttaatgattactttatatttatggaaggtaatattgaagcatgtaactaaagcatcaaaatatacatgacaaaaattgacaacacagataaccattgctgtgttttttttataatagctacagttaggaagatctcatgggggctaagggagagctttcaccttgggcctctgaaggttcactgagaagtcaactcacaaaaggcagattaataggacaaaaggcatatacatttatttcatatgtatacatggaaaccttcagaataaagatccaagttcccaatgagtttgagaagccatcctgagttacagagagaatgggggcttggatc

SEQ ID NO: 79327 - DNA, 789 bp, Homo sapiens
aggaaaatttgactaaggaataagggactataagattggtcaggcagatttaggaaaaaatcaaatgaacatgtaggaatacaaaaattgatatttaaatttaacatctgtgttataaataggtataaatttctgtgatcttggattaggtaatggtttcttaagtaagacacctacagtacaaataaccaaagaaaaaatagaaaaactaaatgtcattaaatttagaaagcttttgtgcctctaacaaatggtgttgggtcaactggatagccacatgcaaaagaatgagctggacccttacctcacgccatatacaaaaactgattcaaaatgaatcagagacctaaatgtaagagcagaaaatatgtctttgaagaaaatttaggaataaatcrtatgactttgcatctgacaatgatttagctatgacactaaaagcacaagcaccaacaacaaaataatatttagacttaatcaaaatttgaaaatgtatataaagaacactagacaacctacataatgggagaaaatatttgcaaattatatatataatatataattatatatttgcaaattaaatatataataaagatttagtattcagaatatataaagaaattttacaacaacaaaaagacaaaacaatccagcttaaaaatgggcaaagcacttatatagacatttctccaaagaagttatacaaatagccaataaacacaaaataagatgttcacattattagtcattaggaaaatacaaatcaaaaccacagtaagataccacttt

SEQ ID NO: 79328 - DNA, 1088 bp, Homo sapiens
atctacaaacacttcccccgatacttatattcaattgcattgccttgttgcatgcaaaattaatgccagaataactatcatccaagtgcttttagtagaatcagcaccaatggaataatgttgcagcctttactagaatttgtacctttgtatacagaagagtttggataatagtaataaaaaataaataaaaaacatcccagtcctgttactttatctgaggctgtatatgctggttaatctctaagctcctttttcctggcatcttccctctgaactcaaagcaggtgagagtggagcaagggatccggtgtgtggttcaggggagttgggaaggggatttttttttttttttatttctagtccactgggtattttctttcactagccccaatatattggaaaagaacatgtttatagccagtattggaagaacttttatttctgttaagattcggaaacttagctttcaatcatttgtttactgattctaaaagggtaaaaagacaaggagaacctggagaayagacattttccgctttgccttagaggtggtaacattatgaggttacagatgagtcctcactgcgggaagctcatggagggagtaccttttgatttcctgggcagtggatagaaaagcatggcacatgaccttggcaaaaatttttttttcaccttattaaaaaaagaccactgtgggaggccaaggcaggcggatcacctgaggtcaggagttcaagaccagcctgaccaacatggagaaaccccatttctactaaaaatacaaaattagcagggtatggtggcacatgcctgtaatcccagctactcgggaggctggggcaggagaatcgcttgaacccggaaggtggaggctgcagtgagctgagactgcgccattggactctagcctgggcaacaagagtgaaactccatctgaaaaaaaaaacaaaacacacatgacttcatggaaagaacgctacaacttccaacaggaatgcgttttggtgtgaaaggtgaaaacgtgacgaatccccactgcctcctaaccccctacatccattggttgcccagaagcacaggac

SEQ ID NO: 79329 - DNA, 1088 bp, Homo sapiens
atctacaaacacttcccccgatacttatattcaattgcattgccttgttgcatgcaaaattaatgccagaataactatcatccaagtgcttttagtagaatcagcaccaatggaataatgttgcagcctttactagaatttgtacctttgtatacagaagagtttggataatagtaataaaaaataaataaaaaacatcccagtcctgttactttatctgaggctgtatatgctggttaatctctaagctcctttttcctggcatcttccctctgaactcaaagcaggtgagagtggagcaagggatccggtgtgtggttcaggggagttgggaaggggatttttttttttttttatttctagtccactgggtattttctttcactagccccaatatattggaaaagaacatgtttatagccagtattggaagaacttttatttctgttaagattcggaaacttagctttcaatcatttgtttactgattctaaaagggtaaaaagacaaggagaacctggagaacagacattttccgmtttgccttagaggtggtaacattatgaggttacagatgagtcctcactgcgggaagctcatggagggagtaccttttgatttcctgggcagtggatagaaaagcatggcacatgaccttggcaaaaatttttttttcaccttattaaaaaaagaccactgtgggaggccaaggcaggcggatcacctgaggtcaggagttcaagaccagcctgaccaacatggagaaaccccatttctactaaaaatacaaaattagcagggtatggtggcacatgcctgtaatcccagctactcgggaggctggggcaggagaatcgcttgaacccggaaggtggaggctgcagtgagctgagactgcgccattggactctagcctgggcaacaagagtgaaactccatctgaaaaaaaaaacaaaacacacatgacttcatggaaagaacgctacaacttccaacaggaatgcgttttggtgtgaaaggtgaaaacgtgacgaatccccactgcctcctaaccccctacatccattggttgcccagaagcacaggac

SEQ ID NO: 79330 - DNA, 1088 bp, Homo sapiens
atctacaaacacttcccccgatacttatattcaattgcattgccttgttgcatgcaaaattaatgccagaataactatcatccaagtgcttttagtagaatcagcaccaatggaataatgttgcagcctttactagaatttgtacctttgtatacagaagagtttggataatagtaataaaaaataaataaaaaacatcccagtcctgttactttatctgaggctgtatatgctggttaatctctaagctcctttttcctggcatcttccctctgaactcaaagcaggtgagagtggagcaagggatccggtgtgtggttcaggggagttgggaaggggatttttttttttttttatttctagtccactgggtattttctttcactagccccaatatattggaaaagaacatgtttatagccagtattggaagaacttttatttctgttaagattcggaaacttagctttcaatcatttgtttactgattctaaaagggtaaaaagacaaggagaacctggagaacagacattttccgctttgccttagaggtggtaacattatgaggttacagatgagtcctcactgcgggaagctcatggagggagtrccttttgatttcctgggcagtggatagaaaagcatggcacatgaccttggcaaaaatttttttttcaccttattaaaaaaagaccactgtgggaggccaaggcaggcggatcacctgaggtcaggagttcaagaccagcctgaccaacatggagaaaccccatttctactaaaaatacaaaattagcagggtatggtggcacatgcctgtaatcccagctactcgggaggctggggcaggagaatcgcttgaacccggaaggtggaggctgcagtgagctgagactgcgccattggactctagcctgggcaacaagagtgaaactccatctgaaaaaaaaaacaaaacacacatgacttcatggaaagaacgctacaacttccaacaggaatgcgttttggtgtgaaaggtgaaaacgtgacgaatccccactgcctcctaaccccctacatccattggttgcccagaagcacaggac

SEQ ID NO: 79331 - DNA, 1820 bp, Homo sapiens
  misc_feature (1)...(1820): n = A,T,C or G
acagaaaagtacataaaattttcaactcagtaatctattattacagtgtaaccaccatccaggtcaataaatagaatattgccatcactccagaagcgcctcttgtgcaccctcctaatcaccacccctttcctaactccaaccctaaggatagccactatcctgattaatggtaatcacttgtatttagacgtttgccatctcagcatgtgttcctgaatactataattcaatttgcctctattttggactttaattaaagtgaatctttaggtacgtgctttttattgtctgacttctcttaaaattttgtgaaatttaaccgtgttgttacatgtaactattttgttccttttcattgttttatagtagtccatggtataaacataccacaatttacccattctactgttgatgaatattttagtatacaatttggggcttcttacaaataatactgctgtgaatatttttgcatgtgtttcttgttcttttgcagggatttctgttaagtgtatgcctagaggtggaattactagatcatagaataagcgtgttttcagctttagtggataatgccaaaaatgttttccaaaaacgttgtacaaatttatactcctatcagcagtctgagaattcctgttgttccacatccttgtcaccctctggtattagtctgtttcattttaggcattctagtatgcaatatcttagtgtgacttaaattttcatttttctgattactagtaaggttgaacatctttttatgtgtttattgtcatatcttctccctctctgtggcttatttcttattttaatcttctttgaaattactaatttaatataatccatattatccaatctttatgtcctgtttaagaattgtatttttatgccaaagttaaatgtttctcctatatcatcttctggagactttgttgttttacctttcacatttacttctatagtccatctggaattaactttgtgtgtggtgtgaggtgggagttaactttcaggtcttcttttttccagtcaagacaggcccatttattgaaaagattgttctttcctcactgctccgccgggccagtttatcaagaatacataaatacaggcaacaaataaatatgcatgtattatttatgttgatatacaactgtwtaatgttgatgtatagatacaaatacatgtctgtttatagactttatttttataacagtatcacagttttttaatcgtcacagccttagtataaaagcttagtttggtagcttacaatgagaccctggtgtcaatatccagaaagcaagcctgtccaccttattgtttttcttcaagattattattcttggctccttgtgtatctaacaacattttagaatccgatgggcagctaacaggacattcagagacagcagtagccatattggccttggtaagcatgggagctcattatatagcctttatttctgtcactgtgaccactctgttcatgtgccctcatgcaagttatcttggccttaacagagcacacctgcttcaactgagcatttaaatgtctctagaactctctgatgaacagatcttcagtcagctgctcagttttatctgctcttccatagccagaaagaagggtctcgttgtaagctaccaaactaagcttttatacttagactttaactgcctgttaacagctctcactttctcattatnnnnnnnnnnnnnnnnnnnnnnnnnnnnnnnnnnnnnnnnnnnnnnnnnnnnnnnnnnnnnnnnnnnnnnnnnnnnnnnnnnnnnnnnnnnnnnnnnnnncacat

SEQ ID NO: 79332 - DNA, 564 bp, Homo sapiens
tgccgttgcactccagcctgggcaacaagagcaaacctctgtctaaaacaaacaaacaaaaaggtctagccccctctcctcctttgtctgccatcatggtgtgtgcttgactccacttcttgtcatgtcttctcacaagactttcaggattaagcggtttctggccaacaaccaaaagtaaaatcgtccgatttcccagtggattcgaatgaaaactggcaataaaatcaggtccaactttaaaaggagacattggagaagaaccaagctgggtctataaggaattgcacgtgagatggcacacatatttatgctgtgtgagcatcataatcacgttacttaagctgaaaatgtcactaccatctggagacttggacatgttttattgggaatatattttttyctctctgaatctgttatgaacgcattggttgggtgggttcagtaataaacatgggagacctttcatttcaaaaaaaaaattttaatgacataatagattacctaaatttctgttttgctttgttttgttttttgagatggagactccactcggttcagtgg

SEQ ID NO: 79333 - DNA, 564 bp, Homo sapiens
tgccgttgcactccagcctgggcaacaagagcaaacctctgtctaaaacaaacaaacaaaaaggtctagccccctctcctcctttgtctgccatcatggtgtgtgcttgactccacttcttgtcatgtcttctcacaagactttcaggattaagcggtttctggccaacaaccaaaagtaaaatcgtccgatttcccagtggattcgaatgaaaactggcaataaaatcaggtccaactttaaaaggagacattggagaagaaccaagctgggtctataaggaattgcacgtgagatggcacacatatttatgctgtgtgagcatcataatcacgttacttaagctgaaaatgtcactaccatctggagacttggacatgttttattgggaatatatttttttctctctgaatctgttatgaacgcattggttgggtgggttcagtaataaacatgkgagacctttcatttcaaaaaaaaaattttaatgacataatagattacctaaatttctgttttgctttgttttgttttttgagatggagactccactcggttcagtgg

SEQ ID NO: 79334 - DNA, 950 bp, Homo sapiens
atttcaagggagctacaagaacggggttgtgttgctgaccatgtcacttggtaatccttcctagacagcggtatgtccaccatcgtacagagcagacatcggtttaggctgtgttctgagaaagccgtcctacagataagcaagtgtctttccttacatggtgagagtagcatggggactgagtactgtggatattgaggtggtcagaaatacaaagattaatatgttaagaagtgacagtaggccgggagcagtggctcatgcctgtaatcccaacactttgggaggcccaggcaggtggatcacctgaagtcaggagttcaaacacagcctggccaacatggtgaaaccctgtctctactaaaaatacaaaaattagctgggcatggtggcatgtgactgcagtcccagctacttgggaggctgaggcaggagaattgcttgaaccccagaggtggaggttacagtgaaccgagatcgtgtcactgcactccagcctgggcaacagagtgagaytgtctcaaaaaaaaaaaaaaaaaaaaaaaaaaaaattcccacccatcttattttcacttcatgctacacagtccagggctctttgccttgctccaacaggttagaaagagactcctgcttataaaaagtaggaaacatgacatgttggaagttttctagatccccagccctatgtttctgtaggaaagaagacattacagatggacttaggaaaatatttcacaaattcctccactgactgcctccttctgaatctttaaagagcactgtaatatgtggacactgagctctcttcccagaactactgaatcaaaagcacaggagtagcaaatagggaactggatatctttaaagtctgccatgaggttttgttttgtttttgttttttgagacagaatcttgctctgttacccgggctggagtgcagtcatgca

SEQ ID NO: 79335 - DNA, 1294 bp, Homo sapiens
ttctactagaatatatatattctagtagaatatgtacatgtatacatggagagaaagacacagagatggactcaaacacaataaaatttgtttctcactctctaatagtttgagacagacgtcttctttatcagcagggagttgtcttttacatggtgattcagttgataatctttccatcttgtggctccctgctctcctagatatcttatcatcatctccattcactaggcagaaggggagagagtgwggaggagcccatataggaagttttgtgggccttgcctggagctatcactcacagttcattggttagaatgaagtcacacgcccatacctaactgcaagacaggcttagaaatgtagtctagctctgggtccaggaaaaagaggaaacatgtattggtgaacagccagcaatatctaccatatcgaaattttctgtatcttgcctggcataaattattgtaattctcttctagcattttcttaagcataggaagtcacactttctaaatcaaagacactccactgagaaataaaatgtgactcatgctatttactactcccttagaaccataccaagccattctgtcctgctgtggtttgatctctatactactttccttatttgaattctgaatgctgtattatcagtttgggcttttgtttgtgtgtgttttcttactagatcaaaagattaaaaagataattatgatttcattcataagctataggaatttaaacatcttactttatacaggatttctttcagaaataatatcaaaaaagaaattggaatctgtttttgaaaaatgcaagacttatctgtctgtacttctgacaaataaacaaggactaagaaaatattgatcgtgtcatatgaaagccataaaagaaaacgtctctctccaagtggcttacatagtttatgacaaacctttaacccgaaactaaatacatctctaaaaattagcagcattttctaggtgtgagcgtgacccattttaatcagcacacagaagaaatttttatgaagtcagaatgtttttatgctagtacatttccctttagctaattagactttatttctgaacctatgacgcgtgctctaaaaattctaaactattcataaaatatatttgaagaacagattgaggtttcattatttataactcagtcaagataccaaactggctagattgtaaacctgctgatacagtagcttttcttcaccactctttgagttgttgctactcaagtttctaatttatgtgcaaattgaatttgccta

SEQ ID NO: 79336 - DNA, 1553 bp, Homo sapiens
cactattcacaataataaagacattgaatcaacctaaatatccataaatggcaggttggataaagaaaacgtggtacatatacaccatggaatactatacagccatgagaaagaatttgaaaatgtcttttgcaggaacatggatggagctggaggctattacccttagcaaacaggataatgcaggaacagaaaaccaaatactgcatgttctcacttataattgggagttaaatgataagaacctatgaacacaaagaaggaaacagacactgggggctacttgaggggggagggggagagagaaagaggaacagaaaagataactattgggtactgggcttaattcctgggtgatgaaataatatgtacaacaaacaccccatgacacatgtttatctacgtaacaaatcttcatatgtacccccgaaccttaaataaaagttataaaaagagaattaaaaaatagaaaaaagtaacaatgaaatggaatatggcataatcaggaactaccctggacaaatggaatacatggtcaccctacaaaagtaacacatgatactatgagtcagagtacagaccctcactggtcacactgaagacatgtttagtaagactgcacacacatttgtgatgctaaaatgtcaaaattaaatgtgacaggaatattggagaagaatcaaaacctgaaatgtgatattttatatctaactgtatatcatcatttggyatattaaaaaattctattatgtattcatcttatttgtattttaccctatcagatgagattatttttaaaaatagtatcctaaaaaaaggtgcctatttggagcttgcagtgagccaagattgcaccactgcactccagcctggggcgacagtgcgagactccatctcaaaaaaaaaaaaaaaaaagtgcctattttgatgcattttcaaagaggtgattttcaaaaaggaatctctgtccttgacagtagatagtttagatatatcatttttgttctccatgcctttaattttcacctctgtgtaacattaaagtttgtatacgaaatgactattagataaatacccttgtaaataagcatgccttgaatctcaatgcttgaggattccttattagaaattgaaatgataattgtatggctggctcgaatgtaggcttcgaaacacataagcgatactgattctcagcctagggaaggattctacattcaggctgggattctgcagagataagagcagctatcaattgatgatgtctactctaagtgtaggacggagaagctcctgagagctcatgtgccacatatttgctggtcttgttctgttaaagtcctaatacaataccccatcattcaacgtcctctctacaaacttgcttttcaagatttatatcctaaacaaccaccccaactaaacttctactctaactagtctgataaatttattgtcccctgaaaaatcttatttcattccttacatttcttaagtagatttcccaagaaagagactgtaagactgaaattcgcacgtaggaagtttgatgg

SEQ ID NO: 79337 - DNA, 2331 bp, Homo sapiens
ccctatccacttctttttgtaagacttgatctgcatggagggtttgttttgaataaaaacctagggagggtgtctagcacctgggatgcagagatggataagtagaaaagcacaagccataaaagcaacagcactgagttagttstcatttggtcccataagccccctgacctttataggagttagaaccaaaagtttagggagatattttcaagagtggttttatgatacttgctattcaaatagtgcagtttctagagctgatgtgatgcccagtgacacaagttagagagcatgtcttctcctcaactgtcctgcaagcttctatgtagcctttgcactccaaccagaaggatcagtgatggcattcaaaggttgagtagtcccatggagggccctggcagccactgaaaaggtgggactatttttcaagtgtcctgcagacatcaatgaagaacctagaacagaaaacatgaatgaacaattcatgagcacatttgagcaacacttaagacttccacgtggctttcatttttctctgaggagatgactgggtttataacttgattaatggggaaatgggaggaaggaatacagtttcccagttactgaaactcatgcatggattttagtgtgaacaaatttgaaaatttcaggttcacctgaaagttatcacacaatgctttggagagatttaactgtttatgtgtgtatctttgctttctaactagattacaataactctgcaggtaaggaccatgtctttccctcacaaatatttaatgattaattcatacattgatggcagcggatctcctgggtcctgaagtaggtaattttatttacctgattcttatttgcagaccagggcttggtgagcatagaatcataaagcggtcttttctcattagtcaccacccagtgactactgtctttttccaccagcctttttcttttaagatcagagtccctatgcttttgtttgtcttctaaatgtctcatgtttctgtcttcacttcttccaacactggtgattacctcattgtggtcttgacctattcctccatcaaaacctacatggcttataggatcactgagttctcagacactgatgacattaacccagttttcatagggtatttaacatgtttgaaccacagacaagaaagagaattaaatataggccctagcctgtgctactttttaatcttcttgcattatgctcttagatttctgggttttccctaagtgttttggcaataaaactgaaagctgataagacattagttggtgcagtcccaaatattttcaaacagtgaatatgaaaaataagaggtcaggtgaatcaattagtctgagataattttatgggattactcattgtattacaggttggttggttattccactatattttattgctctcttttcccaaacatagaaaattctcactatacaaagtctgttcaatctaaacttcaaaaatgacctccaacatacatactttgttcaagatgcaggaaccatttcctgaattttaactgggccaaagagacatatgtgtatgcatatccatgatattctcataaatacataatatgttacatatacaaatgttttatacttttttcataatgaacaatgtgtagacaaacatagagactaagacaagtgcaaacataaataggagagggttcaaaatcaaatctatggagaaagtggagagtgtttttaggtgtcagtaatttgcttggtaacaggatctctatgcttagaacttttcctgtgtacttaaatgagaatttttgactggatgatccagactattatatcaccattttcttcttttttgatgaagatagaggcttagaaatacaaaagagaacaggaaatctccttaaaaaaaattacagcattgtcttgcatagactgtaaccactccctgaactaccaactcagtgagcgctatgaaaccatcttacaaggaaataccctattctctgcaactcagaaagcatcttgatcatcagttatcctctagctgagttccttatctgacccaagtcttctttctgcaaaccttttgttcaggcattttctttctactactacttactaaaattgagaaggtcaaagtgcaagtggtaattgctcttggcactttagaaaatggttttctttccatacctatgattttctttaaagccttcttctgctgagtctctatcagttgttctttgtactgtagatcaacacattcgggacccctctacctcctaagtccctttctggtattggggagtttaaaattcagtgaagtagcccaatgta

SEQ ID NO: 79338 - DNA, 2331 bp, Homo sapiens
ccctatccacttctttttgtaagacttgatctgcatggagggtttgttttgaataaaaacctagggagggtgtctagcacctgggatgcagagatggataagtagaaaagcacaagccataaaagcaacagcactgagttagttctcatttggtcccataagccccctgacctttataggagttagaaccaaaagtttagggagatattttcaagagtggttttatgatacttgctattcaaatagtgcagtttctagagctgatgtgatgcccagtgacacaagttagagagcatgtcttctcctcaactgtcctgcaagcttctatgtagcctttgcactccaaccagaaggatcagtgatggcattcaaaggttgagtagtcccatggagggccctggcagccactgaaaaggtgggactatttttcaagtgtcctgcagacatcaatgaagaacctagaacagaaaacatgaatgaacaattcatgagcacatttgagcaacacttaagacttccacgtggctttcatttttctctgaggagatgactgggtttataacttgattaatggggaaatgggaggaaggaatacagtttcccagttactgaaactcatgcatggattttagtgtgaacaaatttgaaaatttcaggttcacctgaaagttatcacacaatgctttggagagatttaactgtttatgtgtgtatctttgctttctaactagattacaataactctgcaggtaaggaccatgtctttccctcacaaatatttaatgattaattcatacattgatggcagcggatctcctgggtcctgaagtaggtaattttatttacctgattcttatttgcagaccagggcttggtgagcatagaatcataaagcggtsttttctcattagtcaccacccagtgactactgtctttttccaccagcctttttcttttaagatcagagtccctatgcttttgtttgtcttctaaatgtctcatgtttctgtcttcacttcttccaacactggtgattacctcattgtggtcttgacctattcctccatcaaaacctacatggcttataggatcactgagttctcagacactgatgacattaacccagttttcatagggtatttaacatgtttgaaccacagacaagaaagagaattaaatataggccctagcctgtgctactttttaatcttcttgcattatgctcttagatttctgggttttccctaagtgttttggcaataaaactgaaagctgataagacattagttggtgcagtcccaaatattttcaaacagtgaatatgaaaaataagaggtcaggtgaatcaattagtctgagataattttatgggattactcattgtattacaggttggttggttattccactatattttattgctctcttttcccaaacatagaaaattctcactatacaaagtctgttcaatctaaacttcaaaaatgacctccaacatacatactttgttcaagatgcaggaaccatttcctgaattttaactgggccaaagagacatatgtgtatgcatatccatgatattctcataaatacataatatgttacatatacaaatgttttatacttttttcataatgaacaatgtgtagacaaacatagagactaagacaagtgcaaacataaataggagagggttcaaaatcaaatctatggagaaagtggagagtgtttttaggtgtcagtaatttgcttggtaacaggatctctatgcttagaacttttcctgtgtacttaaatgagaatttttgactggatgatccagactattatatcaccattttcttcttttttgatgaagatagaggcttagaaatacaaaagagaacaggaaatctccttaaaaaaaattacagcattgtcttgcatagactgtaaccactccctgaactaccaactcagtgagcgctatgaaaccatcttacaaggaaataccctattctctgcaactcagaaagcatcttgatcatcagttatcctctagctgagttccttatctgacccaagtcttctttctgcaaaccttttgttcaggcattttctttctactactacttactaaaattgagaaggtcaaagtgcaagtggtaattgctcttggcactttagaaaatggttttctttccatacctatgattttctttaaagccttcttctgctgagtctctatcagttgttctttgtactgtagatcaacacattcgggacccctctacctcctaagtccctttctggtattggggagtttaaaattcagtgaagtagcccaatgta

SEQ ID NO: 79339 - DNA, 2331 bp, Homo sapiens
ccctatccacttctttttgtaagacttgatctgcatggagggtttgttttgaataaaaacctagggagggtgtctagcacctgggatgcagagatggataagtagaaaagcacaagccataaaagcaacagcactgagttagttctcatttggtcccataagccccctgacctttataggagttagaaccaaaagtttagggagatattttcaagagtggttttatgatacttgctattcaaatagtgcagtttctagagctgatgtgatgcccagtgacacaagttagagagcatgtcttctcctcaactgtcctgcaagcttctatgtagcctttgcactccaaccagaaggatcagtgatggcattcaaaggttgagtagtcccatggagggccctggcagccactgaaaaggtgggactatttttcaagtgtcctgcagacatcaatgaagaacctagaacagaaaacatgaatgaacaattcatgagcacatttgagcaacacttaagacttccacgtggctttcatttttctctgaggagatgactgggtttataacttgattaatggggaaatgggaggaaggaatacagtttcccagttactgaaactcatgcatggattttagtgtgaacaaatttgaaaatttcaggttcacctgaaagttatcacacaatgctttggagagatttaactgtttatgtgtgtatctttgctttctaactagattacaataactctgcaggtaaggaccatgtctttccctcacaaatatttaatgattaattcatacattgatggcagcggatctcctgggtcctgaagtaggtaattttatttacctgattcttatttgcagaccagggcttggtgagcatagaatcataaagcggtcttttctcattagtcaccacccagtgactactgtctttttccaccagcctttttcttttaagatcagagtccctatgcttttgtttgtcttctaaatgtctcatgtttctgtcttcacttcttccaacactggtgattacctcattgtggtcttgacctattcctccatcaaaacctacatggcttataggatcactgagttctcagacactgatgacattaacccagttttcatagggtatttaacatgtttgaaccacagacaagaaagagaattaaatataggccctagcctgtgctactttttaatcttcttgcattatgctcttagatttctgggttttccctaagtgttttggcaataaaactgaaagctgataagacattagttggtgcagtcccaaatattttcaaacagtgaatatgaaaaataagaggtcaggtgaatcaattagtctgakataattttatgggattactcattgtattacaggttggttggttattccactatattttattgctctcttttcccaaacatagaaaattctcactatacaaagtctgttcaatctaaacttcaaaaatgacctccaacatacatactttgttcaagatgcaggaaccatttcctgaattttaactgggccaaagagacatatgtgtatgcatatccatgatattctcataaatacataatatgttacatatacaaatgttttatacttttttcataatgaacaatgtgtagacaaacatagagactaagacaagtgcaaacataaataggagagggttcaaaatcaaatctatggagaaagtggagagtgtttttaggtgtcagtaatttgcttggtaacaggatctctatgcttagaacttttcctgtgtacttaaatgagaatttttgactggatgatccagactattatatcaccattttcttcttttttgatgaagatagaggcttagaaatacaaaagagaacaggaaatctccttaaaaaaaattacagcattgtcttgcatagactgtaaccactccctgaactaccaactcagtgagcgctatgaaaccatcttacaaggaaataccctattctctgcaactcagaaagcatcttgatcatcagttatcctctagctgagttccttatctgacccaagtcttctttctgcaaaccttttgttcaggcattttctttctactactacttactaaaattgagaaggtcaaagtgcaagtggtaattgctcttggcactttagaaaatggttttctttccatacctatgattttctttaaagccttcttctgctgagtctctatcagttgttctttgtactgtagatcaacacattcgggacccctctacctcctaagtccctttctggtattggggagtttaaaattcagtgaagtagcccaatgta

SEQ ID NO: 79340 - DNA, 2331 bp, Homo sapiens
ccctatccacttctttttgtaagacttgatctgcatggagggtttgttttgaataaaaacctagggagggtgtctagcacctgggatgcagagatggataagtagaaaagcacaagccataaaagcaacagcactgagttagttctcatttggtcccataagccccctgacctttataggagttagaaccaaaagtttagggagatattttcaagagtggttttatgatacttgctattcaaatagtgcagtttctagagctgatgtgatgcccagtgacacaagttagagagcatgtcttctcctcaactgtcctgcaagcttctatgtagcctttgcactccaaccagaaggatcagtgatggcattcaaaggttgagtagtcccatggagggccctggcagccactgaaaaggtgggactatttttcaagtgtcctgcagacatcaatgaagaacctagaacagaaaacatgaatgaacaattcatgagcacatttgagcaacacttaagacttccacgtggctttcatttttctctgaggagatgactgggtttataacttgattaatggggaaatgggaggaaggaatacagtttcccagttactgaaactcatgcatggattttagtgtgaacaaatttgaaaatttcaggttcacctgaaagttatcacacaatgctttggagagatttaactgtttatgtgtgtatctttgctttctaactagattacaataactctgcaggtaaggaccatgtctttccctcacaaatatttaatgattaattcatacattgatggcagcggatctcctgggtcctgaagtaggtaattttatttacctgattcttatttgcagaccagggcttggtgagcatagaatcataaagcggtcttttctcattagtcaccacccagtgactactgtctttttccaccagcctttttcttttaagatcagagtccctatgcttttgtttgtcttctaaatgtctcatgtttctgtcttcacttcttccaacactggtgattacctcattgtggtcttgacctattcctccatcaaaacctacatggcttataggatcactgagttctcagacactgatgacattaacccagttttcatagggtatttaacatgtttgaaccacagacaagaaagagaattaaatataggccctagcctgtgctactttttaatcttcttgcattatgctcttagatttctgggttttccctaagtgttttggcaataaaactgaaagctgataagacattagttggtgcagtcccaaatattttcaaacagtgaatatgaaaaataagaggtcaggtgaatcaattagtctgagataattttatgggattactcattgtattayaggttggttggttattccactatattttattgctctcttttcccaaacatagaaaattctcactatacaaagtctgttcaatctaaacttcaaaaatgacctccaacatacatactttgttcaagatgcaggaaccatttcctgaattttaactgggccaaagagacatatgtgtatgcatatccatgatattctcataaatacataatatgttacatatacaaatgttttatacttttttcataatgaacaatgtgtagacaaacatagagactaagacaagtgcaaacataaataggagagggttcaaaatcaaatctatggagaaagtggagagtgtttttaggtgtcagtaatttgcttggtaacaggatctctatgcttagaacttttcctgtgtacttaaatgagaatttttgactggatgatccagactattatatcaccattttcttcttttttgatgaagatagaggcttagaaatacaaaagagaacaggaaatctccttaaaaaaaattacagcattgtcttgcatagactgtaaccactccctgaactaccaactcagtgagcgctatgaaaccatcttacaaggaaataccctattctctgcaactcagaaagcatcttgatcatcagttatcctctagctgagttccttatctgacccaagtcttctttctgcaaaccttttgttcaggcattttctttctactactacttactaaaattgagaaggtcaaagtgcaagtggtaattgctcttggcactttagaaaatggttttctttccatacctatgattttctttaaagccttcttctgctgagtctctatcagttgttctttgtactgtagatcaacacattcgggacccctctacctcctaagtccctttctggtattggggagtttaaaattcagtgaagtagcccaatgta

SEQ ID NO: 79341 - DNA, 641 bp, Homo sapiens
aaaaggacgcttgtcatcagcatccttttctactattggtcatcactgatctcatttctaacaaagatgagtcatttccaagatgatgatcaaattcacaattataccataaattttatgtccattatagtgttaatggacctttggattatgtctaggttttaagtgttacaaatgatgcttctataaaaattccaggacatgtctttcggttctcatataaacgtactcttgttgacatacaccaatgaatagaattgctggattagaggatattaatattctcagcttgagaaagtgctctcacagttaccacagtgatgttaaaaatttttattccttttatcaatagatgagagtgtggattgcttctctttcccaccaacattattttctacatctttctattttagacattctggttgggttataatggtattggcttataacatgaatttgcattttccaataaataatgtaatggtattggcttataatawgaatttgcatttctaataaataataattccaacagaatagtctattttgacataatgtttctaattaactgttgtgcactgttcaggtttattattaaaatttagtttcatttcttctgtgtttttaaaaaatctagggac

SEQ ID NO: 79342 - DNA, 1336 bp, Homo sapiens
tgcatttttaaatactacagttttatttcataaattttagtggaatcatagactaggtattcgtttgtatctggcatatttcgaatattcgtttcaaatattcctaaatgttattgtgtgtaacactttttcattaactttcagggtcgtatagtatagatgtaccataatttgtctatttcactgatgatcaacatatggaatgagttctcactttgcaatattataatgctgtataaaattcttgtgtataccctgtttacacacatgtgcatccatttctcatgtctgcagagaaaaattataggatcattagatatacagatccatgtttagaaggcaatgactattaggtctacttaagtcaaatttttaaatcgtgttatttacagatctgtattcttatgattttttttctttttgttactgagagaaatgagaaaattctcccaccatgacttcagacctatctatttctcatctaatttttcccaatttctggctgttccgatttcttgccctcttcctaatttttcttgtgagttttgattaaagatctctgaagaagaacatgtstgtggatgtaaacttcccatgggtttacagtctcaggctttcccggcctttaacagcatattcaaaaatttaactatttttacctgtttaccaggcacctctgctttcctcccaagctctgccacagttggacaaataattatctcctgtctttctttggaggtgctctttcctaaactcatgtctactttttcttttctatttttttttcttttatttttagagatgggatctctcttctgtcactcaggctggagcatagtggtgtaatcaatgatagttcactgcagccttgaactcctgggctcaagggatcctcctatctcagcttcctgagtagtcgggactaaaggtatgcacacccatgttccgtgttctgctaattgttttttttgtttttttgttttttttttttgagagccagggtctcactttatagccctggctggtctcaaactcctgccttcaggaaattctcccacctcggcctcccagagtgttagtattataggcgtgagccaccttatttttttcctgaaaaaaatatgatgtacacgttttgatatatgtatacattggggaatggataaatcaagttaaataatattgctggccctcattctttttctttaaattcccaaaagtttctctttcccatacacatgcttttggtgtttttgttttcaatgttttctgaattaatttatataatccttttctgtcttctattttgtctattaagatttttattagtatttac

SEQ ID NO: 79343 - DNA, 1336 bp, Homo sapiens
tgcatttttaaatactacagttttatttcataaattttagtggaatcatagactaggtattcgtttgtatctggcatatttcgaatattcgtttcaaatattcctaaatgttattgtgtgtaacactttttcattaactttcagggtcgtatagtatagatgtaccataatttgtctatttcactgatgatcaacatatggaatgagttctcactttgcaatattataatgctgtataaaattcttgtgtataccctgtttacacacatgtgcatccatttctcatgtctgcagagaaaaattataggatcattagatatacagatccatgtttagaaggcaatgactattaggtctacttaagtcaaatttttaaatcgtgttatttacagatctgtattcttatgattttttttctttttgttactgagagaaatgagaaaattctcccaccatgacttcagacctatctatttctcatctaatttttcccaatttctggctgttccgatttcttgccctcttcctaatttttcttgtgagttttgattaaagatctctgaagaagaacatgtctgtggatgtaaacttcccatgggtttacagtctcaggctttccyggcctttaacagcatattcaaaaatttaactatttttacctgtttaccaggcacctctgctttcctcccaagctctgccacagttggacaaataattatctcctgtctttctttggaggtgctctttcctaaactcatgtctactttttcttttctatttttttttcttttatttttagagatgggatctctcttctgtcactcaggctggagcatagtggtgtaatcaatgatagttcactgcagccttgaactcctgggctcaagggatcctcctatctcagcttcctgagtagtcgggactaaaggtatgcacacccatgttccgtgttctgctaattgttttttttgtttttttgttttttttttttgagagccagggtctcactttatagccctggctggtctcaaactcctgccttcaggaaattctcccacctcggcctcccagagtgttagtattataggcgtgagccaccttatttttttcctgaaaaaaatatgatgtacacgttttgatatatgtatacattggggaatggataaatcaagttaaataatattgctggccctcattctttttctttaaattcccaaaagtttctctttcccatacacatgcttttggtgtttttgttttcaatgttttctgaattaatttatataatccttttctgtcttctattttgtctattaagatttttattagtatttac

SEQ ID NO: 79344 - DNA, 1336 bp, Homo sapiens
tgcatttttaaatactacagttttatttcataaattttagtggaatcatagactaggtattcgtttgtatctggcatatttcgaatattcgtttcaaatattcctaaatgttattgtgtgtaacactttttcattaactttcagggtcgtatagtatagatgtaccataatttgtctatttcactgatgatcaacatatggaatgagttctcactttgcaatattataatgctgtataaaattcttgtgtataccctgtttacacacatgtgcatccatttctcatgtctgcagagaaaaattataggatcattagatatacagatccatgtttagaaggcaatgactattaggtctacttaagtcaaatttttaaatcgtgttatttacagatctgtattcttatgattttttttctttttgttactgagagaaatgagaaaattctcccaccatgacttcagacctatctatttctcatctaatttttcccaatttctggctgttccgatttcttgccctcttcctaatttttcttgtgagttttgattaaagatctctgaagaagaacatgtctgtggatgtaaacttcccatgggtttacagtctcaggctttcccggcctttaacagcatattcaaaaatttaactatttttacctgtttaccaggcacctctgctttcctcccaagctctgccacagttggacaaataattatctcctgtctttctttggaggtgctctttcctaaactcatgtctactttttcttttctatttttttttcttttatttttagagatgggatctctcttctgtcactcaggctggagcatagtggtgtaatcaatgatagttcactgcagccttgaactcctgggctcaagggatcctcctatctcagcttcctgagtagtcgggactaaaggtatgcacacccatgttccgtgttctgctaattgttttttttgtttttttgttttttttttttgagagccagggtctcactttatagccctggctggtctcaaactcctgccttcaggaaattctcccacctcggcctcccagagtgttagtattataggcgtgagccaccttatttttttmctgaaaaaaatatgatgtacacgttttgatatatgtatacattggggaatggataaatcaagttaaataatattgctggccctcattctttttctttaaattcccaaaagtttctctttcccatacacatgcttttggtgtttttgttttcaatgttttctgaattaatttatataatccttttctgtcttctattttgtctattaagatttttattagtatttac

SEQ ID NO: 79345 - DNA, 1336 bp, Homo sapiens
tgcatttttaaatactacagttttatttcataaattttagtggaatcatagactaggtattcgtttgtatctggcatatttcgaatattcgtttcaaatattcctaaatgttattgtgtgtaacactttttcattaactttcagggtcgtatagtatagatgtaccataatttgtctatttcactgatgatcaacatatggaatgagttctcactttgcaatattataatgctgtataaaattcttgtgtataccctgtttacacacatgtgcatccatttctcatgtctgcagagaaaaattataggatcattagatatacagatccatgtttagaaggcaatgactattaggtctacttaagtcaaatttttaaatcgtgttatttacagatctgtattcttatgattttttttctttttgttactgagagaaatgagaaaattctcccaccatgacttcagacctatctatttctcatctaatttttcccaatttctggctgttccgatttcttgccctcttcctaatttttcttgtgagttttgattaaagatctctgaagaagaacatgtctgtggatgtaaacttcccatgggtttacagtctcaggctttcccggcctttaacagcatattcaaaaatttaactatttttacctgtttaccaggcacctctgctttcctcccaagctctgccacagttggacaaataattatctcctgtctttctttggaggtgctctttcctaaactcatgtctactttttcttttctatttttttttcttttatttttagagatgggatctctcttctgtcactcaggctggagcatagtggtgtaatcaatgatagttcactgcagccttgaactcctgggctcaagggatcctcctatctcagcttcctgagtagtcgggactaaaggtatgcacacccatgttccgtgttctgctaattgttttttttgtttttttgttttttttttttgagagccagggtctcactttatagccctggctggtctcaaactcctgccttcaggaaattctcccacctcggcctcccagagtgttagtattataggcgtgagccaccttatttttttcctgaaaaaaatatgatgtacacgttttgatatatgtatacattggggaatggataaatcaagttaaataatattgctggccctcattctttytctttaaattcccaaaagtttctctttcccatacacatgcttttggtgtttttgttttcaatgttttctgaattaatttatataatccttttctgtcttctattttgtctattaagatttttattagtatttac

SEQ ID NO: 79346 - DNA, 714 bp, Homo sapiens
gcattctctacaatgccatatgactattttctaataggtatatttacacatacatattatatgccattctaatttgtaaataccttttgttggcacaacatgtttacattcatgatctcatgtgcccatcacagaagttgagaacaccaagcatttctatcattattttttttttttccagaggaataaatggtcacaaagaggttaatttgctgagtcacttagttactaataaaatggagatgggtgttcaaagttggtttgcatcactccaaaacccattgtgataaaactwcctcttttcaaaccacggaaagagaaaatctttgtcttaattcaaatttcattactgtcttctagacatatcagtgtaaagtaaaaaaatcttcttcatccttatcaatttagaaaaacagtcaaaataatctttgtttagacatattcaagtgaaatcagtcccgtgtatgtatttgtattttatatacaaacataatctcaagtttaatttacctgttcattgtctttaagtggaaaaaagttatctatcttagaagggatagatgtattagcaaactatatcttgagaaataaaccttatagttttggagacatatgtagcatttaagaactacatcttgaatgatgctatgtttcatcctcttatcaaaaatcttttttttttttttgagacagtctcactctgttgcccaggtt

SEQ ID NO: 79347 - DNA, 714 bp, Homo sapiens
gcattctctacaatgccatatgactattttctaataggtatatttacacatacatattatatgccattctaatttgtaaataccttttgttggcacaacatgtttacattcatgatctcatgtgcccatcacagaagttgagaacaccaagcatttctatcattattttttttttttccagaggaataaatggtcacaaagaggttaatttgctgagtcacttagttactaataaaatggagatgggtgttcaaagttggtttgcatcactccaaaacccattgtgataaaacttcctcttttcaaaccacggaaagagaaaatctttgtctyaattcaaatttcattactgtcttctagacatatcagtgtaaagtaaaaaaatcttcttcatccttatcaatttagaaaaacagtcaaaataatctttgtttagacatattcaagtgaaatcagtcccgtgtatgtatttgtattttatatacaaacataatctcaagtttaatttacctgttcattgtctttaagtggaaaaaagttatctatcttagaagggatagatgtattagcaaactatatcttgagaaataaaccttatagttttggagacatatgtagcatttaagaactacatcttgaatgatgctatgtttcatcctcttatcaaaaatcttttttttttttttgagacagtctcactctgttgcccaggtt

SEQ ID NO: 79348 - DNA, 714 bp, Homo sapiens
gcattctctacaatgccatatgactattttctaataggtatatttacacatacatattatatgccattctaatttgtaaataccttttgttggcacaacatgtttacattcatgatctcatgtgcccatcacagaagttgagaacaccaagcatttctatcattattttttttttttccagaggaataaatggtcacaaagaggttaatttgctgagtcacttagttactaataaaatggagatgggtgttcaaagttggtttgcatcactccaaaacccattgtgataaaacttcctcttttcaaaccacggaaagagaaaatctttgtcttaaytcaaatttcattactgtcttctagacatatcagtgtaaagtaaaaaaatcttcttcatccttatcaatttagaaaaacagtcaaaataatctttgtttagacatattcaagtgaaatcagtcccgtgtatgtatttgtattttatatacaaacataatctcaagtttaatttacctgttcattgtctttaagtggaaaaaagttatctatcttagaagggatagatgtattagcaaactatatcttgagaaataaaccttatagttttggagacatatgtagcatttaagaactacatcttgaatgatgctatgtttcatcctcttatcaaaaatcttttttttttttttgagacagtctcactctgttgcccaggtt

SEQ ID NO: 79349 - DNA, 714 bp, Homo sapiens
gcattctctacaatgccatatgactattttctaataggtatatttacacatacatattatatgccattctaatttgtaaataccttttgttggcacaacatgtttacattcatgatctcatgtgcccatcacagaagttgagaacaccaagcatttctatcattattttttttttttccagaggaataaatggtcacaaagaggttaatttgctgagtcacttagttactaataaaatggagatgggtgttcaaagttggtttgcatcactccaaaacccattgtgataaaacttcctcttttcaaaccacggaaagagaaaatctttgtcttaattcaaatttcattactgtcttctagacatatcagtgtaaagtaaaaaaatcttcwtcatccttatcaatttagaaaaacagtcaaaataatctttgtttagacatattcaagtgaaatcagtcccgtgtatgtatttgtattttatatacaaacataatctcaagtttaatttacctgttcattgtctttaagtggaaaaaagttatctatcttagaagggatagatgtattagcaaactatatcttgagaaataaaccttatagttttggagacatatgtagcatttaagaactacatcttgaatgatgctatgtttcatcctcttatcaaaaatcttttttttttttttgagacagtctcactctgttgcccaggtt

SEQ ID NO: 79350 - DNA, 714 bp, Homo sapiens
gcattctctacaatgccatatgactattttctaataggtatatttacacatacatattatatgccattctaatttgtaaataccttttgttggcacaacatgtttacattcatgatctcatgtgcccatcacagaagttgagaacaccaagcatttctatcattattttttttttttccagaggaataaatggtcacaaagaggttaatttgctgagtcacttagttactaataaaatggagatgggtgttcaaagttggtttgcatcactccaaaacccattgtgataaaacttcctcttttcaaaccacggaaagagaaaatctttgtcttaattcaaatttcattactgtcttctagacatatcagtgtaaagtaaaaaaatcttcttcatccttatcaatttagaaaaacagtcaaaataatctttgtttagacatattcaagtgaaatcagtcccrtgtatgtatttgtattttatatacaaacataatctcaagtttaatttacctgttcattgtctttaagtggaaaaaagttatctatcttagaagggatagatgtattagcaaactatatcttgagaaataaaccttatagttttggagacatatgtagcatttaagaactacatcttgaatgatgctatgtttcatcctcttatcaaaaatcttttttttttttttgagacagtctcactctgttgcccaggtt

SEQ ID NO: 79351 - DNA, 1143 bp, Homo sapiens
gactattttacgttaattgcagtcttgtttctttcttgaaggccttaaagacataagtccttgtggttataattaaatcctactgctaataaaattcttatgtgctcccatggtcctagttaaataactcatttctagaatcttccttrtactagctaggccctttaaaaaaatcgaggaggagagggctttattagtattatttgtgaagaatagttcctcctggttttacatatatataaaatgaaaaaagatattaagaatttatcatgtgaatagaactatgaaatcggtaaagagctcagctgcacttgaaaaccttttaacatacttcatttttggagaaagctttctcagactccagcagaagtagcatctgcagtcttctgctatgatcatacttatttctagtcatttttattccataacaaataggctcaatcacattaaccacctacttatacaacattcataatttatataatgacattgaaatctgctattaatctcagaaagcactaggatagtgtcaagttatatgatactggaatgcttttttttagtttctggttctcaattgctgattgacttattgttagctttttaaaaggtctgcagtgacaaagtaaaattggaaccatatctactataataagcctttgcaactgaaaaaggcctttaactacttgaagttccattacatgcacaatttcattttatctaaatcacagtccagtcaggaagggatatcaatggtgaagaaagtgagacagagagttttgatgttttcctaaggtaaggattctgttaatatcccaaaactcataattggaaaaggggattgaacaggcatttactgactagtatggacaggcctcatactatgcacaaaaggcaatttttgtctcattgaaaagacaaacaaatgaaaagcaaaacagtgagttaggagttctctatcaaggtgattttaccaccaaaatttgaggctctgaattgcaaagcaatttacccaagttcatatctccaaaataattggaattaaaacctaaaatgtcagattgccaggtctacatatggttatactcctcctgtccttaactgagaatcagtaattacattttccgacatgcgttaagcact

SEQ ID NO: 79352 - DNA, 1522 bp, Homo sapiens
cttcctcgatttacgtaacagatatactaggccagaaagatgcagcctcagaatccttttccacccagtactctgaggagtcactatcaaaccatttgcactggctcaggagattgaactggttctccatctctccccaagacaatacaaggaaacctacattaaaataaggattctttcctcacaatgttacactctagctcaggtcacaaattgaaaacaattagagcacaatgcaaagcagttgttttacttaagataacactagaggctggaagagatagacctctaaatctcaatagcttaatataatagaagtttatctttttattcatgtaaagtcaggattatgcattcctaagcagtgggaactctttatccagcatgttttaaaaatctaggtttcttccctgaagtgtttctttcatcttccaaagatatgttgtttatcggcaacaagagagaagaaaaaaagcgtgtggaagatcacacttggaagagttctgggtacagatgaattggacctaaaaattagctctactcattataacctgtatggattttacctagctatttaagttttctgaatctgttttggttctaaagttgatgcaatgatacataactttcaaagattatagctaaaattaaaaacgtggctaaagcccctaacaagtaagggttaaacacttacttaagaagcattaaattaacactagtattatttcccttctttttaaaaaaatagttttttactagattgtgtagactatgtataaataaatatatgtgtatacaaacatccacgcaaacatacatgtaggtaactttctgtatgtagtttaatttagagctttttgtatcattacttaatggctttctaaagtattttcaaatcccttgaatctcagaagagtaaagaagataataggtggtgtgttcacagcaagtatattaaattaaaacaaattattatttttaagtcaaaaacagttgtcagcatttttgcacagttcaacctagttgctcacattataattagggaaggttatagagaaagaagctgtattggtttcgaaggatggataagatcaagatacacaacagttgaaaggaaatacaggtcaaaartattctttgttcacagcagaaacatttgaaataaaataagccaattgccgtttgcttggtatttcccaagaaagaggcaaaaatacaccctcattgctcatcgagtatattcaaactttataacaggaaatgacctgatacttatcagtaactgctttaattacttttattcattctggttcacttgtgagcaactctcaggatacttgataggacagtataaagtcaacgaattattgttcttcacaaataatctttttattctctggacagtcattttacaaaggaagacccatatgagtacagtgcttaattccaatcaagttgtccactttaatttgggaggtgtaaggtgtgctcaagcactgatgtagggttattcaccatgcct

SEQ ID NO: 79353 - DNA, 827 bp, Homo sapiens
tccagcttcagctttctacatatggctagccagttttcccagcaccatttattaaatagggaatcctttccccatttcttgtttttgtcaggtttgtcaaagatcagatggttgtagatggtacatggtactggtacaaaacagagatatagaccaatggaacagaacagagccctctgacttgatttttctactragatttgagaaattttttaaccatttctaaagaagtctatcccatattagtccttgtaacacagatttggttctgtaccagccatttcattaaaatccactgaagtttagaatttcaagacccatttaaaatattcttattcttgaatacttatgtaccggtattctctttctttagctcttttctaggtctatgactttttaaaatgttttactctttgagaacattttgcaaatcctattatttgctcatgtatattacataatagagtggtgtggtatctgtttccacaacacttctgcttatctggtcttaatcttcctcaaattgtcatctaggaagtttttttttaaagtaacttgagcttgctgtgtcttgtatttttttttccttaaattggtgtttcttctgctctttctaagtagctaagcttttttgtcaatgcctagggaaagccacacaagccacacacacttcaggtggagggtgtagctgcccagtgtgtgagcagcaggaactagaaccaatggctgctttcttcagatcccagcctactgattactagtagcatatcttgggtaagttacttaaattttttgagcatcagtttactcacatgttaagaagaaat

SEQ ID NO: 79354 - DNA, 827 bp, Homo sapiens
tccagcttcagctttctacatatggctagccagttttcccagcaccatttattaaatagggaatcctttccccatttcttgtttttgtcaggtttgtcaaagatcagatggttgtagatggtacatggtactggtacaaaacagagatatagaccaatggaacagaacagagccctctgacttgatttttctactgagatttgagaaattttttaaccatttctaaagaagtctatcccatattagtccttgtaacacagatttggttctgtaccagccatttcattaaaatccactgaagtttagaatttcaagacccatttaaaatattcttattcttgaatacttatgtaccggtattctctttctttagctcttttctaggtctatgaytttttaaaatgttttactctttgagaacattttgcaaatcctattatttgctcatgtatattacataatagagtggtgtggtatctgtttccacaacacttctgcttatctggtcttaatcttcctcaaattgtcatctaggaagtttttttttaaagtaacttgagcttgctgtgtcttgtatttttttttccttaaattggtgtttcttctgctctttctaagtagctaagcttttttgtcaatgcctagggaaagccacacaagccacacacacttcaggtggagggtgtagctgcccagtgtgtgagcagcaggaactagaaccaatggctgctttcttcagatcccagcctactgattactagtagcatatcttgggtaagttacttaaattttttgagcatcagtttactcacatgttaagaagaaat

SEQ ID NO: 79355 - DNA, 827 bp, Homo sapiens
tccagcttcagctttctacatatggctagccagttttcccagcaccatttattaaatagggaatcctttccccatttcttgtttttgtcaggtttgtcaaagatcagatggttgtagatggtacatggtactggtacaaaacagagatatagaccaatggaacagaacagagccctctgacttgatttttctactgagatttgagaaattttttaaccatttctaaagaagtctatcccatattagtccttgtaacacagatttggttctgtaccagccatttcattaaaatccactgaagtttagaatttcaagacccatttaaaatattcttattcttgaatacttatgtaccggtattctctttctttagctcttttctaggtctatgactttttaaaatgttttactctttgagaacattttgcaaatcctattatttgctcatgtatattacataatagagtggtgtggtatctgtttycacaacacttctgcttatctggtcttaatcttcctcaaattgtcatctaggaagtttttttttaaagtaacttgagcttgctgtgtcttgtatttttttttccttaaattggtgtttcttctgctctttctaagtagctaagcttttttgtcaatgcctagggaaagccacacaagccacacacacttcaggtggagggtgtagctgcccagtgtgtgagcagcaggaactagaaccaatggctgctttcttcagatcccagcctactgattactagtagcatatcttgggtaagttacttaaattttttgagcatcagtttactcacatgttaagaagaaat

SEQ ID NO: 79356 - DNA, 827 bp, Homo sapiens
tccagcttcagctttctacatatggctagccagttttcccagcaccatttattaaatagggaatcctttccccatttcttgtttttgtcaggtttgtcaaagatcagatggttgtagatggtacatggtactggtacaaaacagagatatagaccaatggaacagaacagagccctctgacttgatttttctactgagatttgagaaattttttaaccatttctaaagaagtctatcccatattagtccttgtaacacagatttggttctgtaccagccatttcattaaaatccactgaagtttagaatttcaagacccatttaaaatattcttattcttgaatacttatgtaccggtattctctttctttagctcttttctaggtctatgactttttaaaatgttttactctttgagaacattttgcaaatcctattatttgctcatgtatattacataatagagtggtgtggtatctgtttccacaacacttctgcttatctggtcttaatcttcctcaaattgtcatctaggaagwttttttttaaagtaacttgagcttgctgtgtcttgtatttttttttccttaaattggtgtttcttctgctctttctaagtagctaagcttttttgtcaatgcctagggaaagccacacaagccacacacacttcaggtggagggtgtagctgcccagtgtgtgagcagcaggaactagaaccaatggctgctttcttcagatcccagcctactgattactagtagcatatcttgggtaagttacttaaattttttgagcatcagtttactcacatgttaagaagaaat

SEQ ID NO: 79357 - DNA, 827 bp, Homo sapiens
tccagcttcagctttctacatatggctagccagttttcccagcaccatttattaaatagggaatcctttccccatttcttgtttttgtcaggtttgtcaaagatcagatggttgtagatggtacatggtactggtacaaaacagagatatagaccaatggaacagaacagagccctctgacttgatttttctactgagatttgagaaattttttaaccatttctaaagaagtctatcccatattagtccttgtaacacagatttggttctgtaccagccatttcattaaaatccactgaagtttagaatttcaagacccatttaaaatattcttattcttgaatacttatgtaccggtattctctttctttagctcttttctaggtctatgactttttaaaatgttttactctttgagaacattttgcaaatcctattatttgctcatgtatattacataatagagtggtgtggtatctgtttccacaacacttctgcttatctggtcttaatcttcctcaaattgtcatctaggaagtttttttttaaagtaacttgagcttgctgtgtcttgtatttttttttccttaaattggtgtttcttctgctctttctaagtagctaagcttttttrtcaatgcctagggaaagccacacaagccacacacacttcaggtggagggtgtagctgcccagtgtgtgagcagcaggaactagaaccaatggctgctttcttcagatcccagcctactgattactagtagcatatcttgggtaagttacttaaattttttgagcatcagtttactcacatgttaagaagaaat

SEQ ID NO: 79358 - DNA, 573 bp, Homo sapiens
gaattcacttgtctaaatcagcactgtccaaaagaaattctacaatgatagaaatgttctatatctgcactgcccaacatgatagtcacttgccamacgtgtggctactgagcacttgaaatgtaggtggcacaaatatggaaggaattttaaaattttatttaatttcagttcgtttaagtttacatttaaatacacacaagtggccgggcacagtggctcacacctgtaagcccaggagctcaaggccaccttgggtgacatgccgaaaccccatctctacaaaacatacaaaacctagctgggcatggtagcgagcacctgtggtcccagctacacaggaggctgaggcaggactgcttgagcccaagaggtagaggctatacatgagctgtgattgtgccactgcactccagactggatgacagagcgagagaccctgtcattaaataataataaatacacagaaggagctaatggccaccttattggagagcagagctctaaattaacaaaattagaggccgggtgcagtggctcactcctgcaatcccagcactctgggaggccaag

SEQ ID NO: 79359 - DNA, 573 bp, Homo sapiens
gaattcacttgtctaaatcagcactgtccaaaagaaattctacaatgatagaaatgttctatatctgcactgcccaacatgatagtcacttgccacacgtgtggctactgagcacttgaaatgtaggtggcacaaatatggaaggaattttaaaattttatttaatttcagttcrtttaagtttacatttaaatacacacaagtggccgggcacagtggctcacacctgtaagcccaggagctcaaggccaccttgggtgacatgccgaaaccccatctctacaaaacatacaaaacctagctgggcatggtagcgagcacctgtggtcccagctacacaggaggctgaggcaggactgcttgagcccaagaggtagaggctatacatgagctgtgattgtgccactgcactccagactggatgacagagcgagagaccctgtcattaaataataataaatacacagaaggagctaatggccaccttattggagagcagagctctaaattaacaaaattagaggccgggtgcagtggctcactcctgcaatcccagcactctgggaggccaag

SEQ ID NO: 79360 - DNA, 937 bp, Homo sapiens
aagttgcatttgtaatttgtgtagttaaaataatgtacatatatctagtgatttttccactgttcctgctaaaagctattgagaaaagtgtattacagtcttactctataacatttttatttacatatttttaaattgccaaataaaattatatgtatttaccatgtacaacatattgttgtgaagtatgtatatattgtggaataactaaatctagctaattaacattatgttttaccccagagtgatcacttttgtgataagaacactttacatcctttttcctagcatttttcaagaatacaacatgctgttaactatagtcatcacatgtacaatagattacttgaacttattcttcctatctaactgaaattttgtattctttgatgaacatctcgccaattcacccactaccaaccaccctgccccagctaaccaccattctactttctgtttgtactatcatcttatagttgtctattttcttttagttttgtcaagttttactttctatattttgaagcgatrttactgactctactagtttagaattgtttagaatttagaatcttctcgatggataggccaggttattattaagagatatttgtctatctttaatgatgcttcttgtcttaaagtatactttttatactattagtattaaaaaacacatattttgttagtatatccatggtatacattacattcattattttacttttcaccttactccattcatacctttaaagtctatctcctattgaaaagcggcacacagtttttattttttgttctagtttgtcaacattagtctttgtattggagtctttaaaatagtttcatttaatgtaattagtcaaggttttggaattatatatactgtgtaattgtttttgatttagcaatgtaatatgttctttcttccctgctt

SEQ ID NO: 79361 - DNA, 739 bp, Homo sapiens
gagctggtagcatgagccaarcacagcatgccagtccaagcgagcagaatgagaccagcaggtgcaagcaaaactcaagcagaggtgccaccagccatagaggtttccagctggcaaagcgacacccaaagatcctgtgaaacttacctctaaccaccgcatatattccaattacaccaatttgtacatgttatataaattatacatataaatatattgtatgtgtatatatacaaattataattgaatacagtatataatatacactatacaaatatataaattatgtatatatttagtgtaatacattttggatatatatttatgttttacaaattcatatatatatctctgcatataaactacactgagacctattatctatcacctttaatactgttaaaggagttgaaaatatgtctctctgccatattgactatttaagttaaagacctatgaagaacagcaggtgcaaaaacttcactctgaactttgttttgtttctcgagagcagaagatgaaattaccacgtgaatttattctcaaggacaaaagttaagagcaagatttcttatagatctgtatagatttcttaaaataacttatcttttaagcatcctccagaattgagctgcttcttaacaacttaccattttttatccaattcagtatttaagttcctgactctatctacttttttgggtcttcattttcttatgatgtctcccatgccatgcaa

SEQ ID NO: 79362 - DNA, 739 bp, Homo sapiens
gagctggtagcatgagccaagcacagcatgccagtccaagcgagcagaatgagaccagcaggtgcaagcaaaactcaagcagaggtgccaccagccatagaggtttcyagctggcaaagcgacacccaaagatcctgtgaaacttacctctaaccaccgcatatattccaattacaccaatttgtacatgttatataaattatacatataaatatattgtatgtgtatatatacaaattataattgaatacagtatataatatacactatacaaatatataaattatgtatatatttagtgtaatacattttggatatatatttatgttttacaaattcatatatatatctctgcatataaactacactgagacctattatctatcacctttaatactgttaaaggagttgaaaatatgtctctctgccatattgactatttaagttaaagacctatgaagaacagcaggtgcaaaaacttcactctgaactttgttttgtttctcgagagcagaagatgaaattaccacgtgaatttattctcaaggacaaaagttaagagcaagatttcttatagatctgtatagatttcttaaaataacttatcttttaagcatcctccagaattgagctgcttcttaacaacttaccattttttatccaattcagtatttaagttcctgactctatctacttttttgggtcttcattttcttatgatgtctcccatgccatgcaa

SEQ ID NO: 79363 - DNA, 739 bp, Homo sapiens
gagctggtagcatgagccaagcacagcatgccagtccaagcgagcagaatgagaccagcaggtgcaagcaaaactcaagcagaggtgccaccagccatagaggtttccagctggcaaagcgacacccaaagatcctgtgaaacttacctctaaccaccgcatatattccaattacaccaatttgtacatgttatataaattatacatataaatatattgtatrtgtatatatacaaattataattgaatacagtatataatatacactatacaaatatataaattatgtatatatttagtgtaatacattttggatatatatttatgttttacaaattcatatatatatctctgcatataaactacactgagacctattatctatcacctttaatactgttaaaggagttgaaaatatgtctctctgccatattgactatttaagttaaagacctatgaagaacagcaggtgcaaaaacttcactctgaactttgttttgtttctcgagagcagaagatgaaattaccacgtgaatttattctcaaggacaaaagttaagagcaagatttcttatagatctgtatagatttcttaaaataacttatcttttaagcatcctccagaattgagctgcttcttaacaacttaccattttttatccaattcagtatttaagttcctgactctatctacttttttgggtcttcattttcttatgatgtctcccatgccatgcaa

SEQ ID NO: 79364 - DNA, 739 bp, Homo sapiens
gagctggtagcatgagccaagcacagcatgccagtccaagcgagcagaatgagaccagcaggtgcaagcaaaactcaagcagaggtgccaccagccatagaggtttccagctggcaaagcgacacccaaagatcctgtgaaacttacctctaaccaccgcatatattccaattacaccaatttgtacatgttatataaattatacatataaatatattgtatgtgtatatatacaaattataattgaatacagtatataatatacactatacaaatatataaattatgtatatatttagtgtaatacattttggatatatatttatgttttacaaattcatatatatatctcygcatataaactacactgagacctattatctatcacctttaatactgttaaaggagttgaaaatatgtctctctgccatattgactatttaagttaaagacctatgaagaacagcaggtgcaaaaacttcactctgaactttgttttgtttctcgagagcagaagatgaaattaccacgtgaatttattctcaaggacaaaagttaagagcaagatttcttatagatctgtatagatttcttaaaataacttatcttttaagcatcctccagaattgagctgcttcttaacaacttaccattttttatccaattcagtatttaagttcctgactctatctacttttttgggtcttcattttcttatgatgtctcccatgccatgcaa

SEQ ID NO: 79365 - DNA, 739 bp, Homo sapiens
gagctggtagcatgagccaagcacagcatgccagtccaagcgagcagaatgagaccagcaggtgcaagcaaaactcaagcagaggtgccaccagccatagaggtttccagctggcaaagcgacacccaaagatcctgtgaaacttacctctaaccaccgcatatattccaattacaccaatttgtacatgttatataaattatacatataaatatattgtatgtgtatatatacaaattataattgaatacagtatataatatacactatacaaatatataaattatgtatatatttagtgtaatacattttggatatatatttatgttttacaaattcatatatatatctctgcatataaactacactgagacctattatctatcacctttwatactgttaaaggagttgaaaatatgtctctctgccatattgactatttaagttaaagacctatgaagaacagcaggtgcaaaaacttcactctgaactttgttttgtttctcgagagcagaagatgaaattaccacgtgaatttattctcaaggacaaaagttaagagcaagatttcttatagatctgtatagatttcttaaaataacttatcttttaagcatcctccagaattgagctgcttcttaacaacttaccattttttatccaattcagtatttaagttcctgactctatctacttttttgggtcttcattttcttatgatgtctcccatgccatgcaa

SEQ ID NO: 79366 - DNA, 739 bp, Homo sapiens
gagctggtagcatgagccaagcacagcatgccagtccaagcgagcagaatgagaccagcaggtgcaagcaaaactcaagcagaggtgccaccagccatagaggtttccagctggcaaagcgacacccaaagatcctgtgaaacttacctctaaccaccgcatatattccaattacaccaatttgtacatgttatataaattatacatataaatatattgtatgtgtatatatacaaattataattgaatacagtatataatatacactatacaaatatataaattatgtatatatttagtgtaatacattttggatatatatttatgttttacaaattcatatatatatctctgcatataaactacactgagacctattatctatcacctttaatactgttaaaggagttgaaaatatgtctctctgccatattgactatttaagttaaagacctatgaagaacagcagstgcaaaaacttcactctgaactttgttttgtttctcgagagcagaagatgaaattaccacgtgaatttattctcaaggacaaaagttaagagcaagatttcttatagatctgtatagatttcttaaaataacttatcttttaagcatcctccagaattgagctgcttcttaacaacttaccattttttatccaattcagtatttaagttcctgactctatctacttttttgggtcttcattttcttatgatgtctcccatgccatgcaa

SEQ ID NO: 79367 - DNA, 655 bp, Homo sapiens
aaggaataaataaattaccaccttttacttttttatttggctaatattcctaaaaaaccaagttatgttrttaaataaaatagtgtatattgcttcaaagagaataaaatacctatgaatccaacttacaagggatgtgaaggacctcttcaaggagaactacaaaccactgctcaatgaaataaaagaggacacaaacaaatggaagaacattccatgctcatggataggaagaatgaataccgtgaaaatggccatactgcccaagataatttatagattcaatgccatcctcatcaagctaccaataactttcttcacagaattggaaaaaactactttaaagttcatatggaaccaaaaaagagcctgcattgccaagtcaatcctaagccaaaagaacaaagctggatgcatcatgctacctgacttcaaactatattacaaggctatagtaaccaaaacagcatggtactggtaccaaaacagagatatagaccaatggaacagaacagagccctcagaaataatatcacacatctacaaccatctgatctttgacaaacctgacaaaaaaaaagaaatggggaaaggagtccctatttaataaatggtgctgggaaaactggctagccatatatagaaagctgaaact

SEQ ID NO: 79368 - DNA, 655 bp, Homo sapiens
aaggaataaataaattaccaccttttacttttttatttggctaatattcctaaaaaaccaagttatgttgttaaataaaatagygtatattgcttcaaagagaataaaatacctatgaatccaacttacaagggatgtgaaggacctcttcaaggagaactacaaaccactgctcaatgaaataaaagaggacacaaacaaatggaagaacattccatgctcatggataggaagaatgaataccgtgaaaatggccatactgcccaagataatttatagattcaatgccatcctcatcaagctaccaataactttcttcacagaattggaaaaaactactttaaagttcatatggaaccaaaaaagagcctgcattgccaagtcaatcctaagccaaaagaacaaagctggatgcatcatgctacctgacttcaaactatattacaaggctatagtaaccaaaacagcatggtactggtaccaaaacagagatatagaccaatggaacagaacagagccctcagaaataatatcacacatctacaaccatctgatctttgacaaacctgacaaaaaaaaagaaatggggaaaggagtccctatttaataaatggtgctgggaaaactggctagccatatatagaaagctgaaact

SEQ ID NO: 79369 - DNA, 655 bp, Homo sapiens
aaggaataaataaattaccaccttttacttttttatttggctaatattcctaaaaaaccaagttatgttgttaaataaaatagtgtatattgcttcaaagagaataaaatacctatgaatccaacttacaagggatgtgaaggacctcttcaaggagaactacaaaccactgctcaatgaaataaaagaggacacaaacaaatggaagaacattccatgctcatggataggaagaatgaataccgtgaaaatggccatactgcccaagataatttatagattcaatgccatcctcatcaagctaccaataactttcttcacagaattggaaaaaactactttaaagttcatatggaaccaaaaaagagcctgcattgccaagtcaatcctaagccaaaagaacaaagctggatgcatcatgctacctgacttcaaactatattacaaggctatagtaaccaaaacagcatggtactggtaccraaacagagatatagaccaatggaacagaacagagccctcagaaataatatcacacatctacaaccatctgatctttgacaaacctgacaaaaaaaaagaaatggggaaaggagtccctatttaataaatggtgctgggaaaactggctagccatatatagaaagctgaaact

SEQ ID NO: 79370 - DNA, 939 bp, Homo sapiens
ttaaagtcttttgaaaacttcattttaaagtagtacacagaatgcttgtatggccacagtgctaaatggatgaccttggacaagttctttatctttttaatgcctcattttcctggaaaataagatgatttcaatggttgcttttagtacaatgaagctacacttcatgcagaaggagaagaaacctaatggaccctgtgcattagtatttacttcaagatctaaagcaacagagcatgaaaatratgttcctgcgttaacattttattatctgcagacaccaggtagcttcaggtgcctgtcaattacagaaatttggaagctaatgaatcaatagtcaacacagggctggtaactctccgagtttaatagttacattcaaacattcatgtgagaaataattaacctgttctacctaatagatcgtttttttcaacacaggtggctatttttattttctatgttcatctttagcaagggagtttatacagtgggaacatactgtcaattgcacccagcagttgaacgccggcataataagaaatgttacaatgacgtagatgtcagggctctatatttgcataatgtgccaaagtgtcaaatcatccgtgggtttgtttgtttgtgttaggtttgtgttgttgttgttggttggttggctggttttgaaacagggtcttgctctgtcacccaggctggagtacggtggcaccattgtggctcactgtagccttaaactcctgggctcaagccatcctcccacctcagcctcccaagtagctgggaccagaggcacacgccaccatgcctgaccaatatttttttattttttacagaaatggggtttcactgtgttgctcaggctgatccatgggatttttaaaataaaaatcctcttaaataaaaattaaccttatatcataattttaaatataaaaa

SEQ ID NO: 79371 - DNA, 1088 bp, Homo sapiens
tattatatatgatacaaataaaatccattttattaagataaaccatagtagaaaagtagaaagtacaagtgaaatctcttttataaagtttgctggggaggtacaaagttttaaatagccaagataaaataataataagaagaagctgagaacaaatgttatattcaacatcacctagtataaatatctggaatatagtaggtactcaataaagtttgtagatcaattgaaagaatacacattagtaattagaaaaaatatttctattttttaatatagaataagttgttatagttttaatatatttgcattctgcgagtttcaaggaaaatgattgatttcatataatttactttatcatatcatattattttatatattatttctaccatacagatttgataattgtaaaaaacttcaaaagcatagatattagtgaaatataggataataattaagaattagtgagttttcagtattatctttgtttttagtaaaatttatttcatgataagtatttataatttctttgcttttataaaaacaatggttgtgttcagtaactcagcttgcaactttcctgaaaatttaacaatcatgttttctaggccaagaggcaccagctctaattcaccagtgtatatgagacaaattaagtaatgtttgtgaaagaccctataccttttgtttttaaagaaaactctttaaactataaaacatatttatttgttatcactattgttttacccaagtttctttgcacacaatatgatgaattattgcttttggctgagtcaaatgaagaaagtagataagactaccaacacaaacaaacaagaaacccattattaaacacaacccaaactggaaaacattacgttttagtcagtataatctgtcagaayatgtttcaatgtcaataaactgtgctcagtgttgtcttaattaataattgaaactatacctttaatgattttatgagataaaaaggctatcagcagtatactaaaactgttttttaagtgcctagttttaaatcagcaataaaaagtcacagcatttagataccactctgaaggaaatattta

SEQ ID NO: 79372 - DNA, 665 bp, Homo sapiens
tcctacaaagcctgacaattccaagaggagagggaaaaaaggaggaaggagagaggaacctgctcttcatgaaataacactagatgcaattttttmtcaactgccctcagtgtttctcttattggatggcactgtgtacatttcaagttattatcagacttggatgttcactgtctgcaagggctgtgcccagggtctgttcctgctgttttaatcattattacataaggaaagaagcaagaatcccagtacatcatcccttaccagtctgtgtcctaaagccctctctgaggcaatttatggaaatcacttctcttcaattatgtcctgttcctttggtacaagcccagcggtgagtcaacaaagtttttcttgttcactgattcagcagcagaggacatttaatcagtggtgctcacttctttggggaaaggagagtaacaccgtgtcataagcaaaaaccccttactatgaaagtttctggataactcagctacttccatgtcccagcaaatggcccaagtaatcagtcttctcaaccaagtccctacagtgaaaaagcgtcaaggcagtaatcagttcctaacagggaattacctggttatgcactgtttacatgacaataagaagaaaggacttcttttaaaaagttttatgatcacata

SEQ ID NO: 79373 - DNA, 1076 bp, Homo sapiens
tattctggagggtgagctttcatagagatacagtcattcctcagtattggttgcaggacctctgtagatatcaaaattcactgaggttcaagttccacagtccaccctgaggaaaccatggctatgaaaattgatcyttagaatccaggggttctacatccctcaaatactgtgttttcaatctactgttgatggaatctgtggatgcagaacccttattttcttagtctacagcaaaatgtgctagatgtgaaaagaagcagaaaaaaacgtaaaagatgagtcagtatgagaaatggagcagagttcgtgtaaattagatctctgtaatggccggcaactctttttcataaaagtggagtaatcagaatacttaatttacctcagttaagagtgatcactctggctattgttgctcaaaatggcaccaaatcactctacaattgagctaattgcaacctctgatttagtggcttagcgctgtgatttttcttttatttacataaatgatctgtggagcaaaagcaatccctccttttctcctcctgtttattgtttttctttattattttaattccaccctttgatgattgctataatctcctaaatcattgctcatgttaatcactagatagaacagctatgtaatggtgacctcagagctgttagactaagcagccagtatggtgggtgcaccatgagacccagacttacctgccacggactgtgcacctggtcctgtgaattctcttgcaggctcaggtaaggcagagtcaacaggatgcagtgtttcagggagagggctatttctgtgtttacaaaaggagttgtccaactccatagagttgacctctgtggtcatgtctagttctaaaactctatggtttcattacttgctatgatggaaaatagtggtggtggtaacagtagtgccagtaattcctttagcagggtgtgtgtgtgagtgtgtgtgtgtgtgtgtgtgtgtgtgtgtgtttaagagatggagtatgttgcccaggctggcctcagactccttggctcaagccatcctccagtctcagcctcctgagtag

SEQ ID NO: 79374 - DNA, 1076 bp, Homo sapiens
tattctggagggtgagctttcatagagatacagtcattcctcagtattggttgcaggacctctgtagatatcaaaattcactgaggttcaagttccacagtccaccctgaggaaaccatggctatgaaaattgatctttagaatccaggggttctacatccctcaaatactgtgttttcaatctactgttgatggaatctgtggatgcagaacccttattttcttagtctacagcaaaatgtgctagatgtgaaaagaagcagaaaaaaacgtaaaagatgagtcagtatgagaaatggagcagagttcgtgtaaattagatctctgtaatggcyggcaactctttttcataaaagtggagtaatcagaatacttaatttacctcagttaagagtgatcactctggctattgttgctcaaaatggcaccaaatcactctacaattgagctaattgcaacctctgatttagtggcttagcgctgtgatttttcttttatttacataaatgatctgtggagcaaaagcaatccctccttttctcctcctgtttattgtttttctttattattttaattccaccctttgatgattgctataatctcctaaatcattgctcatgttaatcactagatagaacagctatgtaatggtgacctcagagctgttagactaagcagccagtatggtgggtgcaccatgagacccagacttacctgccacggactgtgcacctggtcctgtgaattctcttgcaggctcaggtaaggcagagtcaacaggatgcagtgtttcagggagagggctatttctgtgtttacaaaaggagttgtccaactccatagagttgacctctgtggtcatgtctagttctaaaactctatggtttcattacttgctatgatggaaaatagtggtggtggtaacagtagtgccagtaattcctttagcagggtgtgtgtgtgagtgtgtgtgtgtgtgtgtgtgtgtgtgtgtgtttaagagatggagtatgttgcccaggctggcctcagactccttggctcaagccatcctccagtctcagcctcctgagtag

SEQ ID NO: 79375 - DNA, 632 bp, Homo sapiens
aatattcatcagagatattttttttaattttcttgtattcatttgtctttgtctggttttggtatcaggataatattgaccttgtagaaggagattggaagtattttttcctcctctatttttcagaatagtttgagtaggttttttgttagttcttctttaaatgtttggtagaattcagcagtgaagtcctcacatcctggccttttctttactgggagactttttattacagcttctatcttgttacttgttattggtcttttcaggtcttagatttcttattcgtttgatattggtacattttatgtatctaggaatttgcccatttattctagatttttcaatttattggcatatagttgctcatagtagcttttggaaagtgatctatctgtaagtgttcacatttcactttatcatgaaacatgttatataagcaaaggaatatttgcaatcaatcacatgaaggaaattagaatgaatgctgcatgcaacattcyataaaatgtttttatccttcctatagggaataggttaacaaaattgacttgaatagatacatacatggaaaacatcgtaatcaatattcaattgtattggaagaaagataggaggaagaaaatcctgca

SEQ ID NO: 79376 - DNA, 683 bp, Homo sapiens
agggaaaaaatgatcttaatgttgtgaaatgttttaagaaaagaagataaattaaaacatggtattaaagaaatttatgtaaattcaaaatggactcatatattatagggtgcaagcattattttatttgggcttcagagtcagctaaatctttcctcttagaaagtacttaaccaagagggccttttaccatctcccatgtctgtcaggcatgtattttatccaatacaagcctgtattactgtagaattgtgctagaatatctctcaattaaaatattaagctaggaaaaatagttatgagaaaaggctctctctcctttacacctatctttctcttggtctttctctctttctctctctctctctctcacacatacacacatacacacacacacagaracacatgctcagaaaaatagttggcctgcaaaatttgattttaattattcatattttcaagatcacatcttttttgtcttcttctattactagattataagacataaatatttcttagattaaaataaatgtttccttcctacacataaaaactaacagagcaggataaattgaaaaatgaagacatagaaaagagaagcctattgttgcacctaactttttttcagtccagattaattgcagaggctagctatttaaggtaccactatcttgagaggatag

SEQ ID NO: 79377 - DNA, 553 bp, Homo sapiens
acctttcaaagctgcccaaaamaaaaccccaacccataattccactattcagattcatgattataaatgaatgaaagactgaaataaataaaaagcgtatttcaaaatgtagatgatctagtttttatttttttccaagtgtagtgtttaaagacaaattcagcatctccaaatcctctgttgtgactccagcttgtcacacgatcagtttacagaagagtgaaatctttatctaagtcagccagctgtttggtctccatgataacaaacaatgggtttggtcatttttcctaatgacttgatagactttggtaacatgaaaatactgatagttgcttagaaattaaaggtaagatgatgctaatccataattttaaccaaaggttcatttcagtcaggtgtttgttattcctttgaagaataaacaactaaattaatattttttaaaataaaaaacaatttttgttacaactgtcaaagaaaatcaagattaagctgcattacatgatgttggcttatagattaggtatacttcatagatgacatatttaat

SEQ ID NO: 79378 - DNA, 566 bp, Homo sapiens
ggcctgaggtccttatatgtaacctagggcataatgatagtgcctacctgcatggggccattgggagaatccaatgagcrttaatgtgaatcatttaacactgagcctgttacatagcaaacactcaataagtgttagctattggtaatattaatagaaacaatcatgcttccaccattaacttcagcgcaaattagttaagtaaccagttaaaattcaaaaggtggggagaaagcggtaaagggaagactgcaaaatcatctttattcctagagcatatctcaaagttctatctaatgtgggtgagccactgatatgccattttccatatgatacaatacaaatgctttgaactgctatgaatctaggaaataaaggagtaaaaatgaccaagaggcgggctccctcttctgaaactatacaccaggacaagacaactatatttttgagatgaatacatgcttcacccattcattcatatatccattcactcattaaataagctcctactatttgccagtcactgtgctagggtctggggacaacatggtgaccaagatacacat

SEQ ID NO: 79379 - DNA, 605 bp, Homo sapiens
gatgtaggcggtgagcaagcagcaccctgaaatgcaaacccagggactagagcagtggggagacaccacatgggccatgcaaaggagtgacttgtacatggcttcttcaaaaggctgcagtgtggcacagatgagcattgcagaggagaaacctagaggcaaggaggccagtgaggagactttcatgctcacctaccccccacagaaggaagcaacaagggctagcacaaagtcactgggtggagtggcccagtggcaagcaaagcagctgctgtccacttcggggacatctgtggacacgcccctacccatacagggcacaaaactccagtagaaggaggagatttagcaggatgcaaatccctgatatattccaggaccattccagacatcctccatgcagcccagtacagtggttgatttgtaaacattaagtaggacataccgtgataataatgaccggtacccaagcaccagatacyatgctggaggccttatgtatttgttctcgtttattcctccccaccagcctaggaggtaggaactattaccatccccatcttaagtgaggaagttgaggctcagacagggtcagacaactatca

SEQ ID NO: 79380 - DNA, 667 bp, Homo sapiens
atcagacttaaaaatgaagtcctggctgggcatggtggttcacacttgtaatcccagcactttgggaagctagagtgggaggattgcttgagcacaggagtttgagaccagcctgggcagcacagcgagaccctgtctctacaaaaatcaaacaattagctaggcatggtggcacacgcctgtggtcctagctactcggaggctgaggtgggaagatcacttcagccaggaaggttgggactgcagtgagctatgatcgtgccactctggctactgcccttcagcctgggagacagactgagactctctgccccctcaaaaccctcaagtcctgtgattttgctccttcctccaaggtattcacaatttggatctagaggctgatattctttaagaccttcactcccagaaccttccctcttgaaactgcactgccacacaaactccagagcctgcctgctttctcctgcgtggtgtcaatcacacctgaagctcctcaggcccatgcccctccacccctgccatcgatccacgtgccacccccctgcctgctgcaggcacctgaggcctggcagaggttagcctagtratatagtaggtcaggatgctgagagcaagggtggggatactgcgtttctataatctccagcttaaagcttgaaatgca

SEQ ID NO: 79381 - DNA, 1714 bp, Homo sapiens
cttgagcccaggagtttcagacaagcgtgggcaacgtagtgagaccatctctacaaacaatttacaagttagccaggtgcagttgcatgcacctgtagtcccagctactcagggggctgaggggggaagatcgctgcccaggaggtcaaggctgtaatgagccatgatcgtgccactgcactccagcctgggtgacagagcaagaccctatctcaaaagaaaagaataagcattaaaatacatacatatatatataaaataaaatccttaaagcctggcacaagatgacttctcaacaaatgtgggggcgagacgcggtggctcacacctgtaatcctggcactttgggagaccgaggtgggcgggtcatctgaggtcaggagttagagaccagcctggacaacatggtgaaaccctgtctctactaaaaatacaaaaacttagccaggcgtggtggcgggcgcctgtaatcccagctactcgggaggctgaggcaggagagttgcttaaacctgggaagtggaggttgcagtgagcggagattgtgctactgcactccagcctgggcgacagagcaaggctgtctcaaaaaaaaaaaaaaaaaaatcaaccaaacaaaaatgtggggttttagtatccaccagcctagtactctcagccctggttgcaaatccacctgggagattgattgtaattaaccaattagagcaggactgcctctaattggtctcaggtggagcccaaacamgggcgtttgtggaatctccccaggtggttctcatgttcaagcaaaggtgtaaagtgccaggccagagcctccaccgcagggctggtgtcctgggtgcccaggacagtgggcggcagctggcaggtgccaggaaatgctgaatggctgcttcatcgcccttggtgtctacattgcttgttactcagcatcgggagtttagatgtcatctcccatcagttaggagggaggtcacccactcagacctaggtcatcggctctgaaataaagatgggctttgtcccattctgaaattccctaatccaaacatgaagtcatcccagccctgcctttggaagttccactcaggactgagccaagaaggagcctgcctctttctttctaaagtcacaggctgcggggctctggattcccgggatacgtccaaaggagaaatttgggtctagcaaggatagggggttgagcagaggtcactgagctcccgccacgggcatggatccgggctcacccctgccaagtttcttgaatccctctcccggaaaggatgataaacatgagtcttcatttcctcaaccgaaaatgccctgcaggttcaggataggaatgatgacgcggggctggcctgcgtggggtggggctactgcacaacagtcatgcaggctggtgtgtgagcctcccggcagctcttccaggatcagctggtccccacttaaagacagctgtggcttggaggggttaagtgctccagaatccatgcacaatttgttggagtgtgaagctatccatacctcttctagtctgtctatatggcagaataagatgcggctgaaacatcaggcaggggcccaagagactttcttaaattgtctctttaaaataacatgatttccatcctgggcaacaaggcaaaaacccgtctctacaaaacgtacaaaaattattactagctaggcatgtgcctgtagtccc

SEQ ID NO: 79382 - DNA, 1714 bp, Homo sapiens
cttgagcccaggagtttcagacaagcgtgggcaacgtagtgagaccatctctacaaacaatttacaagttagccaggtgcagttgcatgcacctgtagtcccagctactcagggggctgaggggggaagatcgctgcccaggaggtcaaggctgtaatgagccatgatcgtgccactgcactccagcctgggtgacagagcaagaccctatctcaaaagaaaagaataagcattaaaatacatacatatatatataaaataaaatccttaaagcctggcacaagatgacttctcaacaaatgtgggggcgagacgcggtggctcacacctgtaatcctggcactttgggagaccgaggtgggcgggtcatctgaggtcaggagttagagaccagcctggacaacatggtgaaaccctgtctctactaaaaatacaaaaacttagccaggcgtggtggcgggcgcctgtaatcccagctactcgggaggctgaggcaggagagttgcttaaacctgggaagtggaggttgcagtgagcggagattgtgctactgcactccagcctgggcgacagagcaaggctgtctcaaaaaaaaaaaaaaaaaaatcaaccaaacaaaaatgtggggttttagtatccaccagcctagtactctcagccctggttgcaaatccacctgggagattgattgtaattaaccaattagagcaggactgcctctaattggtctcaggtggagcccaaacacgggcgtttgtggaatctccccaggtggttctcatgttcaagcaaaggtgtraagtgccaggccagagcctccaccgcagggctggtgtcctgggtgcccaggacagtgggcggcagctggcaggtgccaggaaatgctgaatggctgcttcatcgcccttggtgtctacattgcttgttactcagcatcgggagtttagatgtcatctcccatcagttaggagggaggtcacccactcagacctaggtcatcggctctgaaataaagatgggctttgtcccattctgaaattccctaatccaaacatgaagtcatcccagccctgcctttggaagttccactcaggactgagccaagaaggagcctgcctctttctttctaaagtcacaggctgcggggctctggattcccgggatacgtccaaaggagaaatttgggtctagcaaggatagggggttgagcagaggtcactgagctcccgccacgggcatggatccgggctcacccctgccaagtttcttgaatccctctcccggaaaggatgataaacatgagtcttcatttcctcaaccgaaaatgccctgcaggttcaggataggaatgatgacgcggggctggcctgcgtggggtggggctactgcacaacagtcatgcaggctggtgtgtgagcctcccggcagctcttccaggatcagctggtccccacttaaagacagctgtggcttggaggggttaagtgctccagaatccatgcacaatttgttggagtgtgaagctatccatacctcttctagtctgtctatatggcagaataagatgcggctgaaacatcaggcaggggcccaagagactttcttaaattgtctctttaaaataacatgatttccatcctgggcaacaaggcaaaaacccgtctctacaaaacgtacaaaaattattactagctaggcatgtgcctgtagtccc

SEQ ID NO: 79383 - DNA, 2464 bp, Homo sapiens
caactgtgagttaggcctggcaggtactgttatccccatgttataaggaagctgaagctgagagggttgaattggaaattggcaggtctagtacttgaactgttatcttgtttctggtccagtgctctttatcttattccatgttaccctcttaaagaaaaaatagtgtctaaaatgttttctgacaggtgttgagtgtattttgccttactttttggatcaactaacctgttagtattgagttgtatctcacaggaacattttctttaaaaaagctctaggaatctctgctcttgagaaactcttctatgacacctataaacatatcatcagtgttgagatgactgttttcacgtttttccatatttaaggtctcttggtcttgctgtggcaccacgcgtaagatttcttcagaaaatgcagaaacaacccaccaaagaattggtaaggagccaagccgataaagtaattgagccaagggctccctccctcaccaatgacgaagtggaagaatttagagcctacttcaatgagaaaatgtccatccttcaaaaaggtggaaaaagactcgaagggacagagcacagacaggataatgatactggtaatgaagaacaggaagaagaagaagacgatgaagaagaaatggaagagaaactggcaaaagcaaaaggatctcaagccccatctcttcctaacaccagtgaggcacagaagatcaaggaagttcctacacagttcttggacagagatgaggaggaagaagatgctgatttcttgaaggtgaagcggcataatgtgtttggattggaccttaaagacgagaaaacattacaggtaagtttactcccagtggagggtcttctattacattgtcttactatgtgcttattgttgccttttggggactgagagaaagtgaaaactaagaaacttagactgggtttctttgcaatgaactcttcctcctttcccccatacttaaacacagaataagtgccaatgaattttcatatttttcataactttgggagctctaagaggttaacaactttaatcttatttactggttttctgatgctgtgttttaaaagttgccaaagtcctgattaagtctcaaaggaaggcaatgaagttttttggtttatggcatgaggatccttcgttaaaattcttaagatactgctttctgattgattaaattataaggaacagttgtaattatttaaatataagttttactcttartgcgacatttgtttatgggaaccaagccagtgtcttaaatagaaattgaacagttcttttttaaaggctacttatgaatgtttatgaaaagttttcctgtaaatcctttgtttctccgtagccatcttctaggaggaacaaaagaaataatccatttagataaagcacttgttttctaggatgcttttgtaggtgcacagtaaatgtgtttccccttctcccttattccccttcctacttcatatgcctttattcttgatcatctttttaaaagggaattgaataaaaaatgaagcttgattcttactctttatacaatgttgaataaaatttcaagattcacagtaggaaatacataatagattttgactgtgaaacttagaagagtgtttctttaagtaactaaaaattaaaaaaaaaacctagaaaatgtgcttattgaacacttaatatgtgttatgtgttagtcattttctgaacattatctcatttagtgcttgaaataaaggtcgttactactatctcattatacaggtgacggaaaaaaaataactgtggcacagaagcaatatagtactgtagtgaggcacacaggtagtaaatggcaaagctggaatttgaacataggtgttctgactttaatatttatgctcttgtccaataatcctgtactgtctcatcctgcttcaaattagatcattttaagtctgtagttaagactcattttatcagcaaagtaaatacaagaagttagattttcgttttaaataatttagccactgtattaactattatgtatatcactttctaagaatcatgaacataaccaaagcttcaaattaagatgagaaggaatgatatagttttataataccatgaattgttcacgtaagtaggacatgtgtctaagtactaatagctcatctggcatttgaaaaatgtatatagcaaaacaactttttaagcttttaaaaaagttttactctatgtcagttatctaaatcaatctaactctttaatatatacagtttgagttttggcaaatgtatggtgttgtgtaattaccacaattaagaatagaacagcgtcatcaccccaaaacatttcttattccctttgcaattgctttacccttcactcaacctctggcaaccactgatctgatttctacccctgtagtgttgcatttttcagaatgatatataaataggataat

SEQ ID NO: 79384 - DNA, 634 bp, Homo sapiens
ctctgagaagaggcctgtagacattatcagactgccgaagggggcctatgacaagaggaagaggctgagagtgaaagagagtgagttaggggaaacrtgtgtacaaaagggaagttgatttacagcataattgtgtgagtagttcgataacctaataactagttagtagaaaacttaagattcacatctcccattatctttctgttattacatttggcaagtcaatcttcagtttaagtcgactgtataactgtctttcagtctaaatcacacctgcttatttagtactaagtaagctggtagtgggtgttactggggccactggaaggctttaaagaggttaagaaaccagtgaaaatacagttttgagccgagatgggaattagcaatattttactccaaagctagagttctctccaccatatcagccaggtcttagtatatggttaagtttccaataagtgttattcatttttggttctagagctctctctccatggggtaggtggagaaggaagacatctcagaattatatgggttgtgaagaatggggcatgtggtaagaacaaggtactgacgtcgtgaagttacgtcttgaggatggtcatggtagtttgaacacagatactggctt

SEQ ID NO: 79385 - DNA, 634 bp, Homo sapiens
ctctgagaagaggcctgtagacattatcagactgccgaagggggcctatgacaagaggaagaggctgagagtgaaagagagtgagttaggggaaacgtgtgtacaaaagggaagttgatttacagyataattgtgtgagtagttcgataacctaataactagttagtagaaaacttaagattcacatctcccattatctttctgttattacatttggcaagtcaatcttcagtttaagtcgactgtataactgtctttcagtctaaatcacacctgcttatttagtactaagtaagctggtagtgggtgttactggggccactggaaggctttaaagaggttaagaaaccagtgaaaatacagttttgagccgagatgggaattagcaatattttactccaaagctagagttctctccaccatatcagccaggtcttagtatatggttaagtttccaataagtgttattcatttttggttctagagctctctctccatggggtaggtggagaaggaagacatctcagaattatatgggttgtgaagaatggggcatgtggtaagaacaaggtactgacgtcgtgaagttacgtcttgaggatggtcatggtagtttgaacacagatactggctt

SEQ ID NO: 79386 - DNA, 671 bp, Homo sapiens
gcagaaagagtgatgctgcccttgcaatcagaggggaggaagggataacttatgtcaaaaatsgtcatttgaattctggagatgttttcagaggcacacaaaatataaggggaaagttgcctagctcacagctggattgtggtgctttaagctcgacagaatggctggcattcaagttccgcttctgaggagtcagctacatgtaaataagttgataccccagcagtaaaatatcttcaagaagggaagaggtatggagagagaagaggaaagttacagaccatgtgtatttaggtcagacataacaaccctgctctttgtttttcagcttggtaggcaaagtgccaaaactactgtttgtgaaaggtgttgaaatgaagcatgctagggctctacacccatttggtttctgggacattggtcagttggcattttcttaactaaacaacaaaaaccattcagagaagggctctttcttcctttgggttaagaacagcaaaaactaccattcctggtgtttttatttagtagcaggtactccaacaaggtaggcagaatgatgaccccctaaaaaatattcttatattgatccctggaatctgtgaatgctaccttacttggcaaagagaaattaaggacgcagatggaattaaggttgcagctgactgtga

SEQ ID NO: 79387 - DNA, 828 bp, Homo sapiens
tagacatttcctgcctccccaaggggcacaggaaggttcctgacaaaggtggcttaagaaagaaagatggttcatttccccctcaagggctcaatttcctgtggagtcgaaaaaaagacacattggttaaaaacaaagatgagatatcatttttcaccgattagattggcaaagataattataataataatggcaasagcagtggccagctcactgcctatgtgacagcgctatgcttaaccctccacgctcactctcttactgaaccttcacaacaacctcgtggcataccctttacgggatggaacacatgtaaaaccttggtgagaagcagtttacaatatgtgacaaaatgcaaaatctgcttaccctccgacccagcaatttcattttgaggaatttcccgtgtgttaataattaaaaacactgttccttctgagtgaaaccctcttgctgttcccctcccatgctcaccagtgctttcctcttcatcctgactctgccttttgcccactcatctttcaagctgaatgtcacctcctcagagaagccctccctgactcccaagctcaggttagcttctcttgttttattctgtcatagcctgtacgtttccttcgtactatgtgtacttctccttcgtactacagatcaactgctaattggataagtatctgtgtaactgcttaatacacacgctcattgcaaaaaactgctgtctttcctgatggcaggggccagacaccgtgtctccccactacatcataaactccaccacagccaggactgaccatgtctgttttattcatgatttctatgcctggcatt

SEQ ID NO: 79388 - DNA, 2045 bp, Homo sapiens
tgcattgaattaaacaatgctaaagccaaataaatattggccacttagcaaaagaaccattgatttttatgatggacaacaatgccatccttcactttgctggtggagggtttcaagccagggtcttatcggatccaaaacagccagttcactggattacacagcaagatgccaccgctctttggtgggactgtgcaaagttgagagtaactgttttcactgtttcttgctcagcctagctcatgttccctctctcatttacttttttttttttttttttttttttgagacagggtctcactctctcgcccaggctggagtgcagtggctcaatctcggctcactgcaacctccacctaccaggttcgggtgattctcctgactcagtgtcctgagcagctgggaatacaggtgtgagccactgtgcccggctaatttttgtattttttttttttttagtaaagacggggtttcaccatattggtcaggctggtctcaaactcccaacctcaggtgatccgcctgcctcagcctcccaaagtgctgggattacaggcgtgagccaccgtgcctggtctcattcacctttaaggagacctcaggctgggccttgcctccctctgcttcagtattggcagcgagggcagaggcactgaacatcctttttcccaagatctccgggtatgtctcatcttcctcctatgccacctccctcagcaggctgtccctgaaaccaaagaagtggcttgccttcagccctaagtacaaagggcccctcttcctgctctgcctgaaaatcagggcaaagaggaagacacaggaagggggacacaaaaagatctgtgttggaaagagaaagagatctacaacttccaagcacccgggatgtgcccagcaccatatcagacaccgtacagcattatcttcattaattcccccagaaacttgaaactgggcattagggaggcagacttgaagatggatattgacttccaggagtgagcatcaaaagcctgcagacsaggaatcagactctgtcaacctcacagaccccaggtgcctgtgtgtctctacccaaaaacatccacccccttcccgctggaatgcaggttccgtgagggcagaactaattttgttctcctatattcccagtgctaactggcacttgcacgtgctatgctcttagtaactatccatggaatgcatggatattacaagagaagccctgagatgtgaaggttaacgtcatcaatggagaggagcgggttgccatttggcacccagtcacacagaggcacctgccaggatggcttcaacctggaagggtgaaggaaggaacatgccaagcagccgctgtgctcaggccaggtacacacattggctatctgcactgggggttaagaacaacggagtctggcatagtctcgaaacctcccatcacatcgggctctgagatgtctgagcagagcaatcatggatttaatcagagtggggacaaggtcctttttcttgattctctactctgatgtcaaaggccaagataggatgagggcagtggggagtcagcaacacttgtctggactttggcagtcaaatagggccactagtctttggagagctatcttacaaaaatatattatgatacccatttcataggtgaggaaaccgaggcccaaagaagctaaacaacttattcagggtcttagggtctttgccaaacagtcaagtgaaaactgcacatttcaatgatccagctgtttcccctgtatcatcactgggcatcccagtgccatgctcatagggctgcctggtgtgaggacattcacagcgcagtacccaggctgagtgtgaactagattcctcccagcacagtgaaatcaactggcaggcctcaggccagccatacactctcatggtgggaggaggtgcagttgagtttggtggagggaatcctggcctgtacatgccaaggttcgctcatgcctccatcaacaagcatctgccgctgcgggcagaccccatgctagggaagcctcagcgaatga

SEQ ID NO: 79389 - DNA, 2045 bp, Homo sapiens
tgcattgaattaaacaatgctaaagccaaataaatattggccacttagcaaaagaaccattgatttttatgatggacaacaatgccatccttcactttgctggtggagggtttcaagccagggtcttatcggatccaaaacagccagttcactggattacacagcaagatgccaccgctctttggtgggactgtgcaaagttgagagtaactgttttcactgtttcttgctcagcctagctcatgttccctctctcatttacttttttttttttttttttttttttgagacagggtctcactctctcgcccaggctggagtgcagtggctcaatctcggctcactgcaacctccacctaccaggttcgggtgattctcctgactcagtgtcctgagcagctgggaatacaggtgtgagccactgtgcccggctaatttttgtattttttttttttttagtaaagacggggtttcaccatattggtcaggctggtctcaaactcccaacctcaggtgatccgcctgcctcagcctcccaaagtgctgggattacaggcgtgagccaccgtgcctggtctcattcacctttaaggagacctcaggctgggccttgcctccctctgcttcagtattggcagcgagggcagaggcactgaacatcctttttcccaagatctccgggtatgtctcatcttcctcctatgccacctccctcagcaggctgtccctgaaaccaaagaagtggcttgccttcagccctaagtacaaagggcccctcttcctgctctgcctgaaaatcagggcaaagaggaagacacaggaagggggacacaaaaagatctgtgttggaaagagaaagagatctacaacttccaagcacccgggatgtgcccagcaccatatcagacaccgtacagcattatcttcattaattcccccagaaacttgaaactgggcattagggaggcagacttgaagatggatattgacttccaggagtgagcatcaaaagcctgcagaccaggaatcagactctgtcarcctcacagaccccaggtgcctgtgtgtctctacccaaaaacatccacccccttcccgctggaatgcaggttccgtgagggcagaactaattttgttctcctatattcccagtgctaactggcacttgcacgtgctatgctcttagtaactatccatggaatgcatggatattacaagagaagccctgagatgtgaaggttaacgtcatcaatggagaggagcgggttgccatttggcacccagtcacacagaggcacctgccaggatggcttcaacctggaagggtgaaggaaggaacatgccaagcagccgctgtgctcaggccaggtacacacattggctatctgcactgggggttaagaacaacggagtctggcatagtctcgaaacctcccatcacatcgggctctgagatgtctgagcagagcaatcatggatttaatcagagtggggacaaggtcctttttcttgattctctactctgatgtcaaaggccaagataggatgagggcagtggggagtcagcaacacttgtctggactttggcagtcaaatagggccactagtctttggagagctatcttacaaaaatatattatgatacccatttcataggtgaggaaaccgaggcccaaagaagctaaacaacttattcagggtcttagggtctttgccaaacagtcaagtgaaaactgcacatttcaatgatccagctgtttcccctgtatcatcactgggcatcccagtgccatgctcatagggctgcctggtgtgaggacattcacagcgcagtacccaggctgagtgtgaactagattcctcccagcacagtgaaatcaactggcaggcctcaggccagccatacactctcatggtgggaggaggtgcagttgagtttggtggagggaatcctggcctgtacatgccaaggttcgctcatgcctccatcaacaagcatctgccgctgcgggcagaccccatgctagggaagcctcagcgaatga

SEQ ID NO: 79390 - DNA, 2051 bp, Homo sapiens
aagtttcagctcacggaattgctgctcaacctctttgagtctcaatttccgcatctatacaatggagaaaataataaacatcatgcaagtatgttgtgagcatgattcgggacagtatgtacagctggtgagtactaggtatttaatcaatattagatatggtaataatgaagaagaaaaatttctgaatctacctccaaatgcctaacaggtggtcagctgggctgaggtgggaaaaaacccactggacttggaatccaaatcatggctcagccattatagctgtgattttagcagacgttatactccctctcagcttcctattcctcctctgtaagatggaattcccaaaaccatcctcataggattgctgtgaggatttgatttatttaatcatctttcttttctttccttttttttttttttcagaaatgggatctcgctctctcacccagactggagtgcagtggcacaatcacagttcactgcagcctcaaactcctgcgctcaagcgatcctcccacctcagcctcctgagtagctgggactacaggtgcacaccatcatccctgggtccagtcatttttcaaatatatatagactaatatgtgtctagtactaatttagacttcaggtgattgaggtctgatccttgtacccacagaggatgagggtcattaggcagtgacagcagtgttgttcaggtatgcaggcctgcttgcattcagcaattcccattgagtgcctactaggtgccaatgtggaagaagaacagaaaagactcctgccctaataatatgaatagaagcagctaatattcattgaacattgactgcatggttcagtyctttaggcttcctaaaacacaaacacaattaacagctacctcagagagtggcaggcaagattatatgaattaatgcatgtgacgctcagagcagaggtcctggcacctcgtaagtggtcaataaatgggagccctaattctatttattagctcactaggtagcagccttgtatttagagctttacatgttttatctcatttaatcatttaatccagggtgataagtactaagatacgacacgtgaaatcgcctataaacttaaaagcctttccgcatgtgagtgcttgttaatgtttcagagagacgagcagaggatcatagaatgggatggggcagtcagcatgcagagagatcagccagaaaagcttctggaaggtgagcctggggatgaggcagggatctggggccaccagggctgaacaacagaggacaggaggaacagcctctctcctgcaaaccagggcgtttctgctgctgcagaaggccagattcaaacagggcaatttaaaaacatgtaaaaggcataaagcgagagcagctgtgcacagctgccgccgaacgctccatcgctgcctcgctgtggactctaaatgacaataaaccttccaccccttataaattaagcagactttcaaaaaaaccatatctcctcctgcaactttttatggctgtttggcaactttaatcattttgcaaaatgcaattcctggccataaattctctcccaagtacagatttagggagatctagaggactgcggcgggttgataggtaagttttaatctgacaaggccaaaaagtctattagatttatggggaggcagcagataccttgtaattacaccaggctcgacctctggggaatcttgaattcaaggggggtggtggggagaaaatgggaaggaagtggctggggcagtggcaacagcgggctggaaccccctccgtcagtcagtccctggccccagccttttggtcacaggccacggtgatttcctagcaaaggctcaaagaccttgggttccaagtcactgaagcctgtgactgatacacatgcacacacatgcacacatccacagtgcctgtcaagagaagctgagctcttgtgaaggaggtcacacatccctgagcagggtaaagagtgagtgagaaggcagtggatttcattcaattacacatccaacaagtattgagtccacatgc

SEQ ID NO: 79391 - DNA, 1158 bp, Homo sapiens
gcatcaagcatttatgaaattgcagtttatcacgtgagaatattgcggttatatattagcttactgtctggtggccactccacggctctctctggaccctagatcgcccttcacaggcaaagtcagccttgccgacatctatcgccttcctctgccgacacgtccccagatgctgataaaaggccttgcccccaacaacatatgaatatttaaatgacagttaattattcagcatataatgatgttattagcatccactttattgctggctgtgggcccagccaagtcttgtcccacactgaggggtgctgaggaaaagcctaaaccaggcaagccctatgtctgctgcatctgcagggacgcattgttatctgggggagttgtcaattcacaaaaatgatcactgaggatctctaccctggacctgttccatgtcaagccatgtggacatagatcacatgaggagtgttctaaatcttcccctctggggaggagatttagccaacatagctcctgttcacaaagtgcttacagcctcatgggagctcacattcaccctgccaagcacctcacaggcacatcattagtttcacaaaacaaccttacaaagtaagggcttttcttgtccctcttttcttagaaataagaaaactgaggccaggtgyggtggctcacacctgtaacacaagcactttgggaggccgaggtggagggatcgcttgagctcaggagttcaagaccagcctgggcaacgtggcaaaaccctatgtctacaaaaaatacaaaaattagccaggcatggtggcatgcacctatagtcccagctactcaggaggctgaggagggaagatcgcttgcacccgtgaggcagaagttacagtgagccaagatggccccactgaactccagcctgggtgatagagtgagaccctgtctcaaaaaaaaaaaaaaaggaaataagaaaacagaagcttagaagtaaagtgctgtgcacaaggtcatgaggtacatgaaggaactgggattctaacacggagagccttactcagagctcttgctccactagccacgagcaaagcttgtgctcccagacaatgggaaagaagtgcagcaacacacacgcaagcaaaaggctctgagatccagaagtgaggatgc

SEQ ID NO: 79392 - DNA, 1158 bp, Homo sapiens
gcatcaagcatttatgaaattgcagtttatcacgtgagaatattgcggttatatattagcttactgtctggtggccactccacggctctctctggaccctagatcgcccttcacaggcaaagtcagccttgccgacatctatcgccttcctctgccgacacgtccccagatgctgataaaaggccttgcccccaacaacatatgaatatttaaatgacagttaattattcagcatataatgatgttattagcatccactttattgctggctgtgggcccagccaagtcttgtcccacactgaggggtgctgaggaaaagcctaaaccaggcaagccctatgtctgctgcatctgcagggacgcattgttatctgggggagttgtcaattcacaaaaatgatcactgaggatctctaccctggacctgttccatgtcaagccatgtggacatagatcacatgaggagtgttctaaatcttcccctctggggaggagatttagccaacatagctcctgttcacaaagtgcttacagcctcatgggagctcacattcaccctgccaagcacctcacaggcacatcattagtttcacaaaacaaccttacaaagtaagggcttttcttgtccctcttttcttagaaataagaaaactgaggccaggtgtggtggctcacacctgtaacacaagcactttgggaggccraggtggagggatcgcttgagctcaggagttcaagaccagcctgggcaacgtggcaaaaccctatgtctacaaaaaatacaaaaattagccaggcatggtggcatgcacctatagtcccagctactcaggaggctgaggagggaagatcgcttgcacccgtgaggcagaagttacagtgagccaagatggccccactgaactccagcctgggtgatagagtgagaccctgtctcaaaaaaaaaaaaaaaggaaataagaaaacagaagcttagaagtaaagtgctgtgcacaaggtcatgaggtacatgaaggaactgggattctaacacggagagccttactcagagctcttgctccactagccacgagcaaagcttgtgctcccagacaatgggaaagaagtgcagcaacacacacgcaagcaaaaggctctgagatccagaagtgaggatgc

SEQ ID NO: 79393 - DNA, 2084 bp, Homo sapiens
tttgagctcaggagctagagaccagctggggaaacattgtctctacaaaaaataaaaaatttgacatgcctctagtcctagctgttcaggaggctgaggtgggaggattgcttgaggccaggaaatcgaagctgcagtgaaccttgtttgagccactgcactccagcctgggtgacagagaaagaccttatttaaaaaataaataaataaataaataaataaataaaagaaaaataaaagagtttctgttgttattacttttatagttaccagtataagtttaaattttataattctatttactattttataacatcctataacatctgttggctgccaactatgaaaggtgaacaattgatacacttacactagaacaattgaagcacttacactatctcttactgcccttttccaccacagcttcaggttgtggttattaaatttcattttctgtggcagtgtttaagattttaaatttagtacttatatccatattctatgattaattaatgttaatgattatgtgttaactccctactataaaatgtgatactattataatttctgtattttctaataactctccttttaatatttcacttttagttacttttaaattttaaaggttattttaagggatattttccaacaccaacaactaatactctgattcaccaactagatgttcaacaattcagttcaattctaacaccaactactcaaaattagtgcagattctgttatttaagggctgagttccaaaatactgcccccaactttagatgctggtctcaagtcccagaggtccatacttctgatgaacctcctcctaatgtttgataatttgtgagggtggtctcaaaattcaagaagattacaaatcaatagccaaatcaggaggtacatagaacaaggacagaagggtcttgggctgaaagcttctgttgctgtggagctggcctgccactcagcatgcgtatgggtttgtcaagtctaaggctcatcacattttaagagtctatagagcttaatctccagcccccttccacaaggtcagaaggtgagattaaattttccaattattctgattattttgaagtgatctagggatgtcaccctaagtcaccttattcacatctccaaatcatgtgaggagctcagtgccaggatccagggacagatcccaaatatatttcttattataccgtagttattaaaaattatattttatttggtaatggtattaagtattaattgctggatttagtttacacagcatttgaaatttataaaattattcgctgtaaaagcaatagcatgactggaaagcaaatacaggaaatgtagtcttcaatcagtgaaatttcctgtggtaatgagaatcttccaagtggcagggtggactggatcctcttttaattattttagaattggyttatgatttctgtgttgtatatacacatatttggctatagcatgacattgcatcatattttcatttagtgtgctttggtagtgaactgtgtatacatacttcaaagcatgcttatttttcttcatatttcattaagaattcaatggtgtataaaattttaggaccacctatttttttctccttgagctgttaacatatctttcaataatatacaactatctagctattggtatttcacctgaaagcagtctgattatcattcgtttgttcattcatctggcaaatacttactgagttctgagtatgtatagaaacaaatgttggtgattcaacaatgatcaacagtaaaaaaaaattctccttgggaaactctattaaaaatattgacttctgggtgctgtgatgacaaattgaatccgaatatctggcagtacagcttgagaattagtaccttcttaaagttatccatctgatactaacagtcaatccaaggttgagaatcactgctagaaggagattgagccactttgctctatcatctctatctcatacaaaacccttctatttccataaaagtaagaaagtaaaggacaacaaatgctgagaatgttctttggcttttttgtttattttattttaatctttg

SEQ ID NO: 79394 - DNA, 2084 bp, Homo sapiens
tttgagctcaggagctagagaccagctggggaaacattgtctctacaaaaaataaaaaatttgacatgcctctagtcctagctgttcaggaggctgaggtgggaggattgcttgaggccaggaaatcgaagctgcagtgaaccttgtttgagccactgcactccagcctgggtgacagagaaagaccttatttaaaaaataaataaataaataaataaataaataaaagaaaaataaaagagtttctgttgttattacttttatagttaccagtataagtttaaattttataattctatttactattttataacatcctataacatctgttggctgccaactatgaaaggtgaacaattgatacacttacactagaacaattgaagcacttacactatctcttactgcccttttccaccacagcttcaggttgtggttattaaatttcattttctgtggcagtgtttaagattttaaatttagtacttatatccatattctatgattaattaatgttaatgattatgtgttaactccctactataaaatgtgatactattataatttctgtattttctaataactctccttttaatatttcacttttagttacttttaaattttaaaggttattttaagggatattttccaacaccaacaactaatactctgattcaccaactagatgttcaacaattcagttcaattctaacaccaactactcaaaattagtgcagattctgttatttaagggctgagttccaaaatactgcccccaactttagatgctggtctcaagtcccagaggtccatacttctgatgaacctcctcctaatgtttgataatttgtgagggtggtctcaaaattcaagaagattacaaatcaatagccaaatcaggaggtacatagaacaaggacagaagggtcttgggctgaaagcttctgttgctgtggagctggcctgccactcagcatgcgtatgggtttgtcaagtctaaggctcatcacattttaagagtctatagagcttaatctccagcccccttccacaaggtcagaaggtgagattaaattttccaattattctgattattttgaagtgatctagggatgtcaccctaagtcaccttattcacatctccaaatcatgtgaggagctcagtgccaggatccagggacagatcccaaatatatttcttattataccgtagttattaaaaattatattttatttggtaatggtattaagtattaattgctggatttagtttacacagcatttgaaatttataaaattattcgctgtaaaagcaatagcatgactggaaagcaaatacaggaaatgtagtcttcaatcagtgaaatttcctgtggtaatgagaatcttccaagtggcagggtggactggatcctcttttaattattttagaattggtttatgatttctgtgttgtatatacacatatttggctatagcatgacattgcatcatattttcatttagtgtgctttggtagtgaactgtgtatacatacttcaaagcatgcttatttttcttcatatttcattaagaattcaatggtgtataaaattttaggaccacctatttttttctccttgagctgttaacatatctttcaataatatacaactatctagctattggtatttcacctgaaagcagtctgattatcattcgtttgttcattcatctggcaaatrcttactgagttctgagtatgtatagaaacaaatgttggtgattcaacaatgatcaacagtaaaaaaaaattctccttgggaaactctattaaaaatattgacttctgggtgctgtgatgacaaattgaatccgaatatctggcagtacagcttgagaattagtaccttcttaaagttatccatctgatactaacagtcaatccaaggttgagaatcactgctagaaggagattgagccactttgctctatcatctctatctcatacaaaacccttctatttccataaaagtaagaaagtaaaggacaacaaatgctgagaatgttctttggcttttttgtttattttattttaatctttg

SEQ ID NO: 79395 - DNA, 581 bp, Homo sapiens
gattagtagaaatagtcaatagcaattattatcatgattaatattattattaataaccaaatttattagagagataatttaaccaactttaaaatattattaatatgtaccacttattaagcacttctatttgccgaaggagtagacacataacattcaatttattccctaaagccactttgtgaaataagcatcaatatctctattttagaaatgatgaaactgaggcaatttgtactcatccagctaataaatatcagctcccaaattccaaatccagatctttccaactataatcacttttgtttattaatcaggttattttgctacctagctttccatatatatatrtgtatatatatatggaaatatacattccatatatatataatggaaatatgtatgtatatatgtatttagagagagagagagagatgtatacctcaacctacctctctctttcattaaaatccaaaattctagcgttctgtgcacttactcttttcctcatttctatttaatttattccactctattctggctttttatccttaacattctattacagtatctctttacaa

SEQ ID NO: 79396 - DNA, 581 bp, Homo sapiens
gattagtagaaatagtcaatagcaattattatcatgattaatattattattaataaccaaatttattagagagataatttaaccaactttaaaatattattaatatgtaccacttattaagcacttctatttgccgaaggagtagacacataacattcaatttattccctaaagccactttgtgaaataagcatcaatatctctattttagaaatgatgaaactgaggcaatttgtactcatccagctaataaatatcagctcccaaattccaaatccagatctttccaactataatcacttttgtttattaatcaggttattttgctacctagctttccatatatatatgtgtatatatatatggaaatatacattccatatatatataatggaaatatgtatgtatatatgtatttagagagagagagagagatgtatacctcaacctacctctctctttcattaaaatccaaaattctagcrttctgtgcacttactcttttcctcatttctatttaatttattccactctattctggctttttatccttaacattctattacagtatctctttacaa

SEQ ID NO: 79397 - DNA, 1284 bp, Homo sapiens
aacactgtcctttagactgacttcaacccaagggtgaaaagaatgtcacggtaaaaaaagaatgagggaggccaggtgtggtggctcacatctgaatcccagcactttgggaggccgaggtgggaggatcgcttgaggccaggagttcaagaccagcctgggcaacatggtgagactgtctctaccataaataaataaataggctgggcgcggtggctcacgcttgtaatcccagcactttgggaggctgaggcgggcggatcatgaggtcaggagatcaagaccatcctggctaacacggtgaaaccccgtctctactaagaatataaaaagaaaactagccgggcgtggtggcgggcacctgtagtcccagctacttgggaggttgaggcaggagaatggcgtgaacccgggaggcggagcttgcagtgagccgagattgcgccactgcactccagcctgggagacagagcgagactccatctcaaaaaataaataaataaataaataaataaataaataaataaataaaggccatgagtggtggtgcactcctgtagtcccagctacttgggaggctgaggcgggaggatccttagagtccgcaagttcctgtagtgagctattatgccaccgcactacagcctgggtgacagagcaagaccctgtctctaaattctaaaaattaaaaaaaaaaaaaaaaaaagaatgarggagtgggtgctaggtgcctcccttttttggccaggaggagcaagtgccaggcatggggggagtccacatactacccagtcttcagtcttctcaggactcccttccccacctcttgggagctgcctggggaagccagcacaggtgggaagggctggaaggggctgctccccacagtactgaatgctgcatgaaccaccccccataccacaaacacagcgaagcatgacttaggaaaagcctccagtgggtggtccaaggacgacctgtatcagttctgattagaaatgaagattcctgggctcagccagcccagacttactagaacgcaagctgagcaaggacagggccttggtaagttttgttctactgcatcccccgtgcctggaaaagtgcccagcacaggacagtgttcaataaatatttgtggattgaatgaatgagccagaaaccttaagattggggggtgagaaacctgaatttttaacaggtcctccaagtgattcagaagctttggtctgtgacagagatagagaattcagagtccaaggacaacaaaagctcttatcactt

SEQ ID NO: 79398 - DNA, 2253 bp, Homo sapiens
tataaagtctacagtagtgtacagtaatgtcttaggccttcacactctctcaccactcactcactgacccacccagagcaacacgcagtcctgcaagctccattcatgggaagtgccttatataggtgtactttaaataaaatcttttataccatattttactgtgccttttctaggttttgatagtttagataaacaaataccactgtattaacaattgcctacagtattaagtacagtaacatgccgtacagatttgtagcctaggagtaagaggctagaccacataagcctagtatgtagtatgtctgtagtatgttttgccatcagggttcatgtaagtgcactctgtgatgttcacacaagtacaaaatagtctaataatgcatttatcaaagtatccctgtcgttaagcaccacatgtctatatttggaatccagaatcgtctagttccagagactatttggactacaacagtaattttaaaatgttttcctcttttagcaggtgaattctttggataaaatcctccctgtaagcctggtataatcaacagataaaggaggggcatgtctgagacaagtcagggtgggagatgccctgcgcctccaaccctacctcctttgctcgctcctcatctcctctctacagctctgcagcagcctcggtgcatctctcctgagacttaggtctcaaaacaacaacaaattaagaagcttgaaaaaacactgcattgcatcaagctgccatattctcaccttcagcaaaatttccatatggctccccaagaggaggttctagaaagccactaggaatgtaaatgagtacaaccacaatgaagagcagtttgggatttccccaaaaaactaaatacagagctaccatatgatccagcaatcccactgctgggtatattcccaaaagaaaggaaatcagcatgtcaaagagatacctgcacatccatgtttgttgcagcactgttcacaatagccaatatttggaagcaacctaagtatccatcaacacatgaatggacaaagaaattgtggtacatataaacaatggagtactatttattcatgaaaacaatgagatcctgttatttgcaacaatatggatggaactgtggtcatcatgttaagtgaaataagccaggaacagaaagacaaacattgtgtattcttactcatttactgaatgtaaaaatcaaaacaactgracccatggagatagagaatggaaggatggttaccagaggataggaagggtactgggggatcagggagaggtagagatggttaaagggtacaaaaaataattagaagacctagcatttaatagcatgacagtgtgactatagccaaaataatgtatttgtacattttaaaataacttaaaaaacataattgaattgtttgtaacacaaaggataaatgcttgaggagatggataccccattttccatgatgtgattattatgcattgcatgcctttatcaaaatatctcacataccccataaatatagacacctactgtgtacctacaaaaattagaaattaaaaattaaaaaaaaacttagaaagccaccaagacattgtaattgtggatgaagttccagtgagcatggagggcattcaatgctattactcccactaatattcgatactattactgaatatacagaaactgaagcccagaaacacccagctggattcgatggcagggcttgaatccaggtcctgtgacattcaatccaatgtccttggtatacctggaagactgatgggtatgatcaatggccttcctgatgggtcaggtgcccctaacagggagcacagagataatgcacatcaattcttttctatcatggcacttggcacaatttgtaatcatttacttatcagtgtgtttgtttatattttgtctccttctccagactgtaaattccttgaggacagaaacagtggcacttttacttttgtattacttagcacctaacatacaaaagtcttcaattaggctgggatcagtggcttacacctgtaatcccagcactctgggatgccaaggagggaggaaagcttgagcccaggagttcaagaccagcctgggcaacatagcaaaaccccaactctacaaaacatacaaaaattagccagatgtggtggcacacgcctgtagtcccagctacttgggaggctgaggtaggaggatcacctgagcctgagaggtcgaggctacaatgagtcga

SEQ ID NO: 79399 - DNA, 664 bp, Homo sapiens
cacgattactaagaaaatataaacattttttcatatactggttaattggctttaaagaaaaaaatcccctttttaatcccatcaggatttagtttgacaaatttttcagaaacttataaagatgaaaacacctggatgtatttctctgtaaactttggctgttagcatcctttttcaatgcttgtgtagtttttcagaacagaacctaaccttcaagatgagtcatttgttcccaaacttgaattgtcatgaaacactccttgggtttccctcccgtgctgaatatgatttctaagaatgggatggcatggttactgtataaagatcatttgttctacaggtcagaaggcctgagttctcatcattaattaactttgtgatgtatgttgggtaaatcacttaacctctacagttttatcttctgtaaaatatgaaagaaagactttgagctaaagtttgtttctactgtaagaacatgagatattttatcttggtgacatcatggcttatgggcaggctgaggtgggattagtaattgcaaaagcagtggtcataaggtgaagaaacckggacatgacttcagacttaacctgggaaataaaatcagggaatgtggacaaagtcagacactactttagcacaggatgagatgccagaagatgat

SEQ ID NO: 79400 - DNA, 1182 bp, Homo sapiens
attaaatgagggcagaaaagtcaggcaactactggttgaaggggtactatatgtcatgtcctgttctagatgctggagktatccatggaacaaatcagtcagggtctctgctcttttggggcttctggttataattatgtgaattattctaataataattatgtaataaatcaaacacaaataaagtgatatgtaatttatattagctctttgggaatagggtgagtacctatttgcaaagggtggcaaatacaaagcagacttgtcagcactccctgcttttcctttacccacagcagacatgagccaagccagttaggacattctgggttgctaaatccttctcaatacagcactctctcctgacagctagtgatgattaatcaatgtcagtgtatgatatttgaaaacttatgtttcatgcatacttatttttgcatgcatacttatttttgcccatcttattttctttattcatttcttttttgtttcttaatatttgttgaacattttgaaattccttgtcttagcaatattggaggaaattaacaaaagggagggatgtgcttcccttctggccagtgttcataaggcaatatgaagaactgagggatcaggtctagtcttttccacagcacttgaaacaactaaaattaaaagctgaacctccagaaggtgggcctggggctgctgtaccagtatttttttcatagagatgttctctgggagggctggaagctttaacaactatgaccagtgtctccaagacggtactttagtaccatgggcattgtctttaatcacagaagtggctgcacttttttttagtgctttctcttcagctctgaatggctctgcctggagtgtcaattggctgccctgcagactggtggttttttggctgggtgtaatcttgccttggtagtactgctgccttcttgctgtcacttggtgccactgcacagaactgctgcctggttcctgttccttcctcaccctgccttctggttttcatggaattttggatgcctgattgcatgctaagccttaacaaattgtcttgcttggatttatggaaactacttatccagggctctttccttgttgccaggttttgacctattgccttgctttcagccctgaccattcctattataatccctgacagttcatcttgcttct

SEQ ID NO: 79401 - DNA, 1182 bp, Homo sapiens
attaaatgagggcagaaaagtcaggcaactactggttgaaggggtactatatgtcatgtcctgttctagatgctggaggtatccatggaacaaatcagtcagggtctctgctcttttggggcttctggttataattatgtgaattattctaataataattatgtaataaatcaaacacaaataaagtgatatgtaatttatattagctctttgggaatagggtgagtacctatttgcaaagggtggcaaatacaaagcagacttgtcagcactccctgcttttcctttacccacagcagacatgagccaagccagttaggacattctgggttgctaaatccttctcaatacagcactctctcctgacagctagtgatgattaatcaatgtcagtgtatgatatttgaaaacttatgtttcatgcatacttatttttgcakgcatacttatttttgcccatcttattttctttattcatttcttttttgtttcttaatatttgttgaacattttgaaattccttgtcttagcaatattggaggaaattaacaaaagggagggatgtgcttcccttctggccagtgttcataaggcaatatgaagaactgagggatcaggtctagtcttttccacagcacttgaaacaactaaaattaaaagctgaacctccagaaggtgggcctggggctgctgtaccagtatttttttcatagagatgttctctgggagggctggaagctttaacaactatgaccagtgtctccaagacggtactttagtaccatgggcattgtctttaatcacagaagtggctgcacttttttttagtgctttctcttcagctctgaatggctctgcctggagtgtcaattggctgccctgcagactggtggttttttggctgggtgtaatcttgccttggtagtactgctgccttcttgctgtcacttggtgccactgcacagaactgctgcctggttcctgttccttcctcaccctgccttctggttttcatggaattttggatgcctgattgcatgctaagccttaacaaattgtcttgcttggatttatggaaactacttatccagggctctttccttgttgccaggttttgacctattgccttgctttcagccctgaccattcctattataatccctgacagttcatcttgcttct

SEQ ID NO: 79402 - DNA, 639 bp, Homo sapiens
ctaagagaacagatgacctactcaagattattttgcttccccaaaaatggataactctcagcaagaagggagaataagtacatgaagggccatgtatattcacaaagagcatctgaaccaagtctttgcttaccagattttacctttttaaaagatgccaggaggtggcagcatttgttgcagctgtgtgagtttactcattaaagcacaggttctcagaaagtctggtgtatcagatttggaggagaagggttggtgacaagcataaggtggcaggagtctgttcggattaaaaaggcattgggacaatattataacacaatattatacttgaaagcaaaataaatctggtgtcattggtgttctattaaatcttaaaatcttgggtagccatatacaaaaattaactcaaggtggatttaaagacttaaaaaacctaaaactacaaaaaccctggaagataacctaggaaatactattcyggatataggatccggcaaagatttcatgatgaagacgccaaagcaattgcaacaaaaacaaaaattgacaaatgggacctaattaaaataaagtgcttctgaacagcaaaagaaactatcaacagaataaacagacaacctacggaatgggataaaa

SEQ ID NO: 79403 - DNA, 1252 bp, Homo sapiens
ttaaactcacatctatattatttataatgtttcatttaatccactaaattttaggaaattacttttaaattggtgaacaaaacaggtttgtcagaaacagatatctctatttatattattaatgttaggaactaaaatataataatctcacacattcacttagcagagtcattttcaaagtaacaaagaaaatgccttatttgctcttcaagaaaactatgggaagcaggccgggaagacatggttaattctattttacagatgagaacgattcagacagggtgaaatgacattttcaaggtcacttggcccatgaacatcagaatcggatctcaaagccaattttttttaacattaggatgttaccattgtagagtattgcttttttaattattaaaaagcactgaattggtaaaaagttgctttgcaaaaagaaaaattagaggaagtaaaaagaagacagtcaaaaggaccattagagtccataatgytatgtctgtagccagcagcaaatggagtctggcttatttttttcaccacatctctcaccaaaatttccctgtctcccaaagcaattatttggaatgcttacaggtcaagccagccttaatggagattgtacagatttatagatgtccttatctccaacaatattgtacactctgaaatctttcacttagtattatattgcaaaagataatggctcaatatatgaattatggtagaactctgaccatgactaatactaggtttaaagatattcttaccatttctttttcttctgaataatattgcaaactaaaggtgtattttctacattaattaatggtaggtattattagttctgatttagaaatgttggcaaaatttaaagttgatatgttataggccctactgctgtttaaaagtgtccattgtaatgtgtgagtggttgctcattaatgtggattgagagcatataatgcttacctgatctataaaccaagtactgaagttccaccaaaaagtccacttccctatgatcaactaaaatatacctggaatatataggttgaatttttaaaattcagaaaatgcaatgtaattttacccacataatgaaaattctacttatttaattttcattttcaaaactcggtattacaataataatgcttaatgttatctatgtttgaaaagaaaataaaagatgtttttagcaaaaaattctccttaacaaaacaatttttaaatgataggcaatatttcgcca

SEQ ID NO: 79404 - DNA, 1252 bp, Homo sapiens
ttaaactcacatctatattatttataatgtttcatttaatccactaaattttaggaaattacttttaaattggtgaacaaaacaggtttgtcagaaacagatatctctatttatattattaatgttaggaactaaaatataataatctcacacattcacttagcagagtcattttcaaagtaacaaagaaaatgccttatttgctcttcaagaaaactatgggaagcaggccgggaagacatggttaattctattttacagatgagaacgattcagacagggtgaaatgacattttcaaggtcacttggcccatgaacatcagaatcggatctcaaagccaattttttttaacattaggatgttaccattgtagagtattgcttttttaattattaaaaagcactgaattggtaaaaagttgctttgcaaaaagaaaaattagaggaagtaaaaagaagacagtcaaaaggaccattagagtccataatgttatgtctgtagccagcagcaaatggagtctggcttatttttttcaccacatctctcaccaaaatttccctgtctcccaaagcaattatttggaatgcttacaggtcaagccagccttaatggagattgtacagatttatagatgtycttatctccaacaatattgtacactctgaaatctttcacttagtattatattgcaaaagataatggctcaatatatgaattatggtagaactctgaccatgactaatactaggtttaaagatattcttaccatttctttttcttctgaataatattgcaaactaaaggtgtattttctacattaattaatggtaggtattattagttctgatttagaaatgttggcaaaatttaaagttgatatgttataggccctactgctgtttaaaagtgtccattgtaatgtgtgagtggttgctcattaatgtggattgagagcatataatgcttacctgatctataaaccaagtactgaagttccaccaaaaagtccacttccctatgatcaactaaaatatacctggaatatataggttgaatttttaaaattcagaaaatgcaatgtaattttacccacataatgaaaattctacttatttaattttcattttcaaaactcggtattacaataataatgcttaatgttatctatgtttgaaaagaaaataaaagatgtttttagcaaaaaattctccttaacaaaacaatttttaaatgataggcaatatttcgcca

SEQ ID NO: 79405 - DNA, 705 bp, Homo sapiens
ggaggtgactcttctctatagccactgcacacacaactttctgcaggaaaggctttaccagttatttagccactccccaagcacaggaccccagatggcttccaattttccactgtaaaaattatctgtggtaaacatccttgtgcaatgtgaaggtcttcccccaggacagatgcaaacaagtggaattgctgtatctcagggtgggcccattcttactctggtgaacccagtggattgccagcaccccaggactgctcccatccacatctgctttcggccacacaccactggctgctatttacctgcagctgccttggccatggkctttccctacctgagctgcctggaaagcccagccccccagctgcagcttaatgctgacacctggagacgtctgtcttcctaggcctggctctagtcctcacacaggatgttgttcccaccacctgagctggaattacccatcccctcctcttgctgtcctggactgtggggtcctgggggcagagggcatcctattctattcatctctggattcctagggctcagcacaatgactcacatggcacctgcacccagcaaatctttcagaaggaaagtaggtgtccctcagtgtcacctgtcccctctcaccctcctcaggctcccatcctaacttcccacattcaaactctgtcttggccccatctcattcaaagccta

SEQ ID NO: 79406 - DNA, 609 bp, Homo sapiens
ggatcccaaacaggatggccttactctcctttcttacagttgaattttttaaaaagctagtttatattatatttaaaatgtgtgtttgatgagttttgacatgtgtacacatctgtgaaatcatcatcagtctcaagatactgaacattttagccacctgaaaatttatctcttcctctccacaccctgtagttgggttcatcttactagcattcttttaggtcctcttctccccaccaacccaaatgcacgtgaaattctggaaagttggtttggcattcagtgataatggccactttcacactactaaattttcctctctactgctagtcagccatggggttgggacatcctattctttccagactcagaaagagttaagtctttccttaactctacagtggacagggagagaccatttcctgagaattagacagcctcagtccccattcttttccagagtcttagcttcagagccaactcctrtatcctgtggtatattctcattgattctttctggagtccagacaggcctccatattggtagaacacttggcaacttgcccagtcagtcagaacttacagttcagagtttagagtagtggttcc

SEQ ID NO: 79407 - DNA, 868 bp, Homo sapiens
ctacctgcattctatctgcgcaggcactggccaattacttggagaatgttccagacactggcacagggcagtgcaggcacttcgtggctcacagcctagcacagcaggtaaaagtttacgagaagagcatggctgcacagctcatttaccaaagtgaatgaaggagaaaagtgcttaagtttactcagggtatcaaaatcagagtcaaatcttaggctctgatgtacgttaaagctcaattttaaaatgctctatgtttaagttgctacctcttaacataacaggaagccatccagtagtcagtttaaattaagaagactcattcatgtaatatcaccacataagggaggctgggagagagtaggtgaaggatacggctggggatgtgggtttaaatactggctgttggtcaggtgctgtggctcatgcctataatcctagaactttgagaggcctaggcggaaggatcgcttggacccaggagtttgagaccagcctgggcaacatagcaaaatctcgtctctacaaaaaataccaaaattagctgagcatggtggcaggtgcctgtagttccagctactcaggagactgaagtgggaggatcacctgagcctggaaagttgaggctgtggtgagccgtaatggtgccattgcactccagcctgagcaacagagtgagatcctgtcacaaataaataaatacatacatacatattggctcttcaatcaacattagagcaaatactctttgccttaattttcccactggcmaaacaaggctaatattagtttctctttcacactgttatttttgaggaataattcggttattgcatataaaacactgagtagcatcacataattaacc

SEQ ID NO: 79408 - DNA, 2147 bp, Homo sapiens
gccacacactgtcagactgaggccaggactccggtctggaccttgatgtgtgtgtactttggatgtgctgagcttaggggcagtgtagataaagatgttctctaacacaagaggcccaggtcccagggtcaacactcggttttcacactgaagtccccactaataaaatggtctttcaaagtcccttatctgtatatttatctctgtggtcccaacaaaggagtgaggaagtattttgggattcgtgaataaacatacccctggctgaaaacaatcacagcaccttggtatcacccaaaatggctaattaatttgtttctaacatgtacagagatttgttagctttaaatggctgaaaataaggtcaaagacaagggaaattaagaaatagatgcaaaaagggtagtaattcacaccacagcacagaacattagctatgctgtctatactttttatggtgtgcatgaacagccacatcaatcttaggtgccaaaaataaaatgtgtttctaaacacaacagacactatttataaactacgagtgcctgccatccttccttttggaaagggaagaccacactaatgcctttcattatcaactaagcacatactaaatgcctgacactgtgttatatgcaaatggtatctgtcaacccagtaacttttctttgcagggaacagaaaacataataggaatgtactgtctcacacaatgattcaaggcagtcttgcttcgacaggtcctcccaggcttcctgtctgctttcctgatagtcccaaatgtccattcctgaaccagcagtgaccatggaatgtgtatgaaggaccgcccttagcttaggcaggcctaaagccaagggtgtgatcagcatacactaaagcacatggacgacatggaacatgataggaatattgaaataaagtgctactaccgtgccaagaacatttaaaaatattcctgtgtgtttctgtatatatatatatacacacaaacacacacacacacgtatataacctaacttaaagacatctgatctaaatgaaaagaacagagacacgcataaagaaatgaagaacactagatcatatatatttacatacacatcaggaacctaagtaatgaagtcctgtgcgagttcaatcacaggagaagcctctaaggtgaaagagtcaagaaaaggccacgcagagaagtggagaaagtgaagctgagcaaagagaattgagaaaaatgaggacagtgtgttattccacagaaacggagacatcttacagtgtagctcccttatgtattgtgaaattttatcctaaatgcatgagttaacagggtatttgaaatgtgatcycggtacagcgttcagaatacaagtaaattaaatgtccattatctgaaactcaccaaagcaaaaatgagtgctacctgtaacacatcataagcaaaactagacctaattgctaagaaaaatatatatttacaaatatatcacatttaaagacatctgaataaaatatcaaagtttatactagtgtttttccccttgacatcacatcctcgcttctgttttcgccatgtgacatgcaagtttggccttccaccatgattgtaagcttcctgaggcctccttagaagccgagcagatgccagctccatgcttcctgtacagcctgcggaatcgtaaaccaattaaacttcttttctttataaattaccccagtatcaggtatttctctatagcaatgcaagaatggcctaacatggcatacatatttcaggatatagaatttcaacacagcatcaatgctttaaactagcatacttaaagtcaacaaagtatggtccatgacctctggtataagtaaagatttactggaagacatccacgtcgattcatttatcattcctaagtattgtcttatgcaatactcattggcttattatctaaggctgcattcacacttcaacggcagaggtgagtcacttgtggccagctgtgaaaacgcaatttacttactatctggccctttacagaatttagttacttcttttttaaaataaagttcttaaaatttttcattaaaaaatgttagaaaaactcaatttttattttgaatagctgggaatttagtcacagatttacaatgaagat

SEQ ID NO: 79409 - DNA, 459 bp, Homo sapiens
agctggatgtggtggcttgcacctgtaatcccagctactagggagactgaggcaggcaggagaatcgcttgaacccgggaggcggaggttgcagtgagtgaagatcgtgccactgcacttcagcctgggtgacagagtgagactctgtctcaaaaaaaaaaaaaaaaaaagaaagaaagaaaaatataactgtgaagaaaacggtgagggaacaaggggaggaaatgataggttggaagtgggggaccccaggtgcccacgggtttggagaggacagtatctggttatgctgctgtgcagttggtgttaccggaatgtcaaaggtaagtgtctggtgcccagggtggtcagaggagtctgtaggggcygagtcgaggatggccaggctccctggtttgagcctttatcacttaggtgtggccaggtgttttcagctgagtcgtgatgtggccacagaga

SEQ ID NO: 79410 - DNA, 626 bp, Homo sapiens
atgacaaatagaggaacctacattatcatcattgcagcagctgatcctattaagctcaagtagtcttcacgatgttctcctrgttccaaatttagtacactactgagatcatacctatttcaaggtatgttattacactgattaatgatggaactgctgcattctgaaagtcaagttttaaaagtgtatttgtcactcttaactcacatctggctttacgtgccacaggatacctctgcagacttctcagcaggttgcttaggtaagcatttgctattcaacaagagtctgactgcaatcatcatcagggttatggcaaaggttaaagctctgattttactgaggtataggagtaaagagaatgatgaggatgagggtaacagtggaggaactgaagaaatgggtggaaggggaaaagaggtcaagaagattattgcacataaggcatggcaggagttctcagatcatgtaataatcataattcttcaggagagatgatgtgtctaccatcaggtctcatgcttgatcctcataaagtccacacattcaaaactttaaaaaaaactgaacaataaatttagttgtaattgtgctaatctgtaaatattaaatatattaaaagataa

SEQ ID NO: 79411 - DNA, 626 bp, Homo sapiens
atgacaaatagaggaacctacattatcatcattgcagcagctgatcctattaagctcaagtagtcttcacgatgttctcctagttccaaatttagtacactaytgagatcatacctatttcaaggtatgttattacactgattaatgatggaactgctgcattctgaaagtcaagttttaaaagtgtatttgtcactcttaactcacatctggctttacgtgccacaggatacctctgcagacttctcagcaggttgcttaggtaagcatttgctattcaacaagagtctgactgcaatcatcatcagggttatggcaaaggttaaagctctgattttactgaggtataggagtaaagagaatgatgaggatgagggtaacagtggaggaactgaagaaatgggtggaaggggaaaagaggtcaagaagattattgcacataaggcatggcaggagttctcagatcatgtaataatcataattcttcaggagagatgatgtgtctaccatcaggtctcatgcttgatcctcataaagtccacacattcaaaactttaaaaaaaactgaacaataaatttagttgtaattgtgctaatctgtaaatattaaatatattaaaagataa

SEQ ID NO: 79412 - DNA, 841 bp, Homo sapiens
ccattaaaatgactggaatattgtttgtgatattattgagggacaagacagaaataaagtactgtgagattaaaaaccgcagagaatacaattacacatgcccacagaaagctaagtgaaaaaaatgtggttccattagggtgctggagttgtgcctcctctatttgcttcaatacagtgtagtcaaatatatctaaagcaccaattttaaaaatcagtaaaaatgctttcattttgcttgcttcaatgaaatactttttttaaaaaaagatatatgacatatttgtgttttctgccaaaaattttgatatacagcttgcttgattaaacacctggtctcagggttgacttctccactaggcttggcaggcgcagtgccaaaggctcatgatacttttaggggcccatgaaaacatcttattgtcttaaaatcaggagcaaaaaaacaaataaataaacttttaagtcaaataarattttttcacatgtaacaatagtatatttgcatttataccactgcagttataaaatgtaatttctgatatttttatgtgaagaaagggaatcaaaggcaaaaatgcctagggcccttgaaagtcgtaatgcagttcttcctggttagttttctttaaaacagtagcaaaagcaataatacctatcttcctgcaaaaaaaaaatcttttaataaggttattttgcgaagcagaacatttggagcattctaatttaactgtaaatagtcttaaatgattgcagaatgtaacatacctttagtgccagactcgaaaatgtatttgaaacattgcacttaaagctcagctgcttatccaggtttccctct

SEQ ID NO: 79413 - DNA, 3052 bp, Homo sapiens
  misc_feature (1)...(3052): n = A,T,C or G
atcgtgttctaggtgctgtgccaaatgctccccgcataacctctcacctgattgctaaaacagctttatgagctccgtattgtctacattttacaggagtgccaactgaagcctggacaagtaaattatcttctcaggttacacataggctgctgggcctggcttctggccttcaattctaactattgttattttcatgaaagtgacaccttaagtgctttctttggtagtggtgttggggtaagcctttgtagaacagttgttacagaaaacttgtttacatggaagcattccttcagcgatgactgacagacgggaaaagcaaagtgcaggtcgaccatctcaaatatgaaaatgtgaaatccaaaatgctccaaaatccaaaacttcttgggattgacatgatgctcataggaaatgctctttggagcattttggattttagatttttgggttcgggatgctcaacctgtaagtataatgcaaannnnnnnnnnnnnnnnnnnnnnnnnnnnnnnnnnnnnnnnnnnnnnnnnnnnnnnnnnnnnnnnnnnnnnnnnnnnnnnnnnnnnnnnnnnnnnnnnnnncagtgaaccaagatggtaccactgcactccagcctgggtaacagagtgaaactctgtctcaaaaaaaaaaaaaaatgaattgcatcttacagcaaccactaggttctaatatgcatattattagatatttcccttggaaatcgcaaaggaagggatcacattagagaaggacatgccatcttcttagtaaatcccaacgcaaaccaatttttccttgagtgttggaacagattgccatttgtatggctgaacacaagtgaagtaattagcttggatttggggggacataagcaatgacacatattttacaacattacaatcgcagtctagctctgagatgctcactaaataaatacataaataaataaaacyaagagggagttgagaatgaccagaacaaagtcactgctcctgtatcacaataagctcatagaatggagcagcaggtaagttacccacccacccccatcctttatgcttcttttttttttttttgagacaagtctcactctgttgcccaggctggagagcagtggatggagtacagtggctcactgcaatctctgcctcccaggttcaagtgattctcatgcctcagcctccggagtagctgggattacaggtacatgccaccaggcctggctaatttttgtatttttagtagggacgaggtttcatcatgttagccaggctggtctcgaactcctgacctcaagtgatccgcttgcctcagcctccaaagtgctgggattacgggcgtgagccactgtgcccagccattgttgtttcttactctcacttaatttgactttatttacttattttatgctaaatagataacatttgaattcctaagagctgcatgtgtatatgatacatcatctattatacagaagcctttatcagggcagatttggtaaaggaaggggaaatgcaattaaatgcaatctccatctacagaggaatgactaagttacaatctgttctataactagaatattctgtagccactgacaagcatgaactaaatcaacatgtactctattaaaaacatgttaatatgttggtaaattatttttaaactgagttgccaggtacagagcatttttaaagctctgtgtgtgtgtctatgcatttctggatataacagaaaaaaaaaaaaaaaatatatatatatatatatatacaccagatcattaatacaagttatctcaggatgatgtgactgaaatgatgaaaggaaatctaatttttccttcatatgattttattactcagtaacaaccaccttttttgtataaaggaagttctttatacaaacatatatatataagttgtatgtatgtatttatatacaaatatatacacatgttttcatataaaggaaattgtaaagggaagttcttataaatacatatatttctgatagggaaatattaaaggtataactcttgaggaaaaaatacaggtattagattgatcataaagaacaatttgaaaaaattttgatctgtagatctcctgacagattttggtctgcagatctcctgacatttctctgcaaattaacttcctaagtgaaggacacaggcttcacagaagtccattattggctccccgtttggtctgccagttatgtccactgttacagtgggacagagtgagaacctttgcaagtaggactatacttctctgagacagttcaagagaacttctccatcagcaaaggcagagatcaatatatagaattaatcaactttacacccccactccacccatgtctactaaggcctctgacacacttaaagaaagggttgttttttctaaaaaaaaaaaaaattattaaatttccaaagccaagacttgatcaaaaatgatgagaaatctggctgagaatgcctaggctgtccgccaaggtctcatcatcccttagccaaggaagtttgaggtccccatttgaagagttaccagaggaaacggctagaacagtgatccactctagaattccttctttttgtataccttctctttcaggtgggaaacagtaagaggaagatctctgattcctaatctaagaaatgtattacatgctccattcctaatcatattctcttttctactcattggactgagaaaatgctattctccatatctgaaatatgagctgttatcatccttcacaactggcatatggcctggctcaagagctcaaaaatctggggacagtagcagcccatgcaaaacatttaaagtttcctgatccacagctctagacctgtgccaacccaaattacgataagcaatgtcactgcaacacaatgttgaatggtaagaagtttccttaattgccacgttgtctttaaaaggtatttaaaagatgtaggccaggtatactgctatatatgccacagactgttccatttagaaaatccacaataggaatgatagacagtggaaaatcacat

SEQ ID NO: 79414 - DNA, 3052 bp, Homo sapiens
  misc_feature (1)...(3052): n = A,T,C or G
atcgtgttctaggtgctgtgccaaatgctccccgcataacctctcacctgattgctaaaacagctttatgagctccgtattgtctacattttacaggagtgccaactgaagcctggacaagtaaattatcttctcaggttacacataggctgctgggcctggcttctggccttcaattctaactattgttattttcatgaaagtgacaccttaagtgctttctttggtagtggtgttggggtaagcctttgtagaacagttgttacagaaaacttgtttacatggaagcattccttcagcgatgactgacagacgggaaaagcaaagtgcaggtcgaccatctcaaatatgaaaatgtgaaatccaaaatgctccaaaatccaaaacttcttgggattgacatgatgctcataggaaatgctctttggagcattttggattttagatttttgggttcgggatgctcaacctgtaagtataatgcaaannnnnnnnnnnnnnnnnnnnnnnnnnnnnnnnnnnnnnnnnnnnnnnnnnnnnnnnnnnnnnnnnnnnnnnnnnnnnnnnnnnnnnnnnnnnnnnnnnnncagtgaaccaagatggtaccactgcactccagcctgggtaacagagtgaaactctgtctcaaaaaaaaaaaaaaatgaattgcatcttacagcaaccactaggttctaatatgcatattattagatatttcccttggaaatcgcaaaggaagggatcacattagagaaggacatgccatcttcttagtaaatcccaacgcaaaccaatttttccttgagtgttggaacagattgccatttgtatggctgaacacaagtgaagtaattagcttggatttggggggacataagcaatgacacatattttacaacattacaatcgcagtctagctctgagatgctcactaaataaatacataaataaataaaactaagagggagttgagaatgaccagaacaaagtcactgctcctgtatcacaataagctcatagaatggagcagcaggtaagttacccacccacccccatcctttatgcttcttttttttttttttgagacaagtctcactctgttgcccaggctggagagcagtggatggagtacagtggctcactgcaatctctgcctcccaggttcaagtgattctcatgcctcagcctccggagtagctgggattacaggtacatgccaccaggcctggctaatttttgtatttttagtagggacgaggtttcatcatgttagccaggctggtctcgaactcctgacctcaagtgatccgcttgcctcagcctccaaagtgctgggattacgggcgtgagccactgtgcccagccattgttgtttcttactctcacttaatttgactttatttacttattttatgctaaatagataacatttgaattcctaagagctgcatgtrtatatgatacatcatctattatacagaagcctttatcagggcagatttggtaaaggaaggggaaatgcaattaaatgcaatctccatctacagaggaatgactaagttacaatctgttctataactagaatattctgtagccactgacaagcatgaactaaatcaacatgtactctattaaaaacatgttaatatgttggtaaattatttttaaactgagttgccaggtacagagcatttttaaagctctgtgtgtgtgtctatgcatttctggatataacagaaaaaaaaaaaaaaaatatatatatatatatatatacaccagatcattaatacaagttatctcaggatgatgtgactgaaatgatgaaaggaaatctaatttttccttcatatgattttattactcagtaacaaccaccttttttgtataaaggaagttctttatacaaacatatatatataagttgtatgtatgtatttatatacaaatatatacacatgttttcatataaaggaaattgtaaagggaagttcttataaatacatatatttctgatagggaaatattaaaggtataactcttgaggaaaaaatacaggtattagattgatcataaagaacaatttgaaaaaattttgatctgtagatctcctgacagattttggtctgcagatctcctgacatttctctgcaaattaacttcctaagtgaaggacacaggcttcacagaagtccattattggctccccgtttggtctgccagttatgtccactgttacagtgggacagagtgagaacctttgcaagtaggactatacttctctgagacagttcaagagaacttctccatcagcaaaggcagagatcaatatatagaattaatcaactttacacccccactccacccatgtctactaaggcctctgacacacttaaagaaagggttgttttttctaaaaaaaaaaaaaattattaaatttccaaagccaagacttgatcaaaaatgatgagaaatctggctgagaatgcctaggctgtccgccaaggtctcatcatcccttagccaaggaagtttgaggtccccatttgaagagttaccagaggaaacggctagaacagtgatccactctagaattccttctttttgtataccttctctttcaggtgggaaacagtaagaggaagatctctgattcctaatctaagaaatgtattacatgctccattcctaatcatattctcttttctactcattggactgagaaaatgctattctccatatctgaaatatgagctgttatcatccttcacaactggcatatggcctggctcaagagctcaaaaatctggggacagtagcagcccatgcaaaacatttaaagtttcctgatccacagctctagacctgtgccaacccaaattacgataagcaatgtcactgcaacacaatgttgaatggtaagaagtttccttaattgccacgttgtctttaaaaggtatttaaaagatgtaggccaggtatactgctatatatgccacagactgttccatttagaaaatccacaataggaatgatagacagtggaaaatcacat

SEQ ID NO: 79415 - DNA, 882 bp, Homo sapiens
ctgaaattcagcaaaatgactgtcggcagagaagagttgatcagagtgtgcttccaaaagtcttccagatttttgccctctgagaattttgttggcgacatcaaataattgaactcttcaacatcaatatatacaaaggcattttattattaaccaaagaaagggacttagagtcatcagaaattacaactttattttttcataatacatatatttattgccatcagagttctgcaattctcataaaattagagtcagatggaattcagggacacgtgcaagttttggaaatggacacagataacagtatagaactgtacacaaaataattacaatttattaaacacactgttttagtacatcctggatggatgagaatgagcaccatattttttatgaatatatatttttctttttttgttttctacagcaccaaagaaattcaaataggaaaaggagagttgagaattgggaatcaagaatcagccctgtttccatcttagccacaccaacttatatctttatgattttcaaagcttttgccatgtgattctgcccccacaaaggcatcggtatttcctaaatggtacctgtatatgcagcattgttttctataccatccttattcaaaacttgcatgtggcacaaaatgggttggtggcaccaaggtatattttctgttgatttgatatgttctttgtcttaatcttagccaaraaaacaaacaggaccaacttcaaatccgaacttctgattctgatcaccaaagtcattgatcatgacatcaacaataggtacttgatcaatttttggtgtattgatttcaatgacagtcttttcatagccttttctggactgtaaaataaagcagaaataaaaagt

SEQ ID NO: 79416 - DNA, 866 bp, Homo sapiens
gctacttactttcctagccaatacttataataccaatactacattacctctgcagttatatcattctataattttatatatttgtgaagttttctatttctgtgattaagtaaagtatgatgattgtaaggccattatttataactctgctatagcacatgaaagagtaacataatgaaatagtctttyttgtatgattatgagaaattttgtatacatatatttaccaaaattaacagtattactatgttctacatgtatacaaattggtcacttattcccatatgttataaatacttattttaaaatttttcatttaaatcataaaacttcaatataattttggttgttcattcaaatggtgtgttcactcttgtctttatgatgtttttctttggtcactaccagtatatattctctttaaattatgtatttaaacatgttcctacttcttaaatgaaatatgttagatgatgatactgtcacatgcttcagcacttccttactaatttatactctctaaagaatatctgtggacattattttctaagttctttttttttaatttttttttccctttaagtgttcatgtatttgctctctgatagaaacataaattgggggagtacagagatatgtccttcaagttttttttttcacctagtatggaagtttatacattatccccagcaatttcattctaacagaccagtctggttctattttgtgatccatcagtctgatgcttttagggttggatttactgcctacattaacacataacggaaagaagatttttattagaattgatggaatcccaaactgaagagttaccatagtcctatgagatgaatttttctaactaa

SEQ ID NO: 79417 - DNA, 866 bp, Homo sapiens
gctacttactttcctagccaatacttataataccaatactacattacctctgcagttatatcattctataattttatatatttgtgaagttttctatttctgtgattaagtaaagtatgatgattgtaaggccattatttataactctgctatagcacatgaaagagtaacataatgaaatagtcttttttgtatgattatgagaaattttgtatacatatatttaccaaaattaacagtattactatgttctacatgtatacaaattggtcactyattcccatatgttataaatacttattttaaaatttttcatttaaatcataaaacttcaatataattttggttgttcattcaaatggtgtgttcactcttgtctttatgatgtttttctttggtcactaccagtatatattctctttaaattatgtatttaaacatgttcctacttcttaaatgaaatatgttagatgatgatactgtcacatgcttcagcacttccttactaatttatactctctaaagaatatctgtggacattattttctaagttctttttttttaatttttttttccctttaagtgttcatgtatttgctctctgatagaaacataaattgggggagtacagagatatgtccttcaagttttttttttcacctagtatggaagtttatacattatccccagcaatttcattctaacagaccagtctggttctattttgtgatccatcagtctgatgcttttagggttggatttactgcctacattaacacataacggaaagaagatttttattagaattgatggaatcccaaactgaagagttaccatagtcctatgagatgaatttttctaactaa

SEQ ID NO: 79418 - DNA, 866 bp, Homo sapiens
gctacttactttcctagccaatacttataataccaatactacattacctctgcagttatatcattctataattttatatatttgtgaagttttctatttctgtgattaagtaaagtatgatgattgtaaggccattatttataactctgctatagcacatgaaagagtaacataatgaaatagtcttttttgtatgattatgagaaattttgtatacatatatttaccaaaattaacagtattactatgttctacatgtatacaaattggtcacttattcccatatgttataaatacttattttaaaatttttcrtttaaatcataaaacttcaatataattttggttgttcattcaaatggtgtgttcactcttgtctttatgatgtttttctttggtcactaccagtatatattctctttaaattatgtatttaaacatgttcctacttcttaaatgaaatatgttagatgatgatactgtcacatgcttcagcacttccttactaatttatactctctaaagaatatctgtggacattattttctaagttctttttttttaatttttttttccctttaagtgttcatgtatttgctctctgatagaaacataaattgggggagtacagagatatgtccttcaagttttttttttcacctagtatggaagtttatacattatccccagcaatttcattctaacagaccagtctggttctattttgtgatccatcagtctgatgcttttagggttggatttactgcctacattaacacataacggaaagaagatttttattagaattgatggaatcccaaactgaagagttaccatagtcctatgagatgaatttttctaactaa

SEQ ID NO: 79419 - DNA, 866 bp, Homo sapiens
gctacttactttcctagccaatacttataataccaatactacattacctctgcagttatatcattctataattttatatatttgtgaagttttctatttctgtgattaagtaaagtatgatgattgtaaggccattatttataactctgctatagcacatgaaagagtaacataatgaaatagtcttttttgtatgattatgagaaattttgtatacatatatttaccaaaattaacagtattactatgttctacatgtatacaaattggtcacttattcccatatgttataaatacttattttaaaatttttcatttaaatcataaaacttcaatataattttggttgttcattcaaatggtgtgttcactcttgtctttatgatgtttttctttggtcactaycagtatatattctctttaaattatgtatttaaacatgttcctacttcttaaatgaaatatgttagatgatgatactgtcacatgcttcagcacttccttactaatttatactctctaaagaatatctgtggacattattttctaagttctttttttttaatttttttttccctttaagtgttcatgtatttgctctctgatagaaacataaattgggggagtacagagatatgtccttcaagttttttttttcacctagtatggaagtttatacattatccccagcaatttcattctaacagaccagtctggttctattttgtgatccatcagtctgatgcttttagggttggatttactgcctacattaacacataacggaaagaagatttttattagaattgatggaatcccaaactgaagagttaccatagtcctatgagatgaatttttctaactaa

SEQ ID NO: 79420 - DNA, 866 bp, Homo sapiens
gctacttactttcctagccaatacttataataccaatactacattacctctgcagttatatcattctataattttatatatttgtgaagttttctatttctgtgattaagtaaagtatgatgattgtaaggccattatttataactctgctatagcacatgaaagagtaacataatgaaatagtcttttttgtatgattatgagaaattttgtatacatatatttaccaaaattaacagtattactatgttctacatgtatacaaattggtcacttattcccatatgttataaatacttattttaaaatttttcatttaaatcataaaacttcaatataattttggttgttcattcaaatggtgtgttcactcttgtctttatgatgtttttctttggtcactaccagtatatattctctttaaattatgtatttaaacatgttcctacttcttaaatgaaatatgttagatgatgatactgtcacatgcttcagcacttccttactaatttatactctctaaagaatatctgtggacattattttctaagttctttttttttaattwttttttccctttaagtgttcatgtatttgctctctgatagaaacataaattgggggagtacagagatatgtccttcaagttttttttttcacctagtatggaagtttatacattatccccagcaatttcattctaacagaccagtctggttctattttgtgatccatcagtctgatgcttttagggttggatttactgcctacattaacacataacggaaagaagatttttattagaattgatggaatcccaaactgaagagttaccatagtcctatgagatgaatttttctaactaa

SEQ ID NO: 79421 - DNA, 866 bp, Homo sapiens
gctacttactttcctagccaatacttataataccaatactacattacctctgcagttatatcattctataattttatatatttgtgaagttttctatttctgtgattaagtaaagtatgatgattgtaaggccattatttataactctgctatagcacatgaaagagtaacataatgaaatagtcttttttgtatgattatgagaaattttgtatacatatatttaccaaaattaacagtattactatgttctacatgtatacaaattggtcacttattcccatatgttataaatacttattttaaaatttttcatttaaatcataaaacttcaatataattttggttgttcattcaaatggtgtgttcactcttgtctttatgatgtttttctttggtcactaccagtatatattctctttaaattatgtatttaaacatgttcctacttcttaaatgaaatatgttagatgatgatactgtcacatgcttcagcacttccttactaatttatactctctaaagaatatctgtggacattattttctaagttctttttttttaatttttttttccctttaagtgttcatgtatttgctctctgatagaaacataaattgggggagtacagagatatgtccttcaagttttttttttcacctagtatggaagtttatacattatccccagcaatttcattctaacagaccagtctggttctattttgtgatccatcagtctgatgcttttagggttggayttactgcctacattaacacataacggaaagaagatttttattagaattgatggaatcccaaactgaagagttaccatagtcctatgagatgaatttttctaactaa

SEQ ID NO: 79422 - DNA, 1041 bp, Homo sapiens
gtgcttatgggttttatgcttttatgcttatgttttttgtatcattgacaaattcaaktctcatcaagtacttataaacaaattaaatatgttttataataaatgaatgatagaatataatttataagaaatcaaatcttattttataagtacttctaaaataatagatgtaaatgaagtaaaaatttcaaactacagcctctccaggcattccgtgactatgagcttctattactcataatgaggatttatttccttgggaaccgtaagaagcaagatatctccttttacctcctgacagcagcagaagcaaatatttccaatcatccaaacccttctgtttctgcattcattagtgcatgcaattagtgggaactaggcattgactgatttgattgacatgtgtttattttctctcccacacactgtggaatcacagcatgagagtaatgaaagaagagctgtaattcacaaccatgattgtctggctatttattatcatcatacttacaactggacctggtgggccctggggaccttcccctcctttcagtccaggtgcaccctgggaaaagtgaaaaaaataaagaaaatgaatccatatgaattgaataccaataggaggagatatctgattagtaaaataaggatgtcaggtaatgtttatagacataactacatatatacacatatatgtaatgataatcaaatatatatgtttatatatcttcccttaatcatcacttcttaagttctgagaaaaaatgcttctaataaacaattggaatcacttgctttatctatatagatattgattatacctgagctccaggaagacctctttcccctgggaaaccacgtaatcctgctggtccatctttccctgagataccttgaggacctggatcaccctaaagaatataataaacatcgtcaagacagattaatttctacacatctttctacaaacaaaattgtgattacctctaaactactgtaagtaaaatgtgaatattatttaatgatgagaatattgggtgg

SEQ ID NO: 79423 - DNA, 1041 bp, Homo sapiens
gtgcttatgggttttatgcttttatgcttatgttttttgtatcattgacaaattcaagtctcatcaagtacttataaacaaattaaatatgttttatartaaatgaatgatagaatataatttataagaaatcaaatcttattttataagtacttctaaaataatagatgtaaatgaagtaaaaatttcaaactacagcctctccaggcattccgtgactatgagcttctattactcataatgaggatttatttccttgggaaccgtaagaagcaagatatctccttttacctcctgacagcagcagaagcaaatatttccaatcatccaaacccttctgtttctgcattcattagtgcatgcaattagtgggaactaggcattgactgatttgattgacatgtgtttattttctctcccacacactgtggaatcacagcatgagagtaatgaaagaagagctgtaattcacaaccatgattgtctggctatttattatcatcatacttacaactggacctggtgggccctggggaccttcccctcctttcagtccaggtgcaccctgggaaaagtgaaaaaaataaagaaaatgaatccatatgaattgaataccaataggaggagatatctgattagtaaaataaggatgtcaggtaatgtttatagacataactacatatatacacatatatgtaatgataatcaaatatatatgtttatatatcttcccttaatcatcacttcttaagttctgagaaaaaatgcttctaataaacaattggaatcacttgctttatctatatagatattgattatacctgagctccaggaagacctctttcccctgggaaaccacgtaatcctgctggtccatctttccctgagataccttgaggacctggatcaccctaaagaatataataaacatcgtcaagacagattaatttctacacatctttctacaaacaaaattgtgattacctctaaactactgtaagtaaaatgtgaatattatttaatgatgagaatattgggtgg

SEQ ID NO: 79424 - DNA, 516 bp, Homo sapiens
accatgactgcagatgtaagggtctcccacacatgctggtggctcagaagcaacagctgacagtaaaagatggaaacaccctttgcagmcgctagatcaaatggcttcagcgccaggccaaagatccagcttttagcccaagccaggaaagcagagtagagaagggttagctggaatctgcaaggtggactgccagtagagagcagcaggacctcaggtccaggcctctaaccaccccctgtctaccctagggcctgtggctgggcctcgatcaactgtatcaagtcaagggctcctgcagagcagagtctgagccccgtgcctgtgaactcctcatgcttctgagttcccgacgcagggctggtacacaggaggccacaatatagatctttcaccctgaggctttgttgtgtggctctcaggaggccacttggcacaggctttctgacatctctgtctcctgcctagcagccttcccagttaaaaagaggcagggtttcactatgttggccagcc

SEQ ID NO: 79425 - DNA, 777 bp, Homo sapiens
tgatgagaaaacagttacggagaatctccatattatagagtctccatattatagatgagaaaaacagttatagagaggtcaagtacggttgtatttaccaaaagaaagctgcaacaatgtttcttatcttacgtgtgcactcttataatgtgactataacacttcctctactgaaagataggttctatgtttcttatccctgaatctggatggatttgtcactatagaagagatactctgtgacttccaaagctagactgggaactgtatcagtggctccccactggttctctttaagcactcatttttggactcttgagccagctaaaaggtctgaggctgccatgctcttaggaagccccgataacagagactgggtatagctaatgtctggccaacagccccagcccgggccccaggcagtgtctactgctagatatgtgaataagaatacctcctgatcatttgatcattccagccctcagccatagtcaycttgagagttttgaatcctcttagttgcagttacaagcagtagaaatatgttatcattatgtttttttcctaaatccatgaccatggaatatgtgaatgtaataaaatgactgctttaagctgctgatctctggtgtaactggaaaattgcccaaagtaaaaaaaaaaatatatatatatatatagtaagcagaaaatctgagatttaaatctaaaaactctgattccaaaatctttagatactatatcacttgtgcttagtttctgtatagaaaatgccta

SEQ ID NO: 79426 - DNA, 777 bp, Homo sapiens
tgatgagaaaacagttacggagaatctccatattatagagtctccatattatagatgagaaaaacagttatagagaggtcaagtacggttgtatttaccaaaagaaagctgcaacaatgtttcttatcttacgtgtgcactcttataatgtgactataacacttcctctactgaaagataggttctatgtttcttatccctgaatctggatggatttgtcactatagaagagatactctgtgacttccaaagctagactgggaactgtatcagtggctccccactggttctctttaagcactcatttttggactcttgagccagctaaaaggtctgaggctgccatgctcttaggaagccccgataacagagactgggtatagctaatgtctggccaacagccccagcccgggccccaggcagtgtctactgctagatatgtgaataagaatacctcctgatcatttgatcattccagccctcagccatagtcatcttgagagttttgaatcctcttagttgcagttacaagcagtagaaatatgttatcattatgtttttttcctaaatccatgaccatggaatatgtgaatgtaataaaatgactgctttaagctgctgatctctggtgtaactggaaaattgcccaaagtaaaaaaaaaaatawatatatatatatagtaagcagaaaatctgagatttaaatctaaaaactctgattccaaaatctttagatactatatcacttgtgcttagtttctgtatagaaaatgccta

SEQ ID NO: 79427 - DNA, 987 bp, Homo sapiens
tattttcactagtctcctttgcagtcttgtctaaatgacactcaatgcacctaccaaaagagagcacactcataagtttgtgagataatgtctgagttgatattatctttgtttcattaacctacatttggagagttgtaaaaaatgcactttaaaaggtttagagtccaaatgacaaaatagttcccagtgctacaaaagatagaactgaacgactatgtaattaacatgcaagaaggattttcggcaaacaaattttttagcttctgtagcatggaagttaaatagtggggctgggtgcagtggctcatgcctataatcctagcactttgggaggctgaggtgggcggaccaactgaggtcaggagtttaagatcagccyggccaacatgatgaaaccctgtctctactaaaatacaaaaattagccggtcatgatggcaggtgcctgtaatcccagctattcgggaggctgagatgggagaattgcttgaacccgggagacagtggttgcagtgagccaagatcacaccaatgcactccagcctaggcagctgagtgagactccatctccaaaaaaaaaaaaaaaaaaaaaaaagagaagttaaatagcgtgaagaagactgaaagacacagcgaaatctccaggggaacaaagcctaaatctttatctccagaggaacaaagccagcacaggaattttttgagaatgtattcttagataaaatcaggtctttaaggttgtataattttataacactattactaacacagtctgctggagttagcttatattttatcaaatacgactcccttaaaattacagaaaattcttatctagaaggattcattgttaaactagagaagatggccatcccaaagataactgtagctgattgcataatttttcctaaggcaatatgggtttacacatttcctcaatttacaaatagtggaagtttactttatcacatgtgaaccttggaaa

SEQ ID NO: 79428 - DNA, 1178 bp, Homo sapiens
gcaggataagaagagaggagcaggaactgacaggtgagcaacgccagcaaactgcaagtatttttcatgagaattctagttctattccgtttctatatatatatttgggcatttgggtgtaccactgtagccagtgttagtcttaagcaaaatggcataatatagctctccttcttaccttctgtcttctcctcttgttacctctggataattagtacccctcaacactttatttaaaactcattcttactcctgcacccagtaaactcctaaacattcagtatctcacccccatttgtgaaataaaaacagctaatctggcataattcttatatgtgaagaactaatcctacaaaactgatgtatttctcctctgggaattatttgcattttaaagaacatctccttaaaaaagaaaaaagaaaaatactcccctatgagaattaagtcttactagtagttcaggcatcatataaagcaggcaggaagatgacccagaataaaggcattccctaatgccccaaaaatcataagaagaggtyattcaagcacccctactctgcctcttcataatccctagcccaccactcgtacccaatatctctgcccactaacattaactattcttggagactggaaactcagaggacaaagagcatctttaatatctttgtattcactatatagcatctagtaaataccttgtatattgttcttaactatgttctttaatttaatgttcttatttcattttgggaggctcagaaaacaatatcctaaaatacactgttttggacttcaaactaacagcacctgggagtagcaaatgctgggagggctttctcttatcttcccttatctgactatgagaagttcctttacaaggaacacaatcatcagccaggggaggttagctcacaggaaaagagactaaaggtctaacacgttgctcagagagacttttaccacaggctacaatctatccttcagagggctgctacctgagagacttcatctacataataagacaaacctttggttttagtgcatttcttcccctcactctctcatagcttgtcaccctcaccctccaggagccccagcccctattcctctctgtatgatataaaaacttcagtcatcttattcttctttgagtcatattttatgaggctccc

SEQ ID NO: 79429 - DNA, 1178 bp, Homo sapiens
gcaggataagaagagaggagcaggaactgacaggtgagcaacgccagcaaactgcaagtatttttcatgagaattctagttctattccgtttctatatatatatttgggcatttgggtgtaccactgtagccagtgttagtcttaagcaaaatggcataatatagctctccttcttaccttctgtcttctcctcttgttacctctggataattagtacccctcaacactttatttaaaactcattcttactcctgcacccagtaaactcctaaacattcagtatctcacccccatttgtgaaataaaaacagctaatctggcataattcttatatgtgaagaactaatcctacaaaactgatgtatttctcctctgggaattatttgcattttaaagaacatctccttaaaaaagaaaaaagaaaaatactcccctatgagaattaagtcttactagtagttcaggcatcatataaagcaggcaggaagatgacccagaataaaggcattccctaatgccccaaaaatcataagaagaggttattcaagcacccctactctgcctcttcataatccctagcccaccactcgtacccaatatctctgcccactaacattaactattcttggagactggaaactcagaggacaaagagcatctttaatatctttgtattcactatatagcatctagtaaataccttgtatattgttcttaactatgttctttaatttaatgttcttatttcattttgggaggctcagaaaacaatatccyaaaatacactgttttggacttcaaactaacagcacctgggagtagcaaatgctgggagggctttctcttatcttcccttatctgactatgagaagttcctttacaaggaacacaatcatcagccaggggaggttagctcacaggaaaagagactaaaggtctaacacgttgctcagagagacttttaccacaggctacaatctatccttcagagggctgctacctgagagacttcatctacataataagacaaacctttggttttagtgcatttcttcccctcactctctcatagcttgtcaccctcaccctccaggagccccagcccctattcctctctgtatgatataaaaacttcagtcatcttattcttctttgagtcatattttatgaggctccc

SEQ ID NO: 79430 - DNA, 1553 bp, Homo sapiens
acaccttataacaatacgctgcctgtagatataaaaactgaagacgttgaagggattagttatcaatacatcagatcatttctgaacagaattttattaaaacaaaacagaacaaaaatataaagttattttccttattatttatatttttctaattatgtatgggagaaaccttttatcaactggatatttttattgtgtttttgtttttacagctttattttaatgatattatgatttgagttggtagggatattccacagcaagctactttaatttctctgaaacccagtttctcctcagaaaaatggagaaattagtcatctctacctcatagaaatgttgtgaagatcaagataaggcacataaggcacttagcaagtgctgggaacatggcgaaggctaaatggatatgaactattatactatgatccttcttgaaacaggttataatggctgttttgaactgcatgtttgtgtccttcccctcaccccaaatgcacatgytgaaaccataatttccagtggaatggtggagcctttcagaggcaattaggtcatgagggtggagccctcatgatggattaatccctcatgatgggattagtgccgttttaagaagaggcaggattgagctcaccttctctgtcctcttcaccaagtcaggacacggcaagaagatggccatctgtgaaccagaaagagagccctcagcagaactcaaccatgctggcacccggatcctggacttcccagcctccagactgtgagaaataagtctctgttgttcatgccaccctgtctatgggattgtgttacagcagcccaaacggactaagatgatggcactgatgtcgagtctgtgtgcagcatacccatattgtcctgtgttacagattatattttccaaagatggctgcaacaatatcttgcagcatcccacgtgtgctctccttacagggtaacgctgccatccctcccattaaaggggactcgaagtccactctcctcgaagacggagggcctctgtgacttccttgaccaagagagttggttgaaagtgatgctatgtgatttatgaggtcataaaaatacatatttctatcatgttttcttggcacatatgttttcaaaaaagtcagccgccatataaacagtccatcttccctgaggtgccgtactgtaaggaagcccaagctagcccatgcagagagaccacatgcagaaactctgaaaccaaatggacagagtgggggtggtggtgcctggttatcacccaggcgcccagtcctcattataccagctctagccattgtttggctgcaactgcgggagcagtctcaagccagaactaccaagcccagcccttcctgaattcctgacccagagattccaggattgtaaaaaatattttagcataactatttgttttgcagtaatagtcatgaaacattctccttttatcacttgagccttcttagtgacagaaagaggttctctgtgaagtgtgaaataacagagtaaataacatcatactgagcaaatcttaagtt

SEQ ID NO: 79431 - DNA, 1029 bp, Homo sapiens
aaagtctggataattaaagagtttgttaattatactatgttcccaaagttcaattaaagtattgggccagaattcattagatagcatgccttgttgaatacgagttgtgttggctgactctcacataaatgagttcatagagataccatcgctgtcaaagtaggatttaggaatcccaatattggtgatattaatgagaattcttatatctctgtggaaagcatgacaatctgatcacgctaaaagaaattcttattaaacttaaaaatttggtgaaggcatacaaatcccttttttataattgctaaataaaaaatttgaaaatccctgctgttctgtgtaaataagcagaaaactcaggagaccatgccatactctttccggagatttcttaactcaaatttaccatcgttagaatggttarcattatatattcagatataactgaatctacttactaccactagagaacaatgataatttaataagcacagtgaagtatgtaagcttgttattaataaaatttcccagcctctgttactaatactgtgaaaaaaatcattaaaattttaggacatgtattaagaatttaaaagaatttaatatattatttgttctatcttttaaatgacccatatttggaatattggtatttatttcagcttcttttatctataacaacttatacaaaaagcattctaatttattttagagaccaggctgtcacttaggctagagtgcagcgtatgattatggctcactgcagcctcaatctcccaggctcaggtgatcctcccacctcagcttccctgagtaaactgggcctgtagacacacaccaccataacctggctcattttttttttctcattatgttgcccagactggtctcaaactcctaagctcaagcaagcctcctgcctcagcctcccaaagtgctgagaatacaggcatgagccaccatacctggccaaaaaaaaaagcattccaatttagaatagaaaaaacaataaccacacataattatact

SEQ ID NO: 79432 - DNA, 1029 bp, Homo sapiens
aaagtctggataattaaagagtttgttaattatactatgttcccaaagttcaattaaagtattgggccagaattcattagatagcatgccttgttgaatacgagttgtgttggctgactctcacataaatgagttcatagagataccatcgctgtcaaagtaggatttaggaatcccaatattggtgatattaatgagaattcttatatctctgtggaaagcatgacaatctgatcacgctaaaagaaattcttattaaacttaaaaatttggtgaaggcatacaaatcccttttttataattgctaaataaaaaatttgaaaatccctgctgttctgtgtaaataagcagaaaactcaggagaccatgccatactctttccggagatttcttaactcaaatttaccatcgttagaatggttagcattatatattcagatataactgaatctacttactaccactagagaacaatgataatttaataagcacagtgaagtatgtaagcttgttattaataaaatttcccagcctctgttactaatactgtgaaaaaaatcattaaaattttaggacatgtattaagaatttaaaagaatttaatatattatttgttctatcttttaaatgacccatatttggaatattggtatttatttcagcttcttttatctataacaacttatacaaaaagcattctaatttattttagagaccaggctgtcacttaggctasagtgcagcgtatgattatggctcactgcagcctcaatctcccaggctcaggtgatcctcccacctcagcttccctgagtaaactgggcctgtagacacacaccaccataacctggctcattttttttttctcattatgttgcccagactggtctcaaactcctaagctcaagcaagcctcctgcctcagcctcccaaagtgctgagaatacaggcatgagccaccatacctggccaaaaaaaaaagcattccaatttagaatagaaaaaacaataaccacacataattatact

SEQ ID NO: 79433 - DNA, 1029 bp, Homo sapiens
aaagtctggataattaaagagtttgttaattatactatgttcccaaagttcaattaaagtattgggccagaattcattagatagcatgccttgttgaatacgagttgtgttggctgactctcacataaatgagttcatagagataccatcgctgtcaaagtaggatttaggaatcccaatattggtgatattaatgagaattcttatatctctgtggaaagcatgacaatctgatcacgctaaaagaaattcttattaaacttaaaaatttggtgaaggcatacaaatcccttttttataattgctaaataaaaaatttgaaaatccctgctgttctgtgtaaataagcagaaaactcaggagaccatgccatactctttccggagatttcttaactcaaatttaccatcgttagaatggttagcattatatattcagatataactgaatctacttactaccactagagaacaatgataatttaataagcacagtgaagtatgtaagcttgttattaataaaatttcccagcctctgttactaatactgtgaaaaaaatcattaaaattttaggacatgtattaagaatttaaaagaatttaatatattatttgttctatcttttaaatgacccatatttggaatattggtatttatttcagcttcttttatctataacaacttatacaaaaagcattctaatttattttagagaccaggctgtcacttaggctagagtgcagcgtatgattatggctcactgcagcctcaatctcccaggctcaggtgatcctcccacctcagcttccctgagtaarctgggcctgtagacacacaccaccataacctggctcattttttttttctcattatgttgcccagactggtctcaaactcctaagctcaagcaagcctcctgcctcagcctcccaaagtgctgagaatacaggcatgagccaccatacctggccaaaaaaaaaagcattccaatttagaatagaaaaaacaataaccacacataattatact

SEQ ID NO: 79434 - DNA, 814 bp, Homo sapiens
atccaaaagatgcacatccaacaaacacctgctgaatagaagccactgaagccataaactggtaggaatatttaatttgacaagtttgacaagtttttgtaagcttaatgaagactttcatgagaataaaaaatttctgatagctaaattcttatggagagagggtgatggtgctcacactcacattcctcccaggactccatcaggttttcacagtgaaagcctaagaaagagccctgctggacccaaacatggtagaaaaagaataaccattttgaaacacaggaagagacttatctatagcaaaaggacttcaccagaacacaattctgaaaccatatcccaactagggaaagggaataccttcctacttcaacttcctccagccttctygtcttacaatgggggaaaaataacatgtagcaaattgagaacagggactcaaaagaaatagatttggaatagcacaggaaaacaaaaaccagaggactaacagaaacactagtgaagcctataataccaaaacacaggcccactaaattataatagtatagaatgttcaacctcacccatatcaaaccaccccaccaacaagcaccagtatgataacatggtatgttagtattatatatgttagtattatactaacatatcatgttaatgagaggaaaatctgaaagtgggatatatgtgaacttggtactatcttctgaacctttatataattctaaaactattctaaaatacaagtttattgtaattaaactgacattacaaaaaagaatgaagcaaacacactaagtttatttgatgc

SEQ ID NO: 79435 - DNA, 536 bp, Homo sapiens
gactgtattaatactcattttagaaatgagaaaattgaggtccagaaaggtyaatggacaaaaacagttagtagtagaatttgtttcaagatctccctattccatgttgtcttcaagcatctttcatggctaaatgttgttgaactcatccaaaatattaccggaagacctgttaataaagtaaagctaaatttattaggtcttattgcagtcaggaagcacactattttgacagtgtctcaaaaggggagaaagaagagcttttccatttggtaagcggattaatgcacatctttctaggtgttgaacttattaggattgggcaaagtttgtgatataatagcttaggattggtggacacaatgaagtaactattttaaaatgagtcttgataagcaagctatacttgacaattaagctctgtgtccacttccaataattctggtaattttttgaaaaaaaaaagtgtgataaagatatttattgctttacagtgttacctttctcatgcaaagttttcctggaacacacaacta

SEQ ID NO: 79436 - DNA, 2392 bp, Homo sapiens
tgcatcatcttactgatcaaaattagaaattaaaggagagttaaattaaatatagaacttctgaaatttttctccatactccactttggggatgactgagttagactataaagttagtaaaaggcaactaggctggaacttggtgaagggattttgaattggaagagtgtccacaaaccctatttcttcacttttaggtgcagccctacactccacaattaaaacttcttgaaatgttatccattcggtctttatttcctctcttcctctctcttccttcccttcttcccttcctccgcctccttccctctgtctttttctctctccctctgtccgtatctcctttctctctttctgtctctctctctgagcagctgcactgaagtccaattccaggacatctgatttcttcagcaagggggtgttaatttctaygctctgccacccactgagtcatgagataaaggaagagttgggagaattatagtcagaatttatcttgacatgagtgaatattggtactcataattttaacatcaggttcatctgacctaacctcttaatcctaaacatcttcattttatgattttttttgctctggatacttatgactcaatccctttaaattcccagggatgtaatatccttgaataaattttctgactaaaagaaaaaatatattgcaataaaaatggggtatgggccgggtgtggtggcccaacacttgtaatcccagcattttgggaggccgacgtgggaagatttcttgaggtcgggagttcaagaccagcctgggcaacatggtgaaaccctatctctacaaataataaaaaattagctgggcatggtggcttgcacctgtggtcccagctacttggaggctgaggcaggaggattgcttgagtccaggaggctgcagtgagccatgatcgtgccactgtactccagcctaggcaacagaacaagacaccatctcaaaaaaaatatagaatatggacaaattcagaaagtttgacagtattttttgatcctggaaagagtcttaaagcccatctgatccaatgcatgaattttcatggatggggaaactgaggccaatgatctgcccaacgctgaacaagggcacaacctggcctcaagtctgaacttctggctcctttctagagctcttcccaggcagcatattgcttctccaaaggatgtttgcaaataacatgaattttactatttgatgcaagacacaacatcttctttgctgaaatttttaatactaagaaggagtcatccattgagcagattctaagttcaagttaagataaagaactgacgtctggaaatgaattttgtgatagttgatactggaatagctccagttccatttaaaagtatacaaaatggcaaaatgttggaatttacaataacctttgcattttatagacagtgaagtcaaaatggctgagctcataagattctgcattacaaacgtcccaaacgctcttgagcacctggtgctatttttagctctaaacggtaattaaattaaaggggactggttaaagggtaagtacccctcctcctaacacacacatgctaagtagcttgttttctttttcagaaaataagagaaagtattattcaataattcatttaaaatccactttgagtgtcctctatgagccatgatatgtactaagtgctggggttacatgtcctcaaggagaggatgacagtaaataattccacaaataaatgtaaaatttcaactgtaataagtgctactgagtggggaggcgatttgaggctattcctctcaatcccataaaaagctaaatcaaggagtttgatccactcatgaaaatcagggaagacttcactgagaaaaggatggttgtgctttgatctgaagggtgactgaaaattaaccagagaagggaagaagagagttttccacgcacagggaacaactgccctaaggtccttcggcaagtatcggagcaaagagtggccaagcgtggctacttcaacaacaacctctccttctgctttcctgggagaatctccatttgcccagtggtccattttagaccaagaatccgggggttggggctgacctcatccccatctctaagaaagggctctggttgctttaagccaatcatcaatctgccgaagtcattagaagggcggctccatggccccacgctattttggtgtaacttctgtggcttggctttgtaccttttctaaatgctgtgttatttttctggctcaagggttccctttgatgtgcatttagcccacttactcagagtcacatagaggttacaaaaaacaaggtccccaggtcctggagtgccagaatttacctgggacagctccagtttacctaatg

SEQ ID NO: 79437 - DNA, 1496 bp, Homo sapiens
  misc_feature (1)...(1496): n = A,T,C or G
taattacatttttattatattccttatgatttttgtattttatggctatatttttcctctgaaagtattaatattagagaagagagaacttatacaactcaaattttgtatatttttcctggaaccaggaagataataagtttcttgtttttacatgaaagtgaattgggagcctaaagtaagatttgtgcagaaaaatgtgtcataacttaaaatggcaatagctaaattcttgtcagaaaacatagcttctataaagatatacactgaaaatatttatgagaaggtaggatatagaagtcagtgtcacaccaccaaaaatgagaaggaactcatgtgaggaaagaacattttaatttatctaatgtccttaatatgtacatttgcagatttacctatttttttttggcctctcaaagcctcagtttcctcattatttaagaaatgtatttaaataattttaagattggctatatattagctattaacaaccatgatttcccagtagtcaagttgtaattgtattaaaaatttagataacagttgatgttggaaatagagaaaacagggagcatttactagaaagggggcacagataagaatacattgcttttccaaaatcaccattactatctactggtaaggagtaaagtctagactggaccctgtaatattgtcttagtgttggagatataagtgtgtgtgtgtgtgtgtgnncncncnctcccccccccnnnnnnnnnnnnnnnnnnnnnnnnnnnnnnnnnnnnnnnnnnnnnnnnnnnnnnnnnnnnnnnnnnnnnnnnnnnnnnnnnnnnnnnnnnnnnnnnnnnnatgttttcatttctcaatttagccttcgtgtattttccattcctaattctagctcattttatcacagattcaaaatatatattttactgaatgctgaatgatgtctgcttgcatatctaacaaattgaacatgaatgatgtatttgacttacaggagatacactgtgaaaatcagtgatatcagggaaggttaaaaatgtataaagcatgttattaccacagaagtataactggggaaattgtactcctcttattttgcattagtacatatagaaacttataaagggtgggctgaaacagaataatttaaagatcaggcttctcagagcacagggcatcaagtctccatttgtagctgtagggactctgtgaagcacatatcacaaaactgctcttgacagtttggacagtgtggatttactccaactggcactgggatggcctcccaaagggagcatagtcaaggtgcacacgggcccaagtgcccatcatctgtcaracaccctttctcatctctgacttgggttcatttcactttatctctgagacacagacaccacgtcacccatgacatctgacagaaactacaacagattgagaaaataaaaataaaccttgaaagctcaacatttaaatcatgttgtatttctttgaaaaagctg

SEQ ID NO: 79438 - DNA, 776 bp, Homo sapiens
caaaacttcaagggaaagacaaatatcttgggttacatggaaataaaatctcgccatttcagtaacatcctggttcaagccaccaacaatagttacaacatcccaatatgttactgtgaaaaattattttattattaatgtgataagctgaattatatatgatagctaaaggtaattccaacctggcatttgtcatttcaatatttagaacaaagtcatcatggtatgttacctggttataattaagctaaagtttaatatagggcttaattttcctggttaaaatggaatagaaaagaaggtctcattttaggcatgctaagcacggctttctcatgatatctttgttcttggagcaacattccaataagagggcctaaaaagaaaacattgaaaaatatatcagcaatctcaggaattggacaatgccattaaacaaaataataggacagtaattttattcatcatcaacatattattaaacaagtatactccgtattttagtttttgttttaatactgagaaatgtagatcayggcaaaaataaatacatttgtttaaaatcataaaacacattatgaaccaatttaagattaaatctttcctgctataaattcaaaattacataccattatacatcctaattctaaagcattatgctttatgaaatcacgctccaagaatatttttgtagtgcaattagtggcatcattaatgaataattcaaatttcttaattcaaagaaactgaaaatggcagaagtatttggtggatcc

SEQ ID NO: 79439 - DNA, 1040 bp, Homo sapiens
tgttggtataatgtggcatgtaacctcttacagcatcgttgatgaatataacttatttcaaaagccaagagcttgacaaggattctagcagaatactgacatggcatatgagcaaagagtctaaggaattttattccaggatgtctagccaggatatttataaacaggaatcaattctaaattgacagtagagtagactatgccaggttgagcaatgatgatattttctgatacgtgtagaaatgatcaggagagagaaaatgtttaaaactcatagattggcaccaggttaatcaagacaggtgttagtgcctgggtcactattctgtgtattcagagatgatggcacaaaagccatcactgcctggtcctatgcaacattttttctcaaattgagcaacctgatctgtgagggctgcccataagcgttgtctgctgggccacttggcagcaattttcagtctatttctgtaaattgagcttcacagtgycctttgaatgtttccccttccagattgcaggggccccaatgctgtttagtttacagggctcactttcaacataatgttggaagggctgccttccaacataatggggcctagataaattgaacggtgcacctcatttttatgagcccagtaaaactcccaccagcagagcaagtgggggttcttttcaggtttggtggaagatagaggaaaatcatcagaagggcagttggttatctgtttctaggtttagaacagtgggatattcaaactgccccagtttctggcccagagtttctttcatgattctgtaagattgttgtaggaggttcttcaagaataagtgagcaggagttcttatgcttctgcaagcttgtgcttaaactgactgaacagtagtaatcagatattcccttcctaagaatgggaaggtgatatgcaccaggaatttctacttgggtcttgtggatagtgccacattccagtatccatatgttgggagctttagcccaggtgtctctaaaatggtaacaaagtaactgttcctgttcc

SEQ ID NO: 79440 - DNA, 612 bp, Homo sapiens
agattttacaaaattcaatttgggaaataaggtgctaaattatatctaatgttccctccaagcataaaatcatagtcatttctcaaaacagtcataccaatgctcaccagatacatgaaaaagtacttaacatcactaatcatcaggaaagtataaattaaagccacaaaaagatctacctccacacttgttacaatagccattaacaaaaagacaaaagatagcagttggtgaatatatggagagaagagwacacttgtacactgatgatagggatgtaaatttgtacagccaatttgggaaacagtgtggaagttcatcaaaacattaaaacagaatcattataggacccagcaatctgacttctgggtcatatccaaagaaaatgtaatcattatgtcaaagagatggcactcccatgttcattgcagcattattcacagtagccaagatatgggatcaacctaagtgcctatcagcaaaaggatggttaaagaaaatactgtatatgtgcaatagaatagcatttagctttaacaatgaaaggaattctaccatgaatgacattatggatgaatccaaaaaacactggtaagtgaaataagccagata

SEQ ID NO: 79441 - DNA, 2130 bp, Homo sapiens
  misc_feature (1)...(2130): n = A,T,C or G
gctacataaaaattatcatattaatttctacaccagaacaactatcagactgaattaatggtgtgacttaatcacacaaagaagagggtctttttaatattgccttgtacttagaaaatcatcacttaaccagaagcatgatttcaaaatatgcaaaaaataaatgaatcgagaatcattggtaaaaaggtatgtatgtatatatatatacacacagatacagcttttgtcatacacatacaaaatgtataatcttgttgatacaataaaataataatcaaatttcccatctctaaatgaacaatataaaatatcagcaaaacactcaagctggtggatctaactctggtatatgccattgtagaaaaatgtagatatttcaaacttgtgtatggtccctaacaataaataatcagtatttcagagtaaaagaatgtgtctgaaattttctgtagattcttcttaatggtcttgtgtcagttgttgagaaactcatatgttccacctttttgcaggtttgtgtgtatgtgtgtgcatatacatagaaagagtatagggagacgtgttttgaatttgccatagaagctaaatttttctctgcacataaccttgcagaagatacttactagagatgcatctgagcgaacacccaaggcagytgacaagcacatctgcccttctgtccaaaaactctttgaagggttaactcatgttgatgcttcttcccacctggtagcatggtatttaaggttaatggcaatagtgctggtcatctgaattgacaaaaaaaaaaaaaaaaaaaaaaaaaaaaaaggagtgtagtggaaatactagcgatctaaaaccaaaaaacgtggtactgtcagtaattccctctttgtctttggctcagccgattaacctccctggacctcacttcctttgctgtacagcaaaagctttgtaatttagcaatattttactgactgagttttaatttaaagaaaaactgggtctctcaagatgttactggcagtacaatggcaaatcaacttaaaaattgttgctaatctgatgagcatgatggtagtaaatctggggggcatgccttaaaaaatcagtttaaaccgttcaattccataatctaaacattcaaacaattttttaaatttgggctcataaattttnnnnnnnnnnnnnnnnnnnnnnnnnnnnnnnnnnnnnnnnnnnnnnnnnnnnnnnnnnnnnnnnnnnnnnnnnnnnnnnnnnnnnnnnnnnnnnnnnnnnagatatgctgcaagtaggcaagctcactctaagatgagcaaggaaacataaagcaggcagacagtgaggatagggaaatcatgcagaagaaccaaaagaaaggaaaaggagcagaatataagaaaatgagagtctgcttaaaccgatgtatggtaacaagctcagacactggaaaaacttcacagtcaaaactgaaacagcacatctgatttgcagaagcagaacagtgcaaaaatgaatagtgtagaacattttggtccttaaagctaggttcacattcatccccaggaaatgccagtgattgaaaaagtattggattcctcttgagtagttaaagatgaatttcttctttttccctggagctgtcaaaattgggaaagaagctcagaataattgctggacttggtctcataattagagatctcgtttgtgtgtccgaaatgggcaaccttttaaccaaacaaagtttcactgagtacacaacaaaaaacattattattatttatattaaattatatgtgtactttaagagaaaaaccacagtgtttacaaatcatcatgttaacctcaagcatcccttaagccatatgccagccatcctcaattatcccttttactactgattatttggaaagtttcccatagtagaaacaatcttaaaaatttactaggcccaaatcaaagtgccattagcaaacaagactggtaccaaacctatatgccaagagattaaaagaaactgagaagaagtttctctttgaaaatggcatctgtcaccgagctcatgaccaaaatatcctccaacttattactagagtatatataaaaacatgcacacccaaaatagcatataccagaacatac

SEQ ID NO: 79442 - DNA, 554 bp, Homo sapiens
ttgaaaagttaaatcttctatataaaaattaattttttttctgtagatttctgttygagatagggcaattctaggtcatctaacatataaactcccaaacattagcgggttacataatagaagttcacttctttcccatgtgacagtccactattggtgttctttcaaaaccaaattcccacagggcgattcacagactccaccccttaaccccccacaactctttctaataagtagctccatcttcccacagggcagcagtaatccagcaccacagaaaatattcaagacttttttagtgatttcgtgagttaatttttgtaataatactgaaatgttatctgtcttttttattctcaccccgatgagctaactgtcacattctccataactgtatgatatgtgataacttagtcacttgaatgaagaataagaaagacagtaatcagattttcaaaatgtaaaacaatgccagttttctatttttttgaaatatagttatatgtcataaacatggattatgtttacataatgggtatttgttttataataaa

SEQ ID NO: 79443 - DNA, 554 bp, Homo sapiens
ttgaaaagttaaatcttctatataaaaattaattttttttctgtagatttctgttcgagatagggcaattctaggtcatctaacatataaactcccaaacattagcgggttacataatagaagttcacttctttcccatgtgacagtccactattggtgttctttcaaaaccaaattcccacagggcgattcacagactccaccccttaaccccccacaactctttctaataagtagctccatcttcccacagggcagcagtaatccagcaccacagaaaatattcaagacttttttagtgatttcgtgagktaatttttgtaataatactgaaatgttatctgtcttttttattctcaccccgatgagctaactgtcacattctccataactgtatgatatgtgataacttagtcacttgaatgaagaataagaaagacagtaatcagattttcaaaatgtaaaacaatgccagttttctatttttttgaaatatagttatatgtcataaacatggattatgtttacataatgggtatttgttttataataaa

SEQ ID NO: 79444 - DNA, 756 bp, Homo sapiens
acttagtccctaggcagaagataacatgtgcgatcactgtagaaattatagcagctttccgattgaaatagccctgagagtttcttgtgactattaccttgagctgaggtgtaatcccttaccagtggtgtaatcctaactacaatacaacagttaattgtcttctgtgttcttatttgtggttcagaacacaaattgttatttttccatcagcttttcttgcttgttgtttgttttttacctaattcctttcctgttgtagtagttgttatatgcttggcttgacatagttaggctatttggtactgtgatattaagatatttttkaggaaaaggtcatcagctgtctttctgggctattctgggcattttgtactctattttggatgtaacttttcttgctcttgatttctgattagctgttcttcctccttgctttggcctctcaacttgcttggaagcttttcaacaaatctgcacttggatgacggctttgttcaacaaataaacattatctcaaccttggggaagagttaagaagacacaggatggaacactgttagatgcttctggttctaagcatggaattcctggaacagggaagctagcttccaatacattgaagtccggaagttgttttcctgctcaaggaggtcacatttctaccaagagaaatgtgaattctaaggcattttcaaaagttttggatgatttggtgagatttaaattgtcttatttttgataaatttttagaaa

SEQ ID NO: 79445 - DNA, 1079 bp, Homo sapiens
tgcattaagcatgtactgtttttttgcatgtcaattttacctcagtacagccggttaaagatagaaaaataaaataaaacaaaaatgtacaaatcaacaataatgttaaacttctttttccatcatccaacctttctccaagaactaggcttcctcctacttcccaaccaaatctcccatctactctctggggtaaatacttggctccagccaaactagttcctgcactattccaacaataccccactggacttacttgcttcatgttagttaactgtctgaagttgttttcccttgaggttcccttccagctcctcctcatcctrtgtagttcagtgtcccaacccctctagggaatcttccttgagcagcccagcccacacagatttctcattgctctgaacttgaacattgtctgtatcagtcacatggcaattaatcatgctgcatgaaacctcttctattgtggcattgaaacataaatttgtaattttattttgagggtttacatattgtttcctaaaccaaacagaaagctcattcagggaccatgtcaattcaagaaagctgttcaattcatcaaaattcttcctatgcttttttaagccacaagaaaatttataaaaacaagttggacttgtcttttccttcaaggaatgaacatgtgactacagaaagagcactggactagaacaccaatgatgaaagttcaagtttaaattctgccactcaaaccatatgaccttggatacgttatttagcctctgtgaactatttgtcaagaggaaactactcttccacaagatttgcttttgatatggggtgagaagattccaagcagaggcaacagactgtgaagatcttcggagaggaaaaaaaaagcttgatgtgttcaggaaaaggaaaggaaaccaggaaaggaaaccaggctggttatattaattgagtatttactatgaactgacattttcttagcatgtagtatctcactttagtcatcataataactctgagagttaatctcacaacagggtaaactgagatacagagacgttaagtaactcggctacacagttaat

SEQ ID NO: 79446 - DNA, 1079 bp, Homo sapiens
tgcattaagcatgtactgtttttttgcatgtcaattttacctcagtacagccggttaaagatagaaaaataaaataaaacaaaaatgtacaaatcaacaataatgttaaacttctttttccatcatccaacctttctccaagaactaggcttcctcctacttcccaaccaaatctcccatctactctctggggtaaatacttggctccagccaaactagttcctgcactattccaacaataccccactggacttacttgcttcatgttagttaactgtctgaagttgttttcccttgaggttcccttccagctcctcctcatcctatgtagttcagtgtcccaacccctctagggaatcttccttgagcagcccagcccacacagatttctcattgctctgaacttgaacattgtctgtatcagtcacatggcaattaatcatgctgcatgaaacctcttctattgtggcattgaaacataaatttgtaattttattttgagggtttacatattgtttcctaaaccaaacagaaagctcattcagggaccatgtcaattcaagaaagctgttcaattcatcaaaattcttcctatgcttttttaagccacaagaaaatttataaaaacaagttggacttgtcttttccttcaaggaatgaacatgtgactacagaaagagcactggactagaacaccaatgatgaaagttcaagtttaaattctgccactcaaaccatatgaccttggatacgttatttagcctctgtgaactatttgtcaagaggaaactactcttccacaagatttgcttttgatatggggtgagaagattccaagcagaggcaacagactgtgaagatcttcggagaggaaaaaaaaagcttgatgtgttcaggaaaaggaaaggaaaccaggaaaggaaaccagrctggttatattaattgagtatttactatgaactgacattttcttagcatgtagtatctcactttagtcatcataataactctgagagttaatctcacaacagggtaaactgagatacagagacgttaagtaactcggctacacagttaat

SEQ ID NO: 79447 - DNA, 770 bp, Homo sapiens
aaaagatgaccctaaaattaattataattatttttgccagaaacaggtgcaagaggaatgttgaatcaagcaaaatcttcagatctgtgctgttgtggtggagtgtgctttctctggatctctgccctctaggactcctccggaaatcatgccacaccagtgacatccatcattgaaagaccccatgtctttccccttcaccaacactggttatgtcactaaaaacctcccagagaaccaagctggagcctcttgtgctgtgcttttaatgatactcactcagaattgagcctccagccctgaaattttcatttaagcacattgtgaaaatgctcattctaattgacatcatcaacataacacttcatctattattcacaggctccagcctgtctcctgattcagaaggtgcagatgacaagggcttcgtgttgcccagtwggtgaacattgagttctgttgattttctctgccatgtctcttctcttgtctgtttccctcctgctgtggccctgatacaggcttttcttatctggaccctctcagcagcttcctcactgtgttcgctgcctccagttcctattctcctaatgaaatgcacaaagagctacaggcatttgcttcaaatcgagttctaattgggccacttctgtactgcaatcccctgcagggatctatattcccttgggagtcaaatttaaactgccttgagagcattctgggccccagcaaactacttttccaacccacctccctctctgttcatcagt

SEQ ID NO: 79448 - DNA, 1430 bp, Homo sapiens
gccttgtatttagaagcaggactgactccattggatcaaggaaaactctggataagaagcagctctgtggctctcttgagstcggccttgtcatctgctggtcccccaagctgttgaagtggtcgcactactcacccgcttcacttgatttaacacatgacataacaaacaatgccataaagcaaggactgctggactccaattcctttctaaatccagccctagactcttcccaaattctagctccatcttcaggcgatgatgaagggttaaaggctgaaaactcaggtataaattaaacaataggcagctttcttgtcttaacaaatataaaatattcagagaagagtaggcctgactctacttgaaatgcaagtaattaagtagaggcctgaaaatccgcgatttgttcactgcggtcagggctggggagggctcttcctgctcttcagaagccgactccggtgtggcacttgtcaggcgagtcagccaactgcagacgcaccagaagggctgcaatctgtccgggtgctggagagaaaactttggcacttaagtctgacgtttgccactggcaatgaggtctgtatttgcatgcaagggatccctttgccaaccacccaatacttttcaaagtcatttctccatcagtcatctgagtgttatggccactctcatcggtggcttggagtttcatatgtgccttgcacaaccctcatggccctctggaagctgactttctgggttgggatccatgctccgccaatcctagataggaggccttgaacaggtgactttagtctctcattgccacagcttcctcatctgtaaaatggagttgttttgaggatgaagttagaaatgcaggtcaagtgtttactatcatgtctagtccattgtatgttttcagtaactatcagtttttatcaataatgccagattggtttaaggttcaactggggtcagattggtttaaggttcaactgggatgatgtatttgaaaatattttgcaaaaagctgcatataatgcacgagttatgacgctaaaggtctggcatagacacgacaggtaatgtcctcgtattgtagatgaagaacctgtgcacacagaggtgaatgaacctgcctcatgccacctggtgtctgaggaaagggtgatccctatgctgttgcagattctcttagcatgcagtgatggggcctgatgtgatgtggggcctgcccaaaggcctgaatctcccatatcagagcttaggtttggtacaccctccccacatctgtcaggtcttactattactttctggtggtcttctctgtgcatacccataaatgtctatgtctacttagttactgtgagttggtatagactctagcctttcaccattcttatcaataaatcaaatttcactcaagagttgtgttgttgaca

SEQ ID NO: 79449 - DNA, 1430 bp, Homo sapiens
gccttgtatttagaagcaggactgactccattggatcaaggaaaactctggataagaagcagctctgtggctctcttgagctcggccttgtcatctgctggtcccccaagctgttgaagtggtcgcactactcacccgcttcacttgatttaacacatgacataacaaacaatgccataaagcaaggactgctggactccaattcctttctaaatccagccctagactcttcccaaattctagctccatcttcaggcgatgatgaagggttaaaggctgaaaactcaggtataaattaaacaataggcagctttcttgtcttaacaaatataaaatattcagagaagagtaggcctgactctacttgaaatgcaagtaattaagtagaggcctgaaaatccgcgatttgttcactgcggtcagggctggggagggctcttcctgctcttcagaagccgactccggtgtggcacttgtcaggcgagtcagccaactgcagacgcaccagaagggctgcaatctgtccgggtgctggagagaaaactttggcacttaagtctgacgtttgccactggcaatgaggtctgtatttgcatgcaagggatccctttgccaaccacccaatacttttcaaagtcatttctccatcagtcatctgagtgttatggccactctcatcggtggcttggagtttcatatgtgccttgcacaaccctcatggccctctggaagctgactttctgggttgggatccatgctccgccaatcctagataggaggccttgaacaggtgactttagtctctcattgccacagcttcctcatctgtaaaatggagttgttttgaggatgaagttagaaatgcaggtcaagtgtttactatcatgtctagtccattgtatgttttcagtaactatcagtttttatcaataatgccagattggtttaaggttcaactggggtcagattggtttaaggttcaactgggatgatgtatttgaaaatattttgcaaaaagctgcatataatgcacgagttatgacgctaaaggtctggcatagacacgacaggtaatgtcctcgtattgtagatgaagaacctgtgcacacagaggtgaatgaacctgcctcatgccacctggtgtctgaggaaagggtgatccctatgctgttgcagattctcttagcatgcagtgatggggcctgatgtgatgtgggscctgcccaaaggcctgaatctcccatatcagagcttaggtttggtacaccctccccacatctgtcaggtcttactattactttctggtggtcttctctgtgcatacccataaatgtctatgtctacttagttactgtgagttggtatagactctagcctttcaccattcttatcaataaatcaaatttcactcaagagttgtgttgttgaca

SEQ ID NO: 79450 - DNA, 404 bp, Homo sapiens
cctggatcaacttagctatatagcatcttttctatctgaatgcagtattctcttacccacaaccatatgaagtctacacatattcaytaacagtattatataaaatacaaaattgggactatgtcccctcaagatgagcacagtgctaagaggtaagagatgggaagtttgtattaagttcaaacacttttggcaagaatttatacaatttcaggtaactgggcattttaggcaaagcacacaacttcatgatgtatcactgaggaggataagataaacagttctaaaagctggtacaggtgacaaattttgtgcaattttaagttttacatttttttgtacaaataggatcttgctatgcagtccaggctggtcttgaactcctggcctcaactgatcttcct

SEQ ID NO: 79451 - DNA, 1271 bp, Homo sapiens
ctggccaggcccggtaactcacacctataatcccagcactttgggaggctgaggtaggcagatcaccagaggctgggagttcgagaccagcctggctaacatggtgaaaccccatctccaccaaaaatacaaaaattagccagatgtggtggtgmacatctgtaatcctagctactcgggaggctgaggcatgagaatcgcttgaacctgcaaggtggaggttgcagtgagccaagatcgccccactgcactctagcctgggcaacagagtgagactctgtctcaaaaaaaaaaaaaaaaaaaaaaaaaaggaagaatgaaaagaaaaaggatctgtattccttcatttacagatggctcccagaaggaaattgtcacacaaccagcagatagcctattcagactgttctgttgccccctgaaggtctttaaggagtgatatgattagtgtctgagtggattccagaatgtcggagacagaggataatatgtttacaatgcagttactctcactgattttggcagcctaacagagcaatgagcaataataagggcaatcccaaagaccgggtaatattttctaaaagttgaatttgacttttgcatattaccgtttcttttagaaagtttatttggtagatgtaacttaagaagtcaagggaagcttttctcttttttttttaggactttttttttgttttttcctaagaaagtcttgagtctttattccaattgatatcctggtagcctgccagttatgtcaaggatcctggggtagataggaaaatgagatactctgacaaaacattgatagaaacacatacagaccacacacctggctctcattggaatgtaagctcagaaagagaagagatttttatttgtcttctttactgctttattcccatctcctagaacagttccaggtgtagaatgagtgctgaacaactattttttaaatgaacgaatggatacttgctgaaaatgcactcataaaacaagcttatataattggtgatagtgaagcaacttgtttttcatgcaagggaagcacatgcatatcatatacactgtaagactattttctagatattatatctaatacacctacagttgtaaagaaactaatgacacttgtgccttatatccagatatcatgtccagactactaagaatagttttgagaaatcaaccatatgagtaatgggaactataaaacatctgaggtgggacttgacacttagcagccaaagacattagaaagcttaaaa

SEQ ID NO: 79452 - DNA, 1556 bp, Homo sapiens
ttgacacatcaaattgtactccataaatacgtacaactgcaattttaaaagtaatgaaattatacattgaaaaataaaacagcccagcttcccggcctcctgggtgcgtgttctacttatactactttttggagtttctcagagggattgagacgcaggtgcagcctgttcaatgacacaccttttattggcttcattttctttcttctcggtcccactgccatatcttctaaataaactgtggctgctcaaacttgtctcaggacttgcttctgggagggtccaacctatgtcaaaggctctgtgtggtctggttcatgcctacctcccaacctcaattcacgccatgacattttgctcattgcgttccagccacactggcttttcaagttgtttacacctgttctctccctatgacatgttattttttcttctttacatgattggctctttctgatccttcacatctgtgcttaaatgttacaccaaggaggatgtctttcacaaccccagtcaaacatagtcttccatgttccaacctggtctttgcattcacagcatttaccaccccttattactgtacacgtgtctgtgtgttactgatatgtgatctgcttcccgcttgaaaacagtaaaaaaagttcctcgagggcagaaacacatctgttttctttactattttatatgcagagtttagtacagggtctgaaaaaatagtttgcattcactacatatttgttgaatgaacataaaataccagaatataaaacaatttgagaacaactaagtaggctctgagtggtgttggatagagtgaaactggaaaaaaggagagaagttagggagggcattgtatggaactgccctcagcctttagaagtaagtaggatttatagatgaaatgtggcattggctgagcacctgttatgtgctggcatgctaagcattctaataataggcattacataatgtaatctttacaactttgcaacctggcaaaaagtattccaatttttaaaatggaggcatttagatatgagagatgaagtaattcacccgtagccacaaagctagtaatgattagtgccactctttaaacccaggtcttcctgttaccaaagtacattttcttttcagtactatttcaaaatgtgggtgttgattatacaaatcaccaggtgacaaagtgtggatgaagtagagcaaaccattatcccccctgagaaaaaagaaagcatttgrcccagcaagcataatcagttacataatttctgttacatcatgcatgatgaattgaaagcattttgggaacagcaagtgtgttaaaagtgcagagactatgtttccacatctatgaacatggtaattgtgacatttgccttgcttacttcattggattgcttggtactcaaatgtgaaaacatatatgaaagtgctgtgtaaatttctaaattccttataagggcaattgttacaactatcttgtctctctaaatatcatctaaaatcacccagcatgcatatattattagaaaatagcaatgagggtgggtgcg

SEQ ID NO: 79453 - DNA, 676 bp, Homo sapiens
gatcctgagccagaaaaagggcattgatgagacaactggagaaatgtgagtaaaggccatggagtaaatatgaatactgtatccatgtcagtttcctcattttaataattgtactgtgcttctgcaraatattaatatttgtaaatctgagtgacgatttacaatcttccatacaagtgatggaaattttttgtaataattttcaaattatttcaaagtgaaaaaataaaaaacaaaaaagtttaaagcctttatatttaagaattataaaagtactttcttatgtttcctgctagaattctttttaaatcttttaatattaaacctatatggacttttttcgtcttaatgatttttctataaaatgaacaattttcccaaaaacatttactaaagtacctatctttcttcactgttttgaaagggcctatctatataaaggaatttagtatattttgaattcccaggtaagtatgtgcgtgtgtgtgtaagtccatgtgtgtgcacacacacacatgctgtctctttcaaaaaaccctgtggttcatttcactgatatgtaaaggcataccttgttttactgcaatttgtggatactgcattttttacaaattgaagatttgtggcaactctgtgttgagcaagtctatcgatgccatttttccaacaatatgtg

SEQ ID NO: 79454 - DNA, 1422 bp, Homo sapiens
tggtgggctcaccgtgtgccctccagttacaacacgcacactcagaggagcatcctgactccttccaacataagtaaagtaagacaggagagctcacactgccaacaaatacaaagtgttacaggaaaacctcggtgtttagttccctccttaaaggcagctgcatttgcctgccctactcccataccagggccaaccttgaagtgctactactgtagggcctggtgtaacagatgttttcattgaaccacacctggctcccaaataatacactgcctccaaacagtatctaacttgttcaagagcctatcttgactctctagttggagtcaagcaccattctattctttatgaatctgctttccagcccagcacagtactctgtacttcatggactcttagcaaatcatggttagctaactaactggctgagcacccttgtctggaggtggaaggtcctcaccttgagcagtttcattttgcacrttaaaaaatgggctcacctgttagttgaaggattccctaggtgagctgacagatataaggccagcacccagggcctgctgcctcctgggagatcagcctgaaccctacctctgcctccagatcatagaaactgccatcctgatcgtagaactgacacagagtgaggaaagctgcatcacctactaaggcttttccaaacaatttccatcttaactcgctagctttgtcatattctgagtagcaaaaatgcatgcaagaacatttgagtggaagagcaggttcttgatgttcatttaagaatcttaatgaagatattaatgacaaaagtgtttacattatttttatctctagagaacaaagagtaaagatgacaaatatgctattaacagtagtaatgtcaatactctccattaactgccaaagagaccaaatagatttacaaatttttcaggcctccctatctgatttttaattcacttcgtggtttgaaaaggaatatgtgacaaatattactgcaagaaggaaaaggaagtaggaagtaacatgacaaaaaataacgccaggtactgtaaatccacaaagctgtatcgcttctctagaactccgttcctccctcctcctccacattcctccctcctcctgcgcgttcctcctcctcaccctcagccctgtcctccattttaccatctttctcatagggatgacttcacaggcctgagaacagattctaccacgctcatttaaccaccgcactttagcaaagatgacaaggtttgagagggcttgcagataccttcctcctcaatgaagaccacaggtgggcaggtgcccacccccacacaaccaggccccttctcactggagctttcccacccaacattccattccactgaccaatgaagctgtgtgtttggtatcatggactcaaagaacgct

SEQ ID NO: 79455 - DNA, 577 bp, Homo sapiens
gtagagacggggtttcaccacgttagccaggatgtctcaatctcctgaccttgtgatccgcccgcctcagcctcccgaagtactgggattacaggtgtgagccaccgtgcccagctgataatcctccatttttaaaaagcatcctgtatgtgctatatactgtccttgttgcttttcttaacattaaccaatctaacctcctctttgtagacttggaactgatcagagttataaacaaatggccaggattccccacctagcagagtagggttaactgatcatctgcctttccctaagccacaactctttcactgtaacccacactttctcctrtaggcaagtagagaagggcatgaaatgtgtcatatacggatgaaggaaataatgaattatttctgtgttagtcatcttgaaaatagatgatactgtgttgttatatttttataatgtctttgaacaatggcactttaggaaatctggaataaggtagaaaattactttttactaattataaaaagtaggctgggcctggtggcttgtgcctgtaatcccagctacttgggaggctaaggtggga

SEQ ID NO: 79456 - DNA, 861 bp, Homo sapiens
tttcataaatgatgctgaaacaatttgttattgtaacagtgaaaaaaaggcctatcatgactaactccattttgctcctaatgctaccctccccaattatatattttaggttaacttccttccttatctctgcacataggccatgttaactatgggaggaatttagtttataggttaattttaaagcaaggatgaaaatagtgcctttccctaaccaccaaggagataggaagggcatatgaacaagtaacagtgtttactattaaaactaaatgttaaaaatttagacaagaagaggtggctgactactgtaattccagcactttgagaagccaaggagggagaactgcttaagcacaggagtttgaaagtagccagggcaacttggtgagataccgtctctacaaaaaacataaaatcaaaaaacaaaaccactagccaggcgtgactgcatgagcacatagttccagctacttgggaggctgagacaggaggatcacttgagcccaggaggttgaggctgtggtgggcggtgttcatgccactgcactccagcctgggcaatgaaaacaaaacacaacaaaaaacccccaaaacaaaaactactggggaggctgaggtgggaggatcccttgagcacgggaggttgaggctgcagtgagctgtgatctcctcactgtgctccagcctgggtgacagtgagatcttatctcaaaaaaaaaaaaaaaaaattatgacctgactaaggacaaagaggtttacccttagtgacccttagaagggaatatcttgatgtgggaaagctgtttatgamttgtaatattgtgcagtgaaaatagtattcccctctgtaaaaatgca

SEQ ID NO: 79457 - DNA, 516 bp, Homo sapiens
ctgtaccacagtagggcaaaagtagccataggcaacacctaaacaaatgggtatggctgtgctccaattaaactttatttacaaaaataggcaggaggtgggcaggctgcatttaacctcttagtcaagtttgagaagtttgtggctgcttgacctagtgtaaagggcaaagggtttagagttagggaatctagcttctaaccctgattctgtgcctaagccagctgagtgacctygggccaatcacttcccttctgcttcttctgtagaattctcttttcaattgactgcaaaaataaggtaaaaatatatttcaacatactgaaatgttagctgcagattcttcattaaatccatagataatgaaccagtagcagcaagactttaaaagcataaagagaaagtaaatttgcattttagtagtaccttctatgtgtcaggtgctttataaaatataatctgacttcatccttcataaatgaagaatgtcagaagtgaaatcacatgttcaaagtc

SEQ ID NO: 79458 - DNA, 516 bp, Homo sapiens
ctgtaccacagtagggcaaaagtagccataggcaacacctaaacaaatgggtatggctgtgctccaattaaactttatttacaaaaataggcaggaggtgggcaggctgcatttaacctcttagtcaagtttgagaagtttgtggctgcttgacctagtgtaaagggcaaagggtttagagttagggaatctagcttctaaccctgattctgtgcctaagccagctgagtgacctcgggccaatcacttcccttctgyttcttctgtagaattctcttttcaattgactgcaaaaataaggtaaaaatatatttcaacatactgaaatgttagctgcagattcttcattaaatccatagataatgaaccagtagcagcaagactttaaaagcataaagagaaagtaaatttgcattttagtagtaccttctatgtgtcaggtgctttataaaatataatctgacttcatccttcataaatgaagaatgtcagaagtgaaatcacatgttcaaagtc

SEQ ID NO: 79459 - DNA, 652 bp, Homo sapiens
gcataaacatagaaatatatttttataaaggcctcataatgagcttctattacaacaaaggacaaacattgtggtgctmaccatataagaacacgaatacaaagatgtgactctaaaactctccttcccttcctggattaagcaatagagcaagataatgatactaactttgagttattacagtgtacctggcatagatatgagcacttattaacatatttgatcccataataggtctactgtgatgtattaggtatctattgatatataataaattactacaaacttactggcttaaaacaatagacatgtgttggccgggcgcggtggctcacgcctgtaatcccagcactctgggaggccaaggcaggtggatcatgaggtcaggagatcgacaccatcctggctgacacggtgaaaccccatctctactaaacatacaaaaaaaaaaattagccaggtatggtggcgggcgcctgtggtcccagctactcaggaggctgagacaggagaatggtgtgaacccaggaggcggggcttgcagtgagccgagatcgcgccactgcactccagtctgggcgacagagcgagactccgtcccccccaaaaaaaaaaaacaatagtcatgtgttatttcacggttgctgtggct

SEQ ID NO: 79460 - DNA, 652 bp, Homo sapiens
gcataaacatagaaatatatttttataaaggcctcataatgagcttctattacaacaaaggacaaacattgtggtgctaaccatataagaacacgaatacaaagatgtgactctaaaactctccttcccttcctggattaagcaatagagcaagataatgatactaactttgagttattacagtgtacctggcatagatatgagcacttattaacatatttgatcccataataggtctactgtgatgtattaggtatctattgatatataataaattactacaaacttactggcttaaaacaatagacatgtgttggccgggcgcggtggctcacgcctgtaatcccagcactytgggaggccaaggcaggtggatcatgaggtcaggagatcgacaccatcctggctgacacggtgaaaccccatctctactaaacatacaaaaaaaaaaattagccaggtatggtggcgggcgcctgtggtcccagctactcaggaggctgagacaggagaatggtgtgaacccaggaggcggggcttgcagtgagccgagatcgcgccactgcactccagtctgggcgacagagcgagactccgtcccccccaaaaaaaaaaaacaatagtcatgtgttatttcacggttgctgtggct

SEQ ID NO: 79461 - DNA, 791 bp, Homo sapiens
atgattactaacaaacctaatgcaccggtwtgattaactggactaaaagcctgtaagaattaacactgtaggtattcaagggcccgtctacaaaacatttgcacgtattttagcataagggaaagttattttacaaagtaacgaagtgtacaccagaaatagtcagcgatctctggctgctttgtattttaaatcaaggccagaaaggatctaggcactggtcctctaatatcttttccaaaacagaggaaggatgcttaagatggggctgaccactactcaaatgaatcatcatagctcattatggaagagtcctaaaaagaggaatttttaaaccctcttcctctgcccccatctcctaaatcccctcttagtggttcttttcagtgaagaggcacaagattggggtgagatttttccattttccttagcaggaagctttatgtgaataaagcaccattttataccaacaagccaatgattagtatccttcaatgcagactgggattcatactacccatatgccagggcatttttcctttagcacgtcagcctgtccttttagcatcaggtagcactgaatgtcaggcaagatatttcaatctcagccccctaagggcattctcatttgaatgcccttaatctatttgattctgagtttcatttttgcctgacaggctgaatcctgagtcacacaccgaacaggaacaagggtagttgtgatacggtgattgccagtgaacttaacccctgaaatgtcttcagtaagaggcattttccacaacactctc

SEQ ID NO: 79462 - DNA, 1326 bp, Homo sapiens
cccagcaatgacccccatgataaatactattccaaaaacaatgcccgcaattgcagtgcccctaaaaggaaaaacaagtaagtttactcaaaagacttgtaagcattctttagactttctagtagagctccatgattataggacaagtgttttcttacaaatgttcttaaggataatgtgtgtgtgtttttcttttcttttttttttttaaaacccataagttccctgaattgataaagcaaatagtctgtatttcaatagatatgaaaaagttataaaaatcctcttctagcaccgttgaccaattcatcattcagattccagttcttaaaattcatgttttgatacaaagcacaattctctagatatgctctccaaagtaataattttaaaaaccattctgctgtgtatctaaacagcaaagaatttatctgttgggcatagcatgtatgtgtttaatgaaaacaacttggtagatgtcagaatattaagtgaaatttaacactcattcctgattaacactcttcatagaacaagaatatttgtttcttaataaaagaaaaccaaaccaaacttcatatttttaagctacccagagaacagttatgacaaataagtatcccattaattcaggaagaacataaataaaacttcgatttctactaatgttaatggtttctttcccgcagaaagttttagctcatgcaacaaaaccataaatagaaaaaaaagccgaatagcagaaaagagtcaacattatgattgtttgtgtggaatataatttgtaggtaactacatttttctgttattttgaaaagcaatggggaaatctttatcaaaatataaattttgaccaagaagcatcatttttagcaatgctccctaaggaaatgtagcacataagcataaatactataacaaggatgttcatcacagtgttgtggctaatagcaaaataggagaaacatcctaatgtccataaaaagaggactgacagaaaaaaattcgtcagaaaaggaatcttacatattgattaaaaagggtcaagagatccacatggattgaagtgaaatgtttatgatacatggttaacttaatagtaatactattactattgatagtaatttgtattcattcaattaattagtgttagcttccagcaccatccatgtgcctgcaaaagacatgatcttgttcttttttatggctgcataatattccacggtgtrtatgtactacattttctttatccagtctgtcactgatgggcatttaggttgattccatgtcttttctattgtgaacagtgctgcaatgaacatttgc

SEQ ID NO: 79463 - DNA, 566 bp, Homo sapiens
acctaatgcattttttcaaaacagaaattgaagacatttttctttctaaatatacatggcaaaagattgtattaatatagtttggatatatgtcccctctaaatctcatgccgatttktaatccccattgttggaggtggggcctagtgggaggtgatgggatcatggaggcagatttctcatgaatggcttagtaccatccccttgttgctgtccttgtcatagtgaataagttctcatgagatctggtcatttaaaagtctgtggcacctccctccaccacactctttcttgctcctgcttttgctatgtgctgtgcaagctcccattttgccttccaccatgactaaaagctccctgaggcctccccagaagccaagcagatgccggcatcatgcctcctgtacaacctgcagaacgctacgacaattaaatctcctttctttataaattacccagactcaggtattttaaagaaattgcaagcaaacctctactccacaattcccttttaggtcaaccgtatcaataccaattacctaattataggattttctctgagacaa

SEQ ID NO: 79464 - DNA, 1013 bp, Homo sapiens
  misc_feature (1)...(1013): n = A,T,C or G
tctactttagttatttaaataattttatttctgatagatatgtaaattcaatcttgtctgatactgatcataattgacttccttccaccgtggaaaatctggttttgtccacattcacaatgtacctcaacattcctttacttcatggaaatttgtgctttttaattttttttgtactgctataacatctacctggttacctcatattatatgaggaaataaattatttaatatgtattatttattatgctgtatgcaagtcacaattttatctttttctaaaaattaccttttaacatctctttgtaacctttctaaatccatcagaatagtctgtgaatgtataaaagtctaatgtctttaaatgatgttaaaggatcatcttatgtgtgaacttcatgtactaaagcaaggatggwaaatgcaatttaaatgtttatgtcagagctgataagattgatatacaaatagacagacaaagggacagattatgttccagtaattggtgaccttcattcccctgagttttatcaattgatcctctgaaaattaaaaatggatgcttgaataaatagaactattgcactcttatgaccgctagtcatacaaaacagataaattcaatatagtaggaaagagttcatagtagtttgaccacatgtaatagttgtgaaggagagaacatttgtgaccaaagtgaatagaaaaagataaaaatatacttgagagctagtgctgagaagggaaacaaatctcttccatctacatcacactcatatctccattggactctatttctctttccaattaaaaatgtctgtcactgagaaatacaaaccacctattgttagagtctgttgatgcctgtcaatagcaatgtttctcttcttctaaatgcaaagtaaacactgannnnnnnnnnnnnnnnnnnnnnnnnnnnnnnnnnnnnnnnnnnnnnnnnnnnnnnnnnnnnnnnnnnnnnnnnnnnnnnnnnnnnnnnnnnnnnnnnnnna

SEQ ID NO: 79465 - DNA, 609 bp, Homo sapiens
taaagcaaattttctaataatgtgaccctaaatcagtctgcgtcttgtctaatttggctttgtgtgaaagcaaataaaaactggttgttttaaaactatgtctatttaaatcttagaagatatggcacaattgtgcaacacaacaaacagccstagaagaagatataaaaactaattctggggcatttattttacaatttgtttcctttgtaatttgatagtatccaccgtgtgtgtgtgtgtgtgtgtgtgtgtgtgtgtgtaaatataaagatattattgagtcatattaagaaattatatatatatacacacacacatggagagacacacgtgcaatttagactagtaaaaaaaaggagaggaaaaaacaaaagaaattcataaatgtgtatatatatcagtgcacatttcatatgatacaattacctctctaattcctttctcttgtttttttcacatagtaatttctcagtaataaatgctcacacacacaaacacacacaattaagtcttgtattacctaaataaatgtgtcaacatatctctggaagtttgagatagcatatgaggcagtgggtcaaaacagagaataaacatggagcatgt

SEQ ID NO: 79466 - DNA, 595 bp, Homo sapiens
ttttttttcaagacagagtctcgctctgtcgcccaggctggagtgcccctggcacaatctcagctyactgcaacctccacatcctgggttcaagtgattcttctgcctcagcctcccaagtagctggaactatggcacgtgccaccacacccagctagtttttgtatttttagtagagatggggcttcaccatattggccaggctggtctcaaactcatgacctcatgatccacccacctaggcctcccaaagttctgggattacaggcatgagtcaccgcacccggcctgaagttctcttttaaagaaagttgaaatacattgaaaagagacattacataaatcaaaggtttataaccttagaatttaggaattcaaacaattaaaaaaatagtaaatttagattatattattttctacctggatctgtaatttgacatgtggaagtgagtgtgaagaccagaaagttttactgataagtgataagagaaaagtactaattaccatagataaaaatgtgagacatcatatgagaaggattgtgtcaatttttgaaagttgctgctcttgatgaaaatggcccatctggatattg

SEQ ID NO: 79467 - DNA, 595 bp, Homo sapiens
ttttttttcaagacagagtctcgctctgtcgcccaggctggagtgcccctggcacaatctcagctcactgcaacctccacatcctgggttcaagtgattcttctgcctcagcctcccaagtagctggaactatggcaygtgccaccacacccagctagtttttgtatttttagtagagatggggcttcaccatattggccaggctggtctcaaactcatgacctcatgatccacccacctaggcctcccaaagttctgggattacaggcatgagtcaccgcacccggcctgaagttctcttttaaagaaagttgaaatacattgaaaagagacattacataaatcaaaggtttataaccttagaatttaggaattcaaacaattaaaaaaatagtaaatttagattatattattttctacctggatctgtaatttgacatgtggaagtgagtgtgaagaccagaaagttttactgataagtgataagagaaaagtactaattaccatagataaaaatgtgagacatcatatgagaaggattgtgtcaatttttgaaagttgctgctcttgatgaaaatggcccatctggatattg

SEQ ID NO: 79468 - DNA, 595 bp, Homo sapiens
ttttttttcaagacagagtctcgctctgtcgcccaggctggagtgcccctggcacaatctcagctcactgcaacctccacatcctgggttcaagtgattcttctgcctcagcctcccaagtagctggaactatggcacgtgccaccacacccagctagtttttgtatttttagtagmgatggggcttcaccatattggccaggctggtctcaaactcatgacctcatgatccacccacctaggcctcccaaagttctgggattacaggcatgagtcaccgcacccggcctgaagttctcttttaaagaaagttgaaatacattgaaaagagacattacataaatcaaaggtttataaccttagaatttaggaattcaaacaattaaaaaaatagtaaatttagattatattattttctacctggatctgtaatttgacatgtggaagtgagtgtgaagaccagaaagttttactgataagtgataagagaaaagtactaattaccatagataaaaatgtgagacatcatatgagaaggattgtgtcaatttttgaaagttgctgctcttgatgaaaatggcccatctggatattg

SEQ ID NO: 79469 - DNA, 755 bp, Homo sapiens
ggaaaaggccaaagtctatggctccataattcatggaaagcgtaagatatccaaatgtctagatgacaagatatgtactatgaggagtagtaaaaggaatatttttcatctttactattaacaatagatttgcaaaactcttggagttgctctagaattcaacctcaaaacagtgttttacataataatctaggattagaaaccaaggtgtgcatgttgctcagaggttgctgatgctgttcctacccctttggatgctgagtagacagcactgatgaatgttgccctataaagattgttcrgtaccagtgacagaagaaaacttgaggagacataaggcaagagagactgtatttggccatattttaaatgtgatttattctgattagaggcagtaatttttgttctaactttctcacaaataagactgaaaaaaaaaaacttgttacgttaatcatctgccatctcatcaaaacccctgactaactctatgttagggtgaaaagatggcgtgagtgttaaaaaaattgcttatatagaatattttgctaaattcttggtagatgactttattatgagatattcacatgacttaggtatctgagtcatatgttagatgaaagttttcataatagtacaaaacaaatgaataaatatcaatacaatatctagctgatacaattgatagagctttacatgtaacaaaattaggacattatattgagaacattaataaattactaaccaaatatata

SEQ ID NO: 79470 - DNA, 975 bp, Homo sapiens
ttagaaaggtctgctaggtagctagatgtgccgctagtaaaatcctgtaatgagcgaatgtatggaaaagaacatattgtcagatacatttttgacttaatgatttagataggcccttttatccctcttcatgttgtattagcatactaaagaagtaatattgtatgattctttacataattttctaccttagtctaccttgaaggactaatgtccagctaatcaatgaacaaagaaacaccaggcttccaggttgatatggtttggctctatgtccccacccaaatctcatgttgaattgtaatcctcagtgttgaaggagggacctggctgaaggtgattggatcatgctggtggatttccccattactgttctcattagagcgaatgagctctcacgagatctggttgtttaaawgtgtgtaacacctcccccttcactctctctcctgctctggccatgtgaatactgtgcttgcctccccttcaccttctgccatgattgtaagtttcctgaggccatccaagccatgtgtcctgaacagcctgtggaactttgagccaatgaaacctcttttcttcatgtactactcagtctcaggtagttctttatagtaatgcgagactggaccaatacacaggttaaattgctgacagggcatatggaaatgttctcctctatcacttaaagataaatgaaaacaagagaaggaagcaactcccaaatagtaaggagaatgtgaggaaagtgaacagcaaaattgagatgttgcgttaccagtaacaacaataaagaatagccacaggctcagaagagacttgaatcagaaattagaggtgatctttctgcagagatctgaagggactacaaattaggaatcagtgagaagagatggtaggttaaaagtatgggacagaaatgtgtagcaattcctctctagggaatgtctatagattagctttgccgcctgacat

SEQ ID NO: 79471 - DNA, 975 bp, Homo sapiens
ttagaaaggtctgctaggtagctagatgtgccgctagtaaaatcctgtaatgagcgaatgtatggaaaagaacatattgtcagatacatttttgacttaatgatttagataggcccttttatccctcttcatgttgtattagcatactaaagaagtaatattgtatgattctttacataattttctaccttagtctaccttgaaggactaatgtccagctaatcaatgaacaaagaaacaccaggcttccaggttgatatggtttggctctatgtccccacccaaatctcatgttgaattgtaatcctcagtgttgaaggagggacctggctgaaggtgattggatcatgctggtggatttccccattactgttctcattagagcgaatgagctctcacgagatctggttgtttaaatgtgtgtaacacctcccccttcactctctctcctgctctggccatgtgaatactgtgcttgcctccccttcaccttctgccatgattgtaagtttcctgaggccatccaagccatgtgtcctgaacagcctgtggaactttgagycaatgaaacctcttttcttcatgtactactcagtctcaggtagttctttatagtaatgcgagactggaccaatacacaggttaaattgctgacagggcatatggaaatgttctcctctatcacttaaagataaatgaaaacaagagaaggaagcaactcccaaatagtaaggagaatgtgaggaaagtgaacagcaaaattgagatgttgcgttaccagtaacaacaataaagaatagccacaggctcagaagagacttgaatcagaaattagaggtgatctttctgcagagatctgaagggactacaaattaggaatcagtgagaagagatggtaggttaaaagtatgggacagaaatgtgtagcaattcctctctagggaatgtctatagattagctttgccgcctgacat

SEQ ID NO: 79472 - DNA, 975 bp, Homo sapiens
ttagaaaggtctgctaggtagctagatgtgccgctagtaaaatcctgtaatgagcgaatgtatggaaaagaacatattgtcagatacatttttgacttaatgatttagataggcccttttatccctcttcatgttgtattagcatactaaagaagtaatattgtatgattctttacataattttctaccttagtctaccttgaaggactaatgtccagctaatcaatgaacaaagaaacaccaggcttccaggttgatatggtttggctctatgtccccacccaaatctcatgttgaattgtaatcctcagtgttgaaggagggacctggctgaaggtgattggatcatgctggtggatttccccattactgttctcattagagcgaatgagctctcacgagatctggttgtttaaatgtgtgtaacacctcccccttcactctctctcctgctctggccatgtgaatactgtgcttgcctccccttcaccttctgccatgattgtaagtttcctgaggccatccaagccatgtgtcctgaacagcctgtggaactttgagccaatgaaacctcttttcttcatrtactactcagtctcaggtagttctttatagtaatgcgagactggaccaatacacaggttaaattgctgacagggcatatggaaatgttctcctctatcacttaaagataaatgaaaacaagagaaggaagcaactcccaaatagtaaggagaatgtgaggaaagtgaacagcaaaattgagatgttgcgttaccagtaacaacaataaagaatagccacaggctcagaagagacttgaatcagaaattagaggtgatctttctgcagagatctgaagggactacaaattaggaatcagtgagaagagatggtaggttaaaagtatgggacagaaatgtgtagcaattcctctctagggaatgtctatagattagctttgccgcctgacat

SEQ ID NO: 79473 - DNA, 1464 bp, Homo sapiens
ccatttatatgtccacaattatctaaaaaacatattcagcaacaaataaagcaaatgttattcaacaaagagagatttgtgccaagttccagcaggtgtccaagaaactgaatggtataaattgacacacaatacccattgatattacataagaattcttcaaaactgaatgatcttggaatataagccatcgatgttgactttagaaaacaagttctgctagaaaggtgactgaattaataacagttctggattatataaaagatgtgttagaactatttgggggcaatctgaaaatacaaccaaaatttgactgtatctctgggaaaaatatagttgtctgttttgaatgaggtctacgttaaaaactaccaaatcagctatgtgtgtgcagacaagcatatgcatatgtctgtctgcctctttagtgagaaaatctgttaaattgaagttctaacggcagtggtgatttgtcctgagcttctgtccctgatgtgtttcattacaaaacgtattsgtttataatttgacatatgtcattagacttgaagagaccgacgttgaaaaatcacaacacttatgaaaaatacataccttttgtcaatcagatttaaatcagccacttcaaaaatggaagtttattttctaactgataaatatgatacaagtttaaacccttccaatgtttgtcagctgtttcatcaattgcaatttcaataacctagaaaagatatggaatggtgaacatgcttcaagtactctttattaaagggatcaaaaattgtaattaatatacatgaattgacttttttcaaataaggaaatgtgttaacattttaaaactaatttgaactcaatcagagattgttttcatgttatgtaaatctatcactctgatttttttaaactgcctaatttataatatccttaagcaagtatcattgtccaacctacaataattcagtatatgtagaattatgacttatacatttaaaaaatcaaatgaaaatatattactttcctctgaataatttggaataaattatctagagaactttgtattcataatttgaaaactaagctatattaggagcccaacaggagttgcattggacttttaaataccaaacgttgagcaaactaatttctatctgtcaaattaactatattgtattttatacatgtatttataatcaaaatatttactagttgacagtaaatatacattaaaaacatggaaaaattaagagcatttgaattcctggtttcatttttgtaatttacatttatgctatatctatacataaaatatatataaacattgttctaaaattctgtttcttaagtgttttcagaaatactgatattatataattgtaaataatttagatattatactggagtcatttcttattattttatataagtagagatttaaaactcctaatgtgggacacaaaacaa

SEQ ID NO: 79474 - DNA, 1464 bp, Homo sapiens
ccatttatatgtccacaattatctaaaaaacatattcagcaacaaataaagcaaatgttattcaacaaagagagatttgtgccaagttccagcaggtgtccaagaaactgaatggtataaattgacacacaatacccattgatattacataagaattcttcaaaactgaatgatcttggaatataagccatcgatgttgactttagaaaacaagttctgctagaaaggtgactgaattaataacagttctggattatataaaagatgtgttagaactatttgggggcaatctgaaaatacaaccaaaatttgactgtatctctgggaaaaatatagttgtctgttttgaatgaggtctacgttaaaaactaccaaatcagctatgtgtgtgcagacaagcatatgcatatgtctgtctgcctctttagtgagaaaatctgttaaattgaagttctaacggcagtggtgatttgtcctgagcttctgtccctgatgtgtttcattacaaaacgtattggtttataatttgacatatgtcattagacttgaagagaccgacgttgaaaaatcacaacacttatgaaaaatacataccttttgtcaatcagatttaaatcagccacttcaaaaatggaagtttattttctaactgataaatatgatacaagtttaaacccttccaatgtttgtcagctgtttcatcaattgcaatttcaataacctagaaaagatatggaatggtgaacatgcttcaagtactctttattaaagggatcaaaaattgtaattaatatacatgaattgacttttttcaaataaggaaatgtgttaacattttaaaactaatttgaactcaatcagagattgttttcatgttatgtaaatctatcactctgatttttttaaactgcctaatttataatatccttaagcaagtatcattgtccaacctacaataattcagtatatgtagaattatgacttatacatttaaaaaatcaaatgaaaatatattactttcctctgaataatttggaataaattatctagagaactttgtattcataatttgaaaactaagctatattaggagcccaacaggagttgcattggacttttaaataccaaacgttgagcaaactaatttctatctgtcaaattaactatattgtattttatacatgtatttataatcaaaatatttactagttgacagtaaatatacattaaaaacatggaaaaattaagagcatttgaattcctggtttcatttttgtaatttacatttatgctatatctatayataaaatatatataaacattgttctaaaattctgtttcttaagtgttttcagaaatactgatattatataattgtaaataatttagatattatactggagtcatttcttattattttatataagtagagatttaaaactcctaatgtgggacacaaaacaa

SEQ ID NO: 79475 - DNA, 773 bp, Homo sapiens
atccaggcacaaggctgcttggtcagcctgtggttctgtttctcaggccctggttgctggcacagggctattgggcaagccagaagcttatctgtggaggatgggataaaagagagatgtttctcaggtcctgagctcaggcatgtagttgttccaccagctaaggagtatgtcagctcaggggcctctcccacttaggggaaggcatgcaacagtttggccagctcacaggggtattcaccctgactgggactgctagactgttcctccagctggaaattaaggcaacaatagtttgtttcactgatgtgcagaaccagagtcagctcatcctgggcccaagctctgcactactggagttgtggcattcagctacccttgtagacttgatgaagtgaagatggaaccccagtgctagcaggctataatggctactgacaccctgagcagggcaccccagagcagaggtttctctggtctcaatatggtacaaaactgcaacaacttggttcactgtggatggatgtgggtgaggaktgcaaaccttgtgctcctaatcgaggacaatgcagctgtgtgaattcctggcagctcttcaaatcgggctcaggactttcaacaactgtgagattctcctgttgtaggcactgtagtgtttacaatggtaatgtggacaggtggagatcttatttttcccacaacaggaaatccccagtgactccaggcagatctgatccaagcagggaagacaaggttgcagaggttggatgcct

SEQ ID NO: 79476 - DNA, 649 bp, Homo sapiens
ggcttagtagctgagggctcaacaaatcagggctctcagccctccaaccacaaggaaattaattctgccaataaactgaatgagcttgaatgaaagttctttcccagttggcctacgatatggtaatgcagcctagctgacaccttaattacagcttgtgagaccctaagcagagggtccagttaagttgttttcagactcccgacccacagaaactgtgagaaaataatgtgtgttattttaaaccactgagtttatagaaaactaataataatcataaaatgagttaagatagtgtcaaagcattttgtaaactgaaaagccctatatatgtgttagatgttatcctcaaagtataccaaatgcttcatggagactttaaatgttgcrtaatcaaaaaagttacttctatgctttgaagagtccacaagtcattttttaaccaagtctttacataagcttccccaattttccttaaaattatagcatctccttttttattctgaccttgaagttctgacagctgtgtcactgattgcttttggtctgtgatatgcataacttctatattgccaccaacaaagacaaaatctggaatttaactgttcctccttagagaactatgaaaatcccagactgttttaactat

SEQ ID NO: 79477 - DNA, 755 bp, Homo sapiens
tcctaaatgctaacaggtaatttttgtctacaaaaaaacttaaaacagctgaaagcctacaaagatataatgatttggaaataaaattagcatgtatttatgctatattatagataatatgcctaatttcctccactttgtctctacacaggtcaagactgtgcaccccagaagtatgaaagaagcaaaagtgctctttgttctcttcttatattcgttattcaaactcactttctacatacagatggcagaaagcatctggttaatgggacctctatgtagtttttaaaaggttccaagagtcttttcaaaaaggggtagtagcagggtgcccagctttctgtaaaaaaagaaaacaacaacaaaaatgagtggtataaagaatccagagaaggaagaggaaccagaggaacacactgaaagtacaaagcagtggttattcagtcactacagagacagttctgcaaaagtgataatgtggtaattatttaagactgtgctaagtggacttgacaggtaattactaatgacattcttgttgttatggcccaatggggaatacagataasctgatgcaagtcatttgactaaaaacatctggttaaagatcattattctctgaccgagttggcacataatattaattagaaaccaaaggggtgaatggttctgtatattaccaaagcaatacaatagccagtccttccaaatctgcaagttggttcactggttcaacctcatcttgctttccttca

SEQ ID NO: 79478 - DNA, 2713 bp, Homo sapiens
ggatgggtttgggatgggagcggggtgatgctctggttctcagggctggactccgggcttggaggggaactccctcttgcgagtccccagtcctgtgggggctgggcctggaaggggaactgggagatgcggaagtgcacgccgtcgggtcgcatctttcagtgcggtgcgagagggcccagtggcagaggcccagcaaacagcgcttgtcaggcggacctgagttcgagttctgactgtgccatctacgctatgactttggggcaggcgacccaccctctgcgcctcattaacccatgtactgcatggaaaataagcgtctgcctgggttagaagagggctgtgtgtgaagattcaaaggacgaaggggaagagtcctcgctgggcgcccagcacgcggtgagcgcccggccagtggcagcgcgctcgggctggggttgcgctcgggctcggttccscgcccccggcagctgcgggctttcccagctccggcccgggcccttccgctctccccggcacttacagcggtctctctccacttctcccttctaggaccgcggcggctaggtcacctcctccggacgccgacacgcgctgccctggcaaccgtcaccagggaaacaagcgacgtcacttgcgcgttttcaacgctactctacgggggccgagggggcgccaagagttctgaaagtgacagaggcgctgatggcgcgctgggctggatccaagcgagcacgatctcgagtgcgctggagattttaaatcttctggagtatatttttaaaaaagttttgtggaccaaacgttctgcacagagatgcccattccgctctcctgttggggagttaaaaagcgaacgatctcaccatgaaatttaaagtagccattcagatatatttgaaaaatgtaaaacagtgtggggaaaggccatgttatgatggtgagtgaaggaagcaggacgcaatatagcaatgctaaataaataaagttgtgtttatttcaaactaggcactaaaacaagaccgaaatagaaatattaaaagtggttatatttgggtggtggaatagcagtgctgtgtttttatttttacactttagagaatttttaaaataatgaacatcgtttattttcataaaggaaaatacttgtttttttttttttaaatggcaccttccaatgtaagacactactatatttcagggcaatatgggggtgggaggcaaatttctaggaaagatgattcaagggagatttctttctatctatctatctatctaatctatctatctatctatgatagagtctcgctgtgtcgcccaggctggagtgcagtggtgcgatctcagctcattgcaacctccatttcccaggttcaagcgattctcctgcctcagcctcctgagtagctgggattacaggcacccgccaccacacctggctaatttttttatttttagtggagacggggtttcaccatgttgaccaggctggtcttgaactcctgacctcaggtgatccgcccaccttggcctcctaaagtgccgggattacaggcgtgagccacagctcctgcccaaatatttatccaggacttcataatttgaaaaccttggcagttgtttttctattttttttcctcataaggtgaatgaatacccatcccatagacatgcatacataagatacggcactagactgccatcagcactgcaggtataaacccgaagtttcctgataaaggaaaaatggatctttcccgttggtctccaattgctgcctggtgagctgagggtgggagacgtataatatacaggtggcagcaaagagagacaggataaagagtaggattcaggtagatgtgagcctcaaaggattagggttttttttaaatggtgtgtgtagtggggagtatcattcgtttgcctcatgaccacgatgggactatgtggcataggaaaaggaatagccaggtctacttagagggcttctggaaagcatggatcctagcagaaagccaggttttcattaaaataagaacatgctgtgagaaaattaaggatgcaagagaatttcagaaccgacattctagaatgtatgtattagaaagtttgggaaaggggtaacatttgctccagcaatccaaggattatttttgacgaggatatcatttttgcagtaacccattttttaaaaagcagggatgattttcctctaggtttgttacttttccacggtcaccactaaggctctcatgccattttttttttctgcccaaaattcttttgagaattttctttagtttataagcttgacattttatcatccaagaagctggcgaatccaatctgggtcaccagtatttcctcatgtacagtatacagatgtttgttaattccagcccactttgtttctctagccagaagtatctgtaggacactgccctttgttttttgctttttaatttgaaattatattgagatttttatagaatcacatgcagttgtaaaaaataatagagatcccctgtatacttttccagttctccacaatgatattttgcagaactttagtataatattacaaccaggatattgacatcgatacaacctactcctcttagatttctccaatttaactgtacttttcttttgatttatcacgtgtcagtttgtgtatccatgaccatcaagatatcaaatactagccgggcat

SEQ ID NO: 79479 - DNA, 2713 bp, Homo sapiens
ggatgggtttgggatgggagcggggtgatgctctggttctcagggctggactccgggcttggaggggaactccctcttgcgagtccccagtcctgtgggggctgggcctggaaggggaactgggagatgcggaagtgcacgccgtcgggtcgcatctttcagtgcggtgcgagagggcccagtggcagaggcccagcaaacagcgcttgtcaggcggacctgagttcgagttctgactgtgccatctacgctatgactttggggcaggcgacccaccctctgcgcctcattaacccatgtactgcatggaaaataagcgtctgcctgggttagaagagggctgtgtgtgaagattcaaaggacgaaggggaagagtcctcgctgggcgcccagcacgcggtgagcgcccggccagtggcagcgcgctcgggctggggttgcgctcgggctcggttccgcgcccccggcagctgcgggctttcccagctccggcccgggcccttccgctctccccggcacttacagcggtctctctccacttctcccttctaggaccgcggcggctaggtcacctcctccggacgccgacacgcgctgccctggcaaccgtcaccagggaaacaagcgacgtcacttgcgcgttttcaacgctactctacgggggccgagggggcgccaagagttctgaaagtgacagaggcgctgatggcgcgctgggctggatccaagcgagcacgatctcgagtgcgctggagattttaaatcttctggagtatatttttaaaaaagttttgtggaccaaacgttctgcacagagatgcccattccgctctcctgttggggagttaaaaagcgaacgatctcaccatgaaatttaaagtagccattcagatatatttgaaaaatgtaaaacagtgtggggaaaggccatgttatgatggtgagtgaaggaagcaggacgcaatatagcaatgctaaataaataaagttgtgtttatttcaaactaggcactaaaacaagaccgaaatagaaatattaaaagtggttatatttgggtggtggaatagcagtgctgtgtttttatttttacactttagagratttttaaaataatgaacatcgtttattttcataaaggaaaatacttgtttttttttttttaaatggcaccttccaatgtaagacactactatatttcagggcaatatgggggtgggaggcaaatttctaggaaagatgattcaagggagatttctttctatctatctatctatctaatctatctatctatctatgatagagtctcgctgtgtcgcccaggctggagtgcagtggtgcgatctcagctcattgcaacctccatttcccaggttcaagcgattctcctgcctcagcctcctgagtagctgggattacaggcacccgccaccacacctggctaatttttttatttttagtggagacggggtttcaccatgttgaccaggctggtcttgaactcctgacctcaggtgatccgcccaccttggcctcctaaagtgccgggattacaggcgtgagccacagctcctgcccaaatatttatccaggacttcataatttgaaaaccttggcagttgtttttctattttttttcctcataaggtgaatgaatacccatcccatagacatgcatacataagatacggcactagactgccatcagcactgcaggtataaacccgaagtttcctgataaaggaaaaatggatctttcccgttggtctccaattgctgcctggtgagctgagggtgggagacgtataatatacaggtggcagcaaagagagacaggataaagagtaggattcaggtagatgtgagcctcaaaggattagggttttttttaaatggtgtgtgtagtggggagtatcattcgtttgcctcatgaccacgatgggactatgtggcataggaaaaggaatagccaggtctacttagagggcttctggaaagcatggatcctagcagaaagccaggttttcattaaaataagaacatgctgtgagaaaattaaggatgcaagagaatttcagaaccgacattctagaatgtatgtattagaaagtttgggaaaggggtaacatttgctccagcaatccaaggattatttttgacgaggatatcatttttgcagtaacccattttttaaaaagcagggatgattttcctctaggtttgttacttttccacggtcaccactaaggctctcatgccattttttttttctgcccaaaattcttttgagaattttctttagtttataagcttgacattttatcatccaagaagctggcgaatccaatctgggtcaccagtatttcctcatgtacagtatacagatgtttgttaattccagcccactttgtttctctagccagaagtatctgtaggacactgccctttgttttttgctttttaatttgaaattatattgagatttttatagaatcacatgcagttgtaaaaaataatagagatcccctgtatacttttccagttctccacaatgatattttgcagaactttagtataatattacaaccaggatattgacatcgatacaacctactcctcttagatttctccaatttaactgtacttttcttttgatttatcacgtgtcagtttgtgtatccatgaccatcaagatatcaaatactagccgggcat

SEQ ID NO: 79480 - DNA, 2713 bp, Homo sapiens
ggatgggtttgggatgggagcggggtgatgctctggttctcagggctggactccgggcttggaggggaactccctcttgcgagtccccagtcctgtgggggctgggcctggaaggggaactgggagatgcggaagtgcacgccgtcgggtcgcatctttcagtgcggtgcgagagggcccagtggcagaggcccagcaaacagcgcttgtcaggcggacctgagttcgagttctgactgtgccatctacgctatgactttggggcaggcgacccaccctctgcgcctcattaacccatgtactgcatggaaaataagcgtctgcctgggttagaagagggctgtgtgtgaagattcaaaggacgaaggggaagagtcctcgctgggcgcccagcacgcggtgagcgcccggccagtggcagcgcgctcgggctggggttgcgctcgggctcggttccgcgcccccggcagctgcgggctttcccagctccggcccgggcccttccgctctccccggcacttacagcggtctctctccacttctcccttctaggaccgcggcggctaggtcacctcctccggacgccgacacgcgctgccctggcaaccgtcaccagggaaacaagcgacgtcacttgcgcgttttcaacgctactctacgggggccgagggggcgccaagagttctgaaagtgacagaggcgctgatggcgcgctgggctggatccaagcgagcacgatctcgagtgcgctggagattttaaatcttctggagtatatttttaaaaaagttttgtggaccaaacgttctgcacagagatgcccattccgctctcctgttggggagttaaaaagcgaacgatctcaccatgaaatttaaagtagccattcagatatatttgaaaaatgtaaaacagtgtggggaaaggccatgttatgatggtgagtgaaggaagcaggacgcaatatagcaatgctaaataaataaagttgtgtttatttcaaactaggcactaaaacaagaccgaaatagaaatattaaaagtggttatatttgggtggtggaatagcagtgctgtgtttttatttttacactttagagaatttttaaaataatgaacatcgtttattttcataaaggaaaatacttgtttttttttttttaaatggcaccttccaatgtaagacactactatatttcagggcaatatgggggtgggaggcaaatttctaggaaagatgattcaagggagatttctttctatctatctatctatctaatctatctatctatctatgatagagtctcgctgtgtcgcccaggctggagtgcagtggtgcgatctcagctcattgcaacctccatttcccaggttcaagcgattctcctgcctcagcctcctgagtagctgggattacaggcacccgccaccacacctggctaatttttttatttttagtggagacggggtttcaccatgttgaccaggctggtcttgaactcctgacctcaggtgatccgcccaccttggcctcctaaagtgccgggattacaggcgtgagccacagctcctgcccaaatatttatccaggmcttcataatttgaaaaccttggcagttgtttttctattttttttcctcataaggtgaatgaatacccatcccatagacatgcatacataagatacggcactagactgccatcagcactgcaggtataaacccgaagtttcctgataaaggaaaaatggatctttcccgttggtctccaattgctgcctggtgagctgagggtgggagacgtataatatacaggtggcagcaaagagagacaggataaagagtaggattcaggtagatgtgagcctcaaaggattagggttttttttaaatggtgtgtgtagtggggagtatcattcgtttgcctcatgaccacgatgggactatgtggcataggaaaaggaatagccaggtctacttagagggcttctggaaagcatggatcctagcagaaagccaggttttcattaaaataagaacatgctgtgagaaaattaaggatgcaagagaatttcagaaccgacattctagaatgtatgtattagaaagtttgggaaaggggtaacatttgctccagcaatccaaggattatttttgacgaggatatcatttttgcagtaacccattttttaaaaagcagggatgattttcctctaggtttgttacttttccacggtcaccactaaggctctcatgccattttttttttctgcccaaaattcttttgagaattttctttagtttataagcttgacattttatcatccaagaagctggcgaatccaatctgggtcaccagtatttcctcatgtacagtatacagatgtttgttaattccagcccactttgtttctctagccagaagtatctgtaggacactgccctttgttttttgctttttaatttgaaattatattgagatttttatagaatcacatgcagttgtaaaaaataatagagatcccctgtatacttttccagttctccacaatgatattttgcagaactttagtataatattacaaccaggatattgacatcgatacaacctactcctcttagatttctccaatttaactgtacttttcttttgatttatcacgtgtcagtttgtgtatccatgaccatcaagatatcaaatactagccgggcat

SEQ ID NO: 79481 - DNA, 647 bp, Homo sapiens
aaggaagcaatcagatacgcatttatttcagagagcagaaggaaggctttgagctctgtcttttgtccacaaggaaattcccgtggacaaatcgtgagggaggtacgtagcaatttttatcttagaagctgtctttttttggaataggatgggaggcaggtttgccctaagcagttcccagcttgacttttccctttggcttagtgatttgggggtcccgagattgactttccttcacagagtctccctgaatttgaagtatgtgatgacatggacaataaagaaaccatttgtgacctttgaaaataactgcaaactgtgatattagtgttaaaagaaaacctagaaaatagaagagttaaaaagaataggacctggccaggcatggaggtgcacacctgtggtcccagctactcaggaggctgaggcaggagaatggcttgagcckaggaatttggggctgtagtgagctatgatcacatctatgaatagtcagtgtactccagcctgggaagcgtagggagacctcatctctgaaagaataagttttgagaaaatgaatactaaaatgaaagatcacccatttgaaaaaatggaaggagaaaaatcccgttgttttacctcaataccactctgcctaatgggct

SEQ ID NO: 79482 - DNA, 1027 bp, Homo sapiens
gtgagtataaacaactgcatgtgtggcgaaaaccttatacgatttcgtttttgaatcattttaatgacatttaattgtccatgaggagttataatgacataactatgttggaaatcacattcgataaaattgtagttttaaaacttagtatctgcatcctttccttggaaaatagcagccctttttcccttagaaatgtaactaccatttttttttctttttggtctatttacaaaaacttaagaaaagtgaaagaagaccatagagaattgcctactgcactcttctccacagagataatggctgttactgtttagtaatatgttcttctagacctctctatatgggtttatagatacatctgggcgagtgtatacacagtttttaaatataaaggaaatcttacaatgggtactattcgtcaatttactcttcacttaatcctgtgttgtgaaaaccttttcataccaataaatatgaaagtttgtattattccctctttgaagactacacaaagctcacttcatggttatccgatgctgggtctaactcagctccccactggctatctggttagttcttgattgtttaatgttttaaactccactgccataaacatttctcagtgtgtaccatttcctgattgtatagttttcttcaaattgcctagatataaaacttgtggataaaactatcgcaatttattaagacccgtatatgtattgccaaattgccttcccagaagtgtttacacttcccctcacctcaccagaagatgaaactctctttctctttaacctcctataaatgtaagtcattttgttaagagaaaaagtgtgtcttgtgttcatttactgtgtgttttcatcatgactaaagatgttgtattttcaatattatttataattatatattctcatttgtgagtcatctattcaaaatgtagcaaaattactcagtgttcctctcctgctttgtacacatatrcgaatttaacctcagcttaaaatggtaattcctcaccagg

SEQ ID NO: 79483 - DNA, 1507 bp, Homo sapiens
gccatgaagaagaaattaggcaatgcccctggaagtcaatcaatgggactgaccgtggttgaagctggatggcatagaccagtgaacctcttctatttcatttcttcaggctcaaatgtctgcgaatccattagctcttgacctctactcatgatcctcagtgcaaatagcatcattcaaaattggctgaggatacatgtaggtgagagtacacttcagtgtgggagatgtaatttaatgatggtcacttccaaccacgcatttccagaacggaaaaccctttgatttgtacatggcacacacagractgtctaataatctgtaggtcaaaaataaaaccagaaggatgcaggactacctactcttactctgaacccttctcacaattttttttcccatgtcaaagcagaaatggctaattgcttgcaggaaaatttcccttattttccttatccctttatcagagcaaagatagtaagtgaaatagaagagaacagaaagaaggggctttagaatactgaagatatttaagatctaggatttgtttatttttgatgagatttgcagcatctttttcctctaattgggcaactagtaaacatttcacaaatagataataatagtgacggtgtgtttttttctctctctcttttttcacttgtgatattaaaggtgttttgtttcctccttctttcttttgggaccactgcctgttggtttcgtgctgaggcacatacatgactgtactatctaaagtttctatttcagagaggtctaatctggatatattttagtagacatccatgccgatggatggaagaagacaattttcaaaaagggtgcttgattgacatacaagtctcgcaattagaaaaaggaaaattttctataaaggcaaatccacgggaattactggcagtaatattaatgatattaggctgcctgactacaaggtgtgatcttagggatactgggaaaggtcttctgccagaatcggtccccgctgcacctcaaatccccaccattaaagtcattcatttgagttaagaaaattgccactaggacctctattaaaatgcaaatgtgttccccgggtggggaaacacattaaatcattatcaaccattaacactttagaccaaattagtttcagatttattagccaattactcaagtacagaaggaatgcggagcaggagagtgtagtttaagttggtttttggaaacctgggatgcttaaagacccatccggtggtgtggtgtcttgccatagcttttatctttttattagtcagctttgtgtttttgttttgttttgttttgttttgttttgttttgttttgtttttgagacagactctccctctcttgcccaggctggagtgcagtggcgcgataccggctcactgccatctccgcctcccgggttccagtgattttcctgcctcagcctcccgggtagctgggactacaggcggctgccaccacgcctagttaatttttatttt

SEQ ID NO: 79484 - DNA, 1507 bp, Homo sapiens
gccatgaagaagaaattaggcaatgcccctggaagtcaatcaatgggactgaccgtggttgaagctggatggcatagaccagtgaacctcttctatttcatttcttcaggctcaaatgtctgcgaatccattagctcttgacctctactcatgatcctcagtgcaaatagcatcattcaaaattggctgaggatacatgtaggtgagagtacacttcagtgtgggagatgtaatttaatgatggtcacttccaaccacgcatttccagaacggaaaaccctttgatttgtacatggcacacacagaactgtctaataatctgtaggtcaaaaataaaaccagaaggatgcaggactacctactcttactctgaacccttctcacaattttttttcccatgtcaaagcagaaatggctaattgcttgcaggaaaatttcccttattttccttatccctttatcagagcaaagatagtaagtgaaatagaagagaacagaaagaaggggctttagaatactgaagatatttaagatctaggatttgtttatttttgatgagatttgcagcatctttttcctctaattgggcaactagtaaacatttcacaaatagataataatagtgacggtgtgtttttttctctctctcttttttcacttgtgatattaaaggtgttttgtttcctccttctttcttttgggaccactgcctgttggtttcgtgctgaggcacatacatgactgtactatctaaagtttctatttcagagaggtctaatctggatatattttagtagacatccatgccgatggatggaagaagacaattttcaaaaagggtgcttgattgacatacaagtctcgcaattagaaaaaggaaaattttctataaaggcaaatccacgggaattactggcagtaatattaatgatattaggctgcctgactacaaggtgtgatcttagggatactgggaaaggtcttctgccagaatcggtccccgctgcacctcaaatccccaccattaaagtcattcatttgagttaagaaaattgccactargacctctattaaaatgcaaatgtgttccccgggtggggaaacacattaaatcattatcaaccattaacactttagaccaaattagtttcagatttattagccaattactcaagtacagaaggaatgcggagcaggagagtgtagtttaagttggtttttggaaacctgggatgcttaaagacccatccggtggtgtggtgtcttgccatagcttttatctttttattagtcagctttgtgtttttgttttgttttgttttgttttgttttgttttgttttgtttttgagacagactctccctctcttgcccaggctggagtgcagtggcgcgataccggctcactgccatctccgcctcccgggttccagtgattttcctgcctcagcctcccgggtagctgggactacaggcggctgccaccacgcctagttaatttttatttt

SEQ ID NO: 79485 - DNA, 564 bp, Homo sapiens
ttccaaacaaggttaaaggaattcagtataacttctttccaaaatattttgaaagttttctggttgcttcctatcataaatcctctttgatcaaaaaaatgaatcaaatacattggcctctttccaagaacagagccactctgttttgcaaatgtttggtgaaagtcaaatattgtcatttttgtcattctcctgccccctagagttcttaataacttgagtgttctaaggggctgtagttcagaatcaaatacacagtggtagtgtatattgtttgattgcataaatattgaccatatcttttttcttttctttctttctttctttttttttttttttttgagatggagtctcactctgtcgcccaggctggagtgcagtggcatgatctcagctcaggcagcctccacctcccaggttcaagcgattctccagcctcagcctcccgagtagctgggattacaggcgcgtaccaccgcatccagctaatttttgtatttttagtagagatggggtttcastatgttggccaggctggtctcaaactcctgacctcaggtgatc

SEQ ID NO: 79486 - DNA, 765 bp, Homo sapiens
atggggtttcatcatgttggccaggctggtctttatctcctgacctcaggtgatctacctgcctcagcctcccaaagtgctgggattacagcagtgagccacggtacccggcctgtctcctttttctttgtctttccttttccttccagaacaattcagttctaaagccatttggtgggcaacataaggtaggtatctgcactagaacagggagggtgctgtggaagtccagagaaaggcatcagagtccaagcagtttgagaaatgtctacacaaagaggagcagcctaaagcagtgtcagagccagaatggagagaggagggcatccgtgcatgtgagggagtgtatggagaaagattagttacacagaagaagattgacccaatatgtagcaaattaaaggtagyaaaaaccaggggtgtgtgtgtgtgtgtgtgtgtgtgtgtgtgtgtgtgtgttctttctgtctactcagagcacttgggggaagtaataggccaatgacaatgagcacacctagtagccacgtcttgattgctaaatgccatttgctactaaagggaaccagggctgcctttagaattggctgattttagaactgtgacaggtaaagtacaagttgagcctggaacttcttgtgtcaaaaatcaaagaaatgctcaaggaacaatgaagttttgttaaatatatacagaaacaaacttgaaggagctcccactggccaaatcatggacaatttgagtgtcaaaataaataaagatagt

SEQ ID NO: 79487 - DNA, 1043 bp, Homo sapiens
tttctttcctgatgtgcagtcatagaattgctgacctaaaggacacatttcaattgttggccctttacagtttgcttcatcctagttcatcagcatcatcctctgccattgcacaccataaacctacaatctaattatactaatcttattgttgccagaatataccttacctgttctgacttttggcggttaattatgttattaaactgacttgcagtggccctcgttgcctttttgggaatgtatcatattttataaatcttgttatctccagttcctacttggtatttgtaacttaggaatttgacacttcattgtttaaactgatgaaggcaatatcaagaactgttgtgcatacacagatttattagacttaagaggctagagagtacaagtggtgtttttttttttttttttttttttttaaagacagagtcttgctatgtccccaaggctggagtgcggtggcacagtctcggctcactgcaacctccacctcccgggttcaagtgattctcccacctcagcttcctgagaggctgggactacaggtgcacgccaccacgcctggctaatttttgtatatttagtagagacggggtttcgccatgttggccaggccggtctcgaactcctgacctcaagtgatctgcccgccttggcctcccaaagtgctgggattacaggtgtgagccaccgtgcctggccttttttttttttttttttaacaacctcacactaaggagcaattgtaaatctgctgcctccttcattttaagtacattaaacataccaattttagaatgaaaaaatgaaggctgattgactgtggtggcagatamgtgactgtatgctcttgtttattgaaacagtgttgtttttatgctttcttaacatttcaagtctcaatgtctgtgtttacaagtggtgtattaagagcatgaaggctggagccagatgacctgaatttgaattggtggcctcatgcactttatttaaccatttttttttctgtcatggtacctaattcataggttggtttt

SEQ ID NO: 79488 - DNA, 527 bp, Homo sapiens
taaaaatactgcctgttaacccctgagattttttttcagtttttattttcaaatgaatatagattaacaaaaaaagttacaaaaatagcttagggacctcccttgtccctgctgttgggtttccccagtgataatacacacacacctcattttactgcacttcactttattgtgcttcacaggtgtggcattttttacaaattgaggttttgtggcaaccctacctctagcaagtctatcagtgmcattttttttttaaagcatgtgctcacttcctgtctctgcctcacatcttggtaattcttgcaatatttaaaacttttttactattattgcaatatcttttatggtgatctgtgatcagtgatgtttgatgttactgttgaaatgggtttgtggtgcaacaaacaatgcccatataacataatgaaattaattgatgaatgtaagtgttatgacggcttcactggccagcgattgtccatctctctacctttccttaggcctcccaattccctgaaacacaa

SEQ ID NO: 79489 - DNA, 1694 bp, Homo sapiens
gtcagtatctgccgatggaacttgggcataaagaaaaagagacacaggaggtaaaaggatgccctaactcagaataataagacacataaatactcaaacaggagatgaagaatcagatcagtaaaactctatcagactaaccaactcaccttctaacattttgtgactagacactcatttggtacgcattaaacactttatacattctcaagttccagtagcctgaagtaaatcttaaaaaaagagtcttataaaggattattgctaatattttataatttacctctaattctttcatagtgatgtatgtagtctataattgatatttaatgattatgtataaaaccattaaaaatttttgagtttactttatgccaggctctgtgtttgattattttataacttttacttcatctaatcttcataaaccctatgatattgatagtaatagttcttaaatttcatagttgaagacacaggagattatcaaggaaacacgctcaaagtcaaccaagcagtggtcaagctgagtctcactaacctttgtctacctctacctctaacggattaaaatctagagagtcattttgcataactgtaagaaaattatattttattttgcctcgattgtgctgggaatttttagtttttgttcaaatttagatagataaattgccacagatatattgaatgtaggtttattatataataattacaacatatttacataatgtatacatatgcatatatatgcatgcacacgtacttgactatgtactgactgatctttctttttttttttttttgagacggagtctcgctctgttgtccagactggagtgcagtggcgcaatatcggctcactgtaacctccacctcctgggttccagcgattctcctccatcagcctcctgagtagctgggattacaggcacgcaccaccatgcctggctaatttttgtactttttttttttttttttgagacagagtctcgctctgtcgcccagactggagtgcagtggtgcgatctcggctcactgcaagctctgcctcccaggttcacgccattctcctgcctcagcctcctgagtagctgggactacaggcgcccgccaccacgcccggctaattttttgtattttagtagagacagggtttcaccatgttagccagaatggtctcgatctcctgacctcatgatccgcctgcctcggcctcccaaagtgctgggattacaggcatgagccactgcgcctggcctgatctttcttacagaggtaaaaatccgtatttagacagataattaaactaagttatccccgtagttttgtataacctaggggtggtttttaaagtcctagcaaatttttagttacatattttatttcctcgtttctccatttcatgcttctgtcttctaagaagcataatttaattcgtaaaagtatctgtttatatataacaatatctatttataggttttataatacttcagtatataaataattcacttgaaaaggatgttggcaccaaaatggatggtcttttttaaaacttagaatttatttggatttgtttgaagttaggtttcatgggaggaaatgctctcattatttgtataacatttttttgcaacctatcygtgagaggtctgagtgttaaataaaaaaaaattcggagttatttgtatata

SEQ ID NO: 79490 - DNA, 620 bp, Homo sapiens
tcttagtgtttacctttgtattaccacatatgcttatgtttctgttactgatctaccagctctaaacaatatcctttgacttccagtcattacagattcagcaatcaagatatttattactattatttattataatacctcccacttccccttcactgttccttcccatttttcaggtttttttttkggtatcttttctactttattgggacacaggtgtcccataaaattagggtcccaattaggtattagggtcccaatttagtgactctaattcccatatttgttttagtgttttcttggttttgttatttgtaagttgaatttgttttgctcgtctgcttctatcattttatctgtaatttaaaaaactcttcctttattttgaagtaatgtggtttcttattcctttcttctatatcccacaagccctttctacttcaaagtgtcatccactgataaacgccagctgggagcttgttagaaatgtagactctcaggccctatcccagacctactgaatttgaatctgtgttttaacaaaacccccagctgagtcacatacattttaggtacgagaaacattgttttacagtgttttttgaagactctaacccttg

SEQ ID NO: 79491 - DNA, 620 bp, Homo sapiens
tcttagtgtttacctttgtattaccacatatgcttatgtttctgttactgatctaccagctctaaacaatatcctttgacttccagtcattacagattcagcaatcaagatatttattactattatttattataatacctcccacttccccttcactgttccttcccatttttcaggttttttttttggtatcttttctactttattgggacacaggtgtcccataaaattagggtcccaattaggtattagggtcccaatttagtgactctaattcccatatttgttttagtgttttcttggttttgttatttgtaagttgaatttgttttgctcgtctgcttctatcattttatctgtaatttaaaaaactcttcctttattttgaagtaatgtggtttcttattcctttcttctatatcccacaagccctttctacttcaaagtgtcatccactgataaacgccagctgggagcttgttagaaatgtagactctcaggccctatcccagacctactgaattygaatctgtgttttaacaaaacccccagctgagtcacatacattttaggtacgagaaacattgttttacagtgttttttgaagactctaacccttg

SEQ ID NO: 79492 - DNA, 706 bp, Homo sapiens
atttgaagttatctcacagctcacttttactttgttaattttctaaaattctctgtctctcttttgtaggagattctataacttctacttaaatagtccttttttcggcaacgtctaatttgtcattaattatatccaatgtatttctcatctcagacattgatgttttcaactgtrgaaatttgaggactgtcttgttgtcttccatgcctctacatgctttttgaacatgtggaattcaattataaccattttagtgttcttacctgttaataataacatctgtattagttatggagcagttttaattgatttaattttttctccatgttgagggtcatatttccctgcttcttcagatgcctggaaattttttacaattctatttgatttcacaaagccttcccgttttaggacagttttaaatttacagaaaaacggtgaagataggacagagagtcaccacatactccacactaaatttaccctactgttagcatcttacattagtgttgtatatttgtgataattaatgaactaatactgatatattattactaactaaattccataatgtattcggatttccttatttttttttacagtgtctttttctgatcctaatagtcatatctaggataccaaatcacattcagcagtcacatgaccttaggctgtttttggctatgacagtttctcagacttt

SEQ ID NO: 79493 - DNA, 395 bp, Homo sapiens
aatcccaggccctctgtggggaaagaaagcctcattcagaggaaacagacttggtagaaaccttatgatggcttcctgtggcatcttcccaccccaccctgcccctaaatgaacacaactaagtgcctccagtgatgcatacaagtgcacaagtacayacgcaagcaaagatcccctaaaccagggagtggggagcatttaaggggaagcaggaggtgaacaaacaatgtgatcctggaggaagaagggttcatgcttctctctctctctctctctctctctctctggctctctggctctccctctctcagggtcagagtaggggataactgaaactccagctggctttggatttgaagatttgagagcaatgaaggcctgggtcccctttctca

SEQ ID NO: 79494 - DNA, 415 bp, Homo sapiens
  misc_feature (1)...(415): n = A,T,C or G
cagaacattctagttganttctttgctttctaaataaaagaatgtatgaagaaataattaggtagacaggtaggtaggtaggtaggtagatagataggtaggtaggtagatagatagatagatagatagatagatagatagatagatccacagccagcccatagagtagttcaagggtttccaatacacttaaaaaaagagaaaaggaaaatatctctgtgtatataatatgtcctggcagctataaatagtttggtgactatataagtgttattttcaaaattttgtacaagttcatgtttaatagtcaaacatcagctttttgatgatgagtttgaggtttttgggctattcttatggaaaagatgtaratttacaaggaaccgctggaaatgaagttttaaaatcatatgca

SEQ ID NO: 79495 - DNA, 582 bp, Homo sapiens
agaaacaatggagaagacggtcatttggtgtccctaacatgggccatttccttgtggttctctggtgttgcataactctgtatctttttgcagcccttatgaagagaaggctcagtggggtggtgaatactggtctaggtgcctagggggctgacctcgtattactgacttagcgaacccttgccttggstcctcgtaattttgtctttctaggcttcttcctgatctttcccagttttctcatatgtcctgaataacatgtgactcataactggccctctggagactttgaggagcattttgtaataactgtgcctacattggtcacctctgtgaaatcggttgggggctttgaactattgaatcatttgtttttatgttgggccacctaagagggtgttggctacactaatacataaggctttcctttcccatgtggttcctggctcctaacttcttgtgatacctcagagtatatccccctaaaatttgttttgaccacccaactgccagctagaaccaagactttgatatcctgggtggcaagatttaataagtagattttattaattcctagatgat

SEQ ID NO: 79496 - DNA, 539 bp, Homo sapiens
gacaagggagcctgagctttgagaaagaaactaacatttccacagacacatagccaataaaatgggagagcagacgttctgccctggaatccccttcagagctagagtccttaacacctgccctgcacagcccagccatcagccttccagcacactcttttaaatgcctgaatttttggtgctcagctagaagggatgaaatgactcaaaagaccatcaaagaaatcaacaatcaaaagtaatcatgatgacagcactatcttataaagtccccaagtgtctagaaaagcttccacaattatttcgctctttactctgtcatcccaaacacagtgttgctgttgcacagagctgtttactgcctggaacaacccgggcactcaacctgaccatgcttrtagtgatgtacatgtctgcagggcacagcctgacagattccattaaacacaaccgctcctttgttgccagccttgatgctcagatgtactccctacctcttcctcaaacccacccctctctgcacgaggcagcatgacctt

SEQ ID NO: 79497 - DNA, 449 bp, Homo sapiens
ggctcatgtcctaaggaaaaaattacattttggctaactagggtttaccacacctcacaaaaggattgcaaactcaaaggcttacaggagcctagaacataaaataaatatatacgaaacaggactgggggaactgaggcaaactgggatggagcgccaagcgtctgcaccagcagacgagtgccctgcaggaacccgagcccaggccagcctcatctcctgacttttcarctgaagctgcaaaaattgagggttttatttccaggcttccaattttaaaatgttgacaacttggacaaaatgtatacaataccacactgtgtggcccatagtagctgctagtttcttctttgcggacagggacccactgaggcagaaggcaccaaatccaggtggctcctagcttgattggggtgcctgtcctgaacattaggaccactttccctgca

SEQ ID NO: 79498 - DNA, 1028 bp, Homo sapiens
tgcattgaaacatcacactgtattccagaaatatgtaaagtattatgtgtccattataaattcaaaaattaactaacgaaaaaatgtctaagaatcaggccccctgagataatagaactcagtaataatgtaaatataaaactttgttttcagaggctttttttttttttttgagacagagttttgctcttgttgcccaggctggagtgcatggcacgatctcggctcactgcaacctccgcctcccggattcaagtgattctcctgcctcagcctcccaagtagctgggattacaaacatgtgccaccaagcctgattaattttgtatttttagtagaggtgggttttcaccatgttagttaggctggtctcgaacttctgacctcaggtgatccactgtcttggcctcccaaagtgctggcattacaggtgtgagccaccgcacccagcctcattgttattttttaacaagcatgttcctaagtaatttataattgcaatatttccctattgtattagtttaggccttctgagggcttatcaaataaaaaattgggtcactgaatttcaaaaaaccaactaacttagttccatatggattatttgaaccgattgcagatgtcataaatgatatattaaagaatcataaaaaccacttcgatctctaatgcgattaatagtaacatagattattgcacctgttatggtcctgaccttgctttaacaatttgagtgtctactttatcattatatcagttaataggtttgtcttagtccattttgtgttgctataacagaatatcacagactggataatttataaagaaatgaaatttatttcttagagttcttgaggttgaaaactcccacaggcccgcatctggtgacggtcttcttgcagaaggtggaagagccagagattgcaagagagcaagagagtaagsaggggccactagcttttacagcaagcctacactcagcccacactcatgataattcacctgttcccatgataacaacattgatg

SEQ ID NO: 79499 - DNA, 585 bp, Homo sapiens
ccgtggcaaaaaattaccacaagccctcccagttctaggggcaagaagtccaaggtgtctgcgggcgggctcctcagggagagtccctcccacacccctccatagctctggtggctgcaggcattttggtgtttcttggctggcacacgcagcacgccaatccccactccgctgtcacctagccctctggtctgtgcgtctctgyctcaaatctctccttgcctcatttaaggacaattggcattggatgtagacacaccctaaatgctgaatgacctattctgagatccctaattacacccgcaaagaccctattttcaaaggtcacattcacaggtactgggggttaggacttggacatatcttttgagggcgacaggattcaacccactacactattttattgaggatgggtgcaaggctcaccagagccagctcagggccccccgccagtcctcctgccagcgatatccactggctggggcgagagagaagcccctgccaccacactcagcctcgcaatgggtggcacatccagaagagccgcccctcctctggccttccttatctgcctgctgcatgcta

SEQ ID NO: 79500 - DNA, 647 bp, Homo sapiens
gggtcttgctctgttgcccaagctagagtgcagtggcataatctcagctcactgcaacctccaccacccgggctcaagagatcctcccacctaagcctcccgaggagctgggatcacaggcgtgtgccactatgcctggctaactttttgtatttttggcagagacaaggtttcactatgttccccaggctggtctggaacttctgagcccaagcaatcagccctcttcagcctcctgaagtgctgggattacaggtgtgcgccgccacatccggcccagtgcagagcctttgtatgatacagactttggcttttggtcgagtgaggtgggagccacggagggttctgagcagaggagggaagcggctgacttagatgctcacacgcgccctctggtggccctgggggaaacatactgtagacagtttcattttgcaaagattgttctcgcctcgaggtagagattggatgggacaggggyggcagatagatagggagacgaggtgtagacagtgaggtggggaagtggggtccagccaggagatgatggggctggaccagagaagctgaggagtggcgagaggtgagtggactctgaaggagtagccacaggacctgacggggctggatgtgatgtgaggggagag

SEQ ID NO: 79501 - DNA, 1037 bp, Homo sapiens
tggacttcttacactgtaattgtttgtgataataaataatgttggcatagtccagaggagaatttcaataacttaaatatgtaaaacccaggaccttaacctacatgtttttagttatctatataataatctatataattaattcattcataaattcaaattccatgaatttcaattattttctctttcattcacttattaattcatgatttacttaactcattcagttaacatttattgagtcctaactatatgacactccttccccagattagcttacttcttaaatggcttacatcttaaatcagagagaaaaataataacaaaatttaaaattcactggagaaaaataatagtcagatttcatattatgcaaagtggtctttcctacattagtaagccaacctatatcaaccaagatactaatcaataatcattacctataaaaacatttaaaaaatagatattgtgaaccaggaccaaggagcatgtagcagaaaatgttaggtcaggctagcaaagtgttcttttaaaaaaattctaaatttgtacaggtttaaggtatataagtgtaatttaattctttttttttaattatacttcaagttctgggatacatgtgcagaacatgcaggtttgttacataggtgtacatgtgccatggtggtttgcagctcccatcaactagtcatctacattaggtatttctcctgatgctatcactccccttgccccccaccacccctggacaggcctcagtgtgtgatgttcctctccctgtgtccatgtgttctcattgttcaactcccacttacacrtaagaacatgcaatgtttggttttttgttcctgtgttagtttgttgagaatgatggtttccagcttcatccatgtccctgcaaaagacatgaactcatccttttttatggctgcatagtattccatagtgtatatgtgccacattttcttcacccagtctatcattgatggagatttgggttggttccaagtctttgctattgtgaacagtgctgcaat

SEQ ID NO: 79502 - DNA, 591 bp, Homo sapiens
cctgtratcccagcactttgggaggctgaggcaggcagatcacctgaggtcaggaatttgagaccagcctgggcaacatggtgaaaccctgtctctactgaaaatacaaaacttagctgggcatggtggcacatgcctgtagtcccagctacttgggaggctgagtcaggagaatcacttgaacccgggagatggagactgcagtgagccaagatcgcgccactgcactccagcctggacaacagagcgagaccgtctcaaaaaaaattaaaataaaataaaataaaaataagaaatcaatctgaggaggggtccatgggcttctatgggctgccagaggggtccatggcacaaaaaaaaactttgaatagaaggtgaggaatgagtgtctccccaaagggaaagcaggtgccttaccaaagggaaaggagagtgctgagcggcagaaacaacagatgtccaatcaaaagggacacagagatgagtctgacatgagcctgtcccccaggctagtttgactaggagactcctggagatgccatggtcagcctcttcattttacagacagacaacaactaagactcaagaggg

SEQ ID NO: 79503 - DNA, 591 bp, Homo sapiens
cctgtgatcccagcactttgggaggctgaggcaggcagatcacctgaggtcaggaatttgagaccagcctgggcaacatggtgaaaccctgtctctactgaaaatacaaaacttagctgggcatggtggcacatgcctgtagtcccagctacttgggaggctgagkcaggagaatcacttgaacccgggagatggagactgcagtgagccaagatcgcgccactgcactccagcctggacaacagagcgagaccgtctcaaaaaaaattaaaataaaataaaataaaaataagaaatcaatctgaggaggggtccatgggcttctatgggctgccagaggggtccatggcacaaaaaaaaactttgaatagaaggtgaggaatgagtgtctccccaaagggaaagcaggtgccttaccaaagggaaaggagagtgctgagcggcagaaacaacagatgtccaatcaaaagggacacagagatgagtctgacatgagcctgtcccccaggctagtttgactaggagactcctggagatgccatggtcagcctcttcattttacagacagacaacaactaagactcaagaggg

SEQ ID NO: 79504 - DNA, 591 bp, Homo sapiens
cctgtgatcccagcactttgggaggctgaggcaggcagatcacctgaggtcaggaatttgagaccagcctgggcaacatggtgaaaccctgtctctactgaaaatacaaaacttagctgggcatggtggcacatgcctgtagtcccagctacttgggaggctgagtcaggagaatcacttgaacccgggagatggagactgcagtgagccaagatcgcgccactgcactccagcctggacaacagagcgagaccgtctcaaaaaaaattaaaataaaataaaataaaaataagaaatcaatctgaggaggggtccatgggcttctatgggctgccagaggggtccatggcacaaaaaaaaactttgaatagaaggtgaggaatgagtgtctccccaaagggaaagcaggtgccttaccaaagggaaaggagagtgctgagcrgcagaaacaacagatgtccaatcaaaagggacacagagatgagtctgacatgagcctgtcccccaggctagtttgactaggagactcctggagatgccatggtcagcctcttcattttacagacagacaacaactaagactcaagaggg

SEQ ID NO: 79505 - DNA, 591 bp, Homo sapiens
cctgtgatcccagcactttgggaggctgaggcaggcagatcacctgaggtcaggaatttgagaccagcctgggcaacatggtgaaaccctgtctctactgaaaatacaaaacttagctgggcatggtggcacatgcctgtagtcccagctacttgggaggctgagtcaggagaatcacttgaacccgggagatggagactgcagtgagccaagatcgcgccactgcactccagcctggacaacagagcgagaccgtctcaaaaaaaattaaaataaaataaaataaaaataagaaatcaatctgaggaggggtccatgggcttctatgggctgccagaggggtccatggcacaaaaaaaaactttgaatagaaggtgaggaatgagtgtctccccaaagggaaagcaggtgccttaccaaagggaaaggagagtgctgagcggcagaaacaacagatgtccaatcaaaagggacacagagatgagtstgacatgagcctgtcccccaggctagtttgactaggagactcctggagatgccatggtcagcctcttcattttacagacagacaacaactaagactcaagaggg

SEQ ID NO: 79506 - DNA, 1398 bp, Homo sapiens
tgatctagcccctgcctacttttccagtgccatctgcctcccttcacaaaatgaaaccttaagcatgttaaacttccacatgtctgtgaatgtgtcatgctgtttcatgcctccattcttttcgggttattcttcctctgcctgaaaaaacctgtaagtatcgcctctatgcagctgcagccttcccaagacagaactgatcttcctccttgggagcattcctgtagcctattttcttttattttcatatcttgctcttgcaggttgtaaactctttgatggcacagacaatgtcttccccttctttatatcttgagtatataatatctagcacataggaggttttcggcaaacactgaatgaaaaatggtcatttcccatggctctagcacccagaacatagtgaattcttaattaacatttgattgacaggcagataatactttttgttaaacttggaactgagctgaccatgtaatcacagaaacatacaactgacaattttgaacatgccaagttttaatttctttatatttaccctctctgccagtattccaagtatttcaaggacctgtacttcactcctccatagattattagatcatattatttgagtaatttctcatagaaacctgcttataaatcaaacatgttactcatttggaattttgatttagtgtcaacattaataatttttggtactatgcttctccgcatcttatcgctatggatagactggctattggttaaaattggactataaactgtgaagcacaataacaaagttgttaacagttttcatgcttttcctgaatgacttgaaatcatgtctcccatttcataaaggagagaacagctaagagaattttagagaaattgctgttctcggaaatcttccgcaaatataatagcatgttcctgctgcaaggccagcaaaacccaactagaaattatctcgttagagacaaaatttggagcaggcccatgttggcattaaagatttttgcaggcaggcagcaggacccaacmgctcagctttagggccaagccttcactctttctctggtggaagaattgggtaggacttgatcgacagatttttaggccaaaactatctagcccagaggaacatggctaggattcacttgtcaacataaaattggaggctgtcaaaaatggtgagatagggcagagcccttcagattttaatgtgcatacaaatattgtgggaatcttgttaaaatgcagattctgattcagtagcaggtagggcccaagattttctattcctaacaagctaccagtgatgctggggatgccagggctcttttgaggagcaagaagttagagaacactgaggattcacagtaatcctctgactttccagtgctcactttg

SEQ ID NO: 79507 - DNA, 1170 bp, Homo sapiens
aggtagattttcatgcttgtcaaaaagtgttgaaatgaaggggtcttagaaaccatctctaaaatatgagactggggtataacagagacactgtgcttagacagcataagggactttcttaaggtcatatgagaaaagagagctgggatgaagacttgggttctacaaaaccagatggactgactctagactctagacctacttataggagggaataaaaatgacacaaacgagagaagcgcattcaaataaagagaaaacttgaaaatgttgtagcaaaatttatggttataaaagtcgcttcctttcttggacttgggcaagtaacacacttgctttgagtcttctcttttagaggagtaatcaagcaattaatcactgtatacaaatcactgtgctaggagctttgggggaaaagagagatcatggcatgacctctaggagcttacagtctagtgactgagatggatgtgtgaatgaccagccacggtgtcaagtcaaacaaaacagggaataaccacatggggcctatgtatagttaaataaatatctgtgagatagattatttggacataaaatttatcttcattagtgcatcttaactgtgaaggccaaaaaattaacatataaatattggggagtaacacatctaggctgaggtgatgcaattcaaatgacacagttagttgagttataaaagtgcttgcctttatttttctatctcaaaaggaaaaagtgtgtaatttatacagacaagtaacaaacagacccattgttttcttatattttacaacataagtggtcaacttaatatacacatcatacccttgatatttctccttgtgggaatttgttgcaggaagatatatctgccaatacaatgtttgtgcagggagaaggggaatctaacattgatcaaatactacttatgtgccaagcattgtcatggatatttttgttataggaaagcggtcctgatccagacccccagagggggttcttggatcttgaacaagaaagaattcagggcaagtccrtagagtaaagtggaaataagtttattaggaaagtaaaggaataaagagtagctactccatagacagagcagccctgagagcttctggttgcccatttttatggttttttttgatgatatgctaaacaagggat

SEQ ID NO: 79508 - DNA, 622 bp, Homo sapiens
taagatccttctttatctatgcctcattttgaaggaagaaaccttcccttgagaaggaaaagaacgaagaaagacagagcctagggtactgtgtatcatgaaatgaagggtagaacagtttctcaggagaccarctgtggttccctcattcaaatgacacacgagaagacactgtcatatgtttaagtttgcttttatgtaaggaactatttactgctattctgcttaaaatgctgacccttaaaatattttataaagatctaacatcaatgcaactttacccagccaattataaagaagtaggctgatttttctgatatttgtacagacatttttaaaaattttaatgtaaactttgatattgtaattattaataacacaaaaggattagttctcattttaagcagggaactatttgtgtcctctgtactacgtaaactcaacataagatgcaagagaaaactaacattatgctaatagataaaaccacacatgatctgtggtggaaggactggaattgcactatcactgaagtgcaaatgtatatatatatttaaaattttgaaagcttacactcttctcagatttagtttaaaaaagattctagtttcattctctcctt

SEQ ID NO: 79509 - DNA, 1034 bp, Homo sapiens
tgggtggcattggcgactaagggtttgtgatggttgatgttaggtgtcaacttgactggcctaaggaacgcccagaaatctgtttaaacttgatttctgggtgtgtctatgaggatgtttccaggaaaaatgagactgaggaagattcactctcaccaatgtggcattctccgatcccatgaggaccaaaatagaacaaatgaggtggaggatgggcagattttctctctctccttgagctggggctgacatcctctcctgccattggacatctaagccacgattctcaggccttcagggctgaattacatcccaggctctcctgctccccagtgtgcccatgatgatggtgtgacttctgagcttccatcaccaccggggccaattcccatcatcagcctccaatacatacacacacagacacacacacacacacacacacacaccctcctgattctcctgtgtcatcaaagataagccacagacacctaccctgccttaatttcctcaaggaaaaaaatacagatgataaaattaccctgtcataagctatgtgaggatgaaacagcaaatacaggtaacccttagaacagtgcagtgggtccatgagtgtctgtgtttacattgacatctttgccaattgtccctagcaatktcagcccttagaattttatacaactagtgattttacctttacataaagcacaatttgatggaaaaacttgaagctaaattttaaaattaattagaatttattaacttataaaaataaattttgaaaataaagattaacaaatccatagtcatcatatgaggtttttttaatcacacttaccaaaaatcaatagatatggtaaatatgactatcgactcattctttccaaacacttaaagaaaatcagcattttaaaaatcttttattttactttaagttctgggatacatgtgcaggatgtgcaggtttgttacacaggtaaaggtgtgccgtgatggtttgctgcacctaccaacccttcacctagtattaagacagc

SEQ ID NO: 79510 - DNA, 1034 bp, Homo sapiens
tgggtggcattggcgactaagggtttgtgatggttgatgttaggtgtcaacttgactggcctaaggaacgcccagaaatctgtttaaacttgatttctgggtgtgtctatgaggatgtttccaggaaaaatgagactgaggaagattcactctcaccaatgtggcattctccgatcccatgaggaccaaaatagaacaaatgaggtggaggatgggcagattttctctctctccttgagctggggctgacatcctctcctgccattggacatctaagccacgattctcaggccttcagggctgaattacatcccaggctctcctgctccccagtgtgcccatgatgatggtgtgacttctgagcttccatcaccaccggggccaattcccatcatcagcctccaatacatacacacacagacacacacacacacacacacacacaccctcctgattctcctgtgtcatcaaagataagccacagacacctaccctgccttaatttcctcaaggaaaaaaatacagatgataaaattaccctgtcataagctatgtgaggatgaaacagcaaatacaggtaacccttagaacagtgcagtgggtccatgagtgtctgtgtttacattgacatctttgccaattgtccctagcaatgtcagcccttagaattttatacaactagtgattttacctttacataaagcacaatttgatggaaaaacttgaagctaaattttaaaattaattagaatttattaacttataaaaataaattttgaaaataaagattaacaaatccatagtcatcatatgaggtttttttaatcacacttaccaaaaatcaatagatatggtaaatatgactatcgactcattctttccaaacacttaaagaaaatcagcattttaaaaatcttttattttactttaagttctgggayacatgtgcaggatgtgcaggtttgttacacaggtaaaggtgtgccgtgatggtttgctgcacctaccaacccttcacctagtattaagacagc

SEQ ID NO: 79511 - DNA, 1034 bp, Homo sapiens
tgggtggcattggcgactaagggtttgtgatggttgatgttaggtgtcaacttgactggcctaaggaacgcccagaaatctgtttaaacttgatttctgggtgtgtctatgaggatgtttccaggaaaaatgagactgaggaagattcactctcaccaatgtggcattctccgatcccatgaggaccaaaatagaacaaatgaggtggaggatgggcagattttctctctctccttgagctggggctgacatcctctcctgccattggacatctaagccacgattctcaggccttcagggctgaattacatcccaggctctcctgctccccagtgtgcccatgatgatggtgtgacttctgagcttccatcaccaccggggccaattcccatcatcagcctccaatacatacacacacagacacacacacacacacacacacacaccctcctgattctcctgtgtcatcaaagataagccacagacacctaccctgccttaatttcctcaaggaaaaaaatacagatgataaaattaccctgtcataagctatgtgaggatgaaacagcaaatacaggtaacccttagaacagtgcagtgggtccatgagtgtctgtgtttacattgacatctttgccaattgtccctagcaatgtcagcccttagaattttatacaactagtgattttacctttacataaagcacaatttgatggaaaaacttgaagctaaattttaaaattaattagaatttattaacttataaaaataaattttgaaaataaagattaacaaatccatagtcatcatatgaggtttttttaatcacacttaccaaaaatcaatagatatggtaaatatgactatcgactcattctttccaaacacttaaagaaaatcagcattttaaaaatcttttattttactttaagttctgggatacatgtgcaggatgtgcaggtttgttacacaggtaaaggtgtgccgtgatggtttrctgcacctaccaacccttcacctagtattaagacagc

SEQ ID NO: 79512 - DNA, 1034 bp, Homo sapiens
tgggtggcattggcgactaagggtttgtgatggttgatgttaggtgtcaacttgactggcctaaggaacgcccagaaatctgtttaaacttgatttctgggtgtgtctatgaggatgtttccaggaaaaatgagactgaggaagattcactctcaccaatgtggcattctccgatcccatgaggaccaaaatagaacaaatgaggtggaggatgggcagattttctctctctccttgagctggggctgacatcctctcctgccattggacatctaagccacgattctcaggccttcagggctgaattacatcccaggctctcctgctccccagtgtgcccatgatgatggtgtgacttctgagcttccatcaccaccggggccaattcccatcatcagcctccaatacatacacacacagacacacacacacacacacacacacaccctcctgattctcctgtgtcatcaaagataagccacagacacctaccctgccttaatttcctcaaggaaaaaaatacagatgataaaattaccctgtcataagctatgtgaggatgaaacagcaaatacaggtaacccttagaacagtgcagtgggtccatgagtgtctgtgtttacattgacatctttgccaattgtccctagcaatgtcagcccttagaattttatacaactagtgattttacctttacataaagcacaatttgatggaaaaacttgaagctaaattttaaaattaattagaatttattaacttataaaaataaattttgaaaataaagattaacaaatccatagtcatcatatgaggtttttttaatcacacttaccaaaaatcaatagatatggtaaatatgactatcgactcattctttccaaacacttaaagaaaatcagcattttaaaaatcttttattttactttaagttctgggatacatgtgcaggatgtgcaggtttgttacacaggtaaaggtgtgccgtgatggtttgctgcacctaccaacccttcacctagtattaagmcagc

SEQ ID NO: 79513 - DNA, 1726 bp, Homo sapiens
caggggcctcagtcccaggccacctcatgaaacactgcaggaaccagcctgagggattggggtgggggatctggccttgcaggtgggaagtgcttccatcttgtcacagtaaggcagagaagcaggagggcaaactccacggcacgaatgcaataggtacttcgtgttgctaagtctctgcacatggaaagggaggtttctgctcacgaggaggtgaaatgatgttgcataaacaagacgcaagatatcaaggcaagccccagggaacaggaagactgggtggggtgacatgaacagaaccagtctgggtggaccagtccctccaaactccagcggctcagcagcagcatctccttaaggatgaggccccctcattgcttcattggtcttaaggggctttgactcaggagaaattgaaatttcagagaccttggccccatgtcatctaattcaagtgtcaactacagaggaagtgggttgggcaaggccctaacctcagctttaaacaggattggttgtttcccaggagcaactcttggcctgtcagatgaagcaaggccttcctctcacatgctaaagttgtgaaatacagcagcatctttttttcrggttctttggcccatattacagcagtgatgatgatggtgatggttgtgggatgtgacaaaaggaatgcaacgtgacatggaggcaaagagatggaaaaaattggggtttggaggcagaaagccccagctctgcaacttaaatgcccttttgcaagatatttgttcttgttttgacagaaggggatattgaaacctcctgaggttgtttttgttattattttttctctttttagattcaagagcattcctataaagaaactcccatgttgcctcactcatagaatattcaaaactccatagttattttccaggtgtatgtccatcagtacctgtcccatccctctggttgtgcggtgatgctgccaacttactgatttagtgtatgatggtgtttttgaggtgctccagtggcttctgtttctatcagctgtccctcctgttcagctactgacggggtggtgcgtaacggcaaaagcaccgccggacatcagcgctatctctgctctcactgccgtaaaacatggcaactgcagttcacttacaccgcttctcaacccggtacgcaccagaaaatcattgatatggccatgaatggcgttggatgccgggcaacagcccgcattatgggcgttggcctcaacacgattttacgtcacttaaaaaactcaggccgcagtcggtaacctcgcgcatacagccgggcagtgacgtcatcgtctgcgcggaaatggacgaacagtggggctatgtcggggctaaatcgcgccagcgctggctgttttacgcgtatgacagtctccggaagacggttgttgcgcacgtattcggtgaacgcactatggcgacgctggggcgtcttatgagcctgctgtcaccctttgacgtggtgatatggatgacggatggctggccgctgtatgaatcccgcctgaagggaaagctgcacgtaatcagcaagcgatatacgcagcgaattgagcggcataacctgaatctgaggcagcacctggcacggctgggacggaagtcgctgtcgttctcaaaatcggtggagctgcatgacaaagtcatcgggcattatctgaacataaaacactatcaataagttggagtcatta

SEQ ID NO: 79514 - DNA, 1093 bp, Homo sapiens
cattggcaaaacaggaatctttctatcttgagcttcagcactgcattagaaatcttgttttattatgatggtgaagactgaagccctggggtttgggcaggcatggtttgaaagttcagtggcagctgcctgcagtacgggacatggctgctcatatccaaggctacgaatccggaggaatttcattttcttgagaaagcccaggagagcaagtagcaaggatatgaaagtgagacgcagaaacacagtgaccaaaaaatgctgcctgagatagtgaggcggctgcctggaacacttccttcctggtttttcaaaaggctaccaagataattaagtaactctatgtcaataagtctctgtcctttctgcatctccccagcattgtaacagcacagggagaagagacggtggcatttgctatggttgctggcatgacaatgaatatgatcatggacctaaactcaaccatgccatctttggaaaaaagcagccaagtagaaaggcaataaataaacatcaagcagggagggccaggcgcagtggctcatgcctgtaatcccarcattttgggagggcgaggtgggggtatcacttgaggtcaggagttcaagaccagcctggccaacatggtgaaaccctgtttctactaaaaatacaaaaattagcaaggcgtggtggtgtgtgcctgtaatcccagctatccaggaggctgaggcagaagaattgctggaacacgagaggcagaggctgcagtgatccgagatcgtgccactgcaccccagcctgggcaacagagcaagactctgtctcaaataaaataaaataaaataataaaataaaataaaataaaataaaataaaataaaataaagcagggagaagtgacagccaccaatacagcctctcgacagcataaaaattaatgtgacaaattttaaaggcagtccaaataccactcagactcagttagcttaaactcagagtaactgagtattttacaactcttgtaggtatgtgtgcatatttgttataagtgtgtgcatgtgtatatatacatgttcatgcctgtgtgttgtgcacatgtgtatgtgtgc

SEQ ID NO: 79515 - DNA, 526 bp, Homo sapiens
tccctgagcagattcataaatctttattgaacactacagtgtaccaggcactgttctaggttcagagattatatgtggtgaaaaagaaagatacaatttctgatccagtgwagcttagtggtggaaggcagaacattatgtaagaaaaataataaatgagctcttcaggtagtgatgatcctatgaataaaataatgcaactaatgagatagcagatgactgtggggtaaatatgtgcatgaggtggttaggaaagatctctctgaaatagtgacacttaagctgagacttgaaggatgagaagcagccagtctatgaagctctgtgggcagaatgatgcaagagaagggaacagcatgggtaaagtccctgagacaggaacaggcttggcctatttgaagaacaggaaataaagatccatgtgtctgagctgaattttgaatgactaacaggagttatctgggttgtggaccaagggacaggaagaagaggacagggacgggaagtcattttagagaaggggatc

SEQ ID NO: 79516 - DNA, 526 bp, Homo sapiens
tccctgagcagattcataaatctttattgaacactacagtgtaccaggcactgttctaggttcagagattatatgtggtgaaaaagaaagatacaatttctgatccagtgtagcttagtggtggaaggcagaacattatktaagaaaaataataaatgagctcttcaggtagtgatgatcctatgaataaaataatgcaactaatgagatagcagatgactgtggggtaaatatgtgcatgaggtggttaggaaagatctctctgaaatagtgacacttaagctgagacttgaaggatgagaagcagccagtctatgaagctctgtgggcagaatgatgcaagagaagggaacagcatgggtaaagtccctgagacaggaacaggcttggcctatttgaagaacaggaaataaagatccatgtgtctgagctgaattttgaatgactaacaggagttatctgggttgtggaccaagggacaggaagaagaggacagggacgggaagtcattttagagaaggggatc

SEQ ID NO: 79517 - DNA, 526 bp, Homo sapiens
tccctgagcagattcataaatctttattgaacactacagtgtaccaggcactgttctaggttcagagattatatgtggtgaaaaagaaagatacaatttctgatccagtgtagcttagtggtggaaggcagaacattatgtaagaaaaataataaaygagctcttcaggtagtgatgatcctatgaataaaataatgcaactaatgagatagcagatgactgtggggtaaatatgtgcatgaggtggttaggaaagatctctctgaaatagtgacacttaagctgagacttgaaggatgagaagcagccagtctatgaagctctgtgggcagaatgatgcaagagaagggaacagcatgggtaaagtccctgagacaggaacaggcttggcctatttgaagaacaggaaataaagatccatgtgtctgagctgaattttgaatgactaacaggagttatctgggttgtggaccaagggacaggaagaagaggacagggacgggaagtcattttagagaaggggatc

SEQ ID NO: 79518 - DNA, 687 bp, Homo sapiens
cctkgtctagattagtgcagcttgactttggaaaagaaacaaaaaccctctgatgtgggcacagcagccacatcacgcagccccatgatgcccaacttaagagctccccgcgggccctcactgggtaagggaagtaagcagcccagatcctgctacccaggagaccacctgccaccacttcagaaaagccaggggatctccctgcactctaggtctgaggccatttgtgaagacgtagctcaggtacagattcagcaggcacattccccgctgaccccagagcagctttctggcctcacccagctccggggcctctgtgcaccatggtgcagaccttccaggcctcggccacccaggcacctctgtcttcctgctgaggggggcttctcccagccccactggtgggtccctggggcccatccctggatgaaggagaagttcagagctcctcccacgacggagagaggcccacctcttccccggacaggagataacgcctgtatgcggagatgagagattgtaataaataaagacacagacaaagagatgccaccacgcccagctaatttttgtatttttagtagagacggggtttcaccatgttggccaggatggtttcgatctcttgacctcatgatccacccaccttggctttccaaagcgctgggattacaggtgtgagccacc

SEQ ID NO: 79519 - DNA, 687 bp, Homo sapiens
cctggtctagattagtgcagcttgactttggaaaagaaacaaaaaccctctgatgtgggcacagcagccacatcacgcagmcccatgatgcccaacttaagagctccccgcgggccctcactgggtaagggaagtaagcagcccagatcctgctacccaggagaccacctgccaccacttcagaaaagccaggggatctccctgcactctaggtctgaggccatttgtgaagacgtagctcaggtacagattcagcaggcacattccccgctgaccccagagcagctttctggcctcacccagctccggggcctctgtgcaccatggtgcagaccttccaggcctcggccacccaggcacctctgtcttcctgctgaggggggcttctcccagccccactggtgggtccctggggcccatccctggatgaaggagaagttcagagctcctcccacgacggagagaggcccacctcttccccggacaggagataacgcctgtatgcggagatgagagattgtaataaataaagacacagacaaagagatgccaccacgcccagctaatttttgtatttttagtagagacggggtttcaccatgttggccaggatggtttcgatctcttgacctcatgatccacccaccttggctttccaaagcgctgggattacaggtgtgagccacc

SEQ ID NO: 79520 - DNA, 687 bp, Homo sapiens
cctggtctagattagtgcagcttgactttggaaaagaaacaaaaaccctctgatgtgggcacagcagccacatcacgcagccccatgatgcccaacttaagagctccccgcgggccctcactgggtaagggaagtaagcagcccagatcctgctacccaggagaccacctgccaccacttcagaaaagccaggggatctccctgcactctaggtctgaggccatttgtgaagacgtagctcaggtacagattcagcaggcacattccccgctgaccccagagcagctttctggcctcacccagctccggggcctctgtgcaycatggtgcagaccttccaggcctcggccacccaggcacctctgtcttcctgctgaggggggcttctcccagccccactggtgggtccctggggcccatccctggatgaaggagaagttcagagctcctcccacgacggagagaggcccacctcttccccggacaggagataacgcctgtatgcggagatgagagattgtaataaataaagacacagacaaagagatgccaccacgcccagctaatttttgtatttttagtagagacggggtttcaccatgttggccaggatggtttcgatctcttgacctcatgatccacccaccttggctttccaaagcgctgggattacaggtgtgagccacc

SEQ ID NO: 79521 - DNA, 670 bp, Homo sapiens
ctgcaggagagcagagtagcaggacacaggttcagcagccacttccgaggtcagattctcacagctaagcctctgtggtagggctgatctgcagagcaatgcagagcctgggaaagctctgatcacatgtggaagatgaaactctgggcttctattagtctgttttcccctagctacaaagaactacctgagcgggtaatttatacagaaaagagacttaactgaatcacagttccacatggatggggaggcctcaggaaacttacagtcatggcagaaggggaagcaaggtatgtcttaccattgtgaaaaggagagacagagagagtgaagaaaagcacacacttctaagccatcagatctcgtgagaacgcactatcagcagaacagcaagggggaaatccgcccccatgatacaatcacctgccaccaggccygcccctggcacgtggggattacaattagacatgagatttgggtggggacacagagtaaaccatgttagagctcatggagaagtgtcctatgtgatggaacatcctgcttctgtgggcgtgacagtctttgctctttcttggcagagaaacacttacaatagtcacttgaggaccatgtatagataggctttctttcttctgagtttcttgaaaaaggattcagaggaaacatt

SEQ ID NO: 79522 - DNA, 747 bp, Homo sapiens
atctgggttaggacagcaggcatcacatgccatccttatgcacgacattcccatgggcatgcttaggattctgggcatttcttggcttgtagctatggctctgttcctttctcttccactcagggaagcatttcagaatgctaaaaaagaaagtgacattactctaggggtaagtctgaacgaggactgattttttaaaattaaatgatctataaatttcagttctcctaagtagtaataataatgacagctgaatttgagcatttactgtatgttttccaacatacatacattcatagactttccagtctatgaaatgctgtgatgtgagcatctcatttggtcttcacgacacctcataagtaggtactattatcccctttttatagagttggagcctgaggcttatttccttaacccagctggtcagtggtgaagccttagatggaaaaacgtgaagcagctatactctggaaccctctgtcttatgagctattctgtarcattttcccatcttactactggcaactcacctttcaactcatgtgctgtaaaattacagtcaacaaatgctgacataaatgacacaaaaggggagaaaaactgtgggttcttatttgtttgcttagttgaggggggcatggtaattgtagacagagggaaacaattcagggtatatacatactagaggagcacccactaggtttcaggcactgtgcagtgtttctcactcaccattgtctcact

SEQ ID NO: 79523 - DNA, 747 bp, Homo sapiens
atctgggttaggacagcaggcatcacatgccatccttatgcacgacattcccatgggcatgcttaggattctgggcatttcttggcttgtagctatggctctgttcctttctcttccactcagggaagcatttcagaatgctaaaaaagaaagtgacattactctaggggtaagtctgaacgaggactgattttttaaaattaaatgatctataaatttcagttctcctaagtagtaataataatgacagctgaatttgagcatttactgtatgttttccaacatacatacattcatagactttccagtctatgaaatgctgtgatgtgagcatctcatttggtcttcacgacacctcataagtaggtactattatcccctttttatagagttggagcctgaggcttatttccttaacccagctggtcagtggtgaagccttagatggaaaaacgtgaagcagctatactctggaaccctctgtcttatgagctattctgtaacattttcccatcttactactggcaactcacctttcaactcatgtgctgtaaaattacagtcaacaaatgctgacataaaygacacaaaaggggagaaaaactgtgggttcttatttgtttgcttagttgaggggggcatggtaattgtagacagagggaaacaattcagggtatatacatactagaggagcacccactaggtttcaggcactgtgcagtgtttctcactcaccattgtctcact

SEQ ID NO: 79524 - DNA, 747 bp, Homo sapiens
atctgggttaggacagcaggcatcacatgccatccttatgcacgacattcccatgggcatgcttaggattctgggcatttcttggcttgtagctatggctctgttcctttctcttccactcagggaagcatttcagaatgctaaaaaagaaagtgacattactctaggggtaagtctgaacgaggactgattttttaaaattaaatgatctataaatttcagttctcctaagtagtaataataatgacagctgaatttgagcatttactgtatgttttccaacatacatacattcatagactttccagtctatgaaatgctgtgatgtgagcatctcatttggtcttcacgacacctcataagtaggtactattatcccctttttatagagttggagcctgaggcttatttccttaacccagctggtcagtggtgaagccttagatggaaaaacgtgaagcagctatactctggaaccctctgtcttatgagctattctgtaacattttcccatcttactactggcaactcacctttcaactcatgtgctgtaaaattacagtcaacaaatgctgacataaatgacacaaaaggggagaaaaactgtgggttcttatttgtttgcttagttgaggggggcatggtaattgtagacagagggaaacaattcagggkatatacatactagaggagcacccactaggtttcaggcactgtgcagtgtttctcactcaccattgtctcact

SEQ ID NO: 79525 - DNA, 747 bp, Homo sapiens
agaaagataatcaagggaataattgtaagttataaacagaagcatttaagattacactctatctacatattaaaatagatccaaaatatgtagatattgaatgggatggatgttagtacctgccaggggaaacctactaatttagttaaaactgttagaaataagtgatgagagccaactacattttatctgtaaagtgatttcttctgcccaaaactcatttaatgctttgagataccaattgtgcaaatacatttactcactctctgaaacctctccaaaattaaatgacataaataacatatgtcatatcatgttttatgacagttattcaaggaacaatgaaagtaaacctaatataataggaacatctttccattcaccttattatagcattttgtatatatatatagcatttgtataagtataccattagaatatgaaaaaaatgctgaagaaatcatcatcatttttagtcttattaacaaacacataaaagcaatgattaaataccaaaccatgtggtaatgctttttttcattgtattatatctccttatccctcagtgtatattaaaaggaaaaaaaatgtaattatcttctcccttggtggcatacatagctttattttttagccrcaccatttactgaatttgaggagtgctctttattttttcctcccaaaaatactataatattgtaagggttttaataattcccattttataatttgggaaatacatatgtg

SEQ ID NO: 79526 - DNA, 629 bp, Homo sapiens
aggcctgggaaaccaggaatgtgggtatgaccccatttcaaccttgagaatggctttgaagcctattgtccctagaccacacctgaggatgttacctggcccacttttctcacattacacaggagaggactgaagacagaaggggtatggtttccacctccaaggtcctgcacrgcccaaggacacagggcctggaggaggtcccaggtgtcctcatgtcgtgacctgacctctctcaaatggaacatggatctcagctatgattctattttccatccatccatgcactcatcatccatccatccatccatccatccgttcatccatccatccattcatccattcatccatccatccatcatctatccatagatgcatctatccacctatccatccaacaatccatctgtccagctatccatctatccttccattcttttatctgtttcagagacagcacttcctacatttgggcagcaagactcttgttgaagaggatgtggatgaggcatttctgtgggtgccggagaagctccatatagtgctaggttaatattactaagttatggctgaaattcaatattctatgaaacatacaagtagggaatataattccttataccaacaat

SEQ ID NO: 79527 - DNA, 1433 bp, Homo sapiens
caggctctggacaaagatggtggatgtgggttgtgtctcctgcttgagtgtgactctgcatgtgttggtgtaacacgtgtatgcatgtgtgtgggcaggcatggggtgtgtgtgttgctgttaacagcgtcctgtgtgagtgtgtgttgctgtgtactcatcatcagtgctttggtgcagtgattgtggttccctgcatgcctaggcctctcccgggcaccaggggcagaggttctccccttgcagagttgcagcgtctgggtcgaggacttggagaggtgaggcaggagggccctgttggggcaggtggggaacttcatctgattttgcgcatcctgggatgtggcttcctgcttaaaacgtggaaagcaggatggaaggcaagtgcagggaagtgcaagcctgggacgtgtggccatgtagtgtgtgcaggtccccccgggcacactcacaataacaactgaatgagcaaatctttctgtcacggagacattggcaaagcattgctggacattgaggaaggactcctctgtcaggggactggggttgtaacgagcaagctcctccttcaggaggtcttgggacacatcaaacacaacattcgcaagcagtttatcgatatccaggcaggcatcccctgtggaggatgaggtgagataagaaaacagaggaggtcagaattcagcgaaacctcccatggccaatgagaccttgggatggtgatgagagtgaaggagcagggccaccgcttcctcccagccctgctcgcctctttcttacccagctggacgctgcagatcagagccagcagaagagcacaggtggcggatgtcaccctcatgacagcggagtctggtcccagcaggcacaggcagggaatttggcgatgggtgagctttatgtatatctgaacaaggcacatgcctcttcgtgtgtgtgtgtgtgtgtgtgtgtgtgtgtgtgtgtgtgtgtgtgtgtgtgaatgtggtcagggcaggtctgcagagagaccctcggccctgggccatgctgttggggtggcagcgtatcgggaactggactcagcatgcagtgggaggggttgggtgttgtgacattctctctgtcctccctggagctccctgggattgggagcaggctgaacactggtgtaagcctgcaagtctgagtgtgcatgcacatgtgaccctgtgtcttggcaaacgtgtgtctgcacttggcacgccctagcacagaatctgccaytgagtgctggctcaacaaacatttgctaagtgagtatgtctgtctgaatggatagcacattaggtgcagcttttgagaaatcagtaaactgtaatttagattcaaagaacattatctggagtaaaacacagaacctaaaggacatgagatgtagcaagtgtgttagggacacatgtgacacagtgaag

SEQ ID NO: 79528 - DNA, 1433 bp, Homo sapiens
caggctctggacaaagatggtggatgtgggttgtgtctcctgcttgagtgtgactctgcatgtgttggtgtaacacgtgtatgcatgtgtgtgggcaggcatggggtgtgtgtgttgctgttaacagcgtcctgtgtgagtgtgtgttgctgtgtactcatcatcagtgctttggtgcagtgattgtggttccctgcatgcctaggcctctcccgggcaccaggggcagaggttctccccttgcagagttgcagcgtctgggtcgaggacttggagaggtgaggcaggagggccctgttggggcaggtggggaacttcatctgattttgcgcatcctgggatgtggcttcctgcttaaaacgtggaaagcaggatggaaggcaagtgcagggaagtgcaagcctgggacgtgtggccatgtagtgtgtgcaggtccccccgggcacactcacaataacaactgaatgagcaaatctttctgtcacggagacattggcaaagcattgctggacattgaggaaggactcctctgtcaggggactggggttgtaacgagcaagctcctccttcaggaggtcttgggacacatcaaacacaacattcgcaagcagtttatcgatatccaggcaggcatcccctgtggaggatgaggtgagataagaaaacagaggaggtcagaattcagcgaaacctcccatggccaatgagaccttgggatggtgatgagagtgaaggagcagggccaccgcttcctcccagccctgctcgcctctttcttacccagctggacgctgcagatcagagccagcagaagagcacaggtggcggatgtcaccctcatgacagcggagtctggtcccagcaggcacaggcagggaatttggcgatgggtgagctttatgtatatctgaacaaggcacatgcctcttcgtgtgtgtgtgtgtgtgtgtgtgtgtgtgtgtgtgtgtgtgtgtgtgtgtgaatgtggtcagggcaggtctgcagagagaccctcggccctgggccatgctgttggggtggcagcgtatcgggaactggactcagcatgcagtgggaggggttgggtgttgtgacattctctctgtcctccctggagctccctgggattgggagcaggctgaacactggtgtaagcctgcaagtctgagtgtgcatgcacatgtgaccctgtgtcttggcaaacgtgtgtctgcacttggcacgccctagcacagaatctgccactgagtgctggctcarcaaacatttgctaagtgagtatgtctgtctgaatggatagcacattaggtgcagcttttgagaaatcagtaaactgtaatttagattcaaagaacattatctggagtaaaacacagaacctaaaggacatgagatgtagcaagtgtgttagggacacatgtgacacagtgaag

SEQ ID NO: 79529 - DNA, 660 bp, Homo sapiens
tctggtttaccttctcactgaattaggagaagttccttctaattctcagctgatcatgtgtaggggatgggacagtggaggtccagcatttttttttttttttcattctcaatgtaggcatcctgagtttctgtgctcattagagtttctgttacttttctgatgcattcctgtactctccttcaagtatgtagttgtttattcatattcatactgtctttgggggttagaagcaataaragcttctagtctgccatgttgctgatgttactcctgtaattttattttcttgtagtgtcttttgtgtggatttggtatcaatcatggtaatggtggcttcataaaatgtgtttgaaagtattctctctacttctatttttggaagagtttaaaatagattggttacatatgtatacatgtgccatgctggtgtgctgcacccactaactcgtcatctagcattaggtatatctcccaatgctatccctccccccaccccacaacagtccccagagtgtgatgttccccttcctgtgtccatgtgttctcattgttcaattcccacctatgagtgagaatacgtggtgtttggttttttgttcttgcaatagtttactgagaatgatgatttccaatttcatccatgtccctataaaggac

SEQ ID NO: 79530 - DNA, 1912 bp, Homo sapiens
ccactgtgctttctgttctcggcagccctgcagctgcctggccgttggctccagatgtgggatttcatcacgtccctggccctcttttgggtcatgccaaggttgagatttcagatcccaggggtctggaagccttcagaaagctgccagtgcctgggagagccacaagagccactcacaggactcctctcccactctggccaccaccttcccaacacagtctccctggccctccggccgccactccgcccagctgagcccttccttgcattcctgagtgcattttctcacccctccccaccctggcccgcatgcgagtgtgcagctccacacggcctgcagccctggccacggcccagcttgtgccctcctcacatgagctcagctcgccattcccgcggcagctgccagcctcagagcagcccagcccctttgctaccaggaaagagtgcgagtgagagagtggatagtgagggaggaagggcctggccaggccgggtgccgcacttccctcttgcctggcagaaaggcacccatgtgaggagagcgtgttagcaccgatgccatcttgtgtggttggtggcctccatccattcccggattcactcattcgttcaacagacagctcaggtggctccagccgtccttatccatggaggcctgggcgtcgccctgtggctgaaccttctgggggtctttctgcccacccatcagctcttcagtccctctacagggctccatgaggccctgcagatggtttcctgaggccaaggggctgggtgtggtggccccactggcattcctcccctgggaagggctctggggcagccttcacctgaggtgtttagaagccagctcagtctccggccagggcccagctggttcagcggcctccacacgtccctgccccacccctacctgactgggcatccacgcgggtctgcccatggcgtctgccagagcccccaggcaggctggcctactaattcccaagactcagagcctctgtcctctcaagtagcagttacgtgaaacaggacaggcaggccctccacaccccagggtctggtcgtagcggcctcctccgccctggggtgggtgggccaccttcactccacacccctcaccatcccccacagcccgcagcgggagggtcgtcgtggatgcttctctgagggacttgatttcctgggaatacgaccaaccccgaacgaccccttgtccccactccagttgtcccttggcctggatcccagatagctgtggcratggtccgctgcccacatcctctcggtgcacccttgccaggactctgcggaggcagagggagatgtcacctgctgtttctggttcctgcccctgggagaaagcagttggagaagggaattgcaaggccgccttgtggctgagcctcctgccccagggctgcgcagcagggccggtggagccagagtctcccaggcctcccacttcttggccatcagtgccagagccgatcctgtggggagtctggtaggtgcctgacagttgagactgggagaggctgaggtgaggctggtactggctccatgcctgctgtgctcgaacaccacctcactgaaacttgagaatagttccatgccacacaggtactggggctggccccattttacagatgaaggcacaggcccagagaggcctcggtggctgcactgggcgggcagctgtcaggtgctgggacagagctgaggggatctccgctaccacttgggggaagcccaaggtggtgtgcctgaggcagggcccctgtaggagctggggtgcagccaccttcccaggctggcattttccctgcggttccctaaagaccttcacttgcttgcagggcttccttgagctttggttctgggatgtgtaattagccaggatcagg

SEQ ID NO: 79531 - DNA, 578 bp, Homo sapiens
tctttaataaacaagcacaaagcagttcttgccaaatacggcctgctctggggccacagaggttagcttaggagacaacctttcttgacctaaaaataaatgcatgttcctatcagacattccaagcatagtttaaacatgagacttctgagcagcagctcaagctctgtgggttcaattatgtcagagtatgggcagtgagggtctttggggagtgtgcccccttatttgggattggttgtggctaccaaggaaatcagatgatcaaatgcaaaacttcctccatcttatttctatatgatcttttttttttttttttgagttggagtcttgctctgttgcccaggctggagtgcagtggcakgatctcagctcactgcagcctctgtctcccagattcaagctattattctcctgcctcagccttccaaatagctgggactacaggcgtggccatcatgtccggctaatttttgtatttttagtagagacagggttttgccatgttggccaggctggtctccaactcctgacctcaggtcatccacccgctttggcctcccagagtgctgggatta

SEQ ID NO: 79532 - DNA, 2442 bp, Homo sapiens
gaggccctgggaggttgaggctgcagtgagctgtgatcacaccactgcactccagcctgagtgaaaaacaaacaggccaggctcagtggctcacacctataatcctagcactttgggaggccaaggcgggtggactgctttaggtcaggagtttgagaccagcctggccaacatggcgaaacaccatctctactaaaaatacaaaattagccgggcatggtggcacacacctgtaatcccagctactcgggaggctgaggcaggagaatcgcttgatcctgggaggcagaagttgcagtgagccgagattgcatcactgcactccatcctgggtgacagagcaagactctgtctctaaaaaagtaaataaataaataagtaataaaaataaaataaaataaaacaaacaaacaaatctaccatcaaaataaagaaaatggagaactcccgtctgtgagaaaactgcctgcccttgtcatgtttagtttggggttcctccatttcctcggctccttttgggggcttctgttctgcctgtcatatctacagattcgatgaccccatacggcaccccatcatgcctgcatcatgcctcccctcttggcctgtgcctccttatgtctgcagatgggcttcctctagcccacacctccatcaaaggacagggacccccctgcctcgtgccccatgatgcggcccacatggcgcctccggcctctgccccctctccccacagatatcgacgagtgtcgcatctctcctgacctctgcggccagggcacctgtgtcaacacgccgggcagctttgagtgcgagtgttttcccggctacgagagtggcttcatgctgatgaagaactgcatgggtcggtgactgccgggcaggggtgtggtgggcgcccctgggcagggagggcattgaggagagggagggtggggacggctgttgctgtgtggacgtggatggagggggcaggaggagggaggagctgtaaattagctgaggtacagtgagtctgggctccatgaggcctcgtccttaggagagagacctggggcctgagacctgggggtggccggcacactggggtgtggtctcccagggagggtgtgtagcttgggtagaggacagggaccctcagagaagcctgggaaatactgccggttatgaggcctctcgtccccatcattgacttcgttattcatttgatgagcatttcacatgcatcctctgagctagaggcactgcagggagctctagctccagggagccctctttccttggagctcacagcctaacaggaagacagacatgaataacatgaatcgctgaggaaatgcaaaactgggctgggtgcagtggccctcgcctgtaatcccagcattttgagaggctgaggcagtaggattgcttgagtccaggagttcgaggccagcctgggcaacataacaagaccctgtcactayaaagttttttaaaaattagctaggcatggtggcgcgtgctactcgggaggctgaggagggaggatcccttgagcccaggaggttgaggctgcagtgaaccataatcgcacttttgcactccagcctgggtgacagagtgagaccctgtctaaagaaaaaaggaaggaaggaaggaaggaagaggaaaaagccaggcatggtggctcatgcctgtaatcccagcactttgggaggctgaggtgggcagattgcctgagttcaggagtttgaaaccagcctgggcaacatggtgaaaccccgtctctattaaaatacaaaaaattagctgggtgtggtggcgtgcacctgtaggtccagctactcaggaggctgaggcaggagaattgcttgaacccaggaggtggaggttgcagtgagccgagatcgcgccactgcactccagcctgggcgacagagcgagattctgtctccaaattaaaaaaaaaaaaaaaagaaagaaagaaagaaaaagaaaagaaaagaaaaaaatgcaaaattgccactgtcagaagcccttaaaagggccacatgatctgatgagagatggctgagacaggattgcttgagaccaggagtttaagaccagcttggtcaacatagagaggccccgtctctacacaaaatttaaaaattagccgggcatggtggtgcctgcctgtagtcccagctactcaggaggctgaagtgggaggatagtttgaacacaggaggtggaggctgcagggagctgtgatcgtgtcactgcactccaggctgggtaacagtgtgaaaatctgtctcaaaaaaaaaaaaaaaaaaaaaaaaaggctgggctcggtggctcatacctgtaatcctggcaatttgggaggctgaggcaggtgaatcacttgaggtcaggattttgagaccagcctggccaacatggtgaaacgctgtctctactaaaaatacaaaa

SEQ ID NO: 79533 - DNA, 737 bp, Homo sapiens
ttttttttttttttgtatttttagtagagatggggtttcaccatgttggtcaggctggtctcgaattcctgacctcatgatatgtccgccttggcctcccaaagtgctgggattacaggtgtgagccactgcacctggcccctagtgggttttaaaattacagtgtcacctgttgctgtcacctgttgccttcccatcattcccagttcctgtgacgttgtcacctgttgctgtcacattgtcacactattaatgtcccccagaactgtccccccccgctgctgccactgtcatcccgttaaggtcactgtgagtcacgccagccccaccctccgtttgactttctgagcagccatggagccccccctcataggcgggacttgactgtgtgcacccagagccagcagaccccagatgttcattagcatgagctcgaggaaggcatggagacargagtgggcagggtgtgcccaggagcacagggtcaaggctggggacaaggagatgggaggagggacggggagatgcctgcagtctatggtgtgtggagtgcgctgggccagcctaggccagggtggcttggggacagagccctctttgtataagcacaggaagcagctgggagtcaaagcattgcatacaacgccaggagtttggccacgtgcccaggaatgaggcttggagcggggagggaagccgcagaggacccaggaaagctctgaggaagagatcaagct

SEQ ID NO: 79534 - DNA, 729 bp, Homo sapiens
tcctcatggtccagtattggttgtaggttttgagggggctgacaggagaggtggttgccagggaatggttccaagaagatgcaataggggaggaggctggggatacccaggggacatggcccagcttacggaggctcctgagcttccaggggcatagacattaagaaattgcacgctgagcccgagtgtggtggcttgtgtcggtaatcctagcactttgggaagccatagtgggagaatggctcaagaccaggagtgcaagaccagcctgggcaacataccaagaccctatctctacaaaaaaataacaaaaattagctgggtgtggtggcatgctcctgtagtcccagctgcttggaaggctgaggcgggaggatcacttaagtccaagagttcaaggctgtagtgagctgcaatggtgccactgcactccagtctgggcaacagaatgagaccccatctctttaagaaagaaaaattgtggccaggtgtggtggctcacacctgtaatcccagcactttgggaggctgaggcaggtggatcacctgaggtcaagagttcgaaaccagcctggccagcatggtgaaactccgtctctactaaaataaaaawtacccgggcatgatggcaaacacctgtcatcctagttattcaggtgggtgaggcaaaagaattgcttgaacccgggaggcagaggttgcagtgagccgagatcgcgccactgtact

SEQ ID NO: 79535 - DNA, 532 bp, Homo sapiens
tattaacattaaccctcacctctgggtcagaagggttggcactctagagcctgccttgaggctttacctactgggaccaaaaggactgctggaaagctattttaggccgggtgcggtggctcaagcctgtaatcccagcactttgggaggcagaggcgggtggatcacctgaggtcaggagttcaagacaagcctggccaacatggtgaagtcctgtctctgctaaaaatacaaaaaattagctgggcatggtgggcacctgtagtcccagctactygggaggctgaggcaggagagtcgcttgaacccgggaggtggaggttgtagtgagccgagatcgcgccattgtactccagcctgggtaagagcaaactccatctcaaacataaaataaaataaaaataaataaataaaaatactttttaaagccctattaccacaaaataaatccaggaacgtgtgacttggtacagcctctttggaaggcacattagctattacattagaatccacaccccgccgggtgcgatgg

SEQ ID NO: 79536 - DNA, 532 bp, Homo sapiens
tattaacattaaccctcacctctgggtcagaagggttggcactctagagcctgccttgaggctttacctactgggaccaaaaggactgctggaaagctattttaggccgggtgcggtggctcaagcctgtaatcccagcactttgggaggcagaggcgggtggatcacctgaggtcaggagttcaagacaagcctggccaacatggtgaagtcctgtctctgctaaaaatacaaaaaattagctgggcatggtgggcacctgtagtcccagctactcgggaggctgaggcaggagagtcrcttgaacccgggaggtggaggttgtagtgagccgagatcgcgccattgtactccagcctgggtaagagcaaactccatctcaaacataaaataaaataaaaataaataaataaaaatactttttaaagccctattaccacaaaataaatccaggaacgtgtgacttggtacagcctctttggaaggcacattagctattacattagaatccacaccccgccgggtgcgatgg

SEQ ID NO: 79537 - DNA, 700 bp, Homo sapiens
tgaggttacactaagttgaatattctttaatcctgtcagttttttccgaagtcttcatcgaaatcatgttgatccatataaatttaaccaagtctcaaaatgtttctgaatgtgcaatgttttatttctatatattcttttatttctttcttgtaagcaggatattctggctcaaagccagwtgtgattaccttactggagcaagggaaagagccctgcgtggtggcgagggatgtgacaggaagacagtgccccggtgagttgagagttcatcaggcagatggaagccctcattgccagtcacggccagctggtgagggagcatatacaggctttgcatgctgtttagggagttactctcagaggcctcaggcctttggagtaaaggttaagacagggaagaaaacagatcatctgagcatgaactatcaaaagaacctcatcttggctcctacttaccacctgtctttgtttttgtttcccctcgtattactctccatttcagtaaagggaatgctctttcctagtgcaatcaattgcttcctatcttttctccattgacatgtgtgcttgtttctaatgcctaaaagttcagtctttcacatattcagcatatatttaccgagtgctcactctgtgccaagtgttatcagtgccttggtgaataaggccaaaacctccctacactaatggaattaac

SEQ ID NO: 79538 - DNA, 437 bp, Homo sapiens
ccatttttaccttccacctagatttgaaaatgtatattttgctttttctataaaatacatttttttgcgataccatttgagagttaagttataaacatcatatcattttgcccctaaatcagtttgtatctcctaaaagtaatggtaatacatatacccaaagtactaaaatcacaccctaaaaattaacaattccatagaatcttataatatccattccatgttgaaatttccataattgttccaagaatatatttcatagatatttaacaaggatttactctcctagtatcatacattgtaacattttggtggttctgtcacttttttttttgagacggactctcgctatgtcgcccaggctggagtgcagtggcgtgatctcggctyactgcaacctccgcctcctgggttccaagcaattctcctgcctcagc

SEQ ID NO: 79539 - DNA, 2241 bp, Homo sapiens
cttagtcctcgttcccgccttttccagacagcagtgctgagaagcaggagcccctgagcttggagacgcaggaagagccctgggaggcccagatcaaagggaggcagtcagctcatggagccgaggaatgttctgctgacacccaccccgagggtatccggtatgtttctgtgcaccagcgacccctccacacctcaccagattggttccccagccccgtgggacccaattccgggtcaattccaatttgattccagtccagaatcaaatcagaagagcaatcccgagtgcccacctcacggtctgaagcacctcctcctacacccggacccaaacacgaggtcggctcaaggaggcactgaggtcacgacagtcagggtcctgcgctgcttgtcgcatgcagtctccttccccgaaccgccgcctgcacggcctccactgttttcctattgggctgcagcctgagagccctgacaatgcggcccacaaaccgggaacgcgaaagtgcacgtaccaggcgcgatcaccaggcgctagcgctgaggggggactcgcgtcacagtaaccgccaccgttgccgggggactggccccagcggcttggcccccaggcgtctgtggcagtgcgtcccctctccgcgggatcgtcgccatggtcctgcgatcctaggagtcgggcaaggccgaacctgcctgaagaaacctcaagcggagattcaaggaagcaccacgtgatccctaaggatcccaaagatgcgtcgggcatgcatgggcggtgtgagggtgcgtctccctgacaggtgtccccgctgggatttcgaggtacggcctgcctgtgttycccggggcgctctctttccggaggggtttcctggcagagagcagaaccgcgcagcctcaggagctgcctggctgtgtgtgtttctgtgcgactgttggatgtttccgtgtgtctttctgtgtgtgcgtgtgagtgtgtgtgtggtgtgcggtgaaagaaatgtggctcgtgcagtgaagcgcggtttctctgtagttcgcctacgctctgatgcgcccgtctctttggccgggcttgggttgcggggcaagcgttctttgtttcgctcttggttcctaaagcctcggtgaagtggggggctggctgcgacccgcaaacgtccaaatcacctcccctcccaagccgcccactcttccagaaagaagaccagcacacgacaaccaagaacaaattcctccaggggcccatggtcctgcggcacacccaaggctggacggaccctagctgtcctgtcctcagtacccccttgagcccacttctaattcggtggctggcggagtcgcagcttcaggacctgaggcgggcactccttcatcctcttcagatttcattctggattaaaggatgtgtgcagaaaaaaggtcagatgggggtgaagatacaatccgctgaggtgtggaggaggtctcgcaccttcacctgcagaacaggtgcagacagatgtcaaagaaactgtttccaacgccatccccttttcctcttcactgtacaacctgtccacaccatggcgctgtgctggcgatagaagacacgagtgttcggagaacctttggaccgaagactgtcgcctttctggccaggtcccctgttggaccctggttccccgaggcacatgggagtgggatggattgatcctgcctgggctgcggcctctactctgttctccctcttttcttgccttccctgattctcgtcggcccaggttttccttggtctggctcacagtcctccagaacgtccttcacagcaaatgtttcccagttcgtccaggaccaccttggcggggacgtaggtgatgagtgtttccttctcaacactcacatttcttaatgactgggtagctgtgatgctcttggaaccgtgggtgcccgtagctttccccaataaggaaactcttggtctccccattgcatcagatggctgcatgattcacatagaatgagaggtagccagccgtagctggcctttgccttctaatgaaggctatgtttcatctcatctgctggtgttttctcattgttgaggggtctcccattgctctgttcctggctgggactgcctctcagcactgcaccttttcgttgccagggatttcacggagcaaaagggactgggggttagctgggtgtagacccggtggtgggttgtgatcccggtgtgggtgctggatcactttgcagg

SEQ ID NO: 79540 - DNA, 2241 bp, Homo sapiens
cttagtcctcgttcccgccttttccagacagcagtgctgagaagcaggagcccctgagcttggagacgcaggaagagccctgggaggcccagatcaaagggaggcagtcagctcatggagccgaggaatgttctgctgacacccaccccgagggtatccggtatgtttctgtgcaccagcgacccctccacacctcaccagattggttccccagccccgtgggacccaattccgggtcaattccaatttgattccagtccagaatcaaatcagaagagcaatcccgagtgcccacctcacggtctgaagcacctcctcctacacccggacccaaacacgaggtcggctcaaggaggcactgaggtcacgacagtcagggtcctgcgctgcttgtcgcatgcagtctccttccccgaaccgccgcctgcacggcctccactgttttcctattgggctgcagcctgagagccctgacaatgcggcccacaaaccgggaacgcgaaagtgcacgtaccaggcgcgatcaccaggcgctagcgctgaggggggactcgcgtcacagtaaccgccaccgttgccgggggactggccccagcggcttggcccccaggcgtctgtggcagtgcgtcccctctccgcgggatcgtcgccatggtcctgcgatcctaggagtcgggcaaggccgaacctgcctgaagaaacctcaagcggagattcaaggaagcaccacgtgatccctaaggatcccaaagatgcgtcgggcatgcatgggcggtgtgagggtgcgtctccctgacaggtgtccccgctgggatttcgaggtacggcctgcctgtgttccccggggcgctctctttccggaggggtttcctggcagagagcagaaccgcgcagcctcaggagctgcctggctgtgtgtgtttctgtgcgactgttggatgtttccgtgtgtctttctgtgtgtgcgtgtgagtgtgtgtgtggtgtgcggtgaaagaaatgtggctcgtgcagtgaagcgcggtttctctgtagttcgcctacgctctgatgcgcccgtctctttggccgggcttgggttgcggggcaagcgttctttgtttcgctcttggttcctaaagcctcggtgaagtggggggctggctgcgacccgcaaacgtccaaatcacctcccctcccaagccgcccactcttccagaaagaagaccagcacacgacaaccaagaacaaattcctccaggggcccatggtcctgcggcacacccaaggctggacggaccctagctgtcctgtcctcagtacccccttgagcccacttctaattcggtggctggcggagtcgcagcttcaggacctgaggcgggcactccttcatcctcttcagatttcattctggattaaaggatgtgtgcagaaaaaaggtcagatgggggtgaagatacaatccgctgaggtgtggaggaggtctcgcaccttcacctgcagaacaggtgcagacagatgtcaaagaaactgtttccaacgccatccccttttcctcttcactgtacaacctgtccacaccatggcgctgtgctggcgataraagacacgagtgttcggagaacctttggaccgaagactgtcgcctttctggccaggtcccctgttggaccctggttccccgaggcacatgggagtgggatggattgatcctgcctgggctgcggcctctactctgttctccctcttttcttgccttccctgattctcgtcggcccaggttttccttggtctggctcacagtcctccagaacgtccttcacagcaaatgtttcccagttcgtccaggaccaccttggcggggacgtaggtgatgagtgtttccttctcaacactcacatttcttaatgactgggtagctgtgatgctcttggaaccgtgggtgcccgtagctttccccaataaggaaactcttggtctccccattgcatcagatggctgcatgattcacatagaatgagaggtagccagccgtagctggcctttgccttctaatgaaggctatgtttcatctcatctgctggtgttttctcattgttgaggggtctcccattgctctgttcctggctgggactgcctctcagcactgcaccttttcgttgccagggatttcacggagcaaaagggactgggggttagctgggtgtagacccggtggtgggttgtgatcccggtgtgggtgctggatcactttgcagg

SEQ ID NO: 79541 - DNA, 2241 bp, Homo sapiens
cttagtcctcgttcccgccttttccagacagcagtgctgagaagcaggagcccctgagcttggagacgcaggaagagccctgggaggcccagatcaaagggaggcagtcagctcatggagccgaggaatgttctgctgacacccaccccgagggtatccggtatgtttctgtgcaccagcgacccctccacacctcaccagattggttccccagccccgtgggacccaattccgggtcaattccaatttgattccagtccagaatcaaatcagaagagcaatcccgagtgcccacctcacggtctgaagcacctcctcctacacccggacccaaacacgaggtcggctcaaggaggcactgaggtcacgacagtcagggtcctgcgctgcttgtcgcatgcagtctccttccccgaaccgccgcctgcacggcctccactgttttcctattgggctgcagcctgagagccctgacaatgcggcccacaaaccgggaacgcgaaagtgcacgtaccaggcgcgatcaccaggcgctagcgctgaggggggactcgcgtcacagtaaccgccaccgttgccgggggactggccccagcggcttggcccccaggcgtctgtggcagtgcgtcccctctccgcgggatcgtcgccatggtcctgcgatcctaggagtcgggcaaggccgaacctgcctgaagaaacctcaagcggagattcaaggaagcaccacgtgatccctaaggatcccaaagatgcgtcgggcatgcatgggcggtgtgagggtgcgtctccctgacaggtgtccccgctgggatttcgaggtacggcctgcctgtgttccccggggcgctctctttccggaggggtttcctggcagagagcagaaccgcgcagcctcaggagctgcctggctgtgtgtgtttctgtgcgactgttggatgtttccgtgtgtctttctgtgtgtgcgtgtgagtgtgtgtgtggtgtgcggtgaaagaaatgtggctcgtgcagtgaagcgcggtttctctgtagttcgcctacgctctgatgcgcccgtctctttggccgggcttgggttgcggggcaagcgttctttgtttcgctcttggttcctaaagcctcggtgaagtggggggctggctgcgacccgcaaacgtccaaatcacctcccctcccaagccgcccactcttccagaaagaagaccagcacacgacaaccaagaacaaattcctccaggggcccatggtcctgcggcacacccaaggctggacggaccctagctgtcctgtcctcagtacccccttgagcccacttctaattcggtggctggcggagtcgcagcttcaggacctgaggcgggcactccttcatcctcttcagatttcattctggattaaaggatgtgtgcagaaaaaaggtcagatgggggtgaagatacaatccgctgaggtgtggaggaggtctcgcaccttcacctgcagaacaggtgcagacagatgtcaaagaaactgtttccaacgccatccccttttcctcttcactgtacaacctgtccacaccatggcgctgtgctggcgatagaagacacgagtgttcggagaacctttggaccgaagactgtcgcctttctggccaggtcccctgttggaccctggttccccgaggcacatgggagtgggatggattgatcctgcctgggctgcggcctctactctgttctccctcttttcttgccttccctgattctcgtcggcccaggttttccttggtctggctcacagtcctccagaacgtccttcacagcaaatgtttcccagttcgtccaggaccaccttggcggggacgtaggtgatgagtgtttccttctcaacactcacatttcttaatgactgggtagctgtgatgctcttggaaccgtgggtgcccgtagctttccccaataaggaaactcttggtctccccattgcatcagatggctgcrtgattcacatagaatgagaggtagccagccgtagctggcctttgccttctaatgaaggctatgtttcatctcatctgctggtgttttctcattgttgaggggtctcccattgctctgttcctggctgggactgcctctcagcactgcaccttttcgttgccagggatttcacggagcaaaagggactgggggttagctgggtgtagacccggtggtgggttgtgatcccggtgtgggtgctggatcactttgcagg

SEQ ID NO: 79542 - DNA, 543 bp, Homo sapiens
atcaatctacaacagacactatttcacttaatacttacatttytacagtacagtatcctatattattcctattttaagatttaaagaaaaccctgaggtttagataagcaaattgctcaaagtcacgcaatgccatagtagtgttggagctatgattttccagaatctaagctcttagtcctgggaagtgcctagtgcccaaagaagaagactggaataaaataaggctgaatggtgtgtaagaaccaaataacaaaagccttgcagacattttaaaggctgtgaatattagtctaagaacaataacaagcaaaaaaaaaaaaaaagttttaactggagatagtaacatgtgttttcttttctcttcttttctttttattttgagacggagttgcagccttgttgcccaggttggaatgcaatggcgccatctcggctcactgcaacctctgcctcctgggttcaagcaatgctcctgcctcagcctccagagtagctgggattacaagtgtgcaccaccacgcccggctaattttgtatttt

SEQ ID NO: 79543 - DNA, 548 bp, Homo sapiens
tgaggcagacagatcacctgaggtcaggagtttgagagcagcctgaccaacatggagaaaccctgcctctactaaaaacacaaaattagccaggcatggtggcacgcacctgtaatcccagctacgtgggaggctgaggctggggaattacttgaacccaggggtggaggttgcaatgagccaagatcayaccactgcactccagcctgagcaacaagagcgaaactccgttttttttttgtttgaaaccaaaaaagataatgtattagaagacaagagataacactgcatatagaaaaggtaagtatttcttggtaacatttgtttttctatgaacagctttgtatacagtaactcaattttgaggtcttgagttctgtgcaccagatgcttggaatcatagaagaactgtaggcattgattgattgctgctccaatatattattctaactcaccttcactcactgaacaccattaacctcttctcaccatcattaatttctgaccatcagccctcattcaacaacattctaattaacaagttcaaa

SEQ ID NO: 79544 - DNA, 592 bp, Homo sapiens
taatctaatatgattctggggtaggaggcactatgagaacacaggatggtgctaaacagaaatctagaggaatatagaaaaagttaagattagaataccaaagtctcagaactgtgcccagaatgaggagtacatataaaaatgtattcaattaagtagcagctctttttattgtcattaaattaatgaaaaaactatatggtgaaaaaagggaaaactgcaaaaggggtgatgagtgaagacaacaaaatggagtctgaaaaggaggagtcattttaggaggtttcttttattcttgcccccatcaagtcctactgaatatatctcctaagtagctctcgaatctgttaccttatcaccaacaccactgctgacactcgggaagcccaaggcatctttttkttttttgagatggagtctcgctctgtcatccaggctggagtgcagtcgtgccatctcagctcactgcaacctccgcctccaggttcaagcaattctgcctcagcctcctgagtagctgggcttacaggtgtgcaccaccatgcctggctcatttttgtatttttagtagagataggccttcaccatattg

SEQ ID NO: 79545 - DNA, 766 bp, Homo sapiens
aggctcacagctcaccatttaatcagatgacatgaggaaagaaaatggagtaataggctacttgaactaaattttgatgttagtgtaaagaaaaaatttccttgatatctttattgagtacacattgaaacaacctaaaatcatttatcaggtaccagaaaatgtttccaatacataataaagactagaatgcaggcagtgctcaatctaaactgaacacaataaatttcagagaaaaacaattttaaaatggttaaaaaatatacatctaatgaaatgtgaggtcaaagaagaaaattcaaaacacatataatagtttgaaaatgataatgtgatgtcgtaagattctaccaaagcttatttgagaagcagttatttattttactttattttattttattgagacggagtctcgctctgttgcccggctggaatgcagttatgygatctcggctcactgcaacctccacctcccggattcaagctattctcctgcctgtctccccagtagctggaattacaggcaagcatcaccatgctcagctaatttcagtatttcagttgagatgaggattcaccatgttggccaggctggtctcgaactcctgaaattaggtgatccaccagccttggcctccaaactgctgggattacaggtgtgagccactgcaccaggcctattttttttttttttttttaattaagaacaagctgggtgtggtggctcatgcctgtaatcccaagactttgggaggccgatgcggct

SEQ ID NO: 79546 - DNA, 766 bp, Homo sapiens
aggctcacagctcaccatttaatcagatgacatgaggaaagaaaatggagtaataggctacttgaactaaattttgatgttagtgtaaagaaaaaatttccttgatatctttattgagtacacattgaaacaacctaaaatcatttatcaggtaccagaaaatgtttccaatacataataaagactagaatgcaggcagtgctcaatctaaactgaacacaataaatttcagagaaaaacaattttaaaatggttaaaaaatatacatctaatgaaatgtgaggtcaaagaagaaaattcaaaacacatataatagtttgaaaatgataatgtgatgtcgtaagattctaccaaagcttatttgagaagcagttatttattttactttattttattttattgagacggagtctcgctctgttgcccggctggaatgcagttatgcgatctcggctcactgcaacctccacctcccggattcaagctattctcctgcctgtctccccagtagctggaattacaggcaagcatcaccatgctcagctaatttcagtatttcagttgagatgaggattcaccatgttggccargctggtctcgaactcctgaaattaggtgatccaccagccttggcctccaaactgctgggattacaggtgtgagccactgcaccaggcctattttttttttttttttttaattaagaacaagctgggtgtggtggctcatgcctgtaatcccaagactttgggaggccgatgcggct

SEQ ID NO: 79547 - DNA, 699 bp, Homo sapiens
cctgaggtcaagagttcgagaccagcctgaccaacatggtataaccctgtctctaaaaaaatacaaaattagccgagggtgatggcgcatgcctgtaatctcagatattcaggaggctgtggcaggagaatcatttgagccaagaaggcagaggttgcagtgagctgagatcgcaccactacactccagggtacacaagaagagtgyaactccatcacacacacacacacacacaaaatgctataaacagaacatcagaaaaaaaatatagaaagtcacatgtatttaaaaaccttaagcttttgaaagctgttttcccaagtaatcaaaaatgagccaataacgatgcaaatattatctttttgttttttgttttttctggagacagagatcatgcaactgcactctagcctgggtgacagagtgagactccaactcaaaaaaataaataaataaaaaattattaggccaggagcagtggctctttgggaggctgaggtgggccaatcacctcaggtcaaaagttcgagaccagcctggtcaacatggtgcaaccctatctctactaaaaatacaaaaaattaaccgggcctggtggtgtgtgcctgtaatcccagctactagggaggctgaggcaggagaattggttgaagctgagaggtggaggccgcagtgagtcgagatcatgccactgccctg

SEQ ID NO: 79548 - DNA, 548 bp, Homo sapiens
aaaaaaaagccacacccacacacgcactccattttgtcaatcatttcaggggtcaaagtcactagggttgagcttttctggtgtagcccctcatcgccaagttccaaggaggctcactggggctcagattggaagacattttcaccaagttgccctgagaaggtctgagatgagtgaggtgtgcctgaattcttacatgggggcctgcagggactaatgggaagggttgatcttatcacccccatcctggaaaattagagaaggctctttcacaaacctgggctaaagaaatttcttttgccgggcacggtggctcaagcctgtaatcccagcactttgggaggctgaggcgggtggatcacctgaggtcaggagtttgaggccagcctgaccaacayggagaaaccccgtctctataaaaatacaaaattagctaggagtggtagtgcatgcctctaatcccaggtacttgggaggctaaggaaggagaatcacttgaacccgggagacggaggttgcagtgagccgagatcgtgccactgcactca

SEQ ID NO: 79549 - DNA, 1295 bp, Homo sapiens
  misc_feature (1)...(1295): n = A,T,C or G
tggtatcgtggtttacaaagtgggcccagcacacaaatctctgggcatagtttcaaatacatgcatttcttttaaattaaacacccccccacacacacacacatacacgtgtgtgtgtgtgtgtagggtctgttcaagccctgctgctgcccaggagtgttcccagccacgtgggacagtaactgaggatgatggtactgaagccactgtctaatattagattttgtaactcagagattcattaatataattactcagatgccagcctggcttggcaaggcctcttgaattgtgttcctcttcaacaaagtgctccggctgcagaaatgcccctggtgagcctgagctctgctaccttgcctgtgaatggggcagaaggcatgtgttggcctcctcactgcaccctgggagaggcagtgcatccccatggtggcaagtcttgcctttacatgtcttgtcacgaaaacagggaccttggagagtctgctgcagaggggagcaatctgctgggcgaggccccgtttctatgcaagttggcctgggctcagctgggggccnnnnnnnnnnnnnnnnnnnnnnnnnnnnnnnnnnnnnnnnnnnnnnnnnnnnnnnnnnnnnnnnnnnnnnnnnnnnnnnnnnnnnnnnnnnnnnnnnnnncattttgaatattgaattaccttcagatgggaagcagcccatggcccatccttgagatgatgtaaaggctcacgatggtataaaatcagaaagggggctgatgaaggaagagagccaagatgggaaagtggcaggtgtgctctctgagtgggcattatgaggggagaatcctgacagaggaggggcagtggaagcttccagaatgctggaaggagtgtggcaggcaagtgagaagctgtgggttaatgggttcaaagagacttggtttttcaaaatacttgtttttattttatgtgaatgagctctcaggaaaatggggaaggagcagccttcttctcagccccttccttcacccctgcccccgctgagtaccttgttacaggggctactgcttggtgggctcagcccaccccaccctctcataggccttttcttggtctccttggctgtccctgctaratagtcatctttggggacatcctcccttttggccacaaagcacacagccccccagaggccatgtcctctccagacttggtctgcggagcagccaaactcactcgtgacagggtctcttcccgtgccagatcttccctgccacgctagcctggtggatgccctgcggcagggattggcag

SEQ ID NO: 79550 - DNA, 1386 bp, Homo sapiens
tgacctgggcttcagtagatcatgaatctttcaccattcaaattaagggtgcgttactaacactgatctttttgcatgcttcacttcagctatttaattaaaaatgccaatagcctaaaggccagataacttttcagaaatcaaaaaatgttagcatttgttgccctgtcttcaatctgtttctcagatccactgaagttgtttcctgtaggttgacaaatgatctggcaaacactatgtatgaattatatccagactggccatattctggatatcaactatatctaagatttctaccaaattctgttcagcctttccaacgtaacacggcaagtcagggagagactaaacctaaaagtccttccttggcactgaaggtcggctggatccccagaactttaaatctttgggtctcccagagttcctgattcattttcaggtgcctttcaccttgttacctgagcctacagtgcagagtcaagaagccatctcagaaggtgttcaattaatagagaaggctcccagctggaggggatttatatgttctattcagttaatgaaaacaaccctttaaaagctatatttgaaaaattcaactagggttcattcattcattcaacttaagattgccagattaaatacaagacactcagtgaaaccggaatttcatgtaataaattatttcttagtacaagtgtgtcccaaataatgcatgagatatatttatactaaagaaatactatgtcattttcttaaaaatcgaatttatctgggtgttatatatctttatttgctaartctggcaattctaactcaatcttatactaataatagccagcaacaatacctacatagcactgactacacttggcacttaaaatgttttatgtgtttttaattcttgcaataacctcataagataggtattatttccatttttcaggtatgatgtgaaactggaagcacagaggaatcaaacaaacattgtcttatgaaattcagtatcttccacctgaatgcctaaagcctggatggttgcctatcttgcagagatgggcagggccaaggttttccacagaaaacagttctgagctgcttgaacataaggacaaatgcttgatcaaggtccttaacaatttttggcatggagtgttgttgtataattgtagcctggaaaatattcacagcaggtgttaccaattgccctcataaggatattgaattttaagaaattaaattctgggtgagtcttccaagataaactggctgcaacgcatgcctcttagtagcagccatggtttgaatgtttgcctcttcccagactcacagtgagatctgattgccattataatggtatagggagaggagacctttgagtggtgattg

SEQ ID NO: 79551 - DNA, 1386 bp, Homo sapiens
tgacctgggcttcagtagatcatgaatctttcaccattcaaattaagggtgcgttactaacactgatctttttgcatgcttcacttcagctatttaattaaaaatgccaatagcctaaaggccagataacttttcagaaatcaaaaaatgttagcatttgttgccctgtcttcaatctgtttctcagatccactgaagttgtttcctgtaggttgacaaatgatctggcaaacactatgtatgaattatatccagactggccatattctggatatcaactatatctaagatttctaccaaattctgttcagcctttccaacgtaacacggcaagtcagggagagactaaacctaaaagtccttccttggcactgaaggtcggctggatccccagaactttaaatctttgggtctcccagagttcctgattcattttcaggtgcctttcaccttgttacctgagcctacagtgcagagtcaagaagccatctcagaaggtgttcaattaatagagaaggctcccagctggaggggatttatatgttctattcagttaatgaaaacaaccctttaaaagctatatttgaaaaattcaactagggttcattcattcattcaacttaagattgccagattaaatacaagacactcagtgaaaccggaatttcatgtaataaattatttcttagtacaagtgtgtcccaaataatgcatgagatatatttatactaaagaaatactatgtcattttcttaaaaatcgaatttatctgggtgttatatatctttatttgctaaatctggcaattctaactcaatcttatactaataatagccagcaacaatacctacatagcactgactacacttggcacttaaaatgtttkatgtgtttttaattcttgcaataacctcataagataggtattatttccatttttcaggtatgatgtgaaactggaagcacagaggaatcaaacaaacattgtcttatgaaattcagtatcttccacctgaatgcctaaagcctggatggttgcctatcttgcagagatgggcagggccaaggttttccacagaaaacagttctgagctgcttgaacataaggacaaatgcttgatcaaggtccttaacaatttttggcatggagtgttgttgtataattgtagcctggaaaatattcacagcaggtgttaccaattgccctcataaggatattgaattttaagaaattaaattctgggtgagtcttccaagataaactggctgcaacgcatgcctcttagtagcagccatggtttgaatgtttgcctcttcccagactcacagtgagatctgattgccattataatggtatagggagaggagacctttgagtggtgattg

SEQ ID NO: 79552 - DNA, 1386 bp, Homo sapiens
tgacctgggcttcagtagatcatgaatctttcaccattcaaattaagggtgcgttactaacactgatctttttgcatgcttcacttcagctatttaattaaaaatgccaatagcctaaaggccagataacttttcagaaatcaaaaaatgttagcatttgttgccctgtcttcaatctgtttctcagatccactgaagttgtttcctgtaggttgacaaatgatctggcaaacactatgtatgaattatatccagactggccatattctggatatcaactatatctaagatttctaccaaattctgttcagcctttccaacgtaacacggcaagtcagggagagactaaacctaaaagtccttccttggcactgaaggtcggctggatccccagaactttaaatctttgggtctcccagagttcctgattcattttcaggtgcctttcaccttgttacctgagcctacagtgcagagtcaagaagccatctcagaaggtgttcaattaatagagaaggctcccagctggaggggatttatatgttctattcagttaatgaaaacaaccctttaaaagctatatttgaaaaattcaactagggttcattcattcattcaacttaagattgccagattaaatacaagacactcagtgaaaccggaatttcatgtaataaattatttcttagtacaagtgtgtcccaaataatgcatgagatatatttatactaaagaaatactatgtcattttcttaaaaatcgaatttatctgggtgttatatatctttatttgctaaatctggcaattctaactcaatcttatactaataatagccagcaacaatacctacatagcactgactacacttggcacttaaaatgttttatgtgtttttaattcttgcaayaacctcataagataggtattatttccatttttcaggtatgatgtgaaactggaagcacagaggaatcaaacaaacattgtcttatgaaattcagtatcttccacctgaatgcctaaagcctggatggttgcctatcttgcagagatgggcagggccaaggttttccacagaaaacagttctgagctgcttgaacataaggacaaatgcttgatcaaggtccttaacaatttttggcatggagtgttgttgtataattgtagcctggaaaatattcacagcaggtgttaccaattgccctcataaggatattgaattttaagaaattaaattctgggtgagtcttccaagataaactggctgcaacgcatgcctcttagtagcagccatggtttgaatgtttgcctcttcccagactcacagtgagatctgattgccattataatggtatagggagaggagacctttgagtggtgattg

SEQ ID NO: 79553 - DNA, 1386 bp, Homo sapiens
tgacctgggcttcagtagatcatgaatctttcaccattcaaattaagggtgcgttactaacactgatctttttgcatgcttcacttcagctatttaattaaaaatgccaatagcctaaaggccagataacttttcagaaatcaaaaaatgttagcatttgttgccctgtcttcaatctgtttctcagatccactgaagttgtttcctgtaggttgacaaatgatctggcaaacactatgtatgaattatatccagactggccatattctggatatcaactatatctaagatttctaccaaattctgttcagcctttccaacgtaacacggcaagtcagggagagactaaacctaaaagtccttccttggcactgaaggtcggctggatccccagaactttaaatctttgggtctcccagagttcctgattcattttcaggtgcctttcaccttgttacctgagcctacagtgcagagtcaagaagccatctcagaaggtgttcaattaatagagaaggctcccagctggaggggatttatatgttctattcagttaatgaaaacaaccctttaaaagctatatttgaaaaattcaactagggttcattcattcattcaacttaagattgccagattaaatacaagacactcagtgaaaccggaatttcatgtaataaattatttcttagtacaagtgtgtcccaaataatgcatgagatatatttatactaaagaaatactatgtcattttcttaaaaatcgaatttatctgggtgttatatatctttatttgctaaatctggcaattctaactcaatcttatactaataatagccagcaacaatacctacatagcactgactacacttggcacttaaaatgttttatgtgtttttaattcttgcaataacctcataagataggtwttatttccatttttcaggtatgatgtgaaactggaagcacagaggaatcaaacaaacattgtcttatgaaattcagtatcttccacctgaatgcctaaagcctggatggttgcctatcttgcagagatgggcagggccaaggttttccacagaaaacagttctgagctgcttgaacataaggacaaatgcttgatcaaggtccttaacaatttttggcatggagtgttgttgtataattgtagcctggaaaatattcacagcaggtgttaccaattgccctcataaggatattgaattttaagaaattaaattctgggtgagtcttccaagataaactggctgcaacgcatgcctcttagtagcagccatggtttgaatgtttgcctcttcccagactcacagtgagatctgattgccattataatggtatagggagaggagacctttgagtggtgattg

SEQ ID NO: 79554 - DNA, 714 bp, Homo sapiens
tgcatcctgcaggaatttaggtagcatttctcagatttttgtcccccartctctataatacattgatggagactttctttcttgccaaattattgatatcccaaaaagaactgatggcaacatttccgctgagaaagaaagccacgtaagtacaacacagtgcgaattcattcccagtgccactgatgagcaatcaacgacatcaccccagttaatctcaaatccatctggcttcaaagtctaggcacttttcagcgggccaagccaggtctcactttggaagtcaaggggattctgtgcttaagaagtcagtgcattgtcctacctccagacgttatatgccaagaaagttcatcttattttgaagcaaactcaataaaatgttctggacagaaatggacagagtttgtggaatctgaatcttttcctattcctgtatagcttaagactaaataatttgtccaatttgggggacaataagaaatgtactcttcgggcatggtggctcatgcctgctagtccagtgctttgggaggctaagatgggaggttcacttgaggccaggagtttcagactagcctgggcaacaaagtgagaccccgtatctacaaaaaaagttttaaattagccagtcgcggtagcatgttcctgtagtcccagctactggggaggctgaggtagtaggatcacttgaacccaggagcttgaggctgc

SEQ ID NO: 79555 - DNA, 714 bp, Homo sapiens
tgcatcctgcaggaatttaggtagcatttctcagatttttgtcccccagtctctataatacattgatggagactttctttcttgccaaattattgatatmccaaaaagaactgatggcaacatttccgctgagaaagaaagccacgtaagtacaacacagtgcgaattcattcccagtgccactgatgagcaatcaacgacatcaccccagttaatctcaaatccatctggcttcaaagtctaggcacttttcagcgggccaagccaggtctcactttggaagtcaaggggattctgtgcttaagaagtcagtgcattgtcctacctccagacgttatatgccaagaaagttcatcttattttgaagcaaactcaataaaatgttctggacagaaatggacagagtttgtggaatctgaatcttttcctattcctgtatagcttaagactaaataatttgtccaatttgggggacaataagaaatgtactcttcgggcatggtggctcatgcctgctagtccagtgctttgggaggctaagatgggaggttcacttgaggccaggagtttcagactagcctgggcaacaaagtgagaccccgtatctacaaaaaaagttttaaattagccagtcgcggtagcatgttcctgtagtcccagctactggggaggctgaggtagtaggatcacttgaacccaggagcttgaggctgc

SEQ ID NO: 79556 - DNA, 714 bp, Homo sapiens
tgcatcctgcaggaatttaggtagcatttctcagatttttgtcccccagtctctataatacattgatggagactttctttcttgccaaattattgatatcccaaaaagaactgatggcaacatttccgctgagaaagaaagccacgtaagtacaacacagtgcgaattcattcccagtgccactgatgagcaatcaacgacatcaccccagttaatctcaaatccatctggcttcaaagtctaggcacttttcagcgggccaagccaggtctcactttggaagtcaaggggattctgtgcttaagaagtcagtgcattgtcctacctccagacgttatatgccaagaaagttcatcttattttgaagcaaactcaataaaatgttctggacagaaatggacagartttgtggaatctgaatcttttcctattcctgtatagcttaagactaaataatttgtccaatttgggggacaataagaaatgtactcttcgggcatggtggctcatgcctgctagtccagtgctttgggaggctaagatgggaggttcacttgaggccaggagtttcagactagcctgggcaacaaagtgagaccccgtatctacaaaaaaagttttaaattagccagtcgcggtagcatgttcctgtagtcccagctactggggaggctgaggtagtaggatcacttgaacccaggagcttgaggctgc

SEQ ID NO: 79557 - DNA, 714 bp, Homo sapiens
tgcatcctgcaggaatttaggtagcatttctcagatttttgtcccccagtctctataatacattgatggagactttctttcttgccaaattattgatatcccaaaaagaactgatggcaacatttccgctgagaaagaaagccacgtaagtacaacacagtgcgaattcattcccagtgccactgatgagcaatcaacgacatcaccccagttaatctcaaatccatctggcttcaaagtctaggcacttttcagcgggccaagccaggtctcactttggaagtcaaggggattctgtgcttaagaagtcagtgcattgtcctacctccagacgttatatgccaagaaagttcatcttattttgaagcaaactcaataaaatgttctggacagaaatggacagagtttgtggaatctgaatcttttcctattcctgtatagcttaagactaaataatttgtccaatttgggggacaataagaaatgtactcttcgggcatggtggctcatgcctgctagtccagtgctttkggaggctaagatgggaggttcacttgaggccaggagtttcagactagcctgggcaacaaagtgagaccccgtatctacaaaaaaagttttaaattagccagtcgcggtagcatgttcctgtagtcccagctactggggaggctgaggtagtaggatcacttgaacccaggagcttgaggctgc

SEQ ID NO: 79558 - DNA, 851 bp, Homo sapiens
gcatttaaaatacaacacgattttgtgaccttgttttgggaattcttcaattttcaatattccaggagtcccaaaatacagggcactggccaggcaggcccctctctgctgtggcctatggcttctaaggctgaagtctgcttggcagctggtttgccaccttgaaacaggtaccacaagcccaaaggatgctcacacaatggcccctctccagaggggaggcggtcagttccccctgtgtagctgccaggtgggggttkggtgggggtagaagaggggctgcaatggggtggctcttggacatccaagattggtgggggccacttcagtcctgatgccgaggaatatttatttacgtggttataacattttcccaccatcagagcagagtcattagggcttatggtggcggtggggggcggggttggagtgtgaaagacagaaagagagcacacaagcgcaaggcatcaccgcttgcagttttcgtttactgtttgttgaagtctttcatttaaatttcctttttaaaattccatgcccttttctacaggcaatgaacatgtagagactgatggcagcccagccttgagcatccactcaactctgcacgccacggaagagaaggcaggccaggccagatgaaggctaggtgctggctggggcctctgcaggggccaatgtgctggagccctggaggctgagtgcctgctccaggctgagccaccgctgtgggaacacatgaatggaagcacgcatggcaaacgctgtggagggatcaggaaggcatggaaagaagcatattctgcatctttcatcctttcttccctggacacatctgttcaggccatgca

SEQ ID NO: 79559 - DNA, 631 bp, Homo sapiens
tgtatggcaaaatcaggataaattgttaaaggtagagggaaaacagtggcccaaagcacacaaatgatctcttgtgtgagtgacagtccttgtgctgaagagatgaggagttccaaatgctggcactatagtatgctttcaaccagaacaatctactgttaaatgaagagcactaaggcaggaagggtcacatgggttcgcactctatggagaaaagaaattagtgtgtagctgttcgcccaacatttattcaaatgagaatgaagttaaaataaaaggatctatgttatctataaagaaaagccaattaaagcctaagggaagttttgggaggataagctcaaaagcaatctcatgaaaaytgctgacccactgctcccaaaacatgagtataaatattgacaaacaagctaaaaattttaaatatttcactacattagaaattggtaattctggctgggcacagtgactcatgcctataatcccagcactttgggaggccgaggcaggcagatcacttgaggtcaggagttcgagaccagcctggcccatatggcacaaccccgtctctactaaaaatacaaaaatcagctgggcatggtgacatgcacctgtaatcccagctactcag

SEQ ID NO: 79560 - DNA, 654 bp, Homo sapiens
acaggctgtggaccacgagttctgatttcaggcttccccgtggcctcgggtaatggatctgcttcactgctccattcttcattcgtcacacgacaatcataaggggacatccctgctggtgttgatctcaggcttgtctccatgtggaggaagggctcagcgcacatgtcctctgggaccaagcaggacgtgcagagccacagctgctatttgcacttcggctcgtttcttcaccagttgaagactcagtttccacatcattaaaattgggagaataaatagtgacaagtgccagtaggacacttgcccagagcctggaatacgaggaattcgataaatactgactatcttagaatgcttatggatagtaatagcaatcgttgtatcacccacagctgctttacggcagggccccacgatgtggattgaatcacagtgaagagaagccactcggaccacgtttgagtcaggaggggcagttgtgaggttgggggcagggggctgagtcagtcactgaagtaatatccccatggaattgtgctctggtgacacaattccatatcagaatcctccctcaccctcaacaaaggaacacgctgcaggggccggggaggggacgttgctaaracagaaactgctaaaatcacacccaat

SEQ ID NO: 79561 - DNA, 839 bp, Homo sapiens
attttacctgggggaactgagtggggcaggagcaaccaaccgaccatttgttcattcggtagccatttctttttctttctttctttcttttttttttttttttgactggctctgtcacccaggctgaagtgtggtgacacaatcacaactcgctttagcctctacatcctaggctcaagcaatcttccctccccagcctcccgagtagctgggaccagagacgtgggccaccacgcycagctaatttttgactctttgtagggttgagggacctccctgtgttgcccaggctggtcttgaaatcctgggctcaagtgatcctcccatcttggcctcccaaagtgctgggattccaggtgtgagccaccactctcggtgagcagctgtttcttgagccccggctgcgggccagaccaggcccaggtgcaagggacatacacatgacgtccctgcgctcaggctctgtgtcttggtggcacttagaggacagggtgacagtctccctcagccttttggacgctgcttttcctttgctgccttttcctggatttttcttgttatccgaaagaccgccagggtggctaaatggtagaaaggagagcttggcgggggtatcagtttgcaaactggaagagacggtctccagtgtgtgccaaaggtaacccctcttccaagaggggaggaacaggctgggttttatgcctaacagggcctgtagcccacaatagttgtacatattcagcaggttcgggaggaagtgatatatatttatgaagggagccgagtgcatgggcagtgggtaaacacatgtgacatacatataacgtatatcacatgtt

SEQ ID NO: 79562 - DNA, 839 bp, Homo sapiens
attttacctgggggaactgagtggggcaggagcaaccaaccgaccatttgttcattcggtagccatttctttttctttctttctttcttttttttttttttttgactggctctgtcacccaggctgaagtgtggtgacacaatcacaactcgctttagcctctacatcctaggctcaagcaatcttccctccccagcctcccgagtagctgggaccagagacgtgggccaccacgcccagctaatttttgactctttgtagggttgagggacctccctgtgttgcccaggctggtcttgaaatcctgggctcaagtgatcctcccatcttggcctcccaaagtgctgggattccaggtrtgagccaccactctcggtgagcagctgtttcttgagccccggctgcgggccagaccaggcccaggtgcaagggacatacacatgacgtccctgcgctcaggctctgtgtcttggtggcacttagaggacagggtgacagtctccctcagccttttggacgctgcttttcctttgctgccttttcctggatttttcttgttatccgaaagaccgccagggtggctaaatggtagaaaggagagcttggcgggggtatcagtttgcaaactggaagagacggtctccagtgtgtgccaaaggtaacccctcttccaagaggggaggaacaggctgggttttatgcctaacagggcctgtagcccacaatagttgtacatattcagcaggttcgggaggaagtgatatatatttatgaagggagccgagtgcatgggcagtgggtaaacacatgtgacatacatataacgtatatcacatgtt

SEQ ID NO: 79563 - DNA, 665 bp, Homo sapiens
cagcatgtccctgggagaggaggcacacttctgtctccagctgtagactcttgcctgtctcttctgaggctgcttttgcctggatggtccaggaagaggggcagctcttcctcctggcttggccatttctttctttacttttttttttttttttttttttagatggagtcttgctctgtcgcccacgctggaatgcagtgaaaagatctcagctcactgcaacctccgcctcctgggttcaagcgattctggtgcctsagcctcccaagtagctgggattacaggcacccgccaccatgcctggctaaatgttttgcatttttagtagagacggggttttgccacgttggccaggctggtctcaaacttttgacctcaagtgatcctctcgccttagcctcccaaagtgctaggattacaggtgtgagccaccacatgtggccatggcttggccatgtctatggtcagcctttgagccctggctgcaatggtgttgagctgaacagatcagcccccatgccaggaggaacctggctgcccatcctgccccaggactgaccctgagagatggcaaaaggcaggggattgggaggcatgagtcaagtcaatgcaactgttcttaaaagggggtggggaggtttctgtgaagaatgtatttgaagccc

SEQ ID NO: 79564 - DNA, 628 bp, Homo sapiens
attcatcacaggctcactttttaccattcatcgggcacgtctctgggcaggagtctccttagagccttcccagtgggcagtgatgagtacagaggcttctagctcttctttttaaataatttttttaaaaaaaataatagaaacagggtctcactacgttgctcaggctggtctcraactcctggcctcaagtgattctcctgccttggcctcccaaagtgctgggataacgggcattagccactgtgcccagcctagctgtcgtcttacttctgatgtctccatcacttttgaggccattttttcagtgctgtgccagcctcacccctggatgggccagtcattgtcaagaaccagtaggttcaatggctgtttcccttttcagagaggagccccagaagcctcaatgtaaatgcctatttccctcatggcgcttttgacacctacctccactaactttcccactgagacattggaaaattccttaatgacttccttggatggtagaagacacacagtcccttgaccgtcatacccaactccgctgacctgcagggcgaggcagaagaaagggtttcgccaagagtcaaaaacatgctcccccagttggcccacaatctctgtcctg

SEQ ID NO: 79565 - DNA, 753 bp, Homo sapiens
gccagctgaagcagtaaggaagttacctggggtctaaaaagttgtttcaaagaaccgttgtatagaacgataatgaataaaaataaaagcaatcacaagtatctggtgactgtttaccccacaaaaggcatgtgctaagcacagcatgggtcatagcttgtttcatcttcacaataaccctgtgaaatggaaaccaacatcagccccttttagagatgaggagatcgaagctcagagaggtgaattccttccccgagtcacgccctaggagctatggggcctggggttctctgacttccaacacacactgcagtacggcagcccccacacctgcctctcactcacctgtgccaggcaccgttctgagcacttttggcatctctgaagatctgtaatcctcccaagtaccctatgggcatcaccaccccccattttgcagatgagaaaactgaggcacagagaggttaactaacttgctcaaggttcacaaggctttgaatgrtggtcccagggctcaagcccaggctaatgcccaaccccaggtcattggccacctctcatacggcctctctctgcctctgcaccagcccttgtggcggacctgtgtccttctcacaagctgcctggcatctggagcatcccctgttaggaccccccttctcgggagaaggaaaacgtggaaaatgtgagcccagcttccccagtcctccttgtaggcggggattggccacagacagccgttcctctgaccgg

SEQ ID NO: 79566 - DNA, 753 bp, Homo sapiens
gccagctgaagcagtaaggaagttacctggggtctaaaaagttgtttcaaagaaccgttgtatagaacgataatgaataaaaataaaagcaatcacaagtatctggtgactgtttaccccacaaaaggcatgtgctaagcacagcatgggtcatagcttgtttcatcttcacaataaccctgtgaaatggaaaccaacatcagccccttttagagatgaggagatcgaagctcagagaggtgaattccttccccgagtcacgccctaggagctatggggcctggggttctctgacttccaacacacactgcagtacggcagcccccacacctgcctctcactcacctgtgccaggcaccgttctgagcacttttggcatctctgaagatctgtaatcctcccaagtaccctatgggcatcaccaccccccattttgcagatgagaaaactgaggcacagagaggttaactaacttgctcaaggttcacaaggctttgaatgatggtcccagggctcaagcccaggctaatgcccaaccccaggtcattggccacctctcatacggcctctctctgcctctgcaccagcccttgtggyggacctgtgtccttctcacaagctgcctggcatctggagcatcccctgttaggaccccccttctcgggagaaggaaaacgtggaaaatgtgagcccagcttccccagtcctccttgtaggcggggattggccacagacagccgttcctctgaccgg

SEQ ID NO: 79567 - DNA, 753 bp, Homo sapiens
gccagctgaagcagtaaggaagttacctggggtctaaaaagttgtttcaaagaaccgttgtatagaacgataatgaataaaaataaaagcaatcacaagtatctggtgactgtttaccccacaaaaggcatgtgctaagcacagcatgggtcatagcttgtttcatcttcacaataaccctgtgaaatggaaaccaacatcagccccttttagagatgaggagatcgaagctcagagaggtgaattccttccccgagtcacgccctaggagctatggggcctggggttctctgacttccaacacacactgcagtacggcagcccccacacctgcctctcactcacctgtgccaggcaccgttctgagcacttttggcatctctgaagatctgtaatcctcccaagtaccctatgggcatcaccaccccccattttgcagatgagaaaactgaggcacagagaggttaactaacttgctcaaggttcacaaggctttgaatgatggtcccagggctcaagcccaggctaatgcccaaccccaggtcattggccacctctcatacggcctctctctgcctctgcaccagcccttgtggcggacctgtgtccttctcacaagctgcctggcatctggagcatccccygttaggaccccccttctcgggagaaggaaaacgtggaaaatgtgagcccagcttccccagtcctccttgtaggcggggattggccacagacagccgttcctctgaccgg

SEQ ID NO: 79568 - DNA, 600 bp, Homo sapiens
gctttcatttccaggtagatgtggctctcagagtgtcgaggctgtgggcaggttcctacttcttccttcagtggatatttgttgatgacttctcatatcaggtgttgggtatacagaagttaataaatctgacaaggaacctgcttgggggagcttgcattctagcataggaggcaggtgtgaaataaatatgtgggcaaatacacagacacttggcattataggtgatggcaaatgtgatagaggaaaaggagagggtaaaaccagctatttataactactgatatatacaaatagatgaatcccacagacataacattgagtgaaggaagccaaacgtgaaagaatgcttactgtatgatactattaatatgaagttcaaaaacagccaaaactgctctatagygatagaggtcaatatagtggcttcatttaggacaggtataagctgggaagaggaatgaggatctgagatactggaaattttctatatttttatgtgagtagtggtttcatttgcatagatagatagattagatagacagcatctacccactgtttaatagcaccatggagtcaagcatccatacctacatttga

SEQ ID NO: 79569 - DNA, 3404 bp, Homo sapiens
tcctctcctaactttactttttgaaattagatccacataataaatcccgactctatgattttatacaattagaatattgatttcacattgttttgttttgtttttgaatttgcctttttatttttcacaacatagacatttaagtttctcaatgaaggcttaaaagtcatttgatgctttgaggtgaactatgatgggctcttttatattttcctaaatgaagaaaatgttggaatccaccctatgacagattattgcttaagcttaagaatgactgttctggctcttgataattaaactctcctttgctagtaatttcaggtctattaatcacctgtttgaaaactgcttcttataaaatgtttctatagacttctatccttatgcatttcaggttatgaaacaccagaggttagcaatgccccctccaggagttttggggagtgtcttttttgatgttatatgctaggcattcaattgatctgtcaaccctaaagtcagtggggctgtggtttgtgtcataatgatagtttttctatgatgaaacaaaaattgtatttgggaataatcagaaaactgtgtgaaagtagtgctgaagtagatactgggttgtagcccactaagacagtcttcatgttcaatgcaaggtgtgtcagccagtttctacagacataaagtctctgcatttctattttctcatctatcaaaacataattgtaaagcttagtgtgcatttttggatctcttcccatccatcccacaaccttttatctgagaatgtctcccttataagatccatgaagggacctccaaaaccacatggtggcaagcaaagtccctattccctcctacattggtcatgtgcatttggaccaaaaaccatcacttgccccagaaagaatctttggtagttagctggactaataagatccttccctgcttcagaaaataaaattgggacgtaagcatactgagtcttaagctgtggacattgagaatgtagtctgcaatggtctagtcatgtttgtaccgcatgcagtgagacagagaagagggcagagagagacctgtagagaattaaactcaaaagctgatgtgatggcaggaaggggtgatttcttcacttccattggcaatattccagtcttggctcccattcctcttatgcctggcttccacttcttcctcttggcttccataaaacccttctgtatctttctacttcaccctcctttccttttgtttaatgtgatctttcctactgaataccttaagacaaaaagataaaaggagatgtgtatctaacatgcctcctcgaatgactcagatttagccaatactttagtttctcttgccatgtgcaggctggcatgggatatgcatacagcagacagggtttgtattccgagaaatgctatagcaataaaaatttaaatggagtgatattatctataggtttccaggtagtcagtgtagtttagacatggagaaaaaagcctcctacaagaataacgtctgagtccaagcttgtatcattttaacttcaatgtgtgtgtgtttttgtgtgcttgggtgtacacattttttaaaaacattttcagattccttaaatctgtgttcatctgatcgttggttcaagccatcagacctgccctcttgcccacaattcacaaaaatgactctttgtttccaccttcttttccaccttctcctcatttctatggttttataagagcctgggggatgaaataattcattctgattccgctagaggcagacagtaaggaccattagtattggcttttccaggataactaggtgattacatggggcaaggaacaatgaagacattttgtaaaatgagtgctttatagacataattttatatattaaaagagcatagtagtttgaccctgggaagactgaggctagattgtgagaagctttgataattatgataaagaatatgggttttagctcaaaagcaaaaaggtccccattgaactgagagactccaaaaacagccctcagtaaacttcaccttcctagtattcgtgccctggtatggttgcctcccacatggcctctaggctgctcctatattcactttcactaatacaaaacagcggaaatgacttctggcagcgttcatttttgtacttttgaaagccataagtcaccttgtgagaagtttctctacattgatggagagaccacatggggaggctccttgctaaggtgctagacatgtaagtgaagccttcttggcaattctatcccaagcctccatctgattagtgctgcatgtaaggtcccaagtgagatcagcggaagagtcttccagctcagccctagtcaatccagaagactgtaaggcataatataacagttttgttttaaaccagtgagataacctaaatagctccctttgcttctccctctcttactttgtttttctgcataccttttctgtgttgtcttgttgtctatttcactcatacccgaataccttccacatgacattattgcatgcatactcttatataaagcgttcctggaacaggcttttgttaacacattctcctatcattttttcctgctcttccaattccccttggctcttttaggggctgcatgtatcaggggaatgttggagataaaatacaaagagcaatctccaaggaagaacgatcattgtactcttgaacattctgtgtccctcagggaagtaattagcaacatccaacattaatttccaaggtgaattggcttgtgggagtaggagtacaacattcacaaacctgaaggggtggattttctgattagcatggcaaaagactcttaccactgtactcatatggtatcctgtctcaagtgactttctgttctccagatgtgctgacagtctaagcataggtataataacatttaaaaataccaagtatctttgtggcctgggtccttccgacttgatcatgactttccactccagagcagggcatatgcctgcttccacccaccacacatrttcagtggttccttcttccttctctattccatactccccaccaccatctggtatctatccaggtttcagcccagctctgcccactgagttcccagccgtgtagtctttgataattttcttaatctctctacatctcagtttcctcataagcaaaatataaaacatgagcttcatcttaaatatgaggcattgtagtgaaagacataatgcaataatggacagcaggaatattagcatcacacagagtttcacctgcttcccacatctacatggatagacctgggcacatgctgtcggctgttaggagtctcacttttgaatgaaggtaagattagtccctatgaagcattggttgtgaaaagcaaactcaataatg

SEQ ID NO: 79570 - DNA, 3404 bp, Homo sapiens
tcctctcctaactttactttttgaaattagatccacataataaatcccgactctatgattttatacaattagaatattgatttcacattgttttgttttgtttttgaatttgcctttttatttttcacaacatagacatttaagtttctcaatgaaggcttaaaagtcatttgatgctttgaggtgaactatgatgggctcttttatattttcctaaatgaagaaaatgttggaatccaccctatgacagattattgcttaagcttaagaatgactgttctggctcttgataattaaactctcctttgctagtaatttcaggtctattaatcacctgtttgaaaactgcttcttataaaatgtttctatagacttctatccttatgcatttcaggttatgaaacaccagaggttagcaatgccccctccaggagttttggggagtgtcttttttgatgttatatgctaggcattcaattgatctgtcaaccctaaagtcagtggggctgtggtttgtgtcataatgatagtttttctatgatgaaacaaaaattgtatttgggaataatcagaaaactgtgtgaaagtagtgctgaagtagatactgggttgtagcccactaagacagtcttcatgttcaatgcaaggtgtgtcagccagtttctacagacataaagtctctgcatttctattttctcatctatcaaaacataattgtaaagcttagtgtgcatttttggatctcttcccatccatcccacaaccttttatctgagaatgtctcccttataagatccatgaagggacctccaaaaccacatggtggcaagcaaagtccctattccctcctacattggtcatgtgcatttggaccaaaaaccatcacttgccccagaaagaatctttggtagttagctggactaataagatccttccctgcttcagaaaataaaattgggacgtaagcatactgagtcttaagctgtggacattgagaatgtagtctgcaatggtctagtcatgtttgtaccgcatgcagtgagacagagaagagggcagagagagacctgtagagaattaaactcaaaagctgatgtgatggcaggaaggggtgatttcttcacttccattggcaatattccagtcttggctcccattcctcttatgcctggcttccacttcttcctcttggcttccataaaacccttctgtatctttctacttcaccctcctttccttttgtttaatgtgatctttcctactgaataccttaagacaaaaagataaaaggagatgtgtatctaacatgcctcctcgaatgactcagatttagccaatactttagtttctcttgccatgtgcaggctggcatgggatatgcatacagcagacagggtttgtattccgagaaatgctatagcaataaaaatttaaatggagtgatattatctataggtttccaggtagtcagtgtagtttagacatggagaaaaaagcctcctacaagaataacgtctgagtccaagcttgtatcattttaacttcaatgtgtgtgtgtttttgtgtgcttgggtgtacacattttttaaaaacattttcagattccttaaatctgtgttcatctgatcgttggttcaagccatcagacctgccctcttgcccacaattcacaaaaatgactctttgtttccaccttcttttccaccttctcctcatttctatggttttataagagcctgggggatgaaataattcattctgattccgctagaggcagacagtaaggaccattagtattggcttttccaggataactaggtgattacatggggcaaggaacaatgaagacattttgtaaaatgagtgctttatagacataattttatatattaaaagagcatagtagtttgaccctgggaagactgaggctagattgtgagaagctttgataattatgataaagaatatgggttttagctcaaaagcaaaaaggtccccattgaactgagagactccaaaaacagccctcagtaaacttcaccttcctagtattcgtgccctggtatggttgcctcccacatggcctctaggctgctcctatattcactttcactaatacaaaacagcggaaatgacttctggcagcgttcatttttgtacttttgaaagccataagtcaccttgtgagaagtttctctacattgatggagagaccacatggggaggctccttgctaaggtgctagacatgtaagtgaagccttcttggcaattctatcccaagcctccatctgattagtgctgcatgtaaggtcccaagtgagatcagcggaagagtcttccagctcagccctagtcaatccagaagactgtaaggcataatataacagttttgttttaaaccagtgagataacctaaatagctccctttgcttctccctctcttactttgtttttctgcataccttttctgtgttgtcttgttgtctatttcactcatacccgaataccttccacatgacattattgcatgcatactcttatataaagcgttcctggaacaggcttttgttaacacattctcctatcattttttcctgctcttccaattccccttggctcttttaggggctgcatgtatcaggggaatgttggagataaaatacaaagagcaatctccaaggaagaacgatcattgtactcttgaacattctgtgtccctcagggaagtaattagcaacatccaacattaatttccaaggtgaattggcttgtgggagtaggagtacaacattcacaaacctgaaggggtggattttctgattagcatggcaaaagactcttaccactgtactcatatggtatcctgtctcaagtgactttctgttctccagatgtgctgacagtctaagcataggtataataacatttaaaaataccaagtatctttgtggcctgggtccttccgacttgatcatgactttccactccagagcagggcatatgcctgcttccacccaccacacatattcagtggttccttcttccttctctattccatactccccaccaccatctggtatctatccaggtttcagcccagctctgyccactgagttcccagccgtgtagtctttgataattttcttaatctctctacatctcagtttcctcataagcaaaatataaaacatgagcttcatcttaaatatgaggcattgtagtgaaagacataatgcaataatggacagcaggaatattagcatcacacagagtttcacctgcttcccacatctacatggatagacctgggcacatgctgtcggctgttaggagtctcacttttgaatgaaggtaagattagtccctatgaagcattggttgtgaaaagcaaactcaataatg

SEQ ID NO: 79571 - DNA, 3404 bp, Homo sapiens
tcctctcctaactttactttttgaaattagatccacataataaatcccgactctatgattttatacaattagaatattgatttcacattgttttgttttgtttttgaatttgcctttttatttttcacaacatagacatttaagtttctcaatgaaggcttaaaagtcatttgatgctttgaggtgaactatgatgggctcttttatattttcctaaatgaagaaaatgttggaatccaccctatgacagattattgcttaagcttaagaatgactgttctggctcttgataattaaactctcctttgctagtaatttcaggtctattaatcacctgtttgaaaactgcttcttataaaatgtttctatagacttctatccttatgcatttcaggttatgaaacaccagaggttagcaatgccccctccaggagttttggggagtgtcttttttgatgttatatgctaggcattcaattgatctgtcaaccctaaagtcagtggggctgtggtttgtgtcataatgatagtttttctatgatgaaacaaaaattgtatttgggaataatcagaaaactgtgtgaaagtagtgctgaagtagatactgggttgtagcccactaagacagtcttcatgttcaatgcaaggtgtgtcagccagtttctacagacataaagtctctgcatttctattttctcatctatcaaaacataattgtaaagcttagtgtgcatttttggatctcttcccatccatcccacaaccttttatctgagaatgtctcccttataagatccatgaagggacctccaaaaccacatggtggcaagcaaagtccctattccctcctacattggtcatgtgcatttggaccaaaaaccatcacttgccccagaaagaatctttggtagttagctggactaataagatccttccctgcttcagaaaataaaattgggacgtaagcatactgagtcttaagctgtggacattgagaatgtagtctgcaatggtctagtcatgtttgtaccgcatgcagtgagacagagaagagggcagagagagacctgtagagaattaaactcaaaagctgatgtgatggcaggaaggggtgatttcttcacttccattggcaatattccagtcttggctcccattcctcttatgcctggcttccacttcttcctcttggcttccataaaacccttctgtatctttctacttcaccctcctttccttttgtttaatgtgatctttcctactgaataccttaagacaaaaagataaaaggagatgtgtatctaacatgcctcctcgaatgactcagatttagccaatactttagtttctcttgccatgtgcaggctggcatgggatatgcatacagcagacagggtttgtattccgagaaatgctatagcaataaaaatttaaatggagtgatattatctataggtttccaggtagtcagtgtagtttagacatggagaaaaaagcctcctacaagaataacgtctgagtccaagcttgtatcattttaacttcaatgtgtgtgtgtttttgtgtgcttgggtgtacacattttttaaaaacattttcagattccttaaatctgtgttcatctgatcgttggttcaagccatcagacctgccctcttgcccacaattcacaaaaatgactctttgtttccaccttcttttccaccttctcctcatttctatggttttataagagcctgggggatgaaataattcattctgattccgctagaggcagacagtaaggaccattagtattggcttttccaggataactaggtgattacatggggcaaggaacaatgaagacattttgtaaaatgagtgctttatagacataattttatatattaaaagagcatagtagtttgaccctgggaagactgaggctagattgtgagaagctttgataattatgataaagaatatgggttttagctcaaaagcaaaaaggtccccattgaactgagagactccaaaaacagccctcagtaaacttcaccttcctagtattcgtgccctggtatggttgcctcccacatggcctctaggctgctcctatattcactttcactaatacaaaacagcggaaatgacttctggcagcgttcatttttgtacttttgaaagccataagtcaccttgtgagaagtttctctacattgatggagagaccacatggggaggctccttgctaaggtgctagacatgtaagtgaagccttcttggcaattctatcccaagcctccatctgattagtgctgcatgtaaggtcccaagtgagatcagcggaagagtcttccagctcagccctagtcaatccagaagactgtaaggcataatataacagttttgttttaaaccagtgagataacctaaatagctccctttgcttctccctctcttactttgtttttctgcataccttttctgtgttgtcttgttgtctatttcactcatacccgaataccttccacatgacattattgcatgcatactcttatataaagcgttcctggaacaggcttttgttaacacattctcctatcattttttcctgctcttccaattccccttggctcttttaggggctgcatgtatcaggggaatgttggagataaaatacaaagagcaatctccaaggaagaacgatcattgtactcttgaacattctgtgtccctcagggaagtaattagcaacatccaacattaatttccaaggtgaattggcttgtgggagtaggagtacaacattcacaaacctgaaggggtggattttctgattagcatggcaaaagactcttaccactgtactcatatggtatcctgtctcaagtgactttctgttctccagatgtgctgacagtctaagcataggtataataacatttaaaaataccaagtatctttgtggcctgggtccttccgacttgatcatgactttccactccagagcagggcatatgcctgcttccacccaccacacatattcagtggttccttcttccttctctattccatactccccaccaccatctggtatctatccaggtttcagcccagctctgcccactgagttcccagccgtgtagtctttgataattttcttaatctctctacatctcagtttcctcataagcaaaatataraacatgagcttcatcttaaatatgaggcattgtagtgaaagacataatgcaataatggacagcaggaatattagcatcacacagagtttcacctgcttcccacatctacatggatagacctgggcacatgctgtcggctgttaggagtctcacttttgaatgaaggtaagattagtccctatgaagcattggttgtgaaaagcaaactcaataatg

SEQ ID NO: 79572 - DNA, 902 bp, Homo sapiens
ttttccagattatcctggtgaaaactatcatctggaatattggtttaaaaaaagcaaaaacaaaaacaaatcacaaggtcgtggaccccaaagccacggcatcagaatttccaagggagtgtcccaggaagctgcattcttaacaagggacctgggtgatccttatcctcaaagaactacagaaacactgcatcatatcattttatttgcatgacaattcttttatttatgtactattatgtactattaatctcacagttttatagatgcagcaactggagggcagaaaacttaaagcactagtacaaggtcacactgagccaggatttgaacccaggcagtgttatgtcagaaaccacatctttaaccaccactggattgggttgggacacactgaaattgaaagagggcagaggtccaagtagaaacagtagacagcttggccaggcatggtggctcacccctgtaatcccagcactttgggagrctgaggtgggtggatcacctgaagtcaggagttcgagaacagcctggccaacataatgaaaccctgtctctattaaaaataaaaaaaaactaggctgggcacagtggctcaagcttgggagactgaggtgggcagatcacgaggtcaagagatcgagaccatcctggccaacatggtgcaaccccatctctactaaaaatacaaaaattagctgggcatagtggcacacacctgtagtcccagcgacttaggaggctaagggaggagaatcacttgaacctgggaggcagaggttgcagtgagctgagatcgcgccactgcactccagcctggcaacagagcgagactccacctcaaaaaaagaaaagaaaaaaaatgaaacagtagacagctagacagcttttcaatggctagg

SEQ ID NO: 79573 - DNA, 647 bp, Homo sapiens
ctttctgtaaagccaggaaggagagaatatggatatgaataggtgcttgaatatgctttaaaaatctcttgaaggatatggagatgtggggctagggtttggggagaattgggtggatgtgagcagggtgagatggataattttttctctgtggatgtttagacttggatttatgaatcctgtgaatatattacctatgcagaaattaaatgaaaaataaatgatagccagaggatggaatttcagagagtgtggaaagtcttccagattaaagaggtaatgtgtgcaaaaaggagtgtgatattttcagggaacatggaaacattcagcactgaagcagagagaagaaggtatccagagcatgccttctagggctttttgatgatttctggatcattatgttgagagtaattgaagtgttccgagcaggcaaggggttccttggtcagagtttggaaggttctctctggctgtggggggctgattgcagagagatcagtcagaaacttttgcctttgtccaggtgagagctcgaccatgaggctgttacatctgggctgaagtggacatgamgatgaagtgataagatgtttcagagaaatggttggatggtaaattgattggacttagggagggtttggctaaag

SEQ ID NO: 79574 - DNA, 606 bp, Homo sapiens
agggcagagaaagaagtgagacaggaggggagagtagaaaaatgtctcaggtgacattagctttgggggtgtttgcgcaatggttctatttgagagtggccaggtctaccaagctgtctgcatgccatatgacagaagatgagatcagaggtacacacctgacgtgcagccggacaatcaggtttcctttcactgattatttgaaatttggagtcagagctctagagcctggaatttggaacaggggagaatttggaatttggggagatgtgctgaatggatatctttcccagaggattgaaggacacatgggccartggcaaagatggaaacaacagaacgtaataagttccaggattcaattgtgactcaaatcagaacatccttggatgactcctcagtcacatgagttaatgtgtgccttatttttggcttatgttggtgtaagtttggtttttgtcctttacaactaaaaaaatcctgacacatgcacccttaattacttattccctttaattgtttaaattagttcaatttgttctctactactcatattcacacaagatttaatttacagagttttccttcatagacaataagaagcaa

SEQ ID NO: 79575 - DNA, 606 bp, Homo sapiens
agggcagagaaagaagtgagacaggaggggagagtagaaaaatgtctcaggtgacattagctttgggggtgtttgcgcaatggttctatttgagagtggccaggtctaccaagctgtctgcatgccatatgacagaagatgagatcagaggtacacacctgacgtgcagccggacaatcaggtttcctttcactgattatttgaaatttggagtcagagctctagagcctggaatttggaacaggggagaatttggaatttggggagatgtgctgaatggatatctttcccagaggattgaaggacacatgggccagtggcaaagatggaaacaacagaacgtaataagttccaggattcaattgtgactcaaatcagaacatccttggatgactcctcagtcacatgagttaatgtgtgccttatttttggcttatgttggtgtaagtttggtttttgtcctttacaactaaaaaaatcctgacacatgcacccttaattacttattccctttaattgtttaaattagttcaatttgttytctactactcatattcacacaagatttaatttacagagttttccttcatagacaataagaagcaa

SEQ ID NO: 79576 - DNA, 799 bp, Homo sapiens
ttttcttgtcttttgagggaaaagggtcctcaaagaaattatagtcaggaaagttcaagatcaaaaagtaagaactgaggcaggaataagcacaatatgctatgtgagcccagaggcggggcacttagcccaagcaggcaaaccatttagagaaatctattttaaattgattsttttatttgctggattttatattgacatgttttgctttgttctcaatgtgttctgggactgcagcctattcatttattattaagagaacggtaattatttccaggagctcctgagaatacactttgcttcccctttgcctgttctctgctgaatctgatataaccttcatatctctgaggacgtctgtgtcaggagatgacagacccccatgtgctggtggcgtacaccaaagactgtgctctggaaggagggcttgcagaccaccgcttttcaaagtttaatgaaaataggagtcccctgggatcttgccaaagtgcagaatctgattctggagctctgagatgaggcctgagatttttttttttttctaataaactcccaggtgttgctgatgctgctggtctgtgaaccacattttgagtagcaaaatcatagaagatcagctacaccttctccattggtgaatgttgtagcagggctgaccagaaggttacctatatctcatttgtctgccttgctggactgtaaactcggtggagacagcatttgtttcttgcctacgactatattcccaatggcaggcacataaaaaaatctcaacaaatatttgccaaatagattcttc

SEQ ID NO: 79577 - DNA, 640 bp, Homo sapiens
aatatttattgaacaagcgagttattggagcaaataaattatgaaaaaaaaaaattctaagtaaggaaagggaaaaatcagtaaggacttaaaaatgatgaaaaaccatggagtaggaaaacttctgatacagtatacagcttttaaggaataaaaatccaaccaatcaactaacctgataaccaagtctatttttttttttttttgaggtggagtctcgctctgttgccaggctggagtgcagcggcgcgatctcggctcactgcaacctctgcccccgggttcaagtgattctcctgcctcagcctcctgagtagctggggctacaggcacacgccatcacgcccagctaatctttttgtatttttagtagagacggggtttcactatgttggccaggctggtctcgatctcttgctctcgtagtctgcccgcctcggcctcccaargtgctgggattacaggcccgagctgccaaaccaagtctattttaagaatcaaaagaatatctataaaccttggaattcatggtcataagaaactggaaacatgagctaaacagtaacctgggtcaaatttgtagctaagtaagggcaaaggccacacttaatatgatcacagatggaaccagattcatcag

SEQ ID NO: 79578 - DNA, 1254 bp, Homo sapiens
ttgcttccactggaaattttttctgcagatagaatcctgtccctccaaccccctcaccccacaaccccagtgctggtcaattaaaaaagaaagggatggagggagaatttctcccaccaaaattcttgtaacagagagcctgcttgggtgattttacgctcacaaaagagggtaaaagacagctgcctgagctaaagcgtggtgaagtgatatctcctgcattggttatattactgattcacttagtcccctagaaaagtcattttacctctctgcatctgagtttcttcatttgtaaaactaaattaatgatatctaccttgtctcacatacttggggataaaatattttctttcttcttagtaggcaaaagtttgcagaagcattctaaaaagtagcaagcaccaggagtatataaatgcaaattattattctaaagaacataaggtacatgaaaagcttaggctttacctttcacatttggaataaatgttgaattctggacaatgaaatagaaacagaagccaccctccaggcatgttttcatgtggaattaacttctggcttctttctgaaataatttgctttggcttttaaaacaattttttggtctagtgcaaaaaaattttacctaaggaaactgagcagctggaaagagcatttcagcctataagcagaacaaaaagtgttcctatttcgttaaatataattctaacagtagaaatggagaccagctaaggtcattttactgtctctctctatatcagccaagttcacacctcgctatatttaggcaaggtatgcacacccattaaagatagaaggaggcttcggctcatagcagtgaggtcattacctcagctgaggggaaaagacactaacagaaaaactgtattggtgtgttccttggaaaccaacagaacaaccaatgatcaattttatttcatccggaatagataaatgtataatctcgaatacgcactgagcaatctctaccacacataactctggtacagtcatgcctaaagcaaagcagcaaatatctttcaggtaactcactttccaggactgcctgccaygccttagccagagacaagagctacccaggtcaacagggtaaaatgttcagcagtttagtctcctgggaaatggaaaaaaaacaggttttcaacctgggaatcatcattgtatcaattaacaccagggtctagctgggaagagtcttccagcagtcttttagttgacagcttcctg

SEQ ID NO: 79579 - DNA, 509 bp, Homo sapiens
tagcaagttgtttgtttatttgcaaatggatgccgaattagagaattaagccagctgaatacagtgtttatatctcactgttattactaatacagatttgaaatacacatatatttatcatgacactaaattaatatgtttatgttgctgagtagctaattgctgacatgaaaatcccagtggttcaaaagaacatagtttggaagtttagttagttttgcaaaagaaggactgagagaagggggttgttctgcattctggtcctcactttgctgtaactgactaggtgaccttgggcttcttcattcctatttctaaaaataattagatcattttaagtcccttttcagctttgtttatgcaactcatatctctgcaaacataagtgtttactatcagtatattgtggtaggctaatatgattccttccctcaataagatgactttcctctrtggattttgtagatttggcacctttctgtgacatcctatgggggtagttgggaata

SEQ ID NO: 79580 - DNA, 601 bp, Homo sapiens
ctttgtatacttttaaatcccctgcttaaattttcaagcctggcattcatttttatttcaaaatttaaaaagcatagctgttttatgttctaattgtaagtaactccagtgtctatattcctgtgtctctatgtcttttcacctccatccttctgcttatttgaaaaattactcactgtaattatttaatgataggatattattctcttccttcagaggttatgcttgacacatgaggacactagcaattcagttactccttaatctaatttaatttaatttatttatttatttatttatttatgtattttttgagacgaagttttgctcttgtcgcccagctggagtgcaatggcacaatctcggctcactgcaacctccatctcctgggttcaagtgattctcctgcatcagcctcccaagtagctgggattacaggcacccgccaccatgcccagctaacttgtatttttagtagagayggggtttcaccatgttggccaggctggtcttgaactgctgacctcagatgatacacctgcctcggccttccaaaatgctgggattacagggatgacccactgcaaccagccctaatttt

SEQ ID NO: 79581 - DNA, 1051 bp, Homo sapiens
tgcatagacaaacatacaaattggttagagtgtaaacattcctttgtagtctgttttgttttttggctaagaaatatgtgtattattcaaaatttgtttactgaacacctattatgtcttggcagtttttaggattttgatgctacatcactgagcaaaacatttttaaaagcccattgtccatggagtttatttacatggaaatttatccaagtttgtgaatatataattactttattattattttagaaaataatcttaaccattttaagtgtatacttctgtgaatttaaatatattaacgttgttgtgaaacagatctccagtactttttcatcttataaaactgagactttatacccattaaacactctcctcttccttctttccccagtacctggtaaccctcattctactttctgtttctataaatttgactactttagatactttatataaaaggaatcatattgtgtttgtctttttgtgactggcatactaggaaatatattctttaactttagaatcttcagtgtacagcaagacagagtaggaggctgagagtttttgttgggtcaatttgcagtatttttccacagctattcttaacgttccttattgaaaagaggaagtaaaagcaaatccttccttaaattaaaaaaaaaaaaactgagaggagctaaagaagactaacttagtgtgggctcttcagaagcaacctctgaaaagaaggttactatagaagggatgaattctgaaaattctcataggtaaaatctgaagattgtaatgaaagcaggaaagagcagaggtgtttcggatcagctttagcctgatctggtggggtgttcttgtgtgtgatttcatcaacactccattatgagaacagagctcctatggtcccattttwgtgagtcatcagctagattaagacccagaaaggggagttcctatcaaagatggtactatagaaaaggatgcgagtatgagcccaaaatataagtaaatgtgaatttaataagaatgtgtatgtctgtgttaaacctagagg

SEQ ID NO: 79582 - DNA, 332 bp, Homo sapiens
agatcacgccactgcactccagcctgggtgacagagcaagactccatctcaaaaaaacaaaactcaggtgatgatcaggtgacctcatgatggaagagatgagcatccwtgtccttctgaggcaaaatcccccctgaatcccttcccaccccacccgagtcacatctagagttagtgcctgggaggttctgaggtgagaagggggtgtccaacagctgaaacctctacctcaaaatcctgggatggagggcagggaggtggcgggatacaatgttaataattataagttctacacatttcataaggatatttaaggaaaatcatgaacaatc

SEQ ID NO: 79583 - DNA, 1230 bp, Homo sapiens
gacctaattaactaagcaatttcacttctaaaaattcgtcctctgatatacttgtaggtatacacaaggatttaagattgaaaacaacctaaattgttattcatccaaacaatggaattctctggaactgtcaagatacataaggcaagttaacattcaytaatataaaacaatctcaaatatataatgttaacaaaaaaagaaaaacaatgctcagagtatttagtagtatgctatcatttatggagaaaagaagatctatagagatataatatttctggaaggatacataagaaaatggtcacagtgaagcggagttgaatggctctagctagagtcttgaggttttgcctgattcaataagtacatgccaacagaatgtctcccagcctatcagaaaagccagctggacctctcaagtgtgtatttatatgtttaaatagtgtattaatgggttgctaatcagaggaatattgggtttttaaaaaaacagtcattgaacattaactctaacttaagacagagcgacatttgggaagcacaaataattccagcaaaagacaaatgaattctgttgtggggtgatctcctgagaagttacttaaaatattagtcattctcttagacaatttattttcctttctatttttcaacgatcaccaagtaaccttgtaattattcatcctgcttcttagtttccttgacactaaaaagtggaatccttgaaaatgggtcaaaagcattctaatcacaaaaataaattgacattctgctttgaaactgcattgcatgtgattttgagtaacataagtacataaccaagaaaatgagcatctctgggtatattgaaacatccagtgtctggacctggaagtataatctcagacctcagatggacaatatttccatgactgggcccaaagccatgccccatttggtgagcttcctaactcacctttctattattaattactgttcaatctaaaacaggtgtcatcctagtcttaaataccaaccttgagtctcctaaatgccgagcttgataaaagggcttcaatgtgaagtttgaaagaaagaagaaaaaaaatttaagtctagataagactgcaagaccagataataatgagaacattatatttaacatttttaaatgtatgtagttttcaggaatttcaggaattttccagaaataacacagaatgtttttttaaaaagtgacacatttaaaca

SEQ ID NO: 79584 - DNA, 1136 bp, Homo sapiens
gtctaacaaatgtcaagtatctctgagtttctttcaaaattttaatatatcctgcggtgcccctgtgaatatacggcagaaacctgagcacctccatgaacctgagcacaattcctgaactatggttcatatttttgtattgtgtttgtttttgtctgagttttctagaaaacagatcctgaggcaaaacttacaagccaagactttatgtgaagttgtaattccaggactcaagaatgaaggaaaaagagaatcaaggctgaaaaggaggggaaagtaaattcaaggtggcgagttatgaatgactacagcatcacaaaacaacatacctgctttcttggtcaccagcacttcttccagacaggacctacatcattatatccagaaacattctgtccacaggagagagtggagattctctgccaatgtcttcttgtctcctgttgaaactggttgaagtttgtcccttagagaactaattaattcaccctcacctccaggttctgttactggctctttatggcaactgctagggaacccagatcccccagtgattggaggaacctctgaggatacagactgattgcacctgagcaccaaacttgtgagtctccttctaatgcaatctcagtggaatccagtcactgggagaggctgaggtcactggcacagttgggatatgaggcactggcaatggcaatggtggcttgggctggccactgagcaagcaaagacacaaaggtgtgagagaatagatggaagccagccattctggggacataaattgtgtcttatgtgctccaattcttcttatcattcaggtcttacttctcatgttatctcatcagagaagcctctcgctccctaaactgcccttctcagccattagctaacatagaactgtgtctgtgttaaactgttcccgtgttcaacctagagttgaagattgtcagacttatatcatggccataaaaaatatgaagctacagtgggagcttgctgaattagtatggagaaaaatattttaggttctattgataggaattgatttcaacaggcagtgtctaagctagatttaactaaaaatagaactattatattgcwaggagggaagaggtctttagattacccagtcc

SEQ ID NO: 79585 - DNA, 645 bp, Homo sapiens
ttgagccatctgttcagtgaactggcaccatctataaacttatgttgtatcaagtttatcaagaaacaacttctgcccttctrgatagaatgtattatttcatgaccctgctcaatcctagctggctacctcccaacgtggaaaatacccatttttacatgtgtctcatggcttatggggtgactagcctcaggaattaggaaagagggagaactagcaaaagcctgagcccatgcccactgcacagccaccccccaccatggagattgcctgactggctttggaagagaaccccaggtgatcctccctcaggcttcagaccagattcctctctgcccaaggcccacattgattaattgtcccatttaacaccactgcctcagtctttaaggaggaaggtggcgtgttagctcttctttcgagaaaggggcccaatttattcttgtccaggcagcataataaataacctgccccttttggcagggagtttattagagactgatgggacatttaacaataactgggggcctatgatttattaggtagggaggttcatggcatctctgaagacggaatgtggaatttaattgataaagcggctgtcagcagcaatgagatgcactcaatagaatatgcatttgaggg

SEQ ID NO: 79586 - DNA, 645 bp, Homo sapiens
ttgagccatctgttcagtgaactggcaccatctataaacttatgttgtatcaagtttatcaagaaacaacttctgcccttctggatagaatgtattatttcatgaccctgctcaatcctagctggctacctcccaacgtggaaaatacccatttttacatgtgtctcatggcttatggggtgactagcctcaggaattaggaaagagggagaactagcaaaagcctgagcccatgcccactgcacagccaccccccaccatggrgattgcctgactggctttggaagagaaccccaggtgatcctccctcaggcttcagaccagattcctctctgcccaaggcccacattgattaattgtcccatttaacaccactgcctcagtctttaaggaggaaggtggcgtgttagctcttctttcgagaaaggggcccaatttattcttgtccaggcagcataataaataacctgccccttttggcagggagtttattagagactgatgggacatttaacaataactgggggcctatgatttattaggtagggaggttcatggcatctctgaagacggaatgtggaatttaattgataaagcggctgtcagcagcaatgagatgcactcaatagaatatgcatttgaggg

SEQ ID NO: 79587 - DNA, 645 bp, Homo sapiens
ttgagccatctgttcagtgaactggcaccatctataaacttatgttgtatcaagtttatcaagaaacaacttctgcccttctggatagaatgtattatttcatgaccctgctcaatcctagctggctacctcccaacgtggaaaatacccatttttacatgtgtctcatggcttatggggtgactagcctcaggaattaggaaagagggagaactagcaaaagcctgagcccatgcccactgcacagccaccccccaccatggagattgcctgactggctttggaagagaaccccaggtgatcctccctcaggcttcagaccagattcctctctgcmcaaggcccacattgattaattgtcccatttaacaccactgcctcagtctttaaggaggaaggtggcgtgttagctcttctttcgagaaaggggcccaatttattcttgtccaggcagcataataaataacctgccccttttggcagggagtttattagagactgatgggacatttaacaataactgggggcctatgatttattaggtagggaggttcatggcatctctgaagacggaatgtggaatttaattgataaagcggctgtcagcagcaatgagatgcactcaatagaatatgcatttgaggg

SEQ ID NO: 79588 - DNA, 645 bp, Homo sapiens
ttgagccatctgttcagtgaactggcaccatctataaacttatgttgtatcaagtttatcaagaaacaacttctgcccttctggatagaatgtattatttcatgaccctgctcaatcctagctggctacctcccaacgtggaaaatacccatttttacatgtgtctcatggcttatggggtgactagcctcaggaattaggaaagagggagaactagcaaaagcctgagcccatgcccactgcacagccaccccccaccatggagattgcctgactggctttggaagagaaccccaggtgatcctccctcaggcttcagaccagattcctctctgcccaaggcccacattgattaattgtcccatttaacaccactgcctcagtctttaaggaggaaggtggcgtgttwgctcttctttcgagaaaggggcccaatttattcttgtccaggcagcataataaataacctgccccttttggcagggagtttattagagactgatgggacatttaacaataactgggggcctatgatttattaggtagggaggttcatggcatctctgaagacggaatgtggaatttaattgataaagcggctgtcagcagcaatgagatgcactcaatagaatatgcatttgaggg

SEQ ID NO: 79589 - DNA, 640 bp, Homo sapiens
aatcacatgcttgggtggcagatgcagactgttagtaatttttaaactttagagatcacggaggagaaaactgagatccaaagaagttaaattacttgtccaaagccacttgatgtgggagtggaatgaccgagaggatgtggattctggaaccagagccagttccacatgatggttccagcacacccctcacactgccctctggtgatctactgtctcctcatctcttcctcctctgcagaatggaggaatagcagcacctacctcccaaggttttggaagaataaatgagtacctgacacaaggaaagcctccaatatatgttagactaggyctatttttagtgatgaaccagaggctcatacccacaaatcttttcttccagtctttctgtgaggccacatgccctgatgaaggtccttttcagctcccaaattctatgattctaagtcagaaagattaagatgcaagttatttccaaaaccctccaggcagaaacacaaaagactatttgagggattcattattcactctctattgcctcagtcactttctatggatgatgattcatggagaataatcaacagcagagaagatctgttcaatgctaggagagaaggcagtaaagccgaaactcctt

SEQ ID NO: 79590 - DNA, 640 bp, Homo sapiens
aatcacatgcttgggtggcagatgcagactgttagtaatttttaaactttagagatcacggaggagaaaactgagatccaaagaagttaaattacttgtccaaagccacttgatgtgggagtggaatgaccgagaggatgtggattctggaaccagagccagttccacatgatggttccagcacacccctcacactgccctctggtgatctactgtctcctcatctcttcctcctctgcagaatggaggaatagcagcacctacctcccaaggttttggaagaataaatgagtacctgacacaaggaaagcctccaatatatgttagactaggtctatttttagtgatgaaccagaggctcatacccacaaatcttttcttccagtctttctgtgaggccacatgccctgatgaaggtccttttcagctcccaaattctatgattctaagtcagaaagattaagatgcaagttatttccaaaaccctccaggcagaaacacaaaagactatttgagrgattcattattcactctctattgcctcagtcactttctatggatgatgattcatggagaataatcaacagcagagaagatctgttcaatgctaggagagaaggcagtaaagccgaaactcctt

SEQ ID NO: 79591 - DNA, 687 bp, Homo sapiens
tcttaacctgatttcatccacataaagatggactcaggatgtggaaaatcttctgtgccttctttgagactcacaccaaaaggggattgcctagtggtaagggattcagtgactgctacttcccttcaccgggggcggggctgcatcagtggcacatggaacttcacagcccctggctaccctctgctacttttgagagttgagcaagctcagggagtcttccctcatgcaagttttttcatttctagatggatagggaagaaagcataatgagtaggaagactgtaagctttggggacaaaggaaattgtgtccaagcctacctttttcatttaccagctgtggaagctttgtgagacagttattgtttcagtggttagttttctaattggaaaaaggataatagtaatagccactttgcggtgtattggataatcagggataatgtttataaggcatatggcatgaatggtagctaataaggttattttgaaaataccccgaagtctctttagcacaggagtctatcaggacagcacatcctcatccattctcagtctctatcaratattcaacatggcttccaacacatttactgctttgagaataaaaaaaaaaattgaagccgaggttatttttcttttccacatgtggtttctcatagttctacatgtgtggcttcgtttt

SEQ ID NO: 79592 - DNA, 878 bp, Homo sapiens
actgtctaccccttgccagacattgtgttggctgctgggaatatagccatgaataaggcatagtcatggcactcaggaaatggtctttgggatcaggcttcagctgggatggggatagtttggaagatcatttcaacaggaggaaatcgggtgagcaaaaacataaagaggaagaagataagcaagctttttttttttttttttgagacagagtttcactcttgtttcccaggctggagtgcaatggcacgatctcggctcaccgcaacctccgcctcccgggttcaagcaattctcctgcttcagccccccgagtagctgggattacaggcacgaaccaccacgcctggctaattttgtatttttagtagagatgaggtttctccatgttagtcaggctgggcttgaactcccaacctcaggtgggttccgcccaccttggcctcccaaagtgctgggattacaggcatgagccactgcacccggccagataagcaaactttatagagcacccaggagtccactatygctggtctgaagtttgttgagtaatggaaggggaatccagaaaaggtgtttgaggtcatacttgggcagtcttgaaggacagtctgcaattaacgtgaatggcaatggagagcctttgcagggtggtagtatgcctgcagccacacaaagaccactctcagctaggaattcataatagtgcaatgtatttttactattgtagagatcatgtcttaaatatacacgatagcctgtcccagaagagatctactcaaaactttttcagggcatgagaatgtacactcagtctttgagagtgatattaagtcaattgcaataaaccagcaacttgcacttgtcatagatttagt

SEQ ID NO: 79593 - DNA, 878 bp, Homo sapiens
actgtctaccccttgccagacattgtgttggctgctgggaatatagccatgaataaggcatagtcatggcactcaggaaatggtctttgggatcaggcttcagctgggatggggatagtttggaagatcatttcaacaggaggaaatcgggtgagcaaaaacataaagaggaagaagataagcaagctttttttttttttttttgagacagagtttcactcttgtttcccaggctggagtgcaatggcacgatctcggctcaccgcaacctccgcctcccgggttcaagcaattctcctgcttcagccccccgagtagctgggattacaggcacgaaccaccacgcctggctaattttgtatttttagtagagatgaggtttctccatgttagtcaggctgggcttgaactcccaacctcaggtgggttccgcccaccttggcctcccaaagtgctgggattacaggcatgagccactgcacccggccagataagcaaactttatagagcacccaggagtccactatcgctggtctgaagtttgttgagtaatggaaggggaatccagaaaaggtgtttgaggtcatacttgggcagtcttgaaggacagtctgcaattaacgtgaatggcaatggagagcctttgcagggtggtagtatgcctkcagccacacaaagaccactctcagctaggaattcataatagtgcaatgtatttttactattgtagagatcatgtcttaaatatacacgatagcctgtcccagaagagatctactcaaaactttttcagggcatgagaatgtacactcagtctttgagagtgatattaagtcaattgcaataaaccagcaacttgcacttgtcatagatttagt

SEQ ID NO: 79594 - DNA, 878 bp, Homo sapiens
actgtctaccccttgccagacattgtgttggctgctgggaatatagccatgaataaggcatagtcatggcactcaggaaatggtctttgggatcaggcttcagctgggatggggatagtttggaagatcatttcaacaggaggaaatcgggtgagcaaaaacataaagaggaagaagataagcaagctttttttttttttttttgagacagagtttcactcttgtttcccaggctggagtgcaatggcacgatctcggctcaccgcaacctccgcctcccgggttcaagcaattctcctgcttcagccccccgagtagctgggattacaggcacgaaccaccacgcctggctaattttgtatttttagtagagatgaggtttctccatgttagtcaggctgggcttgaactcccaacctcaggtgggttccgcccaccttggcctcccaaagtgctgggattacaggcatgagccactgcacccggccagataagcaaactttatagagcacccaggagtccactatcgctggtctgaagtttgttgagtaatggaaggggaatccagaaaaggtgtttgaggtcatacttgggcagtcttgaaggacagtctgcaattaacgtgaatggcaatggagagcctttgcagggtggtagtatgcctgyagccacacaaagaccactctcagctaggaattcataatagtgcaatgtatttttactattgtagagatcatgtcttaaatatacacgatagcctgtcccagaagagatctactcaaaactttttcagggcatgagaatgtacactcagtctttgagagtgatattaagtcaattgcaataaaccagcaacttgcacttgtcatagatttagt

SEQ ID NO: 79595 - DNA, 611 bp, Homo sapiens
ggtggaaggctgcttacgtgatggcatgtggatagcgatgccatccgtttgtttttttctcctccatgacagagaagcaggaaaacattcctaaatttatttatagacgttaaaaaaaaatcaggcttggttttttcctgtaactgttcttcagccggcagcaagtatagcagcaagtatacagcagcaagtatacagcagcaagtatacagcagcaagtacagcagcagcaagtacagcagcagtactttatgagttgttgtgtttattccctgccttttggctttactcaagaaaaccagttgtgtttctcagagcaactgtattgttttatttgccactctcttcactttgtccattatagtacaatagattgtccttgtcccrtctccaaattggaagctccctaggtggtggtcaggctgttgatgagatttgtattctatcaaagctccattttagataatctatcatcattttttatacgcagtaagtcgctgattttgtttctttttttcaaacagttttgatttgaagttcctttaaaggctgttggagcttttgcaaatacccagctaatgaaaggcacttaagattgggcccatgtgcat

SEQ ID NO: 79596 - DNA, 592 bp, Homo sapiens
ttgttgttgttgttgttgttgttggatacagagtcttgctctgttgcccaggctgaagtctactggattaatcatagctcaccgcagcctccaactccagggctcagatgatcctcccacttcagcctcccaaatagctgggactacagaygcatatcaccacacctaattttgggggtgggtagggagcgaggtctcactgtgttgctcaggctggtctgaaactcctgagctcaagccattctcctgtctagacctcccagagtgctgggattacaggtgtgagctaccacttgtggcaaaagcattaattctaaggaaacaaaaagaaggaaatttttatgaaaatgtgaatacaagaaaagttaggaatattctgatactttaaagtattccaatttctttagaaatattcaggcatatattgaacatgccattgttgtcatggcagggtgaatagacagaatcacttaggaatttagtttctttttcatgagtgattattttcttgagaagcatagatcaggaatgttttccctttggccccttgtaattggtctggcaggatctggggttggggaggtggacacaa

SEQ ID NO: 79597 - DNA, 1315 bp, Homo sapiens
  misc_feature (1)...(1315): n = A,T,C or G
taaaataaacatcctgtcccacataggttgcttttgtgaaggccacttagctaacatagggaagaatcataacaaagacctgagcctttctgaaaccaatctagaagacaattgcataatagacataaaataatatacaatcatgcaccacacaacaatgtttcagttaacaatggactacatatatatatatatatrtatataatagagttcccataagattataataccatatttttactgtatctgttctatgtttagataggtntagatgctgatatgaaacaggaaaagaactaaggcccaacaactctaagaggaattcccggaagagtccaagagttccctgttttacactcagttttcatatactctttaacaatacactctcacaatatagcccttggataaagttgctttaaaaaaataagggcaactggcatcttgtttaagaaatgttcccatcacagtttgactgagcaacttggtagaaccaactcgttcatctggagttgaagggacataaatgaacagatttttaaaataattattcataagatgtcaactctcgtaacactgtttcttgattatctgccgacctgaggggctcttactacgctctcagaataatgtgtgacatgctgacatccagctggtcaatggtagtgagatattcactgagttagagagaagggtctgataagtctagccccaattctcctttgtctgtgatctggtcagacacttcatagagaatttaaaggggtatatggtgaaatatatggaaagttgggattctaagatactaaacatttatgtactaggtgataggagacaaaggataaatagtgatcctagaaacacatagattctgttgagggaactatttagacattaggtagaatgtgtagaataagagaaaatggtagtcaggcaaattacaagtccctcccctaccagcaatctagctaagtgacaccaaacaagtcagttaaactcacagagcctattttctcttcttaaaaatgaggtaataatgccttagaagacaataatgatgatgaaatgtaattatataaagtatcttgcccataaaaatattcaaaatgatattaatgataatttaaatattaaatagcatttaatttaatattaaaaattatttttctatttgaactggattagcaaatatgttttgttgaatattacattttatgtggcttgtgtgctattttaaaggtacacagtaatatcctttaagtacaaattctaattagagaaagattttgtgattctcactaggcaactacagtca

SEQ ID NO: 79598 - DNA, 650 bp, Homo sapiens
ctcccctgagtctgcctccctttccaaagtccttctgtctttcacatgcctcctcccggcagctgcccagaccacttgagtcctcccaaccctcattctctgggcatggtcctcccgccaagggcaggggagcagaggggaataccacgttggggtgggacagcaccgctgccttcaggtggcttgacacatggtcaggaacaggacgtcacacaactgtccccaaaagaggagagatggcccaggatgctgtgtagcttgagttacaacccatgtggctaatgttgggaccagcagaggcaggcctgggcctggggtgctggctgaggtttggagggcaccagtcctgccctgccttctcctcctgcttcgccagccctgctgctgcgtgggggaacaaggtaacccagggctttgacctgtgtggccttggagctattttgctgggcccaakgcccctctctgggccctccgttcctgcagcagccactcctatgctggccaggggagcaggggtgctggcaagtcccttcccatccctggcctagtttatctgctctatatctaccccctttacctgtaaagagcataaccaggccggcctgtctcccactcaggactcttatcctgacagaatgaagtgagccgca

SEQ ID NO: 79599 - DNA, 650 bp, Homo sapiens
ctcccctgagtctgcctccctttccaaagtccttctgtctttcacatgcctcctcccggcagctgcccagaccacttgagtcctcccaaccctcattctctgggcatggtcctcccgccaagggcaggggagcagaggggaataccacgttggggtgggacagcaccgctgccttcaggtggcttgacacatggtcaggaacaggacgtcacacaactgtccccaaaagaggagagatggcccaggatgctgtgtagcttgagttacaacccatgtggctaatgttgggaccagcagaggcaggcctgggcctggggtgctggctgaggtttggagggcaccagtcctgccctgccttctcctcctgcttcgccagccctgctgctgcgtgggggaacaaggtaacccagggctttgacctgtgtggccttggagctattttgctgggcccaaggcccctctctgggccctccgttcctgcagcagccactcctrtgctggccaggggagcaggggtgctggcaagtcccttcccatccctggcctagtttatctgctctatatctaccccctttacctgtaaagagcataaccaggccggcctgtctcccactcaggactcttatcctgacagaatgaagtgagccgca

SEQ ID NO: 79600 - DNA, 1036 bp, Homo sapiens
ggactacaggcatgtgccactatgcctagctaatttttaaattttttgtagagatggggtctcatctcaccatgttgttcaaggctggtcttgaactcctggcctcaagcactcctcccaccttggcctcccaaagcttacaggcataagccaccaatgcctggcctctggagattttctgacatcatgtgataagcacgtgtccaccatatcctcatcctggagctgatgaaagtactagtactgtgcaggactgagttctgagacctgcaactggagactggaggactgagccgtaactgcttccctgggaagccttttcactgattctttcaggacagtggcctagagaggtgggatggggaggtgtgttggaaggctatccttctgcagtgatgtgactcagaccagagcatagtggcaggggagtagtggaagggaaatacaggtttttattttcacccaagcactttggttttgggcagaagctgccacaaggtgtcagtaaaggctcagagaggttggctgactggtccaaggtcacacaggccttctgatgcccagacctgggcatttcctactagacccagagtgatctgctctgtctgaaattggttggcagaatcacggggcaagctcaagaaggcctgagcgaccttgctgggyggtaacataaggtaacttcctgggctcaggcctccaagggggaaggctatgtcagattacatcagtgaaatgggaggagtaggggatgagcctgggctctgcaacactgtgtgaggctgacattgatggcacagcagtgacctctccccgcccccacaccaccccaattcttcctgaatgatcgtggcgtaactactactcacacttatctgcataccttccttcaacccccagaggaagccacttcatcagtcagtcagataaagaggccaggtcctttctgctggggttttgaggctggtcctatttaatctccttttcttcaaaggcaaggaaaggccttggcaggcttgggaccctctgatgctcc

SEQ ID NO: 79601 - DNA, 701 bp, Homo sapiens
tttttccttttaatcttgtatatagtcccacaggagataagaaagttgactcacagaaggtagaaatatattacctaagcaaatctagaacctaaaaatagtgtgcattctaacaatagattgtagcagatggttcaacaataataaccaactctccctcttctcaccttctcatgataagaaatgacacacaaactgtctttaaaattgcttatcatcaataaggggaaaatgaatcagagaaaaagagacaatcagtgttttcaagagacacttttcacatgtcagttctggctacttagagggctgagattgtggtaactggcaaaaaaaaaatttttttaatcttaactgcttaaatggttagcagtgcagaagtatatttaaaacagccagatttaaagtcattgcagatttggggtatttgtgatcaagatcttaccatgtatccactgttggtgctatacatgttggtgtgctttttatctgctgtttcttttattcattgattgattgtttgacttttagcrgttttaaacaatagacattaattatcttgaagtttctatggctcaggaatctggatacagattagctggatgcctctggctcagggtctttctcaaggccatcattaaggtgttggctagggctgcccaagcaaggaattctaattttaatagagaaagcaatagccggga

SEQ ID NO: 79602 - DNA, 562 bp, Homo sapiens
tttatttgatgtctattaattagacagagggtcttttgagaatctggtaaaagctatggccccttattccagaaaaagacagatgcaatcatattcacaattttgtcccatgctcatagagggtttcctgacaacttgatgtctttctgtggaccacccaactaaccaaagacccaaagttaagaactactgtcccaaaacaaagcaaacaattatggtaaggtcaggagacatgtcaatgtttttgctttgtaggaactctttattttcttattaagttaaatccattggtggaataaaaakaatattttatggattttttaaaatttatggagctaaatttacaaaggtgtttagaggtggaaaacacatgatggtacattttaacacagaaaatggggaagacacggtgaaatgtcatcctttagccatttatttcctaaaaggcctcaaaagatcatgtttccatgtgtttaacaatctgctaaaataacaacaagcctcccactcataagtgctgccatcagccccactcttagtataccaattccaggatgtcatc

SEQ ID NO: 79603 - DNA, 788 bp, Homo sapiens
cttctcaggcctaaaaatgctatgggctacatttaaggcaagaggaaatgaatataatcccacacaaattttctaatagcccttctcttagccttgttacatgacctcttaagaatactcattctttttcatttcaacgtatgtttccaaaattaattcattaaatatgaattgccatccatcagacttttataatactataccaagagtgaaaatgttgatcttcatattttgaccttttttcatgttaattcttgattccagaggaagagcctttttttgatgatgttaattgcattaaaacaagtttgatgtgagtgtatatatgttcaatcacatatgtattgaggatctgtgacttgtaggaagaatattatacacatcatttcattcaattttcacaacactttgaaatagatactttgttcctacttaagggatgggagaaatgaggtacmaagtccctctgttagtaggtggtggagcttggattacaggacacttggattactctctttctactatgcactcttataagatgggcttgttctagtggaaatttacatatctcatatagacacagcaaaaaatattatgtgtgaagtgcagtgctacttgatggcgagaagtagaaaatagttgacttctatccattatttccaaagccgatgtgtagctgaattcaaaatccattactggcatggtatattcactgtcagatgggaagatattggccattagtaaggataaataatttacctgagattcccttgagcactcaaggtcag

SEQ ID NO: 79604 - DNA, 735 bp, Homo sapiens
ggtggcataagaatcacttgaaccctggaggtagaggttgccatgagccaagatcgtgcctttgcactccagcctgggtgacagagctagaccctgtctcaaaaaaaaaaaaagtaaaataatgcaacagaaagcttgataaactaataaaaacagagcaaaaaatgaaagaggaaattcactatccagacatttaaaaattctacaaatgaataagaaaaacacaacccactatatcaatggacaaaaaaacaggcttttgaaacagtatcggctgggcgtggtggctcacgcctgtaattccaacactttgggaggctgaggtgggtggatcacgaggtcaggagatcgagaccatcctggctaacatggtgaaaacccrtctctactaaaaatacaaaaaattagccaggcgtggtggtgggcgcctgtagtcccagctactcgggaggctgaggcaggagaatggcaggaacccaggagacggagcttgcagtgagtgggcaacagagcaagactccgtctcaaaaaaaaaaaaaaaaaagggtatccacatggttcatacacatgaagtgatgctcagtagtctcattggttatcagggaactgtaaattacttcttcaaagaaatactggctgggcacagtggctcacacctgtaatcccagcacttcgggaggccgaggtgggtaaatcacaaggtcgggagttcgagaccagcctggccaacacagt

SEQ ID NO: 79605 - DNA, 700 bp, Homo sapiens
cctagtgccactctgagaaactgaaatttaaattgacattggctaaatcagaagatgaatatcaagggagagaacattccaggtggagggaattgtaacagaacattcccaagatgttaaaaagctctgtctctttgggagtacaaggcctcacttaaggccaatctggctgaacagctatcccattctttacacaaycagaggaggaggttaggcatatggctattcttccataaccacctgccaggtggcatattgccatggaagcaagcttcggaccaaattccactagatgcccacacatttatcagtgagcctacagaaagaccgtcctaccacctgctctgtcctttggcgcaccccgcaagtaccttgcctgaaatgtgaactttgaggtaaaggcaaaaatattccaacaccaagatttattatcagggtcctctgcttagcaaaggcacgcaaggccaaatggagtcgtaggctaaggaggcaactcagaaagtcctggattgctgggcttgccaggttcttgtactttatttatgcaaaggcggaggggttacacaacctttcagctatatatcttttatttcatcaatgaaaagttatttgtaacatcacttatactaattaatataccttctaaagcatattcagaaattgatatttaaagtacatgctgaggccatttctgaagcat

SEQ ID NO: 79606 - DNA, 687 bp, Homo sapiens
ggatcctcagcactcaatcttaggtatagaaaggaggaggaggagcaaaggaaatttcagaaaagacatatcagagcttggaggaaaagacatcaaaggccaagaaaacagcaaaagcaaaggcacaaagaaggggatagcaccaaaatgaaggagctgattagcagtgtaaacatgagtaaagtcctaggagaacaaagaccattgtgagaaaagctattaaatcctagggctcataagaattctaatttcttctctacaatagtactattcacccccttttttcttcctcaaatcccataaggaataaggcagatgccaaaggagacacatcctggtggtgattcgatgattattaataaagggagggaggggctattagaatagggagggaaagagcacaatccgaagtcttccccagttgactctgaagcactttctccatgcctataatcactgctctaagagcagcaatactataytctgctcacatgacctctgggcagtttactctctcaagtctatgttggacatgttaggtccacagtggttgagattagttgtgtcctagctaagacctctttgcaagttgtttcaccatcaaaattatgtttcaactattttcattcctccctatctcaaatctcctaaccacccaaagaaactcacacaaatccaaaccacttt

SEQ ID NO: 79607 - DNA, 687 bp, Homo sapiens
ggatcctcagcactcaatcttaggtatagaaaggaggaggaggagcaaaggaaatttcagaaaagacatatcagagcttggaggaaaagacatcaaaggccaagaaaacagcaaaagcaaaggcacaaagaaggggatagcaccaaaatgaaggagctgattagcagtgtaaacatgagtaaagtcctaggagaacaaagaccattgtgagaaaagctattaaatcctagggctcataagaattctaatttcttctctacaatagtactattcacccccttttttcttcctcaaatcccataaggaataaggcagatgccaaaggagacacatcctggtggtgattcgatgattattaataaagggagggaggggctattagaatagggagggaaagagcacaatccgaagtcttccccagttgactctgaagcactttctccatgcctataatcactgctctaagagcagcaatactatattctgctcacatgacctctgggcagtttactctctcaagtctatgttggrcatgttaggtccacagtggttgagattagttgtgtcctagctaagacctctttgcaagttgtttcaccatcaaaattatgtttcaactattttcattcctccctatctcaaatctcctaaccacccaaagaaactcacacaaatccaaaccacttt

SEQ ID NO: 79608 - DNA, 541 bp, Homo sapiens
tcaatcayctcttcctggaatgttccataatgtcattactggtggctctgtctttggtctctgtccctcaaaaccatcttgctacggccatgctttaaacgtttttcatgcctgcaatggactcctgagaagttttttaaccgtttgtagcctccaacctccaggggcttggagttggtaggtaggaaggtgttttctctacccatcctgttccccattggcacctccaaaccacttcatctccttcctccttcaaaacttcctactcttctgaagattattccatctgaccacattagccaatattactccttttgactgtcatctggctagccagttaccctggtttgctgaaattctagcacccagcttgccatcttcctctctaccacaacttctatcataatcttggcaatttcaatatccacattaaaaagttacttccatactttttgtttttttagagcagggtctcactgcattgccagggtggagtgccatggctattcataggtgcactcacagtgcatggaaactccag

SEQ ID NO: 79609 - DNA, 541 bp, Homo sapiens
tcaatcacctcttcctggaatgttccataatgtcattactggtggctctgtctttggtctctgtccctcaaaaccatcttgctacggccatgctttaaacgtttttcatgcctgcaatggactcctgagaagttttttaaccgtttgtagcctccaacctccaggggcttggagttggtaggtaggaaggtgttttctctacccatcctgttccccattggcacctccaaaccacttcatctccttcctccttcaaaayttcctactcttctgaagattattccatctgaccacattagccaatattactccttttgactgtcatctggctagccagttaccctggtttgctgaaattctagcacccagcttgccatcttcctctctaccacaacttctatcataatcttggcaatttcaatatccacattaaaaagttacttccatactttttgtttttttagagcagggtctcactgcattgccagggtggagtgccatggctattcataggtgcactcacagtgcatggaaactccag

SEQ ID NO: 79610 - DNA, 1206 bp, Homo sapiens
tcatccctcagttcaagagagttatccccatgggcagcctggaccaatgtggggcaggagctgagcacatcagagctgtatcccyacccgacctcttaaaggatctctagtggctcagagccctacagagtttatcagcatcttccaccccaccagattgactttgcgtcctttcttgtctaacacttccctttccgccacttctattccttcaataacttcctaaaataaatggctacacacaagctcttgtctcaagcttggttttgtagagcaactcaagctacaatagcctcctaatttttcccagctatcccttttaatcttctagagtctgttctacagcagccagagtaggttttctagaatataaatcatactatgccattctcctgatcaaaaacttctaattgtttccatcacacacagaataaaatccaaagtactttcaatgactcctgaggctcaccatgatctggctactggccattctctgatcctatcatggtttgctccataccacttaccatcaggtgacatgatattgtatgtttgtttatctgtttatggactatctcctctactgaaatggaagctctgtgacagcagaaacttgtctatcttatttactagtatatccccattgcctagctcaatgcctatcactaggtaggcatcaaaaaatatttgtcaaataaatgatgggacatgtgattttcattatgcacatggttataatgctataactaacatatcagacaaaggggaaaaaacttgctctcagcttttttgagtggctttgtgatatgtttatccaacaatgggtgataaatgtgataaaaacgactaaaaagctttgtgccaatgatagtcttgggaggatagggaaaaaaaggccattcctcttcatcaaaagcaagatgtaatcaaggctggatttgcccagggatatttagctttatatctatagacttaaagctatgaaaacaccagtattattgaaatgcctgcaggcaaaattattattgtgatttgaaatggcccagcctcaaatcccctatttactctttgaaataattatttttaaagtgatttatataaaaagacttctcaggaatgcaagtataacactatagcacagattatactcctgcctcaatgaatgagagaaaatctgaatctaatctacaagaaaatttttcttga

SEQ ID NO: 79611 - DNA, 678 bp, Homo sapiens
agttctcagggcagggaaagtgtctgtccagctctggaaaatcattctgaaaaccctgtgcagtcatcagcaggaaagggagaagtgttatgtgaagtcttccgtgtaactcctaggagcctctcctcatggtgccacatccttgcctctggcatgttcctgagagctgagtttgggttggacacctcctctctttctccttccccacagctttgaragcccagccaagtccttagctgggctcactaactaggctcagaacaaaagactgatctgtcccataagtcagcactccaactggttcaactagactatcaacccttcacgggaatcaattgcttctcagcaatggcaggtgattggcaggtgctgggggaggaagaagggagtggggagaggttgtgcggagctgcagggagtggcaccagtgtggccagggtctgcaggaggtcactagctctgctcttcacaacccttaaccttttgaaatgacagatacaaaattacttgctggatttgaatttattcctttgccttcaacactggagttttcctgatgagatgagggttgacacaagttttccagacttctaatctctgaacactctgaaaaaataaaacctctctgactctttggagaataggtcctagtaagtttcaaagggctacatccctgtc

SEQ ID NO: 79612 - DNA, 571 bp, Homo sapiens
acatatcttctttgtacctacctggaatggaaagccctgtcttytgttaatgcctctcttgtgtgtgtgtgtgtgtgtgtgtgtgtgtgtgtgtgtgtgtatgtgtgcgtgtgtgtgtgtgtgtgtgtgtgtgttcatgtgtgtgcttcagggggcaggggtgtcttccctcatcgggtaaggttttcgcggtgccatcacacaaagaccctctgctctgaccagttaatgagcctgtgatggagcattatctagttggttaaaatatggtatatatgtatatatgtgtgtgtttatttatacatacgtgtgttttgttaaaatgaattataagtgaggttctgtgagagtgcagaccagtgggtccctacccagggcctccccaagaccccagcatgcaccatgtctctccatcatatttgaatgtgggaattttattcttagggcatcttctggaaaagttgataagctaggagtgccaaaatgatggtttcttggttatggtattatgtatgatttatacttttttttgcttatctgcactgaatatatattctacaatgacaatctg

SEQ ID NO: 79613 - DNA, 571 bp, Homo sapiens
acatatcttctttgtacctacctggaatggaaagccctgtcttctgttaatgcctctcttgtgtgtgtgtgtgtgtgtgtgtgtgtgtgtgtgtgtgtgtrtgtgtgcgtgtgtgtgtgtgtgtgtgtgtgtgttcatgtgtgtgcttcagggggcaggggtgtcttccctcatcgggtaaggttttcgcggtgccatcacacaaagaccctctgctctgaccagttaatgagcctgtgatggagcattatctagttggttaaaatatggtatatatgtatatatgtgtgtgtttatttatacatacgtgtgttttgttaaaatgaattataagtgaggttctgtgagagtgcagaccagtgggtccctacccagggcctccccaagaccccagcatgcaccatgtctctccatcatatttgaatgtgggaattttattcttagggcatcttctggaaaagttgataagctaggagtgccaaaatgatggtttcttggttatggtattatgtatgatttatacttttttttgcttatctgcactgaatatatattctacaatgacaatctg

SEQ ID NO: 79614 - DNA, 571 bp, Homo sapiens
acatatcttctttgtacctacctggaatggaaagccctgtcttctgttaatgcctctcttgtgtgtgtgtgtgtgtgtgtgtgtgtgtgtgtgtgtgtgtatrtgtgcgtgtgtgtgtgtgtgtgtgtgtgtgttcatgtgtgtgcttcagggggcaggggtgtcttccctcatcgggtaaggttttcgcggtgccatcacacaaagaccctctgctctgaccagttaatgagcctgtgatggagcattatctagttggttaaaatatggtatatatgtatatatgtgtgtgtttatttatacatacgtgtgttttgttaaaatgaattataagtgaggttctgtgagagtgcagaccagtgggtccctacccagggcctccccaagaccccagcatgcaccatgtctctccatcatatttgaatgtgggaattttattcttagggcatcttctggaaaagttgataagctaggagtgccaaaatgatggtttcttggttatggtattatgtatgatttatacttttttttgcttatctgcactgaatatatattctacaatgacaatctg

SEQ ID NO: 79615 - DNA, 571 bp, Homo sapiens
acatatcttctttgtacctacctggaatggaaagccctgtcttctgttaatgcctctcttgtgtgtgtgtgtgtgtgtgtgtgtgtgtgtgtgtgtgtgtatgtgtgygtgtgtgtgtgtgtgtgtgtgtgtgttcatgtgtgtgcttcagggggcaggggtgtcttccctcatcgggtaaggttttcgcggtgccatcacacaaagaccctctgctctgaccagttaatgagcctgtgatggagcattatctagttggttaaaatatggtatatatgtatatatgtgtgtgtttatttatacatacgtgtgttttgttaaaatgaattataagtgaggttctgtgagagtgcagaccagtgggtccctacccagggcctccccaagaccccagcatgcaccatgtctctccatcatatttgaatgtgggaattttattcttagggcatcttctggaaaagttgataagctaggagtgccaaaatgatggtttcttggttatggtattatgtatgatttatacttttttttgcttatctgcactgaatatatattctacaatgacaatctg

SEQ ID NO: 79616 - DNA, 571 bp, Homo sapiens
acatatcttctttgtacctacctggaatggaaagccctgtcttctgttaatgcctctcttgtgtgtgtgtgtgtgtgtgtgtgtgtgtgtgtgtgtgtgtatgtgtgcgygtgtgtgtgtgtgtgtgtgtgtgttcatgtgtgtgcttcagggggcaggggtgtcttccctcatcgggtaaggttttcgcggtgccatcacacaaagaccctctgctctgaccagttaatgagcctgtgatggagcattatctagttggttaaaatatggtatatatgtatatatgtgtgtgtttatttatacatacgtgtgttttgttaaaatgaattataagtgaggttctgtgagagtgcagaccagtgggtccctacccagggcctccccaagaccccagcatgcaccatgtctctccatcatatttgaatgtgggaattttattcttagggcatcttctggaaaagttgataagctaggagtgccaaaatgatggtttcttggttatggtattatgtatgatttatacttttttttgcttatctgcactgaatatatattctacaatgacaatctg

SEQ ID NO: 79617 - DNA, 930 bp, Homo sapiens
aaaaatccttaggaggaggaggagcaggaggagaaggagaaggaggagaaggaagctgaaataaccattcttggttatatatggatttacatttcttcttcattagggttgtttattgcagcatttctgccatttttccctatcagtttcttcttatccagagaccctggagtctttgcccaggggccactgcctggtgatgaaagtcatattgttcagcttccataaacaacatccactctcatgattagctttggaaaatcagctgaatcttagcctttagcttcacagtgtatgtatgtctgtctgtctatttaatttttacaaaaagctgggaaaatcaaatacttaaaaataacaattgagtaatttcaacaaaagattgtaatcagatcaggctcttggggaatgcagaatcaggacctctccctactcttctcaccactagttgttgccatgctatcttatactttaagtgtctgagtatttaaatctacccactaagcatatttctttgtttccataaaatgaaatgagcagatttatggacagatgtaygagtttgtctcagggtctagaaatctttttttctttctctcttccacctaggtccaagtctataatttaagttttaaactttctaaataaaaagttgattttaaatttagcattagcagaaggtcagcagcaatcagcagtgttggcttgatgctgggggagaggtaaaggggaaggtggcgttggtgtgacaaaagtggtgaagggatggggtgggaagccatgtgggtgagaggaaggtaaggagggaggaagcctgtgccttcagttggcaagatcttctgttcttaaaacatcactttgagttattgaatgtgttagtccattcaggcttccataccagaataccatagactgtcttacaaacaacag

SEQ ID NO: 79618 - DNA, 930 bp, Homo sapiens
aaaaatccttaggaggaggaggagcaggaggagaaggagaaggaggagaaggaagctgaaataaccattcttggttatatatggatttacatttcttcttcattagggttgtttattgcagcatttctgccatttttccctatcagtttcttcttatccagagaccctggagtctttgcccaggggccactgcctggtgatgaaagtcatattgttcagcttccataaacaacatccactctcatgattagctttggaaaatcagctgaatcttagcctttagcttcacagtgtatgtatgtctgtctgtctatttaatttttacaaaaagctgggaaaatcaaatacttaaaaataacaattgagtaatttcaacaaaagattgtaatcagatcaggctcttggggaatgcagaatcaggacctctccctactcttctcaccactagttgttgccatgctatcttatactttaagtgtctgagtatttaaatctacccactaagcatatttctttgtttccataaaatgaaatgagcagatttatggacagatgtatgagtttgtctcagggtctagaaatctttttttctttctctcttccacctaggtccaagtctataatttaagttttaaactttctaaataaaaagttgattttaaatttagcattagcagaaggtcagcagcaatyagcagtgttggcttgatgctgggggagaggtaaaggggaaggtggcgttggtgtgacaaaagtggtgaagggatggggtgggaagccatgtgggtgagaggaaggtaaggagggaggaagcctgtgccttcagttggcaagatcttctgttcttaaaacatcactttgagttattgaatgtgttagtccattcaggcttccataccagaataccatagactgtcttacaaacaacag

SEQ ID NO: 79619 - DNA, 930 bp, Homo sapiens
aaaaatccttaggaggaggaggagcaggaggagaaggagaaggaggagaaggaagctgaaataaccattcttggttatatatggatttacatttcttcttcattagggttgtttattgcagcatttctgccatttttccctatcagtttcttcttatccagagaccctggagtctttgcccaggggccactgcctggtgatgaaagtcatattgttcagcttccataaacaacatccactctcatgattagctttggaaaatcagctgaatcttagcctttagcttcacagtgtatgtatgtctgtctgtctatttaatttttacaaaaagctgggaaaatcaaatacttaaaaataacaattgagtaatttcaacaaaagattgtaatcagatcaggctcttggggaatgcagaatcaggacctctccctactcttctcaccactagttgttgccatgctatcttatactttaagtgtctgagtatttaaatctacccactaagcatatttctttgtttccataaaatgaaatgagcagatttatggacagatgtatgagtttgtctcagggtctagaaatctttttttctttctctcttccacctaggtccaagtctataatttaagttttaaactttctaaataaaaagttgattttaaatttagcattagcagaaggtcagcagcaatcrgcagtgttggcttgatgctgggggagaggtaaaggggaaggtggcgttggtgtgacaaaagtggtgaagggatggggtgggaagccatgtgggtgagaggaaggtaaggagggaggaagcctgtgccttcagttggcaagatcttctgttcttaaaacatcactttgagttattgaatgtgttagtccattcaggcttccataccagaataccatagactgtcttacaaacaacag

SEQ ID NO: 79620 - DNA, 722 bp, Homo sapiens
cacacatttaagaagtacattggtttggtcaaggaaggtgaagtgtggggagggcgggggcgtgggtggtggcgagggtccaggttataggtagatttaaaaattttctgactggctattggttaagtttatgtaaagacctgcgatcaatagaaaggaaatgtctgagttaagataaggaattatggaggtcaaagttcttattatgaagatgaaggcttcaggtagtaggctttagagagaatagattataagtgtttcttatcagacttatggtctgtgtcgattttaatgctggagagtataatgaggcaggtccaacccccactccctgtcatggcctgaaccagtctctcaggttaaattttaagagggccctggcctaggaagaattctattcagataactggggaaccttagagttttatttttggtttacattccacactcaattttactgaaaaaaaaaaaragacatcaaatgataaggtcattgtattgacactgaataggtctaatttctttcattgctggtttgttgtgcctgtggaataagaaagtgggtctgagattgtgtttggcggcgttggtgtcaggcgctgggcagtgatgtcccacctgggcctggagacactgagcatcccagggagagggagtaggagaggctgaacagaggtcctgagcagaagatgggctggcctctgtgctgaggcatggacacg

SEQ ID NO: 79621 - DNA, 722 bp, Homo sapiens
cacacatttaagaagtacattggtttggtcaaggaaggtgaagtgtggggagggcgggggcgtgggtggtggcgagggtccaggttataggtagatttaaaaattttctgactggctattggttaagtttatgtaaagacctgcgatcaatagaaaggaaatgtctgagttaagataaggaattatggaggtcaaagttcttattatgaagatgaaggcttcaggtagtaggctttagagagaatagattataagtgtttcttatcagacttatggtctgtgtcgattttaatgctggagagtataatgaggcaggtccaacccccactccctgtcatggcctgaaccagtctctcaggttaaattttaagagggccctggcctaggaagaattctattcagataactggggaaccttagagttttatttttggtttacattccacactcaattttactgaaaaaaaaaaagagacatcaaatgataaggtcattgtrttgacactgaataggtctaatttctttcattgctggtttgttgtgcctgtggaataagaaagtgggtctgagattgtgtttggcggcgttggtgtcaggcgctgggcagtgatgtcccacctgggcctggagacactgagcatcccagggagagggagtaggagaggctgaacagaggtcctgagcagaagatgggctggcctctgtgctgaggcatggacacg

SEQ ID NO: 79622 - DNA, 888 bp, Homo sapiens
cagacttaggacatctttcaccaattagcaaaagtaygccacatccgtctgtaaagactgagagaggtacctcattcttcagatgcccagtttttaacaaaagattacaaggcacacaaaggtacagaaaaacatcaaccatttgcaaaacaaaataagttttcagaaactgtctttgaagaaacacacacatcaggcttcctagataaaaaaagtaaaacaacactgaaatatgctaaaagagttaaagaaaaacacagatgaacaactaaagaaaataagaaaagcaatatacaaatatacattaaaatgataagaaattaaccaaaattatcaaaaaagaagcaaacagaaattctagagctgaaaaatatggtaaccaaattggaaaatatactagagctgttcgacagcagattcaaagagtgagaagaaagaaccgataaacttgaagacaggtcgtttaaattacgagtctgaggaacaacagaaacaataaataaagtaaaaggagctcagggacttataaggcgctgacaagtgaaccaatacatgcattgtggaagtctcagagaggagagatactgagagagaaagacagagattatttttataaaataataatggttgaaaacttcccaagaaatccttgaatctacaaattcaggaagcttgacgagtccaaatagaatcaccctaagagacccgtactgagtcatattatagttaaactgcctaaaaccaagtaaaatagacagtcttgaaaggagcaagaggaaagtgacttgccatgtaagagggattcccaagtagactatcggggaatttctcagtagaaactttacagaccagaagacagtcagaggacatacttagaatgctgagaaa

SEQ ID NO: 79623 - DNA, 888 bp, Homo sapiens
cagacttaggacatctttcaccaattagcaaaagtacgccacatccgtctgtaaagactgagagaggtacctcattcttcagatgcccagtttttaacaaaagattacaaggcacacaaaggtacagaaaaacatcaaccatttgcaaaacaaaataagttttcagaaactgtctttgaagaaacacacacatcaggcttyctagataaaaaaagtaaaacaacactgaaatatgctaaaagagttaaagaaaaacacagatgaacaactaaagaaaataagaaaagcaatatacaaatatacattaaaatgataagaaattaaccaaaattatcaaaaaagaagcaaacagaaattctagagctgaaaaatatggtaaccaaattggaaaatatactagagctgttcgacagcagattcaaagagtgagaagaaagaaccgataaacttgaagacaggtcgtttaaattacgagtctgaggaacaacagaaacaataaataaagtaaaaggagctcagggacttataaggcgctgacaagtgaaccaatacatgcattgtggaagtctcagagaggagagatactgagagagaaagacagagattatttttataaaataataatggttgaaaacttcccaagaaatccttgaatctacaaattcaggaagcttgacgagtccaaatagaatcaccctaagagacccgtactgagtcatattatagttaaactgcctaaaaccaagtaaaatagacagtcttgaaaggagcaagaggaaagtgacttgccatgtaagagggattcccaagtagactatcggggaatttctcagtagaaactttacagaccagaagacagtcagaggacatacttagaatgctgagaaa

SEQ ID NO: 79624 - DNA, 728 bp, Homo sapiens
caggtgattcacgagcacattaggatttgagaaaaactgtattctctggaacttctaccaacaatgaggaagaagaagaagaaagaaactgaacatgaactgcccaatagtgtcaagtgtctggaatcaattctgcagagactttagggtttaatattctgctaaggactcccgagttagcaaatctctcacccactgacattaacatgtttttgctataagatattttttgggggagggggagggatagaagctgtcccttgagaagtccrtgtttaaatgtaaccaccagcaggtgagacaacaatacattccaccagtagccattaccttcttcaggcaaattgattgctcagtagtggaaattgaacaactgaggcttcatttgaaattgtaaggtctgggacatcagggactgtgactgtacctggtacaggatacatacacacacgaacccatatacacaatccgttttgaattagacttttttcaggaaaaggtccaaagcatgagatgcttctgtttggaaataaaataattttttttcataaaattgtggtaacatttaaataacataatggtggaaaaatgctcaatgacagtaatttttcttatttgacattgaatttatgatatgaatagagagacattatgggtccttaaaaactcaattatataaaacaatgtaaatcagaattcaatatcaattcagtgcaggcacaaaaatg

SEQ ID NO: 79625 - DNA, 1003 bp, Homo sapiens
atttatggaggaattttttatacaccttcgctaacctgctttatagcttacctcttaatttccatatctatttgagttggaaaatcacatattctttctgtaggtacactttccaagtaaagcagcagtcagacaccaatgccaacatacttgtttttaatattttccagttcttaagaaaaaggtgttgttatttatgtactggtcacctgtcttgatatatttgaattcaaatacatagtataatttttttctcttatacaagtctatctgtatgttttcttttccattgatttattagaataaaaatactttaccaggatagaaattgcttattttggctgggcacagtggctcatgcctgtaatcccagcactttggtaggccgagatgggcggatcacaaggtcaggagtttgagaccagcctggccaatatggtgaaacctcatctctgttaaaaacacaaaaattagctgggcgtggtggcaagcgcctgtagccccagctccttgggaggctgaaaacggaagaatcgcttgaacccgagaggtggagattgcagtgagctgagatcacaccactgcactccagcctgggtgacagagcaagactacgtcttgataataataataakaagaagaagaagaagagaagtagaagaagaaattgcttcttttatgcctgtaagtaattaactactatttgtaaagatattaaagtgtttataattatataactatattatacttatttttattaaaacatcttacaaagtgaaataaaaatagacatcactgaatcacaggttctagatttaaatagactaaaatgtctccagttatttccttcctatacatcattttgaaataaagtacactaatattttacagacagtccttggatgggccatatagttgccagacatcttctttcctccattcatccaatcaagtattttattttaaggataatgctctatcactgaatattgttgtgtgagac

SEQ ID NO: 79626 - DNA, 1348 bp, Homo sapiens
aaccatagccccctgccctcctgccccctccctctcccccgccaggcccacccctaaatgacaagtcccagtgctgcctagcaggctggcccgagcctgcgctgggaaatgcagcaggctggggcaagtatttttgggtgagagatggctttgaaaacagtttgaaaaacaaaagaaaaagcgtagaaataaactttatgccagcctgcctggtcctaaggcctcagaagctgtgggtgctgcctcctggtggtaaggcctacaaactgcacctctgggacccttcccccaggcttgattttcagacaaggctagagaatgagcttttttttttttttttttttttttgacaaaagcttgtgactaggcccctttgttcccaggaaacagcagacagtgagccgcagggcagggcctctccatgccgtgaattcccgcttgtcctttctcacataatctcaagtgaggcttatttacagctccttgtctgccttccaccggggtggcactggagtgcctccctggctattctcaccccacatctcttggagatcgttccctcttaggacacatggccttgcctcattggctggagtgactgcgtggtattccgtctcatgagtgtgtcatgatgcatttaacccttcatcccctgtggatggaaggttaggctggatcccgtcttttgcaacctgaacaatgttggagagataccatttgtgtgctgggggagacgcagccctagaagtgaagctgatgcagcaaggggagccagggaggcacattgtaaatggtggcgggtggttccaaatggctctcgagagtacactccaccacgaatatgtgaggtgcctgtgctccccccgcccccgacgtgacaggtagaaactgatatttttcctagttctaatttgcattgattttcttaggctagggattttgaatgacgtgtgtatcctaagggccaggcaggagctatgtttcatttcccacagaaagcctcagatcactggcctgggcagagaggaatgagaagctggggcaccttcttcatgtcctcaagagcagcaagtctctgttctggtcattcaaactcagtgccctaaaaatgaccattatgtgaccttgcatggctctstggggtggcggggctcagctgggtgggtcttctgctgctcttgcttggggtctcttgagaagatggtcctggggatgaagccattggaggcttggctctgatgctgtgatggtcaggcctcgcttctcctccaggtgatctcagggcctgtccctctccatggggcctctccacctggacgacttgagtggtgctcaaagctcccaaggg

SEQ ID NO: 79627 - DNA, 577 bp, Homo sapiens
tattggagctggtgcctcagactcccatggctccgcttcccagcttcttcctcagacctgactctggtcttaggaacatgrcatccttagagctgccacttagccctatggtggttttgtatctcttcctgtgggcagatagccctgtgccagagttcacagataagcaagtgagtgctgactggccccctcagttgggacatttgtgcagtgctcaagctgtacaaccacacatggtgtcctgatgctcaagatcctgccccattctctgcttagactaggggcaccttgaaggcaaagatgctcatactcatcacatcatagtggccaggaacaggatcagccagtgggacaaatggatggcctcatgcccatgtcctccagcccagctgctaaagtcagagaaaaggaatccaggggtgacagtgcttggcctgtctggcagtgccaaggctaaacctgtttcagtctgaagctctccctagcttggcttagagcacattgactaccctatgtctgccctccagtaggacccaatcttggcaaagtgtctgaggctggagtggggagtgggacc

SEQ ID NO: 79628 - DNA, 1498 bp, Homo sapiens
agaaaatatttgaatttactgacaacatgataacagattttctctattgaaagcactatttataggagaaatatcctttgtacagagtaatgcatagctctctggtagtcttacagaaggtagcctgttgacactgatttctctgagttgaagggaaagctcaatctaacctggaggagagtatataattgctaaaagaaattcgaagattaaccaaataatttggtattcatgtgcatttacataattaatataattacacatctaatagacatagactgattatagaaaacatgttgggacttatatatggaagaaagtaactcatgggtttgagattctaaaaatagatattttgtattcaaaacacactccttgtatttacccttattattattattttttttttttttgagatggagtctcgctctgtcaccaggctggagtgcagaggcacgatctcagctcactgcaacctccgcctcctgggttcaagcgattctcctgcctcagcctcccaagtagctgggattacaggcacacgccaccatacccaggtaatttttgtatttttagtacagacagggtttcgtcatgttggccaggatggtcttgatctcctgacctcgtgatccacccgcctcagcctcccaaaatgctgggattacaggcatgagcccccacgcccaaccctgtattctaagaacgtaatgatacagcttaccttcttgctccaagatctaatttttaaaacaaggtcttaatacatgtttaggtataatatgtgtttctgatcattacaaccctttccaactattctcaagaacttaagtattttctaattgtgcaacaaaaatcatgcatcataagtagaatattacaaattgyacttcatattagttttctttattatttactgagttaatattcaccatattaataaaaagatataataattttctttaagaatgaaaatggatctcatatagccctctgtgattcaacattgactagcatttgtcatgataaattcctttcactgtgatgtagattatcatataattcaaggaagatgtttttgtacttcaaccattaattaatacttacttgtaacatagcatgattcattcattacatattctagaatagtaaaaatctacttattgcaaaactagcttaaggcaattcagataactatgtgtctccatcctcattccaaagaacatcagtttaattataggaattatttaatatttatataatgtgccagactatgctctaggcagctctaatgtatgaaaggcatgttttgccctcaaggatattcttctactctcaaactgacataaaaacaaaagagaacagttttcataaaatataaacaataaagtttccatctctactgtggtgtttaatctgcagaatgtagctatagactgcagttgtgtaatcagagattgtatgtcctagttgttttgtggctatccatcatttgtaa

SEQ ID NO: 79629 - DNA, 681 bp, Homo sapiens
ctgccctgcttcttctcgcgtgcaaggatgagactctgacatgctgatgaagtaatagtagtaatagtactagcagcaaacacttacttggagttcactgtgggcccagcactgtgccaaggccttccccatttcatctcgtttgcatttctctatatcgggattaagagcatgcgctctgaagacagacagcctaggtgtgaatttcagccatgccacttactggttcgggcaagttactttacttctctgggcctcagtttcctcacctataaaatggggtgaataataacacctgataatagatcctttacacacagtaaatggcatataaatattactattctatttcaaaaaatctaatatcagcttcctctttcctcggcttgtgaaaggtaaatatttaaaagagaaagctgatagagggaacggttcatttttcagagcttcaggcaaaagggragggacttttgcaagaaggaagacatcagagtggatcattgtggcctgcatttccaaatggggaaagagaggctcagagagggtgagttagttgaccgaaatcacacagccaacaagcagtcgagaaggatttgaactcaggcctatctgatgtcatagctcatgtccttgattccgacgctatatagccagtcctggtggtcatggaaagatcaggct

SEQ ID NO: 79630 - DNA, 757 bp, Homo sapiens
gatccttctgctccagtggaggcttgacatgaccacggccctggcccccagcttgactgcaacctcgtgagagactctgagccacaggcagccagctgagttgcacctggattcctgtgtgataacaaatgtttgttgctttagcccctaggtttagggtaattggttatgcagtagcagataacaaatacattggcctaagacagagcttgctgtgaggatggagtaacatgtatagtgcccacacatagtaggtgctaattcattgcttgtctaatgagtcagtcaataaacaaatgaatgttctataacaccgaatgttctctgaatccaaatgttcactcccttccacccactcccgtccaaaacrtcaccaaaagttgttttaagcagagaatggctgggtcagatttgtttttctgtaatgggagatgggtttgtgtcccatgggtgcggccggttcagctgtggtctgggtgaagagagatttaaaaataataatcctttgtcagctcagagaggactttagtgtaacttagatctcatagcaggtaggtctctggagaaacaactctcctttctcactctattaaagtctcttgaccaactagaagacactcgtgtgttcattcattcatcctttcttgtatttgttcattataccattattcactgaatacctcttttaggcagatactctggatgtagaaatgaacctgacatacctcaaatttcaaaaaagaagggaggaggtaag

SEQ ID NO: 79631 - DNA, 551 bp, Homo sapiens
tgagtataactcatcaaatacaaacgataaaatgtcaaagaactaaatatccataacataaatatccccaaattttcctgactgaacaaattcctctagamgtgtaatacactcttgattttcttcttttgcttgtttttgatttgctaatcaaatcatgttttcctttcaataatgaacacactgaatgtacacttaacacaggaatctaagacaactttttttttctaacatctcctatagccccattcccccacccacaacccaaataagcaattccaagaattgcatttcaccatgagggaaatggcccaggaaatacacttttcaaaaccttcaagtgtcactgaaaattagagaagggagtatttgtaagtaattttaaaaaaactttctgctcctcattgtaatctgaataaagacacaggcctaactaaaaaactattcaattctgagacaaccagcattctcagaagtgagtagaaagaattgtgtcaagatcacactaaccaccatttaaaggatatagggctagaaagaaatgtgagcca

SEQ ID NO: 79632 - DNA, 611 bp, Homo sapiens
tcccatgtcttggaggagggccagctgcagctggaggagctctgagacccaaagcaagttcctggggtcctccaagcctgcacccgagtttgtccatgcctgtcatgggatggttgacaagtgtgaatgcctgtgagtacctggcacagcaccaggcacagacaggcaagctgctaatgtttgtcagttcccttccycgtggcaacctcgagacactgattccaatttctccacggctcacagcttcgcctcccaccataacttatttacaggtcttacaggtttcatcaacagaatgtttatccttaaatctaactgaagaaaacaaacaaacacttctgttctcatcgctccctgataaaatcctatgcatctttcaaaacccagtttgatcgtggcctgtctggttttagcttctccgaggtcctctcagcaccgtatcgcttccatcctcaccctgtggcatcatgattgttccattaagttaatgaatattaactattaggtctgagtaacaccctggtaaacaggatgaaggaaatcccccctcctgcagtatatattcaagatggagaaaagaggcattttaaaaattctagaaatgaaattaa

SEQ ID NO: 79633 - DNA, 611 bp, Homo sapiens
tcccatgtcttggaggagggccagctgcagctggaggagctctgagacccaaagcaagttcctggggtcctccaagcctgcacccgagtttgtccatgcctgtcatgggatggttgacaagtgtgaatgcctgtgagtacctggcacagcaccaggcacagacaggcaagctgctaatgtttgtcagttcccttcctcgtggcaacctcgagacactgattccaatttctccacggctcacagcttcgcctcccaccataacttatttacaggtcttacaggtttcatcaacagaatgtttatccttaaatctaactgaagaaaacaaacaaacacttctgttctcatcgctccctgataaaatcctatgcatctttcaaaacccagtttgatcgtggcctgtctggttttagcttctccgaggtcctctcagcaccgtatcgcttccatcctcaccctgtggcatcrtgattgttccattaagttaatgaatattaactattaggtctgagtaacaccctggtaaacaggatgaaggaaatcccccctcctgcagtatatattcaagatggagaaaagaggcattttaaaaattctagaaatgaaattaa

SEQ ID NO: 79634 - DNA, 1035 bp, Homo sapiens
ttgtcaaagccatacagtttttcattggctttgcttaatttccgcaaatgctttctccaacataaaaatatatgtgtaggtgtgcctatttacaaactaggaagctgcatcagaaacagcacgatttagagggaaagggggaaagacaaaattaagggaagagccgggaaggaaacccagaagggaagaatgagggaagagtgtccactctgtctgtgagttggcaaattcaaatgatgtgcatttgggaaagggaaggatcattggctctgtggctggagatccccttcgsaggatgaagcagggagatgtatgggtttgccaaccctgctactgacaaaagtcccagcctgaagtgcccaagatgtgccccacgtcatcctgatgggtaaaaacatggagggggaatcttatctctcagaggaggagagggaaacatttggaaaactttcctatctccactcatgccaaggatgttggggacattcattgtgtgggagccccaggaggagggaccccagatcagtcagagcaggggtcctgtggagggcaaggaagacaggctcggcactagcctcagcccctccctatgctgaggaagccaaaggctgtcttaaaacagtcaaggaggtaaagagccctggaagttagcactgaacaaagcctggcccttttggtactcagtccacttgctgagggttaggaagtggggcttggagagactgaaaggtactaagtgaagagctggggttagacctgcctgacggcaccatgttggtgccctgactctgtcctgtgactctaatcaagaaggcattcctgcactcgcctgatgactctctcagcactcacttccttggctggattttggactcaaagctgcccaagtaatgacatcagatttgtctttgcttaagacagctcttttaaattgttttcagcacaactcacagtagcaaacatatctttacctgcagtccaatacacaaatgtgtgtatcaagtacctgaaacaaaagtgtcacaagacaatact

SEQ ID NO: 79635 - DNA, 1035 bp, Homo sapiens
ttgtcaaagccatacagtttttcattggctttgcttaatttccgcaaatgctttctccaacataaaaatatatgtgtaggtgtgcctatttacaaactaggaagctgcatcagaaacagcacgatttagagggaaagggggaaagacaaaattaagggaagagccgggaaggaaacccagaagggaagaatgagggaagagtgtccactctgtctgtgagttggcaaattcaaatgatgtgcatttgggaaagggaaggatcattggctctgtggctggagatccccttcgcaggatgaagcagggagatgtatgggtttgccaaccctgctactgacaaaagtcccagcctgaagtgcccaagatgtgccccacgtcatcctgatgggtaaaaacatggagggggaatcttatctctcagaggaggagagggaaacatttggaaaactttcctatctccactcatgccaaggatgttggggacattcattgtgtgggagccccaggaggagggaccccagatcagtcagagcaggggtcctgtggagggcaaggaagacaggctcggcactagcctcagcccctccctatgctgaggaagccaaaggctgtcttaaaacagtcaaggaggtaaagagccctggaagttagcactgaacaaagcctggcccttttggtactcagtccacttgctgagggttaggaagtggggcttggagagactgaaaggtactaagtgaagagctggggttagacctgcctgasggcaccatgttggtgccctgactctgtcctgtgactctaatcaagaaggcattcctgcactcgcctgatgactctctcagcactcacttccttggctggattttggactcaaagctgcccaagtaatgacatcagatttgtctttgcttaagacagctcttttaaattgttttcagcacaactcacagtagcaaacatatctttacctgcagtccaatacacaaatgtgtgtatcaagtacctgaaacaaaagtgtcacaagacaatact

SEQ ID NO: 79636 - DNA, 1035 bp, Homo sapiens
ttgtcaaagccatacagtttttcattggctttgcttaatttccgcaaatgctttctccaacataaaaatatatgtgtaggtgtgcctatttacaaactaggaagctgcatcagaaacagcacgatttagagggaaagggggaaagacaaaattaagggaagagccgggaaggaaacccagaagggaagaatgagggaagagtgtccactctgtctgtgagttggcaaattcaaatgatgtgcatttgggaaagggaaggatcattggctctgtggctggagatccccttcgcaggatgaagcagggagatgtatgggtttgccaaccctgctactgacaaaagtcccagcctgaagtgcccaagatgtgccccacgtcatcctgatgggtaaaaacatggagggggaatcttatctctcagaggaggagagggaaacatttggaaaactttcctatctccactcatgccaaggatgttggggacattcattgtgtgggagccccaggaggagggaccccagatcagtcagagcaggggtcctgtggagggcaaggaagacaggctcggcactagcctcagcccctccctatgctgaggaagccaaaggctgtcttaaaacagtcaaggaggtaaagagccctggaagttagcactgaacaaagcctggcccttttggtactcagtccacttgctgagggttaggaagtggggcttggagagactgaaaggtactaagtgaagagctggggttagacctgcctgacggcaccatgttggtgccctgactctgtcctgtgactctaatcaagaaggcattcctgcactcgcctgatgactctctcagcactcacttccttggctggattttggactcaaagctgcccaagtaatgacatcagatttgtctttgcttaagacagctcttttaaattgttttcagcacaactcacagtagcaaacatatctttacctgcagtccartacacaaatgtgtgtatcaagtacctgaaacaaaagtgtcacaagacaatact

SEQ ID NO: 79637 - DNA, 934 bp, Homo sapiens
gtcagtggaaactaggcttccttattttttttttaagctgtttcatgacagataaaactcagctggtaagccaatccataccaaatgacccaccagggccaccgtacttgttaccacccaagaggtagttccatgaacttcatatttattctctttctatctaaactccctctctgaaatggatccaatgggcgtacttacctgaggtgtaaatggttggtaagtagagttgccagatttcgcacataaaatacaaactccacagttgaatttgtatttgagacaaatgatgaataattttaagtatagtatgtcctgtgcaatgtttgaaacatacgtaagctaatttattacttgttgtttatctgaaattgaaatttcgttgggcatcttgtattttatctggcagccctactgctaaggcccaatgtgctaccttttaaaggaacttgatgtctaacaggagacaataatagccaacgttgtgattaggaaggagggcttatgggcctgggagagttccccagataagaggagcttcctcacctaagaatttgcttcgtgtcagaaggggcagcttatctggccatctggtccctaaacaaactctgtgtcgtggcctgtgaggatggtggcattgctgggtgcccactgctttacagtcakgatgagggggatattatcatccgcttttacaaaagggtaaactgagtgcagggaggttagaaacgtgtccagttcaccccatgggaagcggtcacctgagtggttggggaccaacgtgggagagagggaacgttaccttaagctgctgccctgggcacggagagacacagatggacagcaaggatgcagagggatgcctggtgttcccgacacttcgtggatggtcccagcgaaaggaggcttgtgcaaagtgttttatgatgcttat

SEQ ID NO: 79638 - DNA, 934 bp, Homo sapiens
gtcagtggaaactaggcttccttattttttttttaagctgtttcatgacagataaaactcagctggtaagccaatccataccaaatgacccaccagggccaccgtacttgttaccacccaagaggtagttccatgaacttcatatttattctctttctatctaaactccctctctgaaatggatccaatgggcgtacttacctgaggtgtaaatggttggtaagtagagttgccagatttcgcacataaaatacaaactccacagttgaatttgtatttgagacaaatgatgaataattttaagtatagtatgtcctgtgcaatgtttgaaacatacgtaagctaatttattacttgttgtttatctgaaattgaaatttcgttgggcatcttgtattttatctggcagccctactgctaaggcccaatgtgctaccttttaaaggaacttgatgtctaacaggagacaataatagccaacgttgtgattaggaaggagggcttatgggcctgggagagttccccagataagaggagcttcctcacctaagaatttgcttcgtgtcagaaggggcagcttatctggccatctggtccctaaacaaactctgtgtcgtggcctgtgaggatggtggcattgctgggtgcccactgctttacagtcatgatgagggggatattatcatccgcttttacaaaagggtaaactgagtgcagggaggttagaaacgtgtccagttcaccccatgggaagcggtcasctgagtggttggggaccaacgtgggagagagggaacgttaccttaagctgctgccctgggcacggagagacacagatggacagcaaggatgcagagggatgcctggtgttcccgacacttcgtggatggtcccagcgaaaggaggcttgtgcaaagtgttttatgatgcttat

SEQ ID NO: 79639 - DNA, 1838 bp, Homo sapiens
tcgtaatgacggtctcaattactaacagcagtaactgttataatgatggtctcaagtagtaattgtgacagtctgccacacggggggggtcatgtcctacattacacagcatcccccccaaggggactcaccagacattccggaattttgggtgaaytttgtgtgatctcaacctcaggagaactgggcttctttgaacagctggctgttttttcccttttggacatggatccatgaacggtggggctgtgctcttcaccctggctcctagataaggagtgttggggtgttgaaggctgaaagtatgagggtcgtgatcaactcagcataccactggaggctataagagtaaacagtacactgcttacccaccgccccatcacgtggagaggcactcatggcaggcttcgtgcctacagtccccactcccagctccatcatactcctctgctcttatcttcccctttgactcattccacccctcccctcaccagcttctttaaaaatgttttatttggtgtattatagttgtgcagtgttttttttagaacaaggtagtaaggcactctgtgaatgaaaagttaaagtgaagcatttcaggtagtgtgggggctatttggggcctcaccccagtgagttcggagattccaagatcttctgggggcctccaggcttccctgtcccatccagaacctctctcacctccccagagagaaccccccccacccatgccaacgtccgcagccaccacacctccccagcccaccccagctccagccacaccctcctgctcctggagtttggtttgtgtccatcgagtgatgctggctcagtctcggcttctggtgctgccctgggcgaggccaggactctcctaggcattcaggcctgaaagagcttcccttgactcagccatgactcaccaggggtgggccctaccagggcggggtggccccctgaggggtcttgggatggcctggagtttctgagctataaacattgccatttaaattattgaaattactgagaaagtttgatatgtggcagctcagccttcaggggttgaagttcctagaacatctgctttcaactcaaaccagttagtgggattgtggcatggaagtctgggaaatgtttcctaaaaggccaagtgttggagagaaaagaggactggactgcgggttgggagacctaggatccagtctgggtgtcactcctcactggactgcaaccctgagcaaatctctttccttctcttgaccctgtaaaatggggagaataaggcctgtgtgtgagggtccctttaatcactgagtaattacgaccaagcacctttaatgagctaaggagtgttcgaggttgctgggggtacagtggcggaaaagaacggcaaggcagtagcaatcaaatccaccaatgcaacaggcacctttaggtattgataaataccattaagaaaacaaaatagggtggctcacgggagagtactgggggcaggggagttaaaggtgatcagagaaggcaattgtccaggtaactgatgcctcgtcccagctgatagcaatggagatggggaaaagtgggttgactgcagataaccgtggaggtagagcccttaggatttgcagactgggagaatatagtcaccaggatgatgaccaccagggtttcagggttgagcaacatagtcaatgatgctgctgagtcattgagctggggaagaagtaggtctaagaggaaaaatcgagagcttggtcttggacatattaggtctgaagccctaagttgacacccaagtggcaccaagtgacaccaagtgaagatgtgatgcagacagg

SEQ ID NO: 79640 - DNA, 1838 bp, Homo sapiens
tcgtaatgacggtctcaattactaacagcagtaactgttataatgatggtctcaagtagtaattgtgacagtctgccacacggggggggtcatgtcctacattacacagcatcccccccaaggggactcaccagacattccggaattttgggtgaattttgtgtgatctcaacctcaggagaactgggcttctttgaacagctggctgttttttcccttttggacatggatccatgaacggtggggctgtgctcttcaccctggctcctagataaggagtgttggggtgttgaaggctgaaagtatgagggtcgtgatcaactcagcataccactggaggctataagagtaaacagtacactgcttacccaccgccccatcacgtggagaggcactcatggcaggcttcgtgcctacagtccccactcccagctccatcatactcctctgctcttatcttcccctttgactcattccacccctcccctcaccagcttctttaaaaatgttttatttggtgtattatagttgtgcagtgttttttttagaacaaggtagtaaggcactctgtgaatgaaaagttaaagtgaagcatttcaggtagtgtgggggctatttggggcctcaccccagtgagttcggagattccaagatcttctgggggcctccaggcttccctgtcccatccagaacctctctcacctccccagagagaaccccccccacccatgccaacgtccgcagccaccacacctccccagcccaccccagctccagccacaccctcctgctcctggagtttggtttgtgtccatcgagtgatgctggctcagtctcggcttctggtgctgccctgggcgaggccaggactctcctaggcattcaggcctgaaagagcttcccttgactcagccatgactcaccaggggtgggccctaccagggcggggtggccccctgaggggtcttgggatggcctggagtttctgagctataaacattgccatttaaattattgaaattactgagaaagtttgatatgtggcagctcagccttcaggggttgaagttcctagaacatctgctttcaactcaaaccagttagtgggattgtggcatggaagtctgggaaatgtttcctaaaaggccaagtgttggagagaaaagaggactggactgcgggttgggagacctaggatccagtctgggtgtcactcctcactggactgcaaccctgagcaaatctctttccttctcttgaccctgtaaaatggggagaataaggcctgtgtgtgagggtccctttaatcactgagtaattacgaccaagcacctttaatgagctaaggagtgttcgaggttgctgggggtasagtggcggaaaagaacggcaaggcagtagcaatcaaatccaccaatgcaacaggcacctttaggtattgataaataccattaagaaaacaaaatagggtggctcacgggagagtactgggggcaggggagttaaaggtgatcagagaaggcaattgtccaggtaactgatgcctcgtcccagctgatagcaatggagatggggaaaagtgggttgactgcagataaccgtggaggtagagcccttaggatttgcagactgggagaatatagtcaccaggatgatgaccaccagggtttcagggttgagcaacatagtcaatgatgctgctgagtcattgagctggggaagaagtaggtctaagaggaaaaatcgagagcttggtcttggacatattaggtctgaagccctaagttgacacccaagtggcaccaagtgacaccaagtgaagatgtgatgcagacagg

SEQ ID NO: 79641 - DNA, 543 bp, Homo sapiens
gcttataaataacagattgaagtaataaggcacccaaagatgatggaattaatacagaaacttgtttcattggtaaggaccaggggttcctggtcaacaatttcatctggagaatccaaagtgatgaaccagttcatgttcctgatacagagctgttttaactaaggagataaacccaactgggagtaaactcccttttttcctggctactgtttccaataagtattttaatttcagatttctgtgcacatttgggttggtcatcaataccttgsagaatttctgagcctacaatttcagaaagtcatcttgtgggaaataaccatcacaggagacaaaatgaaaagatcagcttctgcatgcccctactattgccttgaatagtgagggcaacaataactttctgctcaaatatgtctcatcatatgtaagtgtgtccatgggtgtgatgtgtgtgtatgtacatgtgcatcaatggtttttgaagcttctccagatatttaaatcccctgctctctccttgtcttgtgcttggttactcat

SEQ ID NO: 79642 - DNA, 694 bp, Homo sapiens
tttatttggggaaggtaatactgtatggttttgtcagaggaatggaactcagggctgtgttgaatataatcaactggacactttattatttaaataattccagtggcatcaaattgatggctctttaaaattggtagaacattttaatattttttgatcatgaaaacagaaatatagataatactggaaataatgaggtaaacaggtcacttctgtctcactatacagagttaagcatgtttgagtttttccttacatttttaactttttagttttacacaagtcctgaaacaaatatgcaaatctgtattggatcttccacatgacacaaaaaggcatatcctacaaacttgtgagagagaataactttttcccataactcaacattctggctgcaggaaacaaacccattcaaagtagcttacacaaaagaaaaatgattattatatggcattgacagggcaggsgtgtctgtcactgacttaatgtaagaagatcattgcttcataaaaccctggaatctggaactggaaggctgctttgaaactagataacatctaccttgctgactcttgcctccatttctttctcatttattcattggtctcttctttaagcttcacactattaatctgtttcttccttctttctctgcatctgggttgaagtaaactgctttttaactgaccttctc

SEQ ID NO: 79643 - DNA, 854 bp, Homo sapiens
acctgagatacagaaaaacatgaaagggctataacatgactgtttaaaatgattaaagagataatataaggaacattaaccaaaaataaagaaaaagatactgtgaaaagggtttacgtccagcmccgtcttccctaggaagtgtttcttggactgtttattaaagctgtgcaaatcactatcatggcactgaaaacactgttcatggcattttatgccctagcctcccctcttcttcctgcctgtgcctaaccactctaagtgttaagcacatggatttggtaacagctgggctttattctttgtacttccaaggtctagcacagtgcctggcacatagtaggtccttaggaattgaactaaataaaacctacataactacatgctaaactttaaaaagcaaaaattatatcagttcagttgatcggtttggatgagggggtaagtttttgtacctaactgagcattaactttagcaacaccacataagagtattagctgctgttagttgctttcattggtgattttttttttttttttttttttttgtgatggagtcttgctctgtcacccaggctggagtgcagtggtgcaatctcggctcactgcaacctccacctcctgggttcaagtgattctcctgcctcagcctcctgagcagctgggattacaggcgggcgccaccacggcaggttaatttttgtatttttgtagacatggggtttcaccatattgaccaggctggtcttgaactcctgacctcaagtaatctgccgtgcctcggcctcccaaagttctgagattacaggcgtgagcaccacacccagctggtgataatttttaagatgttcaca

SEQ ID NO: 79644 - DNA, 777 bp, Homo sapiens
cattcctagacaaaaaaaaaaaaaagtttttccattgaacactaagcaatcaacatatttccagtcttctttagactgtgatggatgtctacactgtattagcaactagttataaactactgcataaatagttgaattatatgctataaccaaatacaccctatatatcacattaatttgcatatttaaagatatatattacattcttttttttttttttgagaaagagtcttgctctgttgcccaggcttgagtacagtggcatgacctcggctcactgcagactcttcctcctgggttcaagcaatccccccacctcagcctcatgagtagctgggactacaagcgtacaccaccacgcccaggtatttttgtatttttactagagatggggtttcaccatgttggccaggctggtctcgaactcctggccccaagtgatccaactgcctcggcctcccaaagtgctaggattacaggcgtgagccaccacacccggccgtaagtgttacattctgtagtaattagttataaaggctagagttcacagaattttcaacataactatttaggtacttattgtcttaggttcttcagtatctaaacagtgatgttcattgtgtttaccaattaatcaccactttatataatatacatattatgtaagacatcctgatgtaagtatatgcctataaagtcattttacaaattatgatatataggtacccacttacattcccygacccagcccctacatcattagcagctcaaggctcg

SEQ ID NO: 79645 - DNA, 675 bp, Homo sapiens
cagaatgggctggggattcttttaataccagtttctaaagagttccattagattcaacacattatttatcaaaatggagtgggcttatgtgtgacaattggcagtatagcaactgtggccaggaaggttagcaaaacccgaaggaggcacccagtaggtgaccataggaccaagagtggatttccttagggatgaaaaaatcgargcccaccccgtagaacttctgaccaacaaaatatatggcctgtgcaaatcacagcacacagagagaagggaactccaaggaatttgagtttattaaggcataattcaaagtaaagctgtgtagttatctcatgcaatagcagcaaccgataaatgttttcatagtgaagatagcaagagaatgtagagggaatctggaaaatgtgtagcccccaaaggatgagcacgtggtgcagaggacagaaaatacctgcacacacacagaaaaggacacagccagtgttgaaacctctctctagccacggtagccagaagacttgactcattcccaagtgagagaccttgtcgtgtatctaatttacacgtgcctaaattgctgtttgataaaactgctcagaatttactcatactgtaatttttatttaaactttggttgttttctaaagccccagtgtgttcatttgctaggga

SEQ ID NO: 79646 - DNA, 675 bp, Homo sapiens
cagaatgggctggggattcttttaataccagtttctaaagagttccattagattcaacacattatttatcaaaatggagtgggcttatgtgtgacaattggcagtatagcaactgtggccaggaaggttagcaaaacccgaaggaggcacccagtaggtgaccataggaccaagagtggatttccttagggatgaaaaaatcgaggcccaccccgtagaacttctgaccaacaaratatatggcctgtgcaaatcacagcacacagagagaagggaactccaaggaatttgagtttattaaggcataattcaaagtaaagctgtgtagttatctcatgcaatagcagcaaccgataaatgttttcatagtgaagatagcaagagaatgtagagggaatctggaaaatgtgtagcccccaaaggatgagcacgtggtgcagaggacagaaaatacctgcacacacacagaaaaggacacagccagtgttgaaacctctctctagccacggtagccagaagacttgactcattcccaagtgagagaccttgtcgtgtatctaatttacacgtgcctaaattgctgtttgataaaactgctcagaatttactcatactgtaatttttatttaaactttggttgttttctaaagccccagtgtgttcatttgctaggga

SEQ ID NO: 79647 - DNA, 851 bp, Homo sapiens
gcattagtgggcctttgaaaaccaaaatgtcaaaggctgaataatgttcgtctcacgaaaaaaagtatatttattatcaaaacagtattctagaattgtaaacatagctatggggaacagtttaggacataaatatttgtgcatattactagacactgaatattttaaatgaaagtatttcaaatacacagaaaagtttaggtattagtgaaacaaatagccaaaggtcaactatacagatatttacagctatccaataactttccatgtaggctaggaactccttctacaaataaagtgrtcagaaagaaatagatgtttaccatttgaggaaatgtttctatcttggtagctcctagtttatgttaaatgggtgctagatttactaatttctgttaatgcagttcaagctgtctgagatctattgtatttacacaatacaatagattttttatttgatttgatttctttttatttgatttctttggggacactcatttaaaacaacttttcttgactatagctttaagagctgtcacagctgcagatacagctgcaattttttttagttttaactagaaactcatcatttactcttccttgaacacagctggatatgttcttttttcctggttggtggcactgttatacagctattcatatgactatatgttgctgcatacaaactgggtaaaatcattatgaattattggatgtaatttttatcatcttatgctattttgggggttatatattgctttcactgccactaatttcagtaagagaaaagtgtgtaaatcataatgacagagctaactacaattcttgtcaaaattgttggcttattctta

SEQ ID NO: 79648 - DNA, 1435 bp, Homo sapiens
ggaatcaagtacgaaaccaaataaagtataatatgatagtatgttagaagatttaaatgctatgaagaaaaataaagtaggaaagggggataggaggaagcacgtttttaaatagagcacaattttaaagacgttgagggagaccacttgagaagatgacattggaatcaagacctaaaggtgagactagacacagaaaatattgatataattatgtttgccctaagcaaactagaattagtgccctaaacaaactagaattaatttatcactgtcaggctgcattctggctacaaggctcattggatttaaatcctaaattaagcccaatcagagaaaatgaagaacacggcacattggtgcatttttaaatttctggtctgtgaaatttacccactacacacaaaaagagtatctaagggtttttcttttcttcataattacagtgcctcatctttacagaaaaatccaactgtatttctaaaccatttttcactgaggtaaatatttaccaaagtgaattttgtacatgtgcttgtgtctatgtaaacagtatacatacgggtacacattcagtatctaatacattcatttcagaaagtcattttaaatgtgtgtgtgtgtgtgcatacatatatatatatatacgcacacacatgcatcaaccatatcattctcagccttttatctgccctactatgcctcagagatatcaccttgtttcctgtcacatgtagtagcttcacagcattagggctaaggctgtgttgggaagagcagaaaacctagcagtagttttagaaacctctcagatgatcctagtatgcttttttttttttttttaatattttgaaacggagttkcacttttgttgtccaggctggattacaatgatgcgatctcagctcactgcaacttctgcctcccaggctcaagtgattctcccgcctcagcctcccaagtagctgggattacaggcacctgccaccatgcgtggctaatttttgtacttttagtagagacagagtttcaccatgttggccaggctggtctcgaacccctgacctcaggtgatctgaccgcctcggcctcccaaagtgttgggattacaggcatgagccaccgtgctcagccctaataggcttttaaacactcaagcagcctttgagttactgtgttttgtgttgatttcataatagataagtgctaaatgaaagtttaaatgaatgccattaatattcagacaggattttattttcatttaaatctacagcttttcgaacaatctcaaacactcaattaggcatatgagatagtgaggaccacaagctcttggagtgagtggactgtttttcagttgcgtatttctttattgctataataatttaactctaggctcatcaaactatgcagtgtgtcaagagtttagctgcaa

SEQ ID NO: 79649 - DNA, 1435 bp, Homo sapiens
ggaatcaagtacgaaaccaaataaagtataatatgatagtatgttagaagatttaaatgctatgaagaaaaataaagtaggaaagggggataggaggaagcacgtttttaaatagagcacaattttaaagacgttgagggagaccacttgagaagatgacattggaatcaagacctaaaggtgagactagacacagaaaatattgatataattatgtttgccctaagcaaactagaattagtgccctaaacaaactagaattaatttatcactgtcaggctgcattctggctacaaggctcattggatttaaatcctaaattaagcccaatcagagaaaatgaagaacacggcacattggtgcatttttaaatttctggtctgtgaaatttacccactacacacaaaaagagtatctaagggtttttcttttcttcataattacagtgcctcatctttacagaaaaatccaactgtatttctaaaccatttttcactgaggtaaatatttaccaaagtgaattttgtacatgtgcttgtgtctatgtaaacagtatacatacgggtacacattcagtatctaatacattcatttcagaaagtcattttaaatgtgtgtgtgtgtgtgcatacatatatatatatatacgcacacacatgcatcaaccatatcattctcagccttttatctgccctactatgcctcagagatatcaccttgtttcctgtcacatgtagtagcttcacagcattagggctaaggctgtgttgggaagagcagaaaacctagcagtagttttagaaacctctcagatgatcctagtatgcttttttttttttttttaatattttgaaacggagttgcacttttgttgtccaggctggattacaatgatgcgatctcagctcactgcaacttctgcctcccaggctcaagtgattctcccgcctcagcctcccaagtagctgggattacaggcacctgccaccatgcgtggctaatttttgtayttttagtagagacagagtttcaccatgttggccaggctggtctcgaacccctgacctcaggtgatctgaccgcctcggcctcccaaagtgttgggattacaggcatgagccaccgtgctcagccctaataggcttttaaacactcaagcagcctttgagttactgtgttttgtgttgatttcataatagataagtgctaaatgaaagtttaaatgaatgccattaatattcagacaggattttattttcatttaaatctacagcttttcgaacaatctcaaacactcaattaggcatatgagatagtgaggaccacaagctcttggagtgagtggactgtttttcagttgcgtatttctttattgctataataatttaactctaggctcatcaaactatgcagtgtgtcaagagtttagctgcaa

SEQ ID NO: 79650 - DNA, 1435 bp, Homo sapiens
ggaatcaagtacgaaaccaaataaagtataatatgatagtatgttagaagatttaaatgctatgaagaaaaataaagtaggaaagggggataggaggaagcacgtttttaaatagagcacaattttaaagacgttgagggagaccacttgagaagatgacattggaatcaagacctaaaggtgagactagacacagaaaatattgatataattatgtttgccctaagcaaactagaattagtgccctaaacaaactagaattaatttatcactgtcaggctgcattctggctacaaggctcattggatttaaatcctaaattaagcccaatcagagaaaatgaagaacacggcacattggtgcatttttaaatttctggtctgtgaaatttacccactacacacaaaaagagtatctaagggtttttcttttcttcataattacagtgcctcatctttacagaaaaatccaactgtatttctaaaccatttttcactgaggtaaatatttaccaaagtgaattttgtacatgtgcttgtgtctatgtaaacagtatacatacgggtacacattcagtatctaatacattcatttcagaaagtcattttaaatgtgtgtgtgtgtgtgcatacatatatatatatatacgcacacacatgcatcaaccatatcattctcagccttttatctgccctactatgcctcagagatatcaccttgtttcctgtcacatgtagtagcttcacagcattagggctaaggctgtgttgggaagagcagaaaacctagcagtagttttagaaacctctcagatgatcctagtatgcttttttttttttttttaatattttgaaacggagttgcacttttgttgtccaggctggattacaatgatgcgatctcagctcactgcaacttctgcctcccaggctcaagtgattctcccgcctcagcctcccaagtagctgggattacaggcacctgccaccatgcgtggctaatttttgtacttttagtagagacagagtttcaccatgttggccaggctggtctcgaacccctgacctcaggtgatctgaccgcctcggcctcccaaastgttgggattacaggcatgagccaccgtgctcagccctaataggcttttaaacactcaagcagcctttgagttactgtgttttgtgttgatttcataatagataagtgctaaatgaaagtttaaatgaatgccattaatattcagacaggattttattttcatttaaatctacagcttttcgaacaatctcaaacactcaattaggcatatgagatagtgaggaccacaagctcttggagtgagtggactgtttttcagttgcgtatttctttattgctataataatttaactctaggctcatcaaactatgcagtgtgtcaagagtttagctgcaa

SEQ ID NO: 79651 - DNA, 719 bp, Homo sapiens
agaaccaagacatgaaaacccagtagatggagttaataactccagtgtatgggggtgggtggggggtatgggtaggttcactgttgggtgatgtgacatttgagatgggacttaaaaggtggagcaggtagttttcaggggaggaaaggagtgggatgtatcccaggaagagcctccaaacctcaaaaggccctatattcacargaggaaatgagaagttctgtgtgttcgagtgttccttgtgtgtgtgtggtggctggggctgcaggaagtgaggctggagggggacaggttgtagaggaggggaaaggctgttcagtgggaagtgattatgagcctggtctctggagctagcccagctgggttcaaatcccagccccacgtgaaaaacttataagtcaccctgggaggagggtatgaaatctttgcttaggacctcagagaaaagtgttgttctctgttctatattctcagaggcatagattggagattgggagagacccaggcttaaatcctgtccctgcttggtactagcctgtgtaaggggcatagtaatctctttaggcctcagttccccatctctaaaacaggaacagtagtgcctcattcacaaaacctttgtaacaatgcagtgagatgatatacatgatgcatttacctaggcctggcctggtactccctcgtggttgccaaggtgatgggacctgctaaacacagtg

SEQ ID NO: 79652 - DNA, 719 bp, Homo sapiens
agaaccaagacatgaaaacccagtagatggagttaataactccagtgtatgggggtgggtggggggtatgggtaggttcactgttgggtgatgtgacatttgagatgggacttaaaaggtggagcaggtagttttcaggggaggaaaggagtgggatgtatcccaggaagagcctccaaacctcaaaaggccctatattcacaggaggaaatgagaagttctgtgtgttcgagtgttccttgtgtgtgtgtggtggctggggctgcaggaagtgaggctggagggggacaggttgtagaggaggggaaaggctgttcagtgggaagtgattatgagcctggtctctggagctagcccagctgggttcaaatcccagccccacgtgaaaaacttataagtcaccctgggaggagggtatgaaatctttgcttaggacctcagagaaaagtgttgttctctgttctatattytcagaggcatagattggagattgggagagacccaggcttaaatcctgtccctgcttggtactagcctgtgtaaggggcatagtaatctctttaggcctcagttccccatctctaaaacaggaacagtagtgcctcattcacaaaacctttgtaacaatgcagtgagatgatatacatgatgcatttacctaggcctggcctggtactccctcgtggttgccaaggtgatgggacctgctaaacacagtg

SEQ ID NO: 79653 - DNA, 719 bp, Homo sapiens
agaaccaagacatgaaaacccagtagatggagttaataactccagtgtatgggggtgggtggggggtatgggtaggttcactgttgggtgatgtgacatttgagatgggacttaaaaggtggagcaggtagttttcaggggaggaaaggagtgggatgtatcccaggaagagcctccaaacctcaaaaggccctatattcacaggaggaaatgagaagttctgtgtgttcgagtgttccttgtgtgtgtgtggtggctggggctgcaggaagtgaggctggagggggacaggttgtagaggaggggaaaggctgttcagtgggaagtgattatgagcctggtctctggagctagcccagctgggttcaaatcccagccccacgtgaaaaacttataagtcaccctgggaggagggtatgaaatctttgcttaggacctcagagaaaagtgttgttctctgttctatattctcagaggcatagattggagattgggagagacccaggcttaaatcctgtccctgcttggtactagcctgtgtaaggggcatagtaatctctttaggcctcagttcyccatctctaaaacaggaacagtagtgcctcattcacaaaacctttgtaacaatgcagtgagatgatatacatgatgcatttacctaggcctggcctggtactccctcgtggttgccaaggtgatgggacctgctaaacacagtg

SEQ ID NO: 79654 - DNA, 1991 bp, Homo sapiens
ataagaaaggctttggccctgggaaagtaaaatattaaaataatacaattagaggacaatcaagcgcttctccttatgcttacttggatcaggaagtccctgggagcctgtaaagattgtttcaatggagcctacactctctccctgcccaagacccatagaacagggaccctctctggacctaagcatcttacctgtattcctgtgaccactctacctgccttagaggaccagacatgtccctcaggaaaatctacaacatcagagaacttagaggcaagtccagcataaggtctttggggctggacaatcccagagtccctcctccccttccagcactaagctaaatcaggcccttcactccatccctgactcagaaataagcattgagacatcactgagtgcctagggctttgctagaccctcagggaaggaagggttaagacgtgagcctcaccgtctaagagcagaaatgcacacgcctctccttttctccctggcacactcctatccatacttcaaaatagagttcaaaagccatctcctctgtgaagacttccctgacctctccagatggaatcatttactcacactgctggaatcctactgtaatttcttcacccatctgctcagatactttgaatgaatgggaacagaactcaatacaaattacaatagagcaaatggctagatttaatctaatcctgggattctcaatcacttttcagctgggcagatgcatattatagaagagattcacattcatggtacccttctatgaattgatgaaacaaaaagcgggagcagaggagggaagaagcaatggaaatagaccacggcattcatttgtagtgcctcagcagctaactctgtctcttgctcactgagtctccatgggcaagttgggctgggttgtctcactagcttctcactaaaataagtgccaagagagcagagactttacctatttcatatcatgtgcccagggcctgacacaatgtgggtccctcataagcaatccatgccagcggtaaccccacctctgtttctctctttcagaaatcatattgggatcattcagaaatcataatgatgttattatagggataccctgccttccactctgacttacaaaataaaggctgtaacccatacttcagtatttaacaattatcagtaatcaacaatgatcatgacacagctcatatctgattggcacacatgcagctaggtcctccaggttgagaacttctgatcagatcaacggccaccggcatgatctagacagtatgtacgctagagggccaggaagaggagcaatctgtgtggacgagagttaacaagtaatgcttcctggaggaggaggagcttgagttgcctgttgagtasgacgaacatatgtcctggtttgcctgggccggcctctatgttggtatttctggtataattattttatagtttcatttatttgaaacagagtcttactctgtcacccaggctggagtgcagtggcatgatcttgactcaccgcaatctctgcttcccaggtccaagcgattcctgtgcctcattctccccagtagttgggactacatgtgtgcaccatcacacctggctaattttttgtatttttggtagagatggggtttcactgtgttggccaggctggtctcaaactcctgacctcaggtgatccacctgccttggcctcccaaagtgctgggaatacagttgtgagccaccgtgtctggcctgatataattattatctgtactccttttaactctcaaatttattattgcttggaagataaattgtatggttattccaccatgatgaatgtgtgcaaattgacttggcagaggggagggctctacttctccttccctgaggacatggaagcctctcactccttcctctccccttcacacagttttgtctcttgattccaccttttctgctgaccttccttgtcttccatgctgaactct

SEQ ID NO: 79655 - DNA, 660 bp, Homo sapiens
gttcaatttcctgcaatagttggtagtcaattctaaaacaagatggtgagaggagacagaagattttttgaggtttagggggaaaagagctgaccatttgaaagtgagatatgaacccctttctttgtttaattctggtatacttatttttactgctgcttaactgcctattatttaataaaaattagaacgtcattttatttataaacagacttgtaaacaaagtccatctcttggtcagttagtttataaatttgtctgaggtgaacaaagactctttacttcttccccactaggaccacacaacaaataccacaaacaagactgctctggaaacacttcccacagactgtgtgagaatgtgtgtatggggttgtgtttctgtatgtcaatctccatttcaaaaccaaattgaatttcttaattactgtggcttatgcaaatraaatcttaagtttcctggaaaaaaaaaaaaaaagaaagaaagaaaaccaagtgtcagaaaacaaagactcgaccacacatgtggggactctgccttaagagcaggacaagcttaaataactccagcaggcagaattggagaatttgcctctagctgtccatacctcaatcagtgccccattggtttgacctgactttctatctttcaaacatgca

SEQ ID NO: 79656 - DNA, 660 bp, Homo sapiens
gttcaatttcctgcaatagttggtagtcaattctaaaacaagatggtgagaggagacagaagattttttgaggtttagggggaaaagagctgaccatttgaaagtgagatatgaacccctttctttgtttaattctggtatacttatttttactgctgcttaactgcctattatttaataaaaattagaacgtcattttatttataaacagacttgtaaacaaagtccatctcttggtcagttagtttataaatttgtctgaggtgaacaaagactctttacttcttccccactaggaccacacaacaaataccacaaacaagactgctctggaaacacttcccacagactgtgtgagaatgtgtgtatggggttgtgtttctgtatgtcaatctccatttcaaaaccaaattgaatttcttaattactgtggcttatgcaaatgaaatcttaagtttcctggaaaaaaaaaaaaaaaraaagaaagaaaaccaagtgtcagaaaacaaagactcgaccacacatgtggggactctgccttaagagcaggacaagcttaaataactccagcaggcagaattggagaatttgcctctagctgtccatacctcaatcagtgccccattggtttgacctgactttctatctttcaaacatgca

SEQ ID NO: 79657 - DNA, 539 bp, Homo sapiens
agcagtggtgggaaacctggccacccaccagatggctgtgcactgtgctgcccaatagcaggcaccgggatctgtctggatgcagccagaaaggacctgtgcctcagtgttacctgttgataataatagaccagatcccaccagcttttggycccctagcccagcggcttgggggctgagcttcggggctaaggctgtcttcctagcactattccagcaaaggaaagagctgctctagcctgagccaatttagaaggaaacaacatttttagcaaaacatccctagagtcttttccaggagttcctccggttgccgaattcagcccctagcctgtgagctgaaataacagtacccactgataatagccctttccccagagacacacacacctgcagcttcccactcatatttacagatgccttaaacatctacgaagctccctcgtcccaggtctgggcacacagacatagacacactcctatctgttgttcctttgacttagttacacatactcaagtacatacatgacagacatatg

SEQ ID NO: 79658 - DNA, 1483 bp, Homo sapiens
ccttttaacccgaggaggaggctgagaatccaatgacttttctgtcatacgattgaggggacaggagcctagtgataatgggacacggagcttcggctgcagagctctcttttgtccacaatttagggcaactgtcttgcactctgcctccatcctctgggtagactcagtggaggaaacgtttccacaggcaccaggcaaccgggctcctggaagcagcagacccgggagaggagagcaactccccagcttggtgttagatatcatctgagactccttacaccctcgcagcttagaagctcctcagattaccaggcaaggcaaagttgattttgacaatgtctggggaaggaagggctgctcttcctggctggctggcataatcagactctggaggagtcggcctgcctatcaaaggaggtgagagctaagttgttgctgcctttccgcttcaggatgaatggattccaccccattgaactggagtgacctggygcctggattctttcatctctaaaatgggaaaaataattgttgcacatatatggtgttgaaattatggccctcaattggtgataattatcattacttagtattaataattattatttgtgaaacttctcccagaattgctgcatggattgcaatgtccaaataagcttataatggggcttccagacactagcagtgaggcagtttctgtagaggttgagtggcggctcttcaccgactaactgggtttgcgtcccccgcctttttgttttccttttttaaaatatattttttaaatatcatggagtgtcactatgttgcccaggttagtgtcgaactcctgagctcaagggatcctcccactttggcttcccaaagtgctgggtttgcatcctggatggcctcttaggagctgtgtgcccttgggcaagttgtttaaccttcctgagctcctgcgtccctatctttaaagtgaaaataataatagcacgttttactacttggaaggaggctggaccaggttttctacagccagaccatctacgctttccaaagggcctgggcagcaagtgagtattagtctactaagagtgtaattatgttatattaacagcacctacctccaaaggttgctgcgagcagagagcacctcacagtgctttacagcagtgcccggctataaccatcacagcattattattaatgtgattagcctcattttgcagatgaggaaatataggcccagagaggttaagataccccacgcagggacctgcagctagtcggtggcagggatggcgctggaatccaggggttccctccagaaccccacagcggcccatgctgaaaaccagacaacgcccgcccccgccagaaggcaccctgggaacggaaagctggcagccttccaagtcccaggacgcgctggggcccagcccccgctccgccctcccccatccctggaacaaagtacacttctgccgcaggaaca

SEQ ID NO: 79659 - DNA, 1483 bp, Homo sapiens
ccttttaacccgaggaggaggctgagaatccaatgacttttctgtcatacgattgaggggacaggagcctagtgataatgggacacggagcttcggctgcagagctctcttttgtccacaatttagggcaactgtcttgcactctgcctccatcctctgggtagactcagtggaggaaacgtttccacaggcaccaggcaaccgggctcctggaagcagcagacccgggagaggagagcaactccccagcttggtgttagatatcatctgagactccttacaccctcgcagcttagaagctcctcagattaccaggcaaggcaaagttgattttgacaatgtctggggaaggaagggctgctcttcctggctggctggcataatcagactctggaggagtcggcctgcctatcaaaggaggtgagagctaagttgttgctgcctttccgcttcaggatgaatggattccaccccattgaactggagtgacctggcgcctggattctttcatctctaaaatgggaaaaataattgttgcacatatatggtgttgaaattatggccctcaattggtgataattatcattacttagtattaataattattatttgtgaaacttctcccagaattgctgcatggattgcaatgtccaaataagcttataatggggcttccagacactagcagtgaggcagtttctgtagaggttgagtggcggctcttcaccgactaactgggtttgcgtcccccgcctttttgttttccttttttaaaatayattttttaaatatcatggagtgtcactatgttgcccaggttagtgtcgaactcctgagctcaagggatcctcccactttggcttcccaaagtgctgggtttgcatcctggatggcctcttaggagctgtgtgcccttgggcaagttgtttaaccttcctgagctcctgcgtccctatctttaaagtgaaaataataatagcacgttttactacttggaaggaggctggaccaggttttctacagccagaccatctacgctttccaaagggcctgggcagcaagtgagtattagtctactaagagtgtaattatgttatattaacagcacctacctccaaaggttgctgcgagcagagagcacctcacagtgctttacagcagtgcccggctataaccatcacagcattattattaatgtgattagcctcattttgcagatgaggaaatataggcccagagaggttaagataccccacgcagggacctgcagctagtcggtggcagggatggcgctggaatccaggggttccctccagaaccccacagcggcccatgctgaaaaccagacaacgcccgcccccgccagaaggcaccctgggaacggaaagctggcagccttccaagtcccaggacgcgctggggcccagcccccgctccgccctcccccatccctggaacaaagtacacttctgccgcaggaaca

SEQ ID NO: 79660 - DNA, 1483 bp, Homo sapiens
ccttttaacccgaggaggaggctgagaatccaatgacttttctgtcatacgattgaggggacaggagcctagtgataatgggacacggagcttcggctgcagagctctcttttgtccacaatttagggcaactgtcttgcactctgcctccatcctctgggtagactcagtggaggaaacgtttccacaggcaccaggcaaccgggctcctggaagcagcagacccgggagaggagagcaactccccagcttggtgttagatatcatctgagactccttacaccctcgcagcttagaagctcctcagattaccaggcaaggcaaagttgattttgacaatgtctggggaaggaagggctgctcttcctggctggctggcataatcagactctggaggagtcggcctgcctatcaaaggaggtgagagctaagttgttgctgcctttccgcttcaggatgaatggattccaccccattgaactggagtgacctggcgcctggattctttcatctctaaaatgggaaaaataattgttgcacatatatggtgttgaaattatggccctcaattggtgataattatcattacttagtattaataattattatttgtgaaacttctcccagaattgctgcatggattgcaatgtccaaataagcttataatggggcttccagacactagcagtgaggcagtttctgtagaggttgagtggcggctcttcaccgactaactgggtttgcgtcccccgcctttttgttttccttttttaaaatatattttttaaatatcatggagtgtcactatgttgcccaggttagtgtcgaactcctgagctcaagggatcctcccactttggcttcccaaagtgctgggtttgcatcctggatggcctcttaggagctgtgtgcccttgggcaagttgtttaaccttcctgagctcctgygtccctatctttaaagtgaaaataataatagcacgttttactacttggaaggaggctggaccaggttttctacagccagaccatctacgctttccaaagggcctgggcagcaagtgagtattagtctactaagagtgtaattatgttatattaacagcacctacctccaaaggttgctgcgagcagagagcacctcacagtgctttacagcagtgcccggctataaccatcacagcattattattaatgtgattagcctcattttgcagatgaggaaatataggcccagagaggttaagataccccacgcagggacctgcagctagtcggtggcagggatggcgctggaatccaggggttccctccagaaccccacagcggcccatgctgaaaaccagacaacgcccgcccccgccagaaggcaccctgggaacggaaagctggcagccttccaagtcccaggacgcgctggggcccagcccccgctccgccctcccccatccctggaacaaagtacacttctgccgcaggaaca

SEQ ID NO: 79661 - DNA, 639 bp, Homo sapiens
aaatgggccaatgtgacttaaattaggtcaatcaaaatgtgtcttctaggaactttaattttgagggactgatacaaaaacagaaaatgtttggggccaattcatcctaattctggcagtccaaggcaacagaccactggttgctgctttccagattcctcaaactgccctcctgcctgtccttctggagcatggrgcttcagcttttccttcatctttctgttgcctcactcttccaataaagaactttcaaagtaagttacccagaatcgatttctgttgcttactacctaagacccctgactaatacagcatccataccatctaggcctttgaagacctatcacctccccaaaaagctcaggcttttcaggtgtgctgtgtatgtttcatggtgttttatgtatgctgtggatatggagtggtcaggggatgagcagggcaggttgggtgttagggactaagagagatgtcagtgtcagccaggttcatatcccacattcctgagccatgctgtcagactgggaggtgcaacacccacgggaggggtccagggctgagtataggcagagcatgaaaccacaggctgaacacactacgttttctggaggtgccaatttgaagattttatggcaggtg

SEQ ID NO: 79662 - DNA, 1815 bp, Homo sapiens
gtttttgtagagatgagggctcactgtgttgtccaggttggtctcaaacccctggcctcaagcaatcctctcacttcagcctctcaaagtgctggaattacaggcgtgagccattgcacccagctgggaagaagatgtttataaaaacatctgatgagattgtggctgctctttcactttctattactctgtatttttcaaatgtaactcagtaaacatatattattttgtaataataataatttgttttagaaaatgttaaatctcttggtaagagtcccagcaaggcagtgggagaggcgggattcaatgcaagtctcctaatacccaaatggaacccctcttttctaccccacggcctcctcggtcctttttggcaatcctgtgggggaggcagaagagtgtagctatgaaggctgggtgcggtggctcacgcttgtaatgccagcactttgggaggccaaggcaggcggatcacctgaggtcgggagttcgagaccagcctgaccaacatggagaaaccctgtctctactaaaaatacaaaattagccaggcgtggtggtttatgcctgtaatcccagctgctcgggaggctgaggcaggagaatcactcaaacctgggaggcagaggttgtggtgagccaagatcatgccattgcattccagcctgggcaacaagagtgaaactctgtctcaaaaaaaaaaaaaaagaaaaaaaaaaaaagaatgtagctatgaagggcatgggcttggagttacacagacctgggttcaagtcttgggtcctccattgactcactgtgtgaccctaggcaagatgcctaacctctctgagcctcagtttcctcagtggcagagtggggtaattatagtagtggatgttgtcgatgtcattattaaatcatccctgctactgaccgtgctaagcacaaaacacttctaaagggctggtttctggccccttcctcccaccaggcactgctgccccacatacacacagacccgcatacaaccactgaagtcctagtgactccccacttcttaaatattccttcctcaggagaaatggggcctccttcstctgtgatgcagtggcagctcacggtgatgctcggggaccaacattctccagcaaatattgttgaggcttctacccttcctcctcccccacccagtggtgattcacttcgccctctgcattttgatgcatgagattcatggggcatgtgccactgctgcacaccagcctgggtggagtgactgcgaggaggtgttctgtcccccttactggagtgagagtcctaggagaacacagcctgcatcttacagggaggcagctgttgctgaagaaacaacttgcacttcaggcaggtctggatttgagtcttagggctactacttcctggctgtgtggctttgggcaaatcacttcacctctctgaacctcagctttctcagctgtgaaatgggtatgttggcatcataagattcttaggaaaacaaaatgagatgagagatgccaagagtgcagcacagtgtctggtgcacagtggggacccaagttccttagctggtgtcaatagaaatagaaaagtggcctcctcctacaccactgccacccccagccctaatcctgtccctctccaaccctataccctgctttatttctttttcacagcaattgtcaccatttggaattatagtaatctttcttgtccatctccctgctggagtgtaaactctagagagcaggaactagcttgccttaatcccctactgtgtcctcagctcctgacacacaagaggtactgagt

SEQ ID NO: 79663 - DNA, 766 bp, Homo sapiens
ggtaataaatgattattgttttaagcattaagctttaggataattaattttaatttttattttatgttttttgagacagtctcactctgtgacccaggctagagtgcagtggtgtggtctcggctcactacaacctctgcctcccgkgttcaagcaattctcctgcctcagcctcccaagtagctgggattacaggcatgtgccaccacacccagctaatttttgtatttttagtagagacagggtttcaccatgttggccaggctggtcttgaactcctgatctcaggtgatccacttgcctcgggctgccaaggtgctaagattacaggcatgagctgctgcacctggcctattttattttttgaaacagtctctctctgtcacccaggctggagtgcagtggcgcaatcttggctcattgcaacctctgctttccaggttcaagcaattctcctgcctcagcctcccaagtagctgggactacaggcacacaccaccttgcctggctaatttttgtgtttttagtagagacgaggtttcgccatattggccaggctggtctccaactcctggcctcaagtgattggccttcctcggcctctcctaaagtgctgggattacaggcacgagccattgcacctggccactgtttggggctaatttgttttgcagccatagtaagtggagcctgcaggaaatgtggaaaccatttaaacacagagtatcaaataaataatgataaacatggctaaaatttggatccc

SEQ ID NO: 79664 - DNA, 1193 bp, Homo sapiens
agctgggactacaggcatgcatcaccattctgggctatttttttttttttttaaatcaagacagggtctcattatgttgcccaggctggtttcaaactctggagctcgagtgatcctcccaccttggcctcccaaagtattgagattacaggcaggagctatcatgcccagcctgtttctgctgtttttagaacacagattattaactggacacaggcacccagaataagactaaatttccaagcatgcttctgactaggtgtggccatgtgtctaagttctcgcctatgggatgagaacagaagtaaaatgtgcctttgaagaggatgtgtgccttctccttcctcttttttcccttcctgctggctgcattgtgcacttggcattgctccatcatgcagatgagaggttgtatgtaacagcagccaaaactacatcctgactaatacctgtgttaatgggccagacactgcactaggggctcaggacacaaaaaccaatacaattaaatttctacattccaggagctcaaaatcttgggtagaagaccaaagggtaagcaaacacttttgaagtcagcactgtggtagccccagggcctctggagcacggcatagccaatcacctaccatgtctatctatccatttgtgcatctctttagccatccgtgcatttcttaatttacccacctacccatagatcagttcctctctcatctatctgttcatgcttgcatttattcatccatctctcccacatatctcatgaggatcctgcagggtttttgttgttgttgttttatgagacaaggtctcactctgtcacctaggctggagtgcagtggtgtgatcatggctcactgcagccttgaccttctgggttcaagtgatcctcccatctcagccccctgactagctgggaccacaggtgcatgccactgcacgggcctaatttttaaaatgttttgtagagatcaggactcaccatgttgctcaggctgatcttgaactcctggyctcaagtaatccttctgcctcagcctcccaaagtgctgggattacaggcatgagccaccataccaggcctctgcagttatttttgttgagaattatatagggcccgttcaattgtatttttctcaaattcaagccaatcagaatggcacctttcacctcaattttaacagatacca

SEQ ID NO: 79665 - DNA, 1193 bp, Homo sapiens
agctgggactacaggcatgcatcaccattctgggctatttttttttttttttaaatcaagacagggtctcattatgttgcccaggctggtttcaaactctggagctcgagtgatcctcccaccttggcctcccaaagtattgagattacaggcaggagctatcatgcccagcctgtttctgctgtttttagaacacagattattaactggacacaggcacccagaataagactaaatttccaagcatgcttctgactaggtgtggccatgtgtctaagttctcgcctatgggatgagaacagaagtaaaatgtgcctttgaagaggatgtgtgccttctccttcctcttttttcccttcctgctggctgcattgtgcacttggcattgctccatcatgcagatgagaggttgtatgtaacagcagccaaaactacatcctgactaatacctgtgttaatgggccagacactgcactaggggctcaggacacaaaaaccaatacaattaaatttctacattccaggagctcaaaatcttgggtagaagaccaaagggtaagcaaacacttttgaagtcagcactgtggtagccccagggcctctggagcacggcatagccaatcacctaccatgtctatctatccatttgtgcatctctttagccatccgtgcatttcttaatttacccacctacccatagatcagttcctctctcatctatctgttcatgcttgcatttattcatccatctctcccacatatctcatgaggatcctgcagggtttttgttgttgttgttttatgagacaaggtctcactctgtcacctaggctggagtgcagtggtgtgatcatggctcactgcagccttgaccttctgggttcaagtgatcctcccatctcagccccctgactagctgggaccacaggtgcatgccactgcacgggcctaatttttaaaatgttttgtagagatcaggactcaccatgttgctcaggctgatcttgaactcctggcctcaagtaatccttctgcctcagcctcccaaagtgctgggattacaggcatgagccaccataccargcctctgcagttatttttgttgagaattatatagggcccgttcaattgtatttttctcaaattcaagccaatcagaatggcacctttcacctcaattttaacagatacca

SEQ ID NO: 79666 - DNA, 846 bp, Homo sapiens
cagcatgtctgggtctcctgtaaccttcctgatgctgctggctgggaatgccccagggagctgcccagtcccagggcaggagggccccatgtgccctgaccccaggccgggccctcctggatgccaggtgggagctgggagggaacgtgctctcctccaagcccagggaagggtgtatccagctcctcctcctgctgcctctggggaagtgtgcaccccaggcaccaccaaattgcccagggtgatctctcctctgccagctggccccccttcctcctggaacagaaactcagtgtctttgcacccacccctgtgtccgtggctgctgccagctgcccctcaacagggcaccccaacatccagccactgctcagcctccatcctcccccagcctcccatttcccatccacagcctggtctggacccccttgcaagcctragcagcgacttggacgtgccaggtcacgacccaggcagctttcccttggagtcttttttttttgagacagagtctctctctgtcccccaggatggagtgcagtggtgcgatctcggctcactgcaagctccgctcccaagttcacaccattctcctgcctcagcctcccgagtagctgggactacaggcacccgccaccacgcccggctaattttttgtatttttagtagagacggggtttcaccgtgttagccaggatggtctggatctcctgacctggtgatccgcccgcctcggccttccgaagtgctgggatttcaggcgtgagccaccgcacccggctcccttggagtctagacgagcccttcctacagcaatgaatgctgggtcagacctgagcttctccg

SEQ ID NO: 79667 - DNA, 850 bp, Homo sapiens
cctcccaggtttaagcagttctcctgccttagccctcccgagtagctgggattacaggtgcacaccaccaagtccggctgatttttgcatttttagtagagagagggtttcaccgtgttgcccaggctggtctcaaactcctgaccttgtgatccacctgccttggcctcccaaagtgctaggattacaggcgtgagccaccgcgcctggcctcaaaattaagcaacttctaaataacccatgagtaaaagtgggagtatcacgagaaatttaaaaatatcttcaactagggcgtatttttaagactctgtcttaaaaatacatatatgtatacacacacacatatatatataactaaatgaaaattataacatcagatttgttaggagcaactaaaacattgctacaagggaaatttctagcatgaaaaactyctattcgaaagacaaaatcagctgtgtggtcccctctcagggcacgtcacgtggtgacgcggcacgtctgcccccaggtacatcgagtacatgtgtgacatggtggcggaggagcccatcacaccccacagcaagcccatcctggtgagggccgtggtcatgacacccgtgccgctgttcagcaagcagaggagcggctgcaggcccttctgcgaggtctacgtgggggacgagcgtgtggccagcacctcccaggagtacgacaagatgcggtgagtgcagctgcagccccacgctgtgctccctcctcctcacccctccggaaaaccgttaaagaggaaccctggccttgccggggacaggcgcttgctgaggcggacgtgtttggaactgtggcgtctgtggcaggtcacttg

SEQ ID NO: 79668 - DNA, 850 bp, Homo sapiens
cctcccaggtttaagcagttctcctgccttagccctcccgagtagctgggattacaggtgcacaccaccaagtccggctgatttttgcatttttagtagagagagggtttcaccgtgttgcccaggctggtctcaaactcctgaccttgtgatccacctgccttggcctcccaaagtgctaggattacaggcgtgagccaccgcgcctggcctcaaaattaagcaacttctaaataacccatgagtaaaagtgggagtatcacgagaaatttaaaaatatcttcaactagggcgtatttttaagactctgtcttaaaaatacatatatgtatacacacacacatatatatataactaaatgaaaattataacatcagatttgttaggagcaactaaaacattgctacaagggaaatttctagcatgaaaaacttctattcgaaagacaaaatcagctgtgtggtcccctctcagggcacgtcacrtggtgacgcggcacgtctgcccccaggtacatcgagtacatgtgtgacatggtggcggaggagcccatcacaccccacagcaagcccatcctggtgagggccgtggtcatgacacccgtgccgctgttcagcaagcagaggagcggctgcaggcccttctgcgaggtctacgtgggggacgagcgtgtggccagcacctcccaggagtacgacaagatgcggtgagtgcagctgcagccccacgctgtgctccctcctcctcacccctccggaaaaccgttaaagaggaaccctggccttgccggggacaggcgcttgctgaggcggacgtgtttggaactgtggcgtctgtggcaggtcacttg

SEQ ID NO: 79669 - DNA, 1320 bp, Homo sapiens
ctgggagtccactccttctgccccagtgccggctgcccagggcagtcaaggcacacgcaggtctcctcccgagggcacggccctcgcaaccccaccgtgctctcagacaayacaagacagaggccacaaagggaaataaaatacaaaaccacaccgacagaaacgctcatggatgtcctcaagacatagtaaatccccaaaaccacctgaaacataaaaagaacattcaaagacgaaaaaactcttgggacttcatgacagaacagaaggcacttcagatgtgagctcgcaagagcagagtgaggactcaaagccagcccgggagagagtgaggactcgaagccagccctagagatccaacgccgacacctgctcacaggaatttgaggcactcagggaaggacaggagaaacgatgaggagacgggaaatgctcccggagctgagcaggagcagatgccatagcctggggctgcatgctggagcgtccgggggtcaccggcaccaacaagcatcccaaggtggagccacttcccacccagcattccacccgacggccaggcaagtgcaagggaggccccttcagatgatcatccccccgccgccgacgcttcttctgagaagccacagggaccccagggggatgcatcttgggagtgaacccagagacccaggggcatcaggtcagcccaaggagacttgaagccacagcgcccggggccgggcctgaggcagacgtgggaccggagactcagaccacagcgcccgggccgggcctgaggcagacgcaggactggagagggtgggctcggttcttgtggccgacagctagcacgctccgagcacagcctcggggactgagcagagcccagctacaccccacttccatgcagagaccccgcctccccgatggcccccatggccctgaggacaggatggatcacgcaccacaatgccggtgggggctggcagcagtgccagtgtcagcaactcccggttttagcttgccagttggcagtcgcctggaacaggtgcagacacgctgtccccttgggctcactgtgctctgggcttgggggtcttagtgaacagaggcaaagacttcactttgggcagctcagagtcagatagacgagaataaacctcctacaaggaaacagcttccacacccccaaagtgccctccacgttaccttggaggccggagctgaggtcgccaaggtcagcaaatgggtccgggttctgagacttggtccagctggcctgagagccacaaggggccggctgacctccaggagagaagagggggcctggagaagggg

SEQ ID NO: 79670 - DNA, 792 bp, Homo sapiens
tgtacaaaaataattataataaaaggtgtaggatatatatatatatatatccacccctgatcttttatatactaggtagactctgcccctgcagagttgaggagcagaggaagaactgtaaagggcaaggacagatcttacttgagaggtattgtagtattttggtcttggtgctctttggactcttgctgcattgtattagtggattcaccagagacctgtttagtgacctctcacaaaattcccttaacacatctgatactcccaccagccagccacttattacccatcctttagccccttgtttctgaaaggccaccccatagaccctcttttaggatcttaacaccccctgcaggctatcctgttgagactatgtaaaatcactccagatcatgatccacactggatcgactggaaattcacacattttctctcgcaaattaggagtgcagactattctgtaggcaaccatttttctttgctctgtcttctggccatcacagtcctctggcttttagacttttctagagcctctaaaccccacagtctccagagctatcacatgcctcccgagtcttctcttctacaagggcatattaatagatgctttaacaattctttatatgatgtgcttttgaggctgtattagctagctattgctgtgtaacaaaccaatccaaacttagtggtttgaagaaccgttactataccttgtgagtctataggycagctggatggttctgcttatctaggccaggcttagttgatctcagttggacttatatatgc

SEQ ID NO: 79671 - DNA, 780 bp, Homo sapiens
ccaccccaaagttctaagcagatacacgataggaaagaatttctctgcctacaggaagccagaagtgatcatgtgacttatttgggccagtgaaatgtgaatagaagtgatgctacattctggccaggcatggtggctcacgcctataattccaagactttgaaaggccaaggtgggtggatcacctgaggtcaggagttcaagaccagcctggcaacatagtgaaacccaatctctactaaaaatacaaaattggccaggtgtrggggtgcatgcctgtattcccagctactcaggaggctgaggcaggagaatagcttgaacctatgaggcagaggttgcagtgagctgagatcatgccattacactccagcctgggcaacaagagtgaaactccatctcagaaaaaaaaaaaaaaaaaaaaagaaatcatgacacattctatttttttctagccagtgactaacaattttaagatagtggcttttcagaactcaaacaaatttacaagaaaaaaacaaacatccccatcaacaattgggcgaaggatatgaacagacacttctcaaaagaacacatttatgcagccaacagacacatgaaaaaatgctcatcatcactggccatcagagaaatgcaaatcaaaaccacaatgagataccatctcacaccagttagaatggcaatcattaaaaagtcagggaacaacaggtgctggagaggatgtggagaaacaggaacacttttacactgttgatgggactgtaaactagttcaacc

SEQ ID NO: 79672 - DNA, 814 bp, Homo sapiens
tccctgagttgctgctcgcagcacactgcctatgaggtagtcctgctctgcaggagcagtgaccaagctataacaccacctcctcaataaagctgttttcttctaccaccagcttgctcttgcattctttcctgagcaaagccaagaactgtcctgggctaagccccagtgttagggctcacctgccctgcactgcagtgagcagagccttcctgctgaatgacagtggatttgtaatgggagtaagaattaagactttgttgtcttagccactttgatttgcaggggctttcttattactgcataaaagctgcaggctatcttgactgatagagcaggagaccagcatgatgagatttatatttttaaaagataattgagacaatatggaggatggattagaagtagtagaggaagttaattacaggcacaaaaccaatacagagatattgcaatactccaggaaagagataataaaggccyaaaataagagcaataacagtggaagtgaagaaaatgagttatatttaagaaatatttacattgcaatatcaacaatattacattgcaatatcaaagaatatagtgattatcaaaatgtgctatatagattttttttcacctattcctatgtaaaaattaccccaaaacttattgacttaaaacaatgataaaagacattatctcacagtttctgtgggtcagaaagttcaagaacagcttagctggtggtcctggctcaggatttctcatgaggttgcagtcaagattttggccagggctgcagtcatctgaaggtttgactggggctgga

SEQ ID NO: 79673 - DNA, 842 bp, Homo sapiens
tgttttagatttttatctgcttattatcgttccattgaaatttaagctccatggtggcattttgttcagagaaaactcttcactgctttaaaagtccctggcacatagtaggcgcccaaaaaatatatgttgaatgaatccattggtattaaatcctgtggtcaggaaacacttatggcaacatcatttttagctaaatgggaacttaatgtagggacttaccagaaactgaaagcagaaatgtcacagtcattgctataggccatgtagttgccttcrattttaaaaacaatgaggccgggtacagtggctcacacctgtaatcccagcactttgggaggctgaggcaagtggatcaattgaggtcaggggttcaaaaccagcctggccaacatagtgaaacctggtctttactaaaaatacaaaaatcacctgggcataatggcacacacctgcaatcccgctacttgggaggctgaggcagagaattgcttgaacccaggaggtggaggttgcagtgagccaaaatcacgccactgcacaccagcctgggtgacagagtgagagtccatctaaaataaatttaaaaagacaatgacagtcacagtacctctgaaatctttgtataggatcaaataccagcctattaatatgctcaggagcaagtgaccctgatacgacaggaggtaatatggcaaaatcaaaacttactactactctaaattaatgactttggccatatcattgtcaatatccactgagcctccctcacttctagatatcctgccaggaaattatagaaacaaactcagttacaaagcaataaaggacactgccgtgaa

SEQ ID NO: 79674 - DNA, 1042 bp, Homo sapiens
ttggattacacttccttctagtcactgggggcttagggcaatgaaacaaggatgagtcgttgcaagtctatctctatgaccaggaaaataactccaacacagttagtaaaccttcagacagtagggtcacagacctcatttcataagtcagtgaggtggccaatcccacagcacaataactaagtatgatataggaattttaaaatagaggggaagtaaagaggaaccatcagctcaatatctgtagcatcaaatttggggagcaatgtaagttcaagagaagtccaacaagggataaattaaaatctgccctcattcttccttgctaagccaaaaacatgttccttaaacttctgagcctgaacctggccacatgtatgagttcaggcctgagtctaaggtatgggcatctttgcagccttgaaactttactttaagcaacttctatattctattggttgttgctcctgttttcttacctgaaaaagaagaagaattatattggcagcagaaactgagtgatagagaaaaacctgaaattgccttcttctatttctttattacaacaaaccaaccaaccgatgacactgtctgtccatccacctttatccacaccaacaaccaaaaggctttccactccatagacctggagggctgggctctgggcagtgaggtgctcagagcagcaacaggcaggaccttgccaaaggtaatgtgggcatcagttgctgtggaaggcaagtcccaacctcagtgctatccctgggtggcactatggctaagagaaatcacatgtttttgcatggtctggacatgctcgtaaccagttatgtgagaccccagggttggcctgtaygaaaacttgcatgtgtcccttgctagtgtttttactcactctggtggtcagttatagcagctcagggcaagttgacgcttcaccaccacccccagctccattccactgattatatgacatatgcctcaattgcttctgctgtcaaatgggaatacaatggtaccaacctcattgtgtggttaagaa

SEQ ID NO: 79675 - DNA, 926 bp, Homo sapiens
ttttctgggaaactgttttatttaagatattttatgttttctcctttccaataattcatttgaagttttttttaaggcaggacttgcagaaataacatgccgatgatgtttcttccttttcgaggttagaaaaaattttttttatgttattaggtcacacttgaccaaaagtctgcctttttcttcccaacacagactaatagctcagcgcattaaaacaaaaaaatggttttcagagcaaacacttgtgtcttctgattttcattcagtcygaatggcatatggaacctgctgatttgaatggaatcatgcagatcccaggcattgctcatggcttatttccttgtcaatagccaagaatggctcattcatcttacattcatagaatatttattgcgtattactgtattccaggtatgaagagaaggtcctggagattcaagtgtgggaaggcagtcccggcccccattgctcgccgaacagcttccagtctgcacggaagtaagtactctcgggtggtttgaggaacagcaatgcacagctgatatagaaattggtctgctaaagttggttactgtcatcacaaaacctaaacacctgctgttgatgggccgtggacagggtggtgggtggcaaatgaaatggcagcgagcggggactggcacccttcagagaagctgttgtggaccccaggcagggtagatgcctgcagggtagacccacgacaaccgcagaactgtcaggggagatagagtgaagctgaggagcttcatctggcaaaggcgagctccagcagtcagcgtttcggccgagttctcctggtggtgcaggacaggggaggacatgagcgccgccgtcggcagcagaatcgagaggggacacccagaggccagtgcttgtagggttgtatgagaaaactcatttca

SEQ ID NO: 79676 - DNA, 878 bp, Homo sapiens
gctcgttctgtttctgattaactcgcgggtcatgaggctgctgttgcagggagatccagagctggaaaacaccgctatagaccagcacaacttcacattttggtctacatggatcattttgagagtatgattaaacatctaatctccaattaaaaagaaatccatgtgtatacctctttccaaaatatcccatatatattcagaaataagggctttttaatacaaaatcacttaattcttccaaacgtcgttatctgtgccacctacagttgcaaccacgttcaaggtagagactgactagcttgatacaatggatgtttaggattatctcttgcagggaaaatggagaaaataagcttttttaatattgctctttaaacctagatatgttggccattttagggtttacttacatgatgtaaaaagtacctaccagggcaatagttttaaaacccttatttccaaagcttataaatgcttctgtgggttctaccttaattgttataaacagccttttctccatctctcattcactctgctycaggcctgcccatgtctcagctctgtccagcttgaattaaactgttgtttaggttgggaagtgttaatgagtccctaacacttctcagctgtccagtctcagctcaaaatagcttcctcaccagacatctctttaggggctgaccgtctgcaggcctcatctggcccaaatatgtattgtcagcccacagaggcgtgtggtttaggtgctggctggtttgagaagtaacctgaacatgatgttggctaggcatacacttggttttgccacagtcttcgctatcccctactggccagcctggccgattcatccctttatgttagtgctgggcctttcc

SEQ ID NO: 79677 - DNA, 1456 bp, Homo sapiens
ggttcaaggccagcctgggcatcatggaaatggcctgtctggccgggcgtgttggctcatgggtgtaaccccagcactgtgggaggccgaggcggatggatcacctgagatcaggagttttgaccagcctgaccaacatggttaaaccccatctctactaaaagtacaaaaaccagctgcgtgtggtggcacacacctgtaatcccagctactcgggaagctgaggcatgataatcgtttgaacccaggaggcgaaggttgtggtgagccaagattgcacccctgcactccagccttggtgacaagcaacactctgtcaaaaaaaaaaaaaaaaaaaacacacttcacctttacaaaaaatacaaaaattagctgggcgtggtggcactcgcccgtagtctcagctactcaggaggctgaggaggaaggatagcttgagcccacgaggttgaggcttcaktgaggtgtgatggtgccactacactccagcctgggcaacagagcgagaccctgtctcaaaaaacaaaaataagaaaataaatgatatgtactgaataccactccatcctaacaatgaagcacatcttactcaccgctgtataacataacgtgagggtgtcatccccactctaagaaataagggaaaagaggcagtaaacttttggagaattctcaggtgaaatcccaggtaaaatttcattattgtcattgtacttgtaaaaaatacttaaggccgggcatggtggctcacgcctataatctcagcactttgggaggcccaggcaggtggattacttgaggccaggagttcaggatccacctgggcaacatagtaagaccctgtctctactaaaaaaaaatacaaaaattaaccagtcatggtggccggtgcctgtagtcccagctacttgggagactgaggcaggagaattgcttgaacccaggaggtggaggttgcagtgagccgagatcaggcatctgcactccagcctgggcaacagagcaagactccacctcaaaaaagacaaaaaaaaaaaaaaaactataacaaatcatgagctctaaacaattttagagtaagtaacataaatctgtatccatatgaaaagcacttgttcagtttggcctagggtctatagtgggggtcttgtcctcgaagagggcatgcgctctggggacagctggatgacctgagcagtaaaggagacgaggacagagggcgctgtgagtgccgggcccagggactgactccccattcttgagtccaatgtgcttttgttctgcccagctcttggaagactcggccccccagagtcttggcagtgtggatgtgacagggtccccagcgggacatgggcacaggaagagctgggggagggtccccaagcatgggctttcccatcagggagccaacagagcaaaatgtttggagcgtgacaaaatgttaacatttaaa

SEQ ID NO: 79678 - DNA, 669 bp, Homo sapiens
ataaaaacacttaagaagctgctgagcacagctgcatggcaggagggtggagcaccccaactccatggggccagatgctcctgtgcttgggaccttcaagaccccgctctctccatcgcttcatctgcctgttcttctgtgtcctttattataaccttattaacaaaccatcaaatgtaagtatrgtgttttgctgagttctgtgagctgctctagcaaatgaattgacctcaagaagggggtgctgggagcccgatttgcggccattcagtcagaagcgtggtggctggtatctgacgtggggaccgtcttatgggacagggtcctttaacccgtgggatctgatcctctctctaggtagacagggtcagagtgaagttgaattacaggacacccagctggtgtcctctggagaattgtttggtatgttggatttagtgagacaagatataggaaagtgttttttattttttggagacagggtctcattctgtcactcaggctggaatgtagtggcacaatcattgctcactgcagcctcgaactcctaggctcaaggaatcctctcacctcagcctcccaacaaacagggaccacaggtgcacacctccaagtcctgctaattttcatatgttttgtagagatggggtcttactatgttgcctaagt

SEQ ID NO: 79679 - DNA, 669 bp, Homo sapiens
ataaaaacacttaagaagctgctgagcacagctgcatggcaggagggtggagcaccccaactccatggggccagatgctcctgtgcttgggaccttcaagaccccgctctctccatcgcttcatctgcctgttcttctgtgtcctttattataaccttattaacaaaccatcaaatgtaagtatagtgttttgctgmgttctgtgagctgctctagcaaatgaattgacctcaagaagggggtgctgggagcccgatttgcggccattcagtcagaagcgtggtggctggtatctgacgtggggaccgtcttatgggacagggtcctttaacccgtgggatctgatcctctctctaggtagacagggtcagagtgaagttgaattacaggacacccagctggtgtcctctggagaattgtttggtatgttggatttagtgagacaagatataggaaagtgttttttattttttggagacagggtctcattctgtcactcaggctggaatgtagtggcacaatcattgctcactgcagcctcgaactcctaggctcaaggaatcctctcacctcagcctcccaacaaacagggaccacaggtgcacacctccaagtcctgctaattttcatatgttttgtagagatggggtcttactatgttgcctaagt

SEQ ID NO: 79680 - DNA, 669 bp, Homo sapiens
ataaaaacacttaagaagctgctgagcacagctgcatggcaggagggtggagcaccccaactccatggggccagatgctcctgtgcttgggaccttcaagaccccgctctctccatcgcttcatctgcctgttcttctgtgtcctttattataaccttattaacaaaccatcaaatgtaagtatagtgttttgctgagttctgtgagctgctctagcaaatgaattgacctcaagaagggggtgctgggagcccgatttgcggccattcagtcagaagcgtggtggctggtatctgacgtggggaccgtcttatgggacagggtcctttaacccgtgggatctgatcctctctctaggtagacagggtcagagtgaagttgaattacaggacacccagctggtgtcctctggagaattgtttggtatgttggatttagtgagacaagatataggaaagtgttttttattttttggagacagggtctcattctgtcactcaggctggaatgtagtggcacaatcattgctcactgcagcctcgaastcctaggctcaaggaatcctctcacctcagcctcccaacaaacagggaccacaggtgcacacctccaagtcctgctaattttcatatgttttgtagagatggggtcttactatgttgcctaagt

SEQ ID NO: 79681 - DNA, 488 bp, Homo sapiens
tcctgatagcccccatggaacagggcttcgtggattcaggcgtcagaatcaagcctagagagaggagatgtttaccgctcatggcagagtgaggcctcgcggtgaatggaaagcatggctgggcacaggggtggtcctgatggaggggccagaggctgatgatggcgtggaggccctgacacagggcagccccgccagcctctgcatggccgggggagttacacccttgaggacgggttccaggaataagatgtgtratatgcagaagacaacagggcctttgtgtggaaaggcatccgtgaattaacaccaatggcggagagcaggcagtagggaagcggccgcggtgggcgctgttccgcaccccgtgtggtctggcttgcacggccagggcagcccaggcgtcggcctcctgtttctctcctgccatgatcctctttctacccccaaagctcttacctggcccctgtatccaagccttcctcggg

SEQ ID NO: 79682 - DNA, 749 bp, Homo sapiens
ctgtcatccagactggagtgcagtggcacaatcttggctcaatgcagcctcggcttcctgggctcaagtgatccctctgcctcagcctcccaagttgctgggaccacaggcacctgcctttacgcccttcttgtgctgggatttcgggtgtgagcctccacactggccctgtttctcacgatgggatttcagctatgagcctccacgcctggccctgtttctcacgctgggattttgggtgtgagtccccttgcccggccctgtttcttgtgctgggatttcgggtgtaagccccggcgcccagccctgtttcttgtgctgggatttcgggtctgagcccctgcacctggccttgtttctctggctgcctccctttctcagactcctgtagtggtgtttccgtccaacacctgtgttttacagcatgtgggtttttttctcctctctgcyatcaatatgcaaagtgctgaggttgcactcttaagccctgtgaaaaggactttgctattgttactggacaatttttcttcatgttacttccaatttcttggaaatcggtaggtgcttttcctcacccaactggggttttccatttccgtctcctggatctagatggctctgctcttttatcagcagagagcactggttcccgcgccttcagaggggactgttttagagcctccagctctgtcgtgtggctgtgccagtaaccccggaaaggcttacaccctagtgtagtaatagaacac

SEQ ID NO: 79683 - DNA, 749 bp, Homo sapiens
ctgtcatccagactggagtgcagtggcacaatcttggctcaatgcagcctcggcttcctgggctcaagtgatccctctgcctcagcctcccaagttgctgggaccacaggcacctgcctttacgcccttcttgtgctgggatttcgggtgtgagcctccacactggccctgtttctcacgatgggatttcagctatgagcctccacgcctggccctgtttctcacgctgggattttgggtgtgagtccccttgcccggccctgtttcttgtgctgggatttcgggtgtaagccccggcgcccagccctgtttcttgtgctgggatttcgggtctgagcccctgcacctggccttgtttctctggctgcctccctttctcagactcctgtagtggtgtttccgtccaacacctgtgttttacagcatgtgggtttttttctcctctctgctatcaatatgcaaagtgctgaggttgcactcttaagccctgtgaaaaggactttgctattgttactggacaatttttcttcatgtkacttccaatttcttggaaatcggtaggtgcttttcctcacccaactggggttttccatttccgtctcctggatctagatggctctgctcttttatcagcagagagcactggttcccgcgccttcagaggggactgttttagagcctccagctctgtcgtgtggctgtgccagtaaccccggaaaggcttacaccctagtgtagtaatagaacac

SEQ ID NO: 79684 - DNA, 1785 bp, Homo sapiens
  misc_feature (1)...(1785): n = A,T,C or G
ataaatgaaagctaatattattttcatgttcaaagtcaatggaaagagttggctatgaaaaccctcacacataccaatacccagattattttatcattttatctttagatatctcattcacaaatatagaaatgtgggtttatgggggcccaggggtgggatggtgaaatactctctttgagagaaaaaaggatagtttataaaatttcatgagtatgttagttttattgctactgtaacaaattatcacatattagctgcttaaaacaacaaaaatttgttaccttagagttctgcaggtcagaagtctgacatgggtgtctgtgaggctgaaatcaagatacctgcacgtctgtgtctctttctgagggatctttggaagagtctgtctcttggtgcattcaggttgttggcagaattcnnnnnnnnnnnnnnnnnnnnnnnnnnnnnnnnnnnnnnnnnnnnnnnnnnnnnnnnnnnnnnnnnnnnnnnnnnnnnnnnnnnnnnnnnnnnnnnnnnnntatcagtctattacacaaagagacataagcagcaaaaataagagtgagaactcccactaataaaaagtgagagtctcaaaaggggggaatgagggaagagagagaccctctcatattgttttatattgttttatactcagtacctgttttaagaaaaaacaacaaggaagcaaaaccaaagacaggcagcccggcaccaggcccgaaaccgggcctgggtctgcctggcctaaacccggtagttaaaaatcaactcataacttagaaaccgatgttattcatagattccagatatcgtatagaagaacattgtggaactccctgctctgttctgtttctctctgaccaccggtgcatgcagcccctgtcacgtaccacctggttgctcaaatcaatcatgaccctttcatgtgaaatctttagtgttgtgagcccttaagagggacagaaattgtgcattcggggagctcggattttaaggcaatggcttgccgatgctcccagctgaataaagcccttccttctactactcggtgtctgagaggttttgtctgtggctcgtcctgctacactatcagctgtggttgaaggttctgcagggagagttgtggcaattccagtctgctctacaggcgggcagggtggactcactcaggtagagtcacaggtgtgggtagttggttggaagtctggctagagtgcaagacaatgttaagagatgaataaatatgggaaggcacagctagcactcttacagacagtccattaacattcctgagtctgttttctcatttttaaagtggaaattccaagaactattttggaaatgttgaaatgtmagtgaaggcactggctgggatccaggaccccaaacactctgtcttaccatagtaagagatcccagttctgtcttcctatactcactcttcctttggaagtgtccatggtgtatgtttgtgtctatgcacacaaacaaggctgagaaaaggaacacactacaactagatggaaccctaatcctgttcagctaagactacacagatttgtgggaattctgttgctcagagaaggcaatcctaactttgggcaggaggcctctttggaccctttaacccggagccatgctaaaatatcagccctctgattcgcaaactctgatactgggaaaagataagtctttttgagtattaactagatacatgcagttataaagtacctagtacagtacctgacatatagtgtctgccatatagtaggtttctcc

SEQ ID NO: 79685 - DNA, 1153 bp, Homo sapiens
atcattgattatacaggaaagaaagcacaccaatatttcctattgaataacagtatctttacatttcaaaggtaaaaacaataatgatattacatcgatcaatgtgcataagaagatgtagagagtagaaaggaaaataattattgatgaaagagcttactcaaatggacagacatgaacctagatgtttttaaattttattattttaattcaaaaatttaacccaatttttctaaccaaataagttgtaaaataagacctctactactactactacaactactgttactactactgttattacaggtagaaaatggggaaaatcatgttattaaatttacctctatgtgtataattatcacatagaatgtttataaacttcttacaaaaatatacagcaatcattgtaatgatttgtgtaatatgcaagcaaccattttcttctgagaaatattatcagctaacaatgtcagtttccctctctcatttatagtattttcatgagaattagtacccctgtggttacttttttctcactgaaattttaaaccataaaataagtaagaaaaatgagtattattatttcaaaaatagtagctctttaaattaacacttttgactataggacaacttattctatattatcaagtgctattttcaatggcctcctaatctgttatttgcctctcattttatctttctcaaactcttgccctgaaaagatcaatgcagaattaaacctcaccaattcaccttctttttaaaaaaaatgttaatttaaattcatcacttacaagataaagccaaactttctttaagaaacaatactagtttttttcatgatcaacttcttgcttctctcttcagtgcccgctttccactcccaaccttacacttcacagtkcagtcatagaaaactgaagacatttccagattataacatcacatccatttgtcttcatcaactgctggtccctttccattcctggacttctctacaacccctttctttcagagaattattattcagcttctgagagccagaatcatctctgaaagcagcttttcaggaaatcatcctcaaccctcctcaccaatccaggctctcagtcacagtcataaattatatttagttaacaatataattctatct

SEQ ID NO: 79686 - DNA, 880 bp, Homo sapiens
aatggaacctttaaygaattgagcactttgtcaacactcagatttaatgaacacacatcacttgaatatttttttaaagatttttttcccagataataacctagaattttgagattgtcgaatgcaatctgttacagaaaagacccactcgtgctgtctctttcttccccaaattgcatctagctcataaactatagtattcagttattcttaattccccacagaggagctccataaacaatgacctgttatatcaatgactttgccaattagagtcacagtaggcactacaattggacacatcattttctgttcttctgacatttacaacttcaaatcctacttaaaattgcagttattagattcagtccttatagtcattaatactgaatacctttacgactctcttcagtgatagatcagatgttagacctcaacagtagggctccttgtgtgcgctctaagttttggcaaggccacgttcctcagagtccacagaaggacaccctccatttaatatgaacattgattcaggaaggtgagggtgaatggctttgtggtaattagactgagagctaatgaacaaatgtgttgtagtcgtaacttcccaggatttctaaaagtcttttcaaattgcctgttacataaattggtgttaacgattgtgcaagtctctatttaagagccactatgcttagactaaaagggaattttcaatgctttggggaaatatttttcatctatattaagaataattctttgcatacctatgttctagctctgcctctcagcaaaggaaaatgagctgttctgcatttgtttttcagtgcaaagaaagacatttaatttctcaggcaatgcgtggtaacttaagagcaat

SEQ ID NO: 79687 - DNA, 734 bp, Homo sapiens
agcagagaaagtaggtttgtatttagggaagacacaggaacatttgaagaaaccacgtacctgaacaggtaaggaagggcatcttttttgttgcttttttttttttttagcagagcttctcaaacttgaattatgttgttaaaaagcagtttctaggccgggcgcggtggctcacgcctgtaatcccagcactttgggaggccgaggcgggcggatcacgaggtcaggagatcgagaccatcctggctaatacggtgaaacctcgtctctactaaaaatacaaaaaattagccgggcgcggtggygggtgcctgtagtcccagctactcgggaggctgaggcaggagaatggtgtgaaccagggcggcggagcttgcggtgagccgagatagcgccactgcactctcgcccgagcaacagagggagactctgtcctctgtctcaaaaaaaaaaaaaaaaaaagaaaaagaaaaaaaaagcagattctgactcagtaggtctacgtgggtctgaagttctgcatttccaagatgtttccaggtgatgttaatgctgctgttcctagctcatgtgttggaaggattaaatctaggcaggagaatgggtgggtaatgaggctgggtgtagatcagctatgttgtagggaggacagaaggaagttgagggtcctacctaaagggcttctttcccttagtaaagtagtatttaagtttacttaccaagaattaggagag

SEQ ID NO: 79688 - DNA, 734 bp, Homo sapiens
agcagagaaagtaggtttgtatttagggaagacacaggaacatttgaagaaaccacgtacctgaacaggtaaggaagggcatcttttttgttgcttttttttttttttagcagagcttctcaaacttgaattatgttgttaaaaagcagtttctaggccgggcgcggtggctcacgcctgtaatcccagcactttgggaggccgaggcgggcggatcacgaggtcaggagatcgagaccatcctggctaatacggtgaaacctcgtctctactaaaaatacaaaaaattagccgggcgcggtggtgggtgcctgtagtcccagctactcgggaggctgaggcaggagaatggtgtgaaccarggcggcggagcttgcggtgagccgagatagcgccactgcactctcgcccgagcaacagagggagactctgtcctctgtctcaaaaaaaaaaaaaaaaaaagaaaaagaaaaaaaaagcagattctgactcagtaggtctacgtgggtctgaagttctgcatttccaagatgtttccaggtgatgttaatgctgctgttcctagctcatgtgttggaaggattaaatctaggcaggagaatgggtgggtaatgaggctgggtgtagatcagctatgttgtagggaggacagaaggaagttgagggtcctacctaaagggcttctttcccttagtaaagtagtatttaagtttacttaccaagaattaggagag

SEQ ID NO: 79689 - DNA, 734 bp, Homo sapiens
agcagagaaagtaggtttgtatttagggaagacacaggaacatttgaagaaaccacgtacctgaacaggtaaggaagggcatcttttttgttgcttttttttttttttagcagagcttctcaaacttgaattatgttgttaaaaagcagtttctaggccgggcgcggtggctcacgcctgtaatcccagcactttgggaggccgaggcgggcggatcacgaggtcaggagatcgagaccatcctggctaatacggtgaaacctcgtctctactaaaaatacaaaaaattagccgggcgcggtggtgggtgcctgtagtcccagctactcgggaggctgaggcaggagaatggtgtgaaccagggcggcggagcttgcggtgagccgagatagcgccactgcactctcgcccgagcaacagagggagactctgtcctctgtctcaaaaaaaaaaaaaaaaaaagaaaaagaaaaaaaaagcagattctgactcagtaggtctacgtgggtctgaagttctgcatttccaagawgtttccaggtgatgttaatgctgctgttcctagctcatgtgttggaaggattaaatctaggcaggagaatgggtgggtaatgaggctgggtgtagatcagctatgttgtagggaggacagaaggaagttgagggtcctacctaaagggcttctttcccttagtaaagtagtatttaagtttacttaccaagaattaggagag

SEQ ID NO: 79690 - DNA, 734 bp, Homo sapiens
agcagagaaagtaggtttgtatttagggaagacacaggaacatttgaagaaaccacgtacctgaacaggtaaggaagggcatcttttttgttgcttttttttttttttagcagagcttctcaaacttgaattatgttgttaaaaagcagtttctaggccgggcgcggtggctcacgcctgtaatcccagcactttgggaggccgaggcgggcggatcacgaggtcaggagatcgagaccatcctggctaatacggtgaaacctcgtctctactaaaaatacaaaaaattagccgggcgcggtggtgggtgcctgtagtcccagctactcgggaggctgaggcaggagaatggtgtgaaccagggcggcggagcttgcggtgagccgagatagcgccactgcactctcgcccgagcaacagagggagactctgtcctctgtctcaaaaaaaaaaaaaaaaaaagaaaaagaaaaaaaaagcagattctgactcagtaggtctacgtgggtctgaagttctgcatttccaagatgtttccaggtgatgttaatgctgctgttcctagctcaygtgttggaaggattaaatctaggcaggagaatgggtgggtaatgaggctgggtgtagatcagctatgttgtagggaggacagaaggaagttgagggtcctacctaaagggcttctttcccttagtaaagtagtatttaagtttacttaccaagaattaggagag

SEQ ID NO: 79691 - DNA, 1240 bp, Homo sapiens
catcaaatatatctcttggagacactctcatttccaggagttcccagttgatatgcaaattaggcctttatagttacttccagacacttggaaactgkgagtaaagcttctccagtctgcctctccagtctattctattaaccactatgctatgttgtctctcatatgtagtgggacactgattagtgtttattgatagaaatgatgaagaaggagtgttaccaaagccaaataaaaagtttctgggagtgtattagtcagcttcagctaagttatattgcagcgacaaataaccccaaaatatcagcttacagaaagggttacatgttagctgcaggtgatgcaggctgaaggttcggttcttggaagagagggaaaaggtacactggtatgctggtataacttgcattagagaaagctgatagtgtatatctcttcccaactttgtgctcagtaatgtcacattggtagcttgaaatcagttatggtggaagtacatatactacagaatgtggcaaatattttccctctagaagagccagttgttaaatgtttactagcacaggactggaaaaaaggaaaatgatgggatctcttgttggcccttaaaccttctgcctagaaatggcacaggccatggaaatgctacaggtcacatgcacttacattgtacttgtcaaagcaagtctcatggacaagctgcagtcaatggggccaggaatgtacttcttccactgagaggcactcagtaggtgaggcagggaatattcatgaacaatagcacaatcttccttcctggcggagtcaaaggtgaggactgagaaaaatcccttggaattggcctcaaggagtttgccctttaacatgagagcagtttcagctgaaggaagtgacttttattttactcttgcctgtggtgatcagagttctccaccgattaatttttaaaagttaccatttattgagcaaggattggtaccaagccctgtgatcagatctctacatacaatctcactgagtcatcacaatacacttgctatgtcaaaactattttttcttttttttttgagatggagtcttgctctgtatccaggctggaatgcagtggcatgatcttggctcactgcaatctctgcctctcaggttcaagtgattcccctgcctcagcctcctgagtaggtgggactacaggtgcacaccaccacacctggctaatttgccagaactattatatccctac

SEQ ID NO: 79692 - DNA, 1240 bp, Homo sapiens
catcaaatatatctcttggagacactctcatttccaggagttcccagttgatatgcaaattaggcctttatagttacttccagacacttggaaactgtgagtaaagcttctccagtctgcctctccagtctattctattaaccactatgctatgttgtctctcatatgtagtgggacactgattagtgtttattgatagaaatgatgaagaaggagtgttaccaaagccaaataaaaagtttctgggagtgtattagtcagcttcagctaagttatattgcagcgacaaataaccccaaaatatcagcttacagaaagggttacatgttagctgcaggtgatgcaggctgaaggttcggttcttggaagagagggaaaaggtacactggtatgctggtataacttgcattagagaaagctgatagtgtatatctcttcccaactttgtgctcagtaatgtcacattggtagcttgaaatcagttatggtggaagtacatatactacagaatgtggcaaatattttccctctagaagagccagttgttaaatgtttactagcacaggactggaaaaaaggaaaatgatgggatctcttgttggcccttaaaccttctgcctagaaatggcacaggccatggaaatgctacaggtcacatgcacttacattgtacttgtcaaagcaagtctcatggacaagctgcagtcaatggggccaggaatgtacttcttccactgagaggcactcagtaggtgaggcagggaatattcatgaacaatagcacaatcttccttcctggcggagtcaaaggtgaggactgagaaaaatcccttggaattggcctcaaggagtttgccctttaacatgagagcagtttcagctgaaggaagtgacttttattttactcttgcctgtggtgatcagagttctccaccgattaatttttaaaagttaccatttattgagcaaggattggtaccaagccctgtgatcagatctctacatacaatctcactgagtcatcacaatacacttgctatgtcaaaactattttttcttttttttttgagatggagtcttgctctgtatccaggctggaatgcagtggcaygatcttggctcactgcaatctctgcctctcaggttcaagtgattcccctgcctcagcctcctgagtaggtgggactacaggtgcacaccaccacacctggctaatttgccagaactattatatccctac

SEQ ID NO: 79693 - DNA, 739 bp, Homo sapiens
gaatctctcatgatttcctaagtgtgagctgaggggagaggttccaatgcagggatcacaacaggggattctgggcctgcttctgtagtttatttgtgacctctggtcctgctcaggcctagttcatgacaacgttccatgtccacccttcaatggattactgttgcacatactcgactatacagttgggtggatctgacagtacacaacttacaatgggaaactctggctatataatcagttgatcccccatatatatatattctacatcgtttattgtaactcttgtcagttgttaagctgttgcctcttagcgccgcaaccacacttctgtatcaacttgtgtagtgctggggctggggttcagaaattcactttccagcatatatatatatatatatatataygtatatatatatacacatatatatgtatatatatatatatatatatatatatacacacacacatacacatatatatatatacacatactgttgtcacctctgctttgggtgaccctcaccagtttctttacagattaagaaaccgatgtgaggtttctactgcctgctgagtttactaatcccaattaagtattcagggatggggaaaatagtcacaggagggtgtgaagacccactggactcactgtaaaatgggctttggcaaagactccatttatcatcttgcctccatatctccttactttaacaggagggctatagtggcaatttgg

SEQ ID NO: 79694 - DNA, 739 bp, Homo sapiens
gaatctctcatgatttcctaagtgtgagctgaggggagaggttccaatgcagggatcacaacaggggattctgggcctgcttctgtagtttatttgtgacctctggtcctgctcaggcctagttcatgacaacgttccatgtccacccttcaatggattactgttgcacatactcgactatacagttgggtggatctgacagtacacaacttacaatgggaaactctggctatataatcagttgatcccccatatatatatattctacatcgtttattgtaactcttgtcagttgttaagctgttgcctcttagcgccgcaaccacacttctgtatcaacttgtgtagtgctggggctggggttcagaaattcactttccagcatatatatatatatatatatatacgtatatatatatacacayatatatgtatatatatatatatatatatatatatacacacacacatacacatatatatatatacacatactgttgtcacctctgctttgggtgaccctcaccagtttctttacagattaagaaaccgatgtgaggtttctactgcctgctgagtttactaatcccaattaagtattcagggatggggaaaatagtcacaggagggtgtgaagacccactggactcactgtaaaatgggctttggcaaagactccatttatcatcttgcctccatatctccttactttaacaggagggctatagtggcaatttgg

SEQ ID NO: 79695 - DNA, 739 bp, Homo sapiens
gaatctctcatgatttcctaagtgtgagctgaggggagaggttccaatgcagggatcacaacaggggattctgggcctgcttctgtagtttatttgtgacctctggtcctgctcaggcctagttcatgacaacgttccatgtccacccttcaatggattactgttgcacatactcgactatacagttgggtggatctgacagtacacaacttacaatgggaaactctggctatataatcagttgatcccccatatatatatattctacatcgtttattgtaactcttgtcagttgttaagctgttgcctcttagcgccgcaaccacacttctgtatcaacttgtgtagtgctggggctggggttcagaaattcactttccagcatatatatatatatatatatatacgtatatatatatacacatatatatrtatatatatatatatatatatatatatacacacacacatacacatatatatatatacacatactgttgtcacctctgctttgggtgaccctcaccagtttctttacagattaagaaaccgatgtgaggtttctactgcctgctgagtttactaatcccaattaagtattcagggatggggaaaatagtcacaggagggtgtgaagacccactggactcactgtaaaatgggctttggcaaagactccatttatcatcttgcctccatatctccttactttaacaggagggctatagtggcaatttgg

SEQ ID NO: 79696 - DNA, 739 bp, Homo sapiens
gaatctctcatgatttcctaagtgtgagctgaggggagaggttccaatgcagggatcacaacaggggattctgggcctgcttctgtagtttatttgtgacctctggtcctgctcaggcctagttcatgacaacgttccatgtccacccttcaatggattactgttgcacatactcgactatacagttgggtggatctgacagtacacaacttacaatgggaaactctggctatataatcagttgatcccccatatatatatattctacatcgtttattgtaactcttgtcagttgttaagctgttgcctcttagcgccgcaaccacacttctgtatcaacttgtgtagtgctggggctggggttcagaaattcactttccagcatatatatatatatatatatatacgtatatatatatacacatatatatgtrtatatatatatatatatatatatatacacacacacatacacatatatatatatacacatactgttgtcacctctgctttgggtgaccctcaccagtttctttacagattaagaaaccgatgtgaggtttctactgcctgctgagtttactaatcccaattaagtattcagggatggggaaaatagtcacaggagggtgtgaagacccactggactcactgtaaaatgggctttggcaaagactccatttatcatcttgcctccatatctccttactttaacaggagggctatagtggcaatttgg

SEQ ID NO: 79697 - DNA, 889 bp, Homo sapiens
tcttcaccccctttccctggtcccagaggatgaagctcaccttctgttgagaatggattcctcccctagggccccttgaatccactcaggcctcttctgggaactgactccttcaatgagcccacttttgactctgtatttttgtctccttccttgtcattggctgcttttcctcagcctagaaacaggctcaacttcctattcaaatgatactctctacagttgccccaccttgagctaccacctcatttcttgcctgtctctagcccagcactttgagagaattgtctgtacatcctcctgcgtcaccatcagcccattgcagcctgcgcatcctcctgggccagcagcagcccactgcagcctgcacatcctcctgggccaggaccagccctctgcagcctgcacatcctcctgggccagggcagcmctctgcagcctgcacatcctcctgggccaggaccagcccactgcagcctgcacatcctcctgggccagcaccagcccactgcagcctgcacatcctcctgtgccagcatcagcccactgtggcctgtgcatcctcttgggccagcatcagcccactgcagcctggctctgctcccccaccactccactcatcatctcctaattgccaattaaaaatactttcggagacacagttgctgctgtagaaaaacaaaagagaggaaaactaagaagccaccattcagaaagaactattgttaatacttggatcatatcctcagatctttttcatatattctatatatgtgtgcacatgtgtgcacacacaaactcgggtgtaggggtaaggagaaggggagtcaggggagagagggagaaagatatttttaaaaaatagaaatgagttcactctctaaattag

SEQ ID NO: 79698 - DNA, 633 bp, Homo sapiens
caaaattaccagaggcagatataattttaggtttagtaaaaccacaattatgtcctctggtagaagtgatctctccctaccctctgagaactaggatctctggttcaacagagcctaaagctttggcaatagaaagcataaatttgccaagtgggtcattgggaataaaggtgagagaggccactcatttcttggcttccagacctatgtattctgactgttggggatgtagcacccttacaatagctattgtctcaagtatagaaatacatgtaagggaggcagggtgtgatggctcacgcctgtaatcccagcactttgggaggccgagacgggcagatcacgaagtcaggagtttgagaccagcctgaccaacatggtgaaaccccgtctctactaaaaatacaaaaattagccgggggtggtggcggktgcctgtaatcccagctactcgggaggctgaggcaagagaatcccttgaacccaggaggcagaggttgaagtaagagattgtgccactgcactccagcctgggcaacagaatgagacttcatctcaaaacaaacaaacaaacaaacaaacatgtaaggacaggttctcaaccctatcttcaagctgatgacttagctatgc

SEQ ID NO: 79699 - DNA, 1226 bp, Homo sapiens
aaagcaagtttatttactttaaatatacttataatattttaagtttattatttaaaatattacaaatggaaatatatacacatggctattaaaataagtgtggttttaaatttcaaagcctcattgaagagttggatgacagcaaagggaaaacacttaagtccatgttcattgctaggtttctagattttatttcttacaatactgcttatctttgcataaaaaatgaacaaatcaaaaccatatatatacatacatattatgtatatatatatatgtgtgtgtgtatatatatatatatatatatatatccccagtagagaactcataattcaacctgatacttgttattcttatttttgttgttgctgttataagctctggtccaagcctggacaaaacttttactcccaattcccattagcatgaccatatgctatatttctttcctgctcaacaggaaataatatgcaatgtggtgcttttgcttagaggagctgtggaagatgcaactaaaacaaagaagagagtgtagattcttacaataatccaaattttggctcacattattttccaagctttccttaatgatttaaaagaagatctcattaatcctcttgcaactggaaaatatataatctattccacctcaaaagatcacragttgaaagggaaccagatcacagaatcaaagctcagccgatagttactccatactataaaatatacaattttattaaaattggagcagattcctgaggcagatattatgattacagtttagtctgttgctgtatgtaaaataagacgtaagaccaagttcggggctttgctacctactgataattgcagagtggctggtgggtacagaacatgagaaagttgtgtggtttttaactatcctatcaccttccttaaaaataatcacttcaagctgggcacggtggctcacgcctgtaatcccagcattttgggaggccgaggtgggtgaatcacttgaggtcaggagttcaagaccagcctgaccaacatggagaaaccccgtctctactaaaaatacaaaaaaaattagccaggcctggtggtgcatgcctgtaatcccagctactctgcaggctgagacaggagaattgcttgaacctgggaggcagaggttgcggtgagccaagatcatgccattgcactccagcctgggcaacaagagcgaaactccatctcaaataaat

SEQ ID NO: 79700 - DNA, 937 bp, Homo sapiens
tgcattacattgtaagcttgatttttaaacatacatacattttgaagaatcaaataatctacaaaatttatctattacaaaaacaaaacacagtagccaaccctagctctgttttaatgacaaaaacagaaaaaccaaggagcaatgagagtataagcatgacatttagaaatatagggattataaacaaaagtacacagctatcccaaggtacggtgagtggccagctcctcccttcagctaaggcactctcaaaaggctggcagctcagggctgtttgcaggtggccctcccagcactgggagtaacacataatcctgtactgaaggaggatcttgacagtgtcacgtggcttccatccattccctactttggtgctggatcaccttttgttcagaattgcatattatttcctttcttggtatctcctttgttttgttatatgctctactgtagtttcctaaagtccataggagttaagatttctgagaccttgtacatctgaaatctacacttaactttcaaataattgttagcatgggacataatttaagtttggaaatcaaatttgcttcagaagttaaagtcattgcatcattctctctcagcttcagagatgctgttgagaaatccagtgtcaatttaactttttatcattactatattagcttttccgctttgaattcacctaggatattctctttttcccaagtaatcttaaatttcaggcttatttgccccagaatggatctattttcatccattttttgtctctcaatggggccttgcaacttagaaatttaaattatttgttcaatgattgtctactctctattatatctgtgttctttttaagtattacattattaaattaaatttacrgtatattaactatatattcaataatatattaaaatatatattaatgttatcaatg

SEQ ID NO: 79701 - DNA, 1200 bp, Homo sapiens
ccatctacttgggaggctgaggcaggagaatcgcttgaaccccagaggcgaggttgtggtgagccgagatcgtgccattgcactccagcctgggaaacgagcgaaattccgtctcaggaaaaaaaaaattttttttaagggaaaaaaaaaccctctttttctagccggaaataccctctttcaggaaggcgcgcctgtgccgcatacgcacactcagttacttagcaaagtctgggctaaaccacccaaggcggagcccaggaacaacagagccaccgcatcccccaccaatcagcgccgacctcgccttcgcaggcctaaccaatcagtgctggtgctgcaagaaagtttccagagctttcgaggaaggtttctttaactcgaattcatccgcccaataattttcttatattttcctaaagaagagaagtgcatagaggagaagggacataatttgttaggatcctttcttacgctatgggaatttggggctcagttgaaaagcctgaactgcgtctggggatgttgggcgcggcgaactactttcagtggcgcacggagacggtgtctatgtaagaagtgataacgcaacacaccttgcacaaatttgcgctctgccaaaccagagcattcaggcacgactggctttgttgggtgaggttgttgtggtgttcctgtggctggacgtgattcgcagcatcctcgtatccgctaacaggtactggcccacagccgtaaagacctgcgggggcgtgagaggggggaatgggtgaggtcaagctggaggcttcttggggttgggtgggccgctgaggggaggggagggcgaggtgacgcgacacccggcctttctgggagagtgggccttgttgacctaaggggggcgagggcagttggcacgcgcacgcgccgacagaaactaacagacattaaccaacagcgattccgtcgcgtttacttgggaggaaggcggaaaagaggtagtttgtrtggcttctggaaaccctaaatttggaatcccagtatgagaatggtgtcccttcttgtgtttcaatgggatttttacttcgcgagtcttgtgggttcggttttgttttcagtttacctaacaccgtgcttaggtttgaggcaggttggagttcggtcaggggagtttgaatatccagaacaggtagtggagaaagttgtggacgcttggtt

SEQ ID NO: 79702 - DNA, 701 bp, Homo sapiens
cgcgctgcttcttcgccttccgcccgcggtttcttcctcttggaagaccctccgtgaatcccggcctccagagaccatcctgttgatgccctggccaggactggtcttagccccgattctgattaatccctctaatcccaggttctcgtgaggcggaggcaagagaatcacttgaacccaggcggcagagtttgcagtgagctgagatcccgccactgcagtccagactgggtgacagaatgagactccgactattaaaaaaaaataataataaaataaatgacggcagagcggcggctgcggggactggggcggtggctggtgaagtgaagattgggagaggggcctcattgaccctccgcaaatcctggcctgagtttgggatctcgcactgcctccccagcaatctgcctgagctttcttgctcctgaggtttcttcctgstggtcgaccctccgagaatcccgatctccggagaccatcctgttaacaccctggccaggactggtctcagccccgactctgacacactatcacacagggctcctacttcgccaagtctcagggacccacttctgggcaacagaggcggtcactgttaccaaagcagagactctggcctcgtgcatgcgcactggcgaggccaactccccccttgctccggagagtcaggctgcggaccctttaaaaaatggcggcga

SEQ ID NO: 79703 - DNA, 1106 bp, Homo sapiens
tggattcccatgaggatcgtcctctgtgaactgtgaaacatttagtgtgtaagacgttgagccagccccaggaaaccctaggccgatgaggaacatggaagtcagcaaaagaagaggcaagtgcggtggccacatcccacccagcatcaacccatcacacttccatttggctctaggtataaaagcccccaaattgggagtttgtcaggatggcctcagtttgcactccaaatgttccctgcaccttggagttttcccacctgaacaccgggccatgggtgtactggttgtgcaattaagggactgaggggatgcagctggaagcaccttcatctgtcttcaccttttttgcaggtagaggtgtgggacctcattcaccccacaacagattgtatcctctcccctatctgaccttattgctgctcacactttctgtacctgaatgaaatccgaagatgatggaggagtgccccctcacgacgggaagtacctgctcggctgggaactgaattcgatgtaaattctgccctgcggacagaactgctagtgtctttccctgacttggacgcaagacggtaaaacactgggagatgtcctttcttgggtgtggtgtgctcctgttctttctagaagaacatctttttttttttttttttttttttttttttgcagtggaggtgattttgacccaggccggtctcagccagcctccgaattcactgcggattcatgatccacagaaagataaagagcaccgagccgcgcagaccaagcagagccacacagacaggacaacataaggttgggagactcaaaaaaaaagaagcgctgcagtgcattagccacattcctttaagtcgactacacttacaggcacayacacacacacacacacgcagacttccaacacttgtaacactcccacagaacacacagaccggcagcttctgaggctgcatgtttctgaaggaaaccccacctaagagagagcaaccctgaggaacacaggtgggctgtatctaaaaatcacagtggggcaagtttcaaaaagacttacccctacgatgactaggcaggcctgaggcatcctgcagatccttttggat

SEQ ID NO: 79704 - DNA, 832 bp, Homo sapiens
cagaagtgggagcccataggaaggaaratatttagatagtgatgaatgaaatgaaactacaagtacttaggagggagacttttccagcagtctctctcttgggtatctgagtgtctatgaaggttcttaagcttactggtttttgtggatttgaataaggcaggatctatataatgacaataattggattttaaaatttttaatgttttaatcttctgtgaagaatattcccaataacaacctaacaacatatgcatttgtactttgacttttgcacactcagctttcaaacatttgcggtgtttcaaggggctccctgtagtgttctagggtgaagagaatcaatgggccctctttaagtagcttgcatgctgaagatccaagactcccattttcccgtgacacagattagtctttgaatcagaaatagataatgcagaagagacagtgccttttctaccttgttttaggttatcaggtttactccagttcagtaacaaaagttgtgtcagatatcaactggattttcagtttagcctttagggtagataatttataaggacaaattattgtctggccgtgccgttataatgcctgtcactatttgttacgggtttaagggtgagtctgcactggatatttcataggttgggagaggtggaggcagaaataggtaactgaaatgttttctaaaatggaagccatatcttaattataccaagaaatattatttaatatgcagataactgagtttcctcagactttgttttaccatttcttttggaggggacatgcatgtataaactgatggtttttgttttcttttaagaaa

SEQ ID NO: 79705 - DNA, 832 bp, Homo sapiens
cagaagtgggagcccataggaaggaaaatatttagatagtgatgaatgaaatgaaactacaagtacttaggagggagacttttccagcagtctctctcttgggtatctgagtgtctatgaaggttcttaagcttactggtttttgtggatttgaataaggcaggatctatataatgacaataattggattttaaaatttttaatgttttaatcttctgtgaagaatattcccaataacaacctaacaacmtatgcatttgtactttgacttttgcacactcagctttcaaacatttgcggtgtttcaaggggctccctgtagtgttctagggtgaagagaatcaatgggccctctttaagtagcttgcatgctgaagatccaagactcccattttcccgtgacacagattagtctttgaatcagaaatagataatgcagaagagacagtgccttttctaccttgttttaggttatcaggtttactccagttcagtaacaaaagttgtgtcagatatcaactggattttcagtttagcctttagggtagataatttataaggacaaattattgtctggccgtgccgttataatgcctgtcactatttgttacgggtttaagggtgagtctgcactggatatttcataggttgggagaggtggaggcagaaataggtaactgaaatgttttctaaaatggaagccatatcttaattataccaagaaatattatttaatatgcagataactgagtttcctcagactttgttttaccatttcttttggaggggacatgcatgtataaactgatggtttttgttttcttttaagaaa

SEQ ID NO: 79706 - DNA, 832 bp, Homo sapiens
cagaagtgggagcccataggaaggaaaatatttagatagtgatgaatgaaatgaaactacaagtacttaggagggagacttttccagcagtctctctcttgggtatctgagtgtctatgaaggttcttaagcttactggtttttgtggatttgaataaggcaggatctatataatgacaataattggattttaaaatttttaatgttttaatcttctgtgaagaatattcccaataacaacctaacaacatatrcatttgtactttgacttttgcacactcagctttcaaacatttgcggtgtttcaaggggctccctgtagtgttctagggtgaagagaatcaatgggccctctttaagtagcttgcatgctgaagatccaagactcccattttcccgtgacacagattagtctttgaatcagaaatagataatgcagaagagacagtgccttttctaccttgttttaggttatcaggtttactccagttcagtaacaaaagttgtgtcagatatcaactggattttcagtttagcctttagggtagataatttataaggacaaattattgtctggccgtgccgttataatgcctgtcactatttgttacgggtttaagggtgagtctgcactggatatttcataggttgggagaggtggaggcagaaataggtaactgaaatgttttctaaaatggaagccatatcttaattataccaagaaatattatttaatatgcagataactgagtttcctcagactttgttttaccatttcttttggaggggacatgcatgtataaactgatggtttttgttttcttttaagaaa

SEQ ID NO: 79707 - DNA, 832 bp, Homo sapiens
cagaagtgggagcccataggaaggaaaatatttagatagtgatgaatgaaatgaaactacaagtacttaggagggagacttttccagcagtctctctcttgggtatctgagtgtctatgaaggttcttaagcttactggtttttgtggatttgaataaggcaggatctatataatgacaataattggattttaaaatttttaatgttttaatcttctgtgaagaatattcccaataacaacctaacaacatatgcatttgtactttgacttttgcacactcagctttcaaacatttgcggtgtttcarggggctccctgtagtgttctagggtgaagagaatcaatgggccctctttaagtagcttgcatgctgaagatccaagactcccattttcccgtgacacagattagtctttgaatcagaaatagataatgcagaagagacagtgccttttctaccttgttttaggttatcaggtttactccagttcagtaacaaaagttgtgtcagatatcaactggattttcagtttagcctttagggtagataatttataaggacaaattattgtctggccgtgccgttataatgcctgtcactatttgttacgggtttaagggtgagtctgcactggatatttcataggttgggagaggtggaggcagaaataggtaactgaaatgttttctaaaatggaagccatatcttaattataccaagaaatattatttaatatgcagataactgagtttcctcagactttgttttaccatttcttttggaggggacatgcatgtataaactgatggtttttgttttcttttaagaaa

SEQ ID NO: 79708 - DNA, 832 bp, Homo sapiens
cagaagtgggagcccataggaaggaaaatatttagatagtgatgaatgaaatgaaactacaagtacttaggagggagacttttccagcagtctctctcttgggtatctgagtgtctatgaaggttcttaagcttactggtttttgtggatttgaataaggcaggatctatataatgacaataattggattttaaaatttttaatgttttaatcttctgtgaagaatattcccaataacaacctaacaacatatgcatttgtactttgacttttgcacactcagctttcaaacatttgcggtgtttcaaggggctccctgtagtgttctagggtgaagagaatcaatgggccctctttaagtagcttrcatgctgaagatccaagactcccattttcccgtgacacagattagtctttgaatcagaaatagataatgcagaagagacagtgccttttctaccttgttttaggttatcaggtttactccagttcagtaacaaaagttgtgtcagatatcaactggattttcagtttagcctttagggtagataatttataaggacaaattattgtctggccgtgccgttataatgcctgtcactatttgttacgggtttaagggtgagtctgcactggatatttcataggttgggagaggtggaggcagaaataggtaactgaaatgttttctaaaatggaagccatatcttaattataccaagaaatattatttaatatgcagataactgagtttcctcagactttgttttaccatttcttttggaggggacatgcatgtataaactgatggtttttgttttcttttaagaaa

SEQ ID NO: 79709 - DNA, 1504 bp, Homo sapiens
aatttcaaaaagtcgtggaagtttagaaatttaaattctgttctcaaatctgtattagagaaggtttacacagtgttttccaagccttttttatttagagtatactttaaactctttatttaattgaaaaatatgcattttgtttaaaataacctgtttgataaacagatactcttcatattcctatggtcagactttaatttcacaaggtttttgcattttaattaaaaggaatccactcagggtctttgtatctcattctaaatttcaaatttcagaggcttttgtgcttagttattgaaaaaataattgtaaagctcctgcattactacgagccacttgaaactagaaaacctatttgtatgtatcctggaatacacagaataaggtcttgcatgtaagaagcattttagtagtttttcatgtaaatcaacaaacaaggaaatgggttttttttataatggaatgttacaggtaacataatatgcatgacatatctaataattctagttcaaaacccagtcttcttttacatcattctgtcattgagtgattttagttttagaaagagggagtggctctagtgaacacagtggaaaaggatgagaatggaataatgagctgttgaacccaatgaaagtggataagaatggaatttgcagrggacagacaaatttgaagatgtagattggagattgccatggatccctgcagaagagggatccagaagggggagcccataggaaggaagatatttagatagtgatgaatgaaattaagctgtaagtactcaggagggagacttttccagcagtctgtctcttgagtatctgagtgtctatgaaggttcttaagcttgctggtttttgtagacctgaataaggcaggatctatataatgacattaattggattttataatttttaatgttttaatcttctgtgaagaatattcccaaagtacatttgtactttgactttttttacactcagctttcaaacatttgcagtgtttcagggggctccctgtagagttctagagtaaagagaatcgatgggcaatctaagtagcttacatgctgaagatccaagactccccttttcccgtgacacagattagtctttgaatcagaaatagataatgcagaagagacagtgccttttctaccttgttttaggttatcaggtttactgcagttcagtaacaaaagttgtgtcagatattaattggattttcagtttagtctttagggtagataatttataaagacaaattattgtctggccatgctgttataatgcctgtcactatttgttacgggtttaagggtgagtctgcactggatatttcataggttgggagaggtggaggcagaaataggtaactgaaatgttttctaatacagaagccatatcttaattataccaagaaatattatttaatgtaaggataactgaccttcctcagactttgttttaccaattttttttggaggggacatgca

SEQ ID NO: 79710 - DNA, 606 bp, Homo sapiens
ggatcacatatataatttaatcaaaatcctctttgacttttatgaggtgaacataagattggagtgcagtgacgtgatcatggctcactgcagcctcaacctcctgggctcaagtgatcctcctcctgcctcagcacgcctggctaatttttttattatttgtagagatggggtttcactatgttgtccatgctggtctcaaactcctggtctcaagtgattctcccaccttggcctcccaaagtgctgggatcacaggcatgagtcactacacctgaccccttttaaccaccatgcccagctattttatttttttattttttwaatttttaatggagacagggtttcaccatgttggccaggctggtctggaacacctgacctcaagtgatctacctacctcagcctcccaaagcgctgggattacaggtgtgagccaccatacccagcccatggccaagtttaaagaaaagaggcatagtcagctgagcgcagtggctcatacctgtaattccaacactttgggaagctgaggtgggaggatcacctgaggccaggagtccaagaccagcctaggcaacataggaagactctgtctttacgaaa

SEQ ID NO: 79711 - DNA, 1329 bp, Homo sapiens
tgcattatgagtccttaagtagaaggtttagtatgtagttttcaaaacctttttctccccatagaccatctgttaatatctcctgaaatgagtgttcagtggaacacagtttgagggtttcaaagaatcagctcttagttttatttaataaatctctttgttttctaatttattaatttctgcttttattttcatatattattttttcttttcatttttttctttgaaacagggtcttactttgtcacccaggctggagtgcggtgttgtgatctcagctcactgcaacctccatctcccaggttcaggcgatcctcctgcctcactcagccccccaaagtagctgggactagaagtgtgtgactccacacccagctaatttttttttgtattttttgtatttgagatggaattttgccatgttgcctaggctggtcttgaactcctgagctcaagtgatctgcccgccttggcctcccaaagtgctaggattctaggcgtgagtcactgcacccggcctattttttcttacttttttttggtttattttgttgtcctttttctagtttccgagagttaaatacatagtttattcatcagcagcttcaaggttgttttaaggaatgttttaaagctattaatattcctctgcatataccrttgacttcatcctatacattttattattatggactatttgttgttaatttctgaacaagctgtcatttcagttttgatttctattttgatccaagaattattcaaaagagtatcttttaatatccagcaattcattagactttgcttaacattttcatttacagttgattagatataaaggcattcgttttattattcttttgttataaacatgatcagctatttaatttattagtaatattgacagtctttttaacttttctttcttgtatttgtctgatatgtatttttgcccggtattttgttttcaagttttctttgccatgtatctcttttttattttattttattttattttatttttattattatactttaagttttagggtacatgtgcacaatgtgcaggttagttacatatgtatacatgtgccatgctggtgtgctgcacccattaactcgtcatttagcattaggtatatctcctaatgctatccctcccccctccccccaccgccatgtatctctttaattaatatataagatttttaaaaatctcaccctgacggccctgctcttttaatataggaatttaattcatttacatatatttgacaatgatatatttgttcttttataacagcattattgagatagaatttatacact

SEQ ID NO: 79712 - DNA, 647 bp, Homo sapiens
agaaaaagaagtataagggactcaagttccacatggctggagaggcctcacaatcatggtggaaggtgaagaaggaataaagtgtataaatataaataaagaaatataatggtggcagccaagagcatgtgtgttgggaaatgccctttataaaaccatcagatctcgtgagacttactaactatcatgagaatagcwtgggaaaatccccaccccatgatcaattacctcctgcggggtcccgcccatgacacgtggggattatgggagctacaatcaagatgagatttgggtggggacacagccaaaccatatcagggataaaggtttgtaaaaacttttttctatatttttcaaattctctaaagagcatacattgcatttattcaacacaatagaatatgaaaaaaatgacataaataaacagctcctcattggttaaaagcaaagcaacagtcatatagagttccaaaatgtaaaagttcacaaaggagggatattaaaatcttggtaaacatgatttaaataaaataatgtgatgccaaaagccttaatccatttttctcagtacttgggcctctcttagacatttccttgattccctgggattgccatgaactagtggttctgtcctaaacctagacctt

SEQ ID NO: 79713 - DNA, 647 bp, Homo sapiens
agaaaaagaagtataagggactcaagttccacatggctggagaggcctcacaatcatggtggaaggtgaagaaggaataaagtgtataaatataaataaagaaatataatggtggcagccaagagcatgtgtgttgggaaatgccctttataaaaccatcagatctcgtgagacttactaactatcatgagaatagcttgggaaaatccccaccccatgatcaattacctcctgcggggtcccgcccatgacaygtggggattatgggagctacaatcaagatgagatttgggtggggacacagccaaaccatatcagggataaaggtttgtaaaaacttttttctatatttttcaaattctctaaagagcatacattgcatttattcaacacaatagaatatgaaaaaaatgacataaataaacagctcctcattggttaaaagcaaagcaacagtcatatagagttccaaaatgtaaaagttcacaaaggagggatattaaaatcttggtaaacatgatttaaataaaataatgtgatgccaaaagccttaatccatttttctcagtacttgggcctctcttagacatttccttgattccctgggattgccatgaactagtggttctgtcctaaacctagacctt

SEQ ID NO: 79714 - DNA, 647 bp, Homo sapiens
agaaaaagaagtataagggactcaagttccacatggctggagaggcctcacaatcatggtggaaggtgaagaaggaataaagtgtataaatataaataaagaaatataatggtggcagccaagagcatgtgtgttgggaaatgccctttataaaaccatcagatctcgtgagacttactaactatcatgagaatagcttgggaaaatccccaccccatgatcaattacctcctgcggggtcccgcccatgacacgtggggattatgggagctacaatcaagatgagatttgggtggggacacagccaaaccatatcagggataaaggtttgtaaaaacttttttctatatttttcaaattctctaaagagcatacattgcatttattcaacacaatagaatatgaaaaaaatgacataaataaacagctcctcattggttaaaagcaaagcaacagtcatatagagttccraaatgtaaaagttcacaaaggagggatattaaaatcttggtaaacatgatttaaataaaataatgtgatgccaaaagccttaatccatttttctcagtacttgggcctctcttagacatttccttgattccctgggattgccatgaactagtggttctgtcctaaacctagacctt

SEQ ID NO: 79715 - DNA, 647 bp, Homo sapiens
agaaaaagaagtataagggactcaagttccacatggctggagaggcctcacaatcatggtggaaggtgaagaaggaataaagtgtataaatataaataaagaaatataatggtggcagccaagagcatgtgtgttgggaaatgccctttataaaaccatcagatctcgtgagacttactaactatcatgagaatagcttgggaaaatccccaccccatgatcaattacctcctgcggggtcccgcccatgacacgtggggattatgggagctacaatcaagatgagatttgggtggggacacagccaaaccatatcagggataaaggtttgtaaaaacttttttctatatttttcaaattctctaaagagcatacattgcatttattcaacacaatagaatatgaaaaaaatgacataaataaacagctcctcattggttaaaagcaaagcaacagtcatatagagttccaaaatgtaaaagttcacaaaggagggatattaaaatcttggtaaacatgatttaaataaaataatgtgatgccaaaagccttaatscatttttctcagtacttgggcctctcttagacatttccttgattccctgggattgccatgaactagtggttctgtcctaaacctagacctt

SEQ ID NO: 79716 - DNA, 773 bp, Homo sapiens
agttaattgggtaactccttgttttccttcttccttggtgagcaggatataaatggggagaacatcacacaagacactttattcaggtattatataccttcttctttagcatcttacttgcacctgttcctctgagttgatgtgagaatagatattcgttcacacttgcaaaacatctaaattcacagaactaatgtctagttatctcatcttgtaaataaacaatattgatgacttgggaacaatgccaaccaagttctaaaattaatacatggatgtaaatgtggcagtcacaacaggcatatggaaagtttatagtgggacatttctctctggaacctcagttagctgtagagttagcaccatgttaccaagagtggtatcagtctgagaaaggacatagagatgattcttaatcgcttatctctttttcctcactgaatagtgcgttgctttgacaaaagtaaactaggttccaactctgaaatataataagtgacaacaaaaatgatgacaaaagcaccattcatttctgaagtatttcctgcatggcaggcattgtgctcaktgatatagatggtccctgctgaatataggatactttaagcatcacagatcgtggtggaaagaggaaaatgattaaacaatgtggctatgccacttattttgataaataattaggactttaattccacaacaacataccaaatgctttaaaaaaattaagttgaagaaaagtggcagtcaaatctaaatatgtcttggtattaagt

SEQ ID NO: 79717 - DNA, 1158 bp, Homo sapiens
aacagttccttagcctttatccaaattcatcctgggacttaggtgagaaaacaaatgggaggccagctagttggcttcaagataccttgttggtaatacctgtgttttagctcacaaatcattttttgtttgatccagaatttcttccagaggaatcccaagcttaagggctttgatatgtccagcatctctaatatctgaaactttgctcaggccgtatttctaacttcagctgcaatcagtgagagcaatggctatataaagaaatttaatgcaaatttaaaaataattgtagtacactttatttgttccttctaataaacagctgtgtcttccatacttaaaagatacttgagaccctccaaggaaatgacaagagagggaaaaccagtgccttccaaaakgatattataatctagatggtgaaatatttcaaaaattacaaagtaacatgtaaatatattttaaaatattatatacaaacatacttctctctttcaaaattgtatatgtgtaagttgaatacaaaggtggaaaaatgagttgtgtctttaaggagacttcgagcaaaggacacatggtataaaaatgtatttaaaactcatcaataaatgtactgtaatgccgtgatgagagagaatacaaacaaccttgtcaactgtcattagaatgtgatctttaaataaatacaacaggatggtgaaatcaggtcctgaaattggatttgaactccaaaattgccctcagttcattatcacaaaaataataatcacagtatttaacattttagtttcagctgaatgagttacaaaatgtgcagtaatgtattttgcaggcttatgctatgaattaattatagtttttttagtgaagaaattggtataattgggaacaatatcaaactaatcataattcagtgtttggtaatttttgtaaaagggtcattgaagattttaatcatgaatgttctggctaaagcttccaatacgatttatctctggaaatctgaagccagtcttcttcgactgttttgatgaacttcaacgtgatgaatataaatatcatcccatctaataattttatctcaaggaattcagaagaattactgagattgcgtttacaagagggctacttagaaattctagtacaattgcatgc

SEQ ID NO: 79718 - DNA, 1114 bp, Homo sapiens
acacgtttcatgaaagatgtaaacttcagagtaacaaatctataaaaaaatacaggataaaataatattttattgatccaggtgtctctgatgcttaattcattgattcattataataacatagtaaggatggtattattaacctcatttgaaagatggtaatctagtgcatcacagacctgtgaaatttggtccacaaaagctccctagtggtaattaaaatatataaacccattctgagctgttcttacactttacacacattcactaataagacaatatagagtgaaattagatttttttttttactaaccacaagaaattgtttactagtaataaagcaatgcaagtaagtttagattttttttaagtctatgaatctcatttgcaaagattaaaaagaatgctggctgagcatactgaatcatgcctgtaatcccagtactttgagaggctgaggcaggaaggactgcttgagcccagaagttcaagccagcctgggcaacacatctctataaaaaattaaaaaaaaattagctgaggatggtggtgtgtgcctatagtcctggctacttgggaggctgaggctggaggattgcttgagcctgcaaggttgatgctgcagtgatccgtgattgcagcactgcactccaacctgggcaacacagtgagactcacctcaaaataaacaaataaataaaaataaatagaaagaataccaacacctagtgttggctaggtcagcagtccccaactttttttggcaccagggaccagtttcactgaagacaaatttttcacagactagggtgggtgggggtttgagaaraaactgttctgccttaaattctcataaagagtgcacagcctagatccctcacatcgcagttcacaataggattcattctcctatgacaatctaatgccactgctgatctgacaggagctagaactcactagcctgctgctcacctctggttgtgcaatctggttcctaaacaggccacagaccggtaccagtccatggcccaggggttggggacccctgggctaggttatggagaaatgcacattcttacatattgttcttgaaaaaacaaattgacacaatata

SEQ ID NO: 79719 - DNA, 353 bp, Homo sapiens
tcaagtatgccttgttgtttttgaggtcctttttggttgcktatttttccttttaaatattattttgttaagcattaacttattttataattctgtatctgatgattttccagtatctgaagtcagtatccgaagtgtgagcgtgggaggatggggtaacctaaacctgctacttacagtttgtgctgaatctcttctatggtggctttttccatgcagatgcatgtgtgtgtggtagtttttgtttataagctcatcatatgttgacataaatctatggaaatcccgagtacctccattttcctgtttctgctagtggctatggggagctaacaactccaaggtgctttcta

SEQ ID NO: 79720 - DNA, 911 bp, Homo sapiens
aggctcttctctgagcagctgggaattcctccaggcttgctaatggtgggctgtgttccttcttcatcctatctttcctccctctcaccctcctcttacccccgctgacctcaggagtatggtggaggtagaaccaggaaggcaaggcctggggtctatatttggtccccaatttgcaggttttgcatctgacctttctggagcttgaattcctctctgtgtccttctcctcccctgtgaaaatccacaaccaaggctacctctaaaaaagagcctgagagaggcacatagggagctggatggaatggtggagatggtttagaataggtgggggaattgaggctaagagccgaattagcttgcctgagtcatgtagcaattaggcaacagaattggagttgaacccaggcatctgaatcagagtcctgacattttagctttctgttcacccctgaaaccagatttgaccatcggctgtacccccagtgaaatcccattgtggagtctttgtgtatctggacctaagccacctcgtccatgaggcctgccctctgcaccacaaccacmtttgcttcctggactctgcagctcttctaggctaaaacactctgcacttggcagagatgtcctggctgggtcatttatctttataggaggcacctgtttcctgaagcggagggtgggtcccatgtcttatacatccagccagaagtgtggggacctactttccaatcccaaatcaggacatgaggcctggtgactatgaccattttgtaggaaccacaggaaagaatgtgtgaatcaggactgtccagattaggatagccaggaaaaaatatgtgtgcacggactgaatcgcagacgaagactgaaagaagaaaggaatctcagagtttatcttgaggccaatg

SEQ ID NO: 79721 - DNA, 504 bp, Homo sapiens
tttgacaccacatcaagactcattactgaacagtcacagagacacacattcctagcaaagaatgattaaaagcaataaggagccattcattcaatgagtcaatcaacaaacatttgtccattcattaatcagttattacgcattaggtgctgggctagacgctggagatcaaagattgaaaagacaagcagtctttaccttcatatagcttatcccctggcaggaaaacagatattacatgatggattacaataaagtctgttaagggttgtgatggagaagtacagggggctctaaatgagtttactaaaggtgaactcaggggctagaaaggggtcctgtgtgtcatctcaacctatatatctaagcccatccaacaagctkccgttttcctaccccatccccctcctcaccaggctcagctgttccccttccgatgggaagcctggttccaccagcagtcacctgggaccaggtaggccccgaagtactgagggggtgtca

SEQ ID NO: 79722 - DNA, 504 bp, Homo sapiens
tttgacaccacatcaagactcattactgaacagtcacagagacacacattcctagcaaagaatgattaaaagcaataaggagccattcattcaatgagtcaatcaacaaacatttgtccattcattaatcagttattacgcattaggtgctgggctagacgctggagatcaaagattgaaaagacaagcagtctttaccttcatatagcttatcccctggcaggaaaacagatattacatgatggattacaataaagtctgttaagggttgtgatggagaagtacagggggctctaaatgagtttactaaaggtgaactcaggggctagaaaggggtcctgtgtgtcatctcaacctatatatctaagcccatccaacaagcttccgttttcctaccccatccccctcctcaccaggctcagctgttccccttccgatgggaagcctggttccaccagcagtcacctgggaccaggtaggcccsgaagtactgagggggtgtca

SEQ ID NO: 79723 - DNA, 712 bp, Homo sapiens
aaatgaacagcccctacaggatcttgaaygctgcacatctcagacgcaggttccttctgcaccagagccttgtagcatgtgctcctggaggagaaaggctgtcagaatccaggaaggctacagtgcagactcttccctgggtactcagagcctttgctcctggcccctttccagcatcagaagacagggctaggtaaacaagtccagaagcatcagggaattaacctccgagtccctgggtgaccagcttcagctttagccgagaggtgagcctgagaggagacatgaataaccataactggagagtaatctaaacagaagcagtgctgttgaattctagcttgcagagctgaaagagaacctagagctgagcccatccaaatctgtttcattctgtttgacatggagcccaggaatctgcatgttgcatctgccccacccccaggtggaactggcatgctccaaaacttgagaaccatgtcccaaaggtgtctggtctgctgcagcaactcagaaactgccaagtgatgcagggacagggagaggaagaagacccagaggcagcatctcaccatgacatgcgcaaggagaggcagtccccacaagtaaccagcagagagctaggaacagtcacacctggaacagcgtaggtagagggggcccacccactcatcaaggtcagccacatccaccctagtgatcaagtaccgca

SEQ ID NO: 79724 - DNA, 795 bp, Homo sapiens
cctcttactctcatatattgacctaaaagtgaaacccaacccttaattagaagcagagcgcagatttcmcaatgcagtcatgcactgaatagtgacattttggtcaacgatggatcacatttatgacagtggtcacgtaagattataatgtaactgaaaaattcctgttgcctagtgacatagccatcatagcacaacatattactttaaacatacctgcttaggtgtttagatacacaaagaccattgtgttacggttgcctaaggtattcagtacagtaacgtggtacaggtttgtagcctaggagcagtaggctataccatatagcttaggtgtattgcaggtatgccatctagatttgtgtaagtacactctgatgttcacacaacaatgaaattgcctaaggctatatttctcagaatgtatccccatcgataacgcaaggcatgactatactttaaaggagtttttaaatgtttttatatactagattgactcacataaaattgtcatttttacaggtcaaaaatatttggatatttggccttttcatgtggttcaacctgatatgaggaattgagcttttctagttttgtttttttattcatccttcaccagaaaaataagtattgagaggccagaattcatcatcctatcaaaagcatctatgccagaatcttcctgaattcatttaacattttacacaccagaaggcatcacaggttttaggaatgacacattctcagactagatagatgtgggattatttcaaataaaccatttggttcctccaa

SEQ ID NO: 79725 - DNA, 795 bp, Homo sapiens
cctcttactctcatatattgacctaaaagtgaaacccaacccttaattagaagcagagcgcagatttcacaatgcagtcatgcaytgaatagtgacattttggtcaacgatggatcacatttatgacagtggtcacgtaagattataatgtaactgaaaaattcctgttgcctagtgacatagccatcatagcacaacatattactttaaacatacctgcttaggtgtttagatacacaaagaccattgtgttacggttgcctaaggtattcagtacagtaacgtggtacaggtttgtagcctaggagcagtaggctataccatatagcttaggtgtattgcaggtatgccatctagatttgtgtaagtacactctgatgttcacacaacaatgaaattgcctaaggctatatttctcagaatgtatccccatcgataacgcaaggcatgactatactttaaaggagtttttaaatgtttttatatactagattgactcacataaaattgtcatttttacaggtcaaaaatatttggatatttggccttttcatgtggttcaacctgatatgaggaattgagcttttctagttttgtttttttattcatccttcaccagaaaaataagtattgagaggccagaattcatcatcctatcaaaagcatctatgccagaatcttcctgaattcatttaacattttacacaccagaaggcatcacaggttttaggaatgacacattctcagactagatagatgtgggattatttcaaataaaccatttggttcctccaa

SEQ ID NO: 79726 - DNA, 795 bp, Homo sapiens
cctcttactctcatatattgacctaaaagtgaaacccaacccttaattagaagcagagcgcagatttcacaatgcagtcatgcactraatagtgacattttggtcaacgatggatcacatttatgacagtggtcacgtaagattataatgtaactgaaaaattcctgttgcctagtgacatagccatcatagcacaacatattactttaaacatacctgcttaggtgtttagatacacaaagaccattgtgttacggttgcctaaggtattcagtacagtaacgtggtacaggtttgtagcctaggagcagtaggctataccatatagcttaggtgtattgcaggtatgccatctagatttgtgtaagtacactctgatgttcacacaacaatgaaattgcctaaggctatatttctcagaatgtatccccatcgataacgcaaggcatgactatactttaaaggagtttttaaatgtttttatatactagattgactcacataaaattgtcatttttacaggtcaaaaatatttggatatttggccttttcatgtggttcaacctgatatgaggaattgagcttttctagttttgtttttttattcatccttcaccagaaaaataagtattgagaggccagaattcatcatcctatcaaaagcatctatgccagaatcttcctgaattcatttaacattttacacaccagaaggcatcacaggttttaggaatgacacattctcagactagatagatgtgggattatttcaaataaaccatttggttcctccaa

SEQ ID NO: 79727 - DNA, 795 bp, Homo sapiens
cctcttactctcatatattgacctaaaagtgaaacccaacccttaattagaagcagagcgcagatttcacaatgcagtcatgcactgaawagtgacattttggtcaacgatggatcacatttatgacagtggtcacgtaagattataatgtaactgaaaaattcctgttgcctagtgacatagccatcatagcacaacatattactttaaacatacctgcttaggtgtttagatacacaaagaccattgtgttacggttgcctaaggtattcagtacagtaacgtggtacaggtttgtagcctaggagcagtaggctataccatatagcttaggtgtattgcaggtatgccatctagatttgtgtaagtacactctgatgttcacacaacaatgaaattgcctaaggctatatttctcagaatgtatccccatcgataacgcaaggcatgactatactttaaaggagtttttaaatgtttttatatactagattgactcacataaaattgtcatttttacaggtcaaaaatatttggatatttggccttttcatgtggttcaacctgatatgaggaattgagcttttctagttttgtttttttattcatccttcaccagaaaaataagtattgagaggccagaattcatcatcctatcaaaagcatctatgccagaatcttcctgaattcatttaacattttacacaccagaaggcatcacaggttttaggaatgacacattctcagactagatagatgtgggattatttcaaataaaccatttggttcctccaa

SEQ ID NO: 79728 - DNA, 547 bp, Homo sapiens
  misc_feature (1)...(547): n = A,T,C or G
tcctcgttatgattgggactaaaaaggtcttagttatggttggatttattgtgtagttagagaaatagacattaagtaaatacagaaatattggacaacaatgtgtttagaaaaaagcaaagcagcaggatagtttgataaagaatgactaggcttggtagtgatacagtagattaaatttgctagttgaaaaagagatggtgacatttggcattcatacatcaaaacaaaaatcttatattaccttgtctgacatggctgccaaaggaaatcgctttttgtacctttcagagatctatcccctttgaaccttctaaagttctctctgaacctgccaaaaattttcatggaaagcacatctcttgggtgcctcctgttggcgttttgagtatttttctctttgttccctctctcgcgctgtattttttttttgttttgtttgnnnnnnnnnnnnnnnnnnnnnnnnnnnnnnnnnnnnnnnnnnnnnnnnnnnnnnnnnnnnnnnnnnnnnnnnnnnnnnnnnnnnnnnnnnnnnnnnnnnntkctc

SEQ ID NO: 79729 - DNA, 742 bp, Homo sapiens
gccygccttggcctcccaaagtgctgggattacaggcatgagccaccattcctggcctgtcctcctctcttagcatgctcatttaaaagaaacaaatagatctgttttcccttaattcagacctccacatatgtgcctttttcaaaattaatatatactgcttcatttaactgtactttcaaaggcagactctataacaggatcttaacctggaattatacaaggatggtttcacttacctcttacatattttgtatatactatttagtttttatataccttttatgttttgtggagtatttggggcgagacttcatgtgcatcacttttataggtagagttgttactatcaagaggcaacttaatgccatcactggccttttttaggaatgcacaggaaactgtacgttcctatattacagagtactagtgtgtccggaattggtaggttcttggtctcactgacttcaagaatgaagccgcagaccttcgcggtgagtgttacagctcttaaggtggtgcgtctggagtttgttccttctgatgttcagatgtgttcggagtttcttccttctggtgggttcgtggtcttgctggctcaggagtgaagctgcagaccttcgcggtgagtgttacagctcttaaggcggcatgtctggagttgtttgttcctcccagtgggctcgtggtctcgctggcttcaggagtgaagctgcagatcttcgcggtgagtgttatggct

SEQ ID NO: 79730 - DNA, 742 bp, Homo sapiens
gcccgccttggcctcccaaagtgctgggattacaggcatgagccaccatkcctggcctgtcctcctctcttagcatgctcatttaaaagaaacaaatagatctgttttcccttaattcagacctccacatatgtgcctttttcaaaattaatatatactgcttcatttaactgtactttcaaaggcagactctataacaggatcttaacctggaattatacaaggatggtttcacttacctcttacatattttgtatatactatttagtttttatataccttttatgttttgtggagtatttggggcgagacttcatgtgcatcacttttataggtagagttgttactatcaagaggcaacttaatgccatcactggccttttttaggaatgcacaggaaactgtacgttcctatattacagagtactagtgtgtccggaattggtaggttcttggtctcactgacttcaagaatgaagccgcagaccttcgcggtgagtgttacagctcttaaggtggtgcgtctggagtttgttccttctgatgttcagatgtgttcggagtttcttccttctggtgggttcgtggtcttgctggctcaggagtgaagctgcagaccttcgcggtgagtgttacagctcttaaggcggcatgtctggagttgtttgttcctcccagtgggctcgtggtctcgctggcttcaggagtgaagctgcagatcttcgcggtgagtgttatggct

SEQ ID NO: 79731 - DNA, 514 bp, Homo sapiens
aaatccaggttaggaggtcagaaggattatagtaataacaggcattcattcaataaatatttgttattactacatttcagggataaaatggtgaatgaaatggatacagtccttgaagtcctacaacttacagtctgagatagatgtggtacagaggggaacatttcatraggaaaattgccagtaaagaaataaggtagtagagaaggcttctagtggaagttgttaaccttaaacagggaagccagattctatgctaatttcaatgtgagatgaatctaattctatttcatatatccaattcattatatctatatcaagggaaagctagccttgaatgatttcttgccagtacttttatattccacagacagtacatctagtcaaaactcttttcaagcttccactcccatacacaatgctttgactcttatggaaaacctcttttgctttctataaaaagcaaagccatgcaaggtaaagtattttattcttaatcttctttttatcttat

SEQ ID NO: 79732 - DNA, 514 bp, Homo sapiens
aaatccaggttaggaggtcagaaggattatagtaataacaggcattcattcaataaatatttgttattactacatttcagggataaaatggtgaatgaaatggatacagtccttgaagtcctacaacttacagtctgagatagatgtggtacagaggggaacatttcataaggaaaattgccagtaaagaaataaggtagtagagaaggcttctagtggaagttgttaaccttaaacagggaagycagattctatgctaatttcaatgtgagatgaatctaattctatttcatatatccaattcattatatctatatcaagggaaagctagccttgaatgatttcttgccagtacttttatattccacagacagtacatctagtcaaaactcttttcaagcttccactcccatacacaatgctttgactcttatggaaaacctcttttgctttctataaaaagcaaagccatgcaaggtaaagtattttattcttaatcttctttttatcttat

SEQ ID NO: 79733 - DNA, 737 bp, Homo sapiens
catgtcagacacagtgataaggcagttatctgcaagtcagaaagagagctgtcaccagaacccaaattggctatcagcttgatctgggacttcccaacctcaggaactgtgagaaataaatttctgttatttaagctactcagtatggcattttttaaaatggtaatctgaacagactaatacatcaacatagaaaggagttccattggttatttgttccattggttatttattctctatttttggcctgacccagccagttgtgttgtttcatctgcatgaatgtgtttaacccccttatgaaccaaggtgatggttccttatagaatagaaccctctgccaaattacatttggatcttcagcacttcattaaatgttccccaagagatagtttamcacttattattactctttgtttacaaaatgtcagtcatttaatttatatttaacaaataattgtttaacatggaagtttattaatattccaaattctcaactaagttttaaatattgacttaccaatatccattgatttccaattttgtagttaaaataaccaataagaaattattaactttttataactatagttgtaacattatctacaattatatatttatttttgctttccaattacttaatctcaatctccagatgaaaacacctctttcttagtacctaattgttctattcaaacctagtctctcctattaagatatcttagctaacattattt

SEQ ID NO: 79734 - DNA, 1084 bp, Homo sapiens
caaaaaatatttagataagaaaaatgcaaaagttataaattttctctagatatttcaagagaattaacacagattttagtccctccagaaatatcaccccaggttgtaaaatcccctcagtactatttatctttctctactcagaaatgagttcagagtagagcaaaccacaggtaaactcacagggtttcagtgtgatggtgccataaggtgaggaatagtaagggcaacgttcaggaactaggtcaagaatattagtgagggccccaccaattcaaatttagggtaacttgtatgaagtccagaagcaagaactacacaggctgcctttatgagcagtttggttatacaaggtctgggccggcgcccattctttgtggctatccaggcaagccatctcacctatttaacgtagccgggtggaccaaggaaagcactgacaactgggtgcttttcattgctaatcctggccctgactcaccactccgtgacctctcttggtgtgtttcctcagctggaaagtgaagataataataatgacctatttaacaaggggtgttgtgtggattgccagttaataacatgtttcaaaacacaaggcagcattgagcttgtaaatactaatagaaagtttctccacactacaaagtcaatgagtgcttctcttgaagaaaacccaacatgccagaacatgaacatacaaagcagttgaattaaggtgagtttttacttaacagaagaaacttcattttctaaaaggatactctagagttttcctttagatggttagctcacccttgtgcatttaaaagcttttataaaattcatctatacctattccattagtttagtgtttgtttggaatatatttagaatatatttttggtatgtttaaatacttttttcccccaaaatcaaccraaagtaaatgtcatatagcttgtcactgtattatcgatattatcataagtcttctgtaaagtcaacttggaacatataaaataacaaatacacatgttttactttggttgcctcatcatggagggattcttgttctactagaggaacttatgttaaactaatg

SEQ ID NO: 79735 - DNA, 573 bp, Homo sapiens
ggcacaggagccaagctgtctccctttggttatgtttgtggtggggttggcatacatgggacaaataacgcatggccttttctctgagaggagaaatctggggctaccctagactgaaagatcgggcaatttatggtcatcttttgctgctaccaggggctgcaggcttcaccggtgtaagtagcttgtctgtctgcacacaggtctgctgtgcacctctcaggggttggctaatcatggcatctgaagtggcaatctgaagtgcatgggaactgtttagggtggtaagaggatcaaggcggtgcacaaagagatgtgtgtagtgattttcttccaaccagttttcccaagctgggtccgagggygctgggagtctgcaacctgagaatgggggcatgtgtccctggggcagtatcccccatctttcatccaacaggcttggccgggctgcttgggctaactcctgagtggcttccttttcgtattccttatggtcagagagtaaagatactaaatggacattagatcattggagaacagcaacctgtgactgaggggtcacctacaaaatcc

SEQ ID NO: 79736 - DNA, 537 bp, Homo sapiens
cctttagatctaccagagatgaaaaaaaaaatccagatcccttcacaaagaaggaatattcttacatggttagcagaccactcattaacaataaaaaagtcagtgaagtaataatatcttcaacgttctgagaaaaaaaatgaagattcaataaatttttaaaaatctaggtataaaaatgttcaacattgagggcaactaactgagcttatgctactcatacctgcccccagtccccggtccttgctagtagaactactaccaaaggcctatgccatctagaacttgggtttttttttttttttttttttttttggagatggagtttcgctcttgttgcttaggctgaagtacagtggtgcgattttggctcactgcaacctytgcctcccggattcaagtgattctcctgccttagcctcccgagtagctgagattacaggtgcacgccatgacacctggctaattttttgtatttttagtagagacggggttttaccatgttggccagactggtctcgaactcttgatctcagg

SEQ ID NO: 79737 - DNA, 537 bp, Homo sapiens
cctttagatctaccagagatgaaaaaaaaaatccagatcccttcacaaagaaggaatattcttacatggttagcagaccactcattaacaataaaaaagtcagtgaagtaataatatcttcaacgttctgagaaaaaaaatgaagattcaataaatttttaaaaatctaggtataaaaatgttcaacattgagggcaactaactgagcttatgctactcatacctgcccccagtccccggtccttgctagtagaactactaccaaaggcctatgccatctagaacttgggtttttttttttttttttttttttttggagatggagtttcgctcttgttgcttaggctgaagtacagtggtgcgattttggctcactgcaacctttgcctcccggattcaagtgattctcctgccttagcctcccgagtagctgagattacaggtgcacgccaygacacctggctaattttttgtatttttagtagagacggggttttaccatgttggccagactggtctcgaactcttgatctcagg

SEQ ID NO: 79738 - DNA, 1086 bp, Homo sapiens
gatgctcaagaagctgataagactattctaggtcattatcacatttccttgggtcaccactactctggtggtctcttgcatcctgactttcctaatgcaggaggctttaccattataagctgtcagcaaatcagctggtctatttctttaaaggaagataatacacttcctgccccacaagagaccagggacttctctgtaactttatctcctaagaaactctagaggtgcctattccatgtcaccacctttgtttaaaagcttggtgaacagtgctaggcagaaaatatgtcccaatattccatttatagctcttgttggatttgtctgcctgggaaactgaagtgaaatatgttctttaagtgaactccgcattatttgtcactcagagcaaaaaaggaaatgcctaaaaggatggtttcaaatccttgtggtctattatttgtaacctgggtagtgaatggcaagaaaaatgcagtgagaaagaaaaagaggcctggaaatgcaaataacatgatataaaaaataaatttagataatttgatgacattgacctaaaaaagaaaaatcaaractatttctttttgaaataatcagattgttttgtctacaactgagtttgggtgtaactcctttgcacatgttcattttccattactttgagttgttacacaaatccattaacgttcatggcagaataaaaaaaaaagtaagatgttcaaattaaaaaatcgatttcatcccaaatagaatatcggctgttcagacatgattaagtttcaaagtagaaatgtatttttgtgctaatgaggaaagatctccatgtgcacatttgataaagtagtataaattttaattagggagaagcaggttacattcaggtagaaataccttccttatgtcaagataatattatttttttccccaagtgagaattcatgctttattcttaattttagaagatgatagtaatttttttcattgcgcttctttaccttctccaagttttcagcgttgaccatagggtgatttcccaatttgagtgagatatattaatttttgaaataacccagaagtgttacatat

SEQ ID NO: 79739 - DNA, 534 bp, Homo sapiens
aaagtgctgggattacaggcgtgagccaccgcacctggccgtatataatgtttacaatgagagttatattcattttasgaataaaaactctgaagatcagagacattaggtaaagttgctcaagttgacagaattgactaaacttagagtaaacattttctagccgggcacagtggtgtgcacctgcagtctcagctactcaggcgtctgaggccagatcatttgagcacaggagtttgaaaccagcctgggcaacatagcaagacccccatctcaaacaacaacaacaacaacaaaaaaacccaaaatattttaggcctgcttagtccaatgcccttgccatcccaccccatatcctcccccagctcagacatgctcagtgatgaaacgagtgtctgcggttgcaattccctcccacaagcaaatgaggggctgatccaaagtgcttctaaactctgtagttactgcttgcctggttccaagcaatcagcccaggtccaaagataaacacaaaggcagccccagaaaggatcc

SEQ ID NO: 79740 - DNA, 712 bp, Homo sapiens
atttaagaactacgagcgtcagaaggtgttcctagaggagctgatggcaccagtggccagcatctggctttctcaagacatgcacaggtaaaggagatcccttgccctgactcttactatactcaagcacccattttggtttaagagctaggcccagggtggggtaggggttaaggatattgaagtgtgatggcattatccatgatatctgaagttctctaaaagcagtcttttgtaatttaatctctggttcaattagattgtgggtggggagggcacagagtgagactcctgtggtgtctgcattgcagcaccagcacatttagaraaatgagaacagctaggaagggccatacaaccacacagacacttatctgtgctcacacagtagagaaattattttctttatattttgaagattatattcttgtttaattcttaaattgttactaataatatttgggagtgggaagggaaatttaaaccttcaaatgacaactgacaattagtatgattatactcctctcactataaaaactgctcttaagggccaaataatgatagcctgttaactcctgtggaagaaactgtccttgtttaaagtcatgatgtaacttgtttttccccctccaaccttcagagtgctgtcagatgttgatgctttcattgcgtatgtgggtacagatcagaagagctgtgacccaggcctgga

SEQ ID NO: 79741 - DNA, 1127 bp, Homo sapiens
tgagattgatttgtaagtccctgcattgctaaaccactcatctcaatttaactatgcgatttgggagtgttggaactatgccattttgcaagaaaatgattaagacaaactctaagaatattgtgaactttatcaggaaaatcaatttgtctaacaagaaagtgaatcactattgatttttttccctctaattaggctcagaggcttgatagctttaactaagtggtggcagtttgctttcagcaaatgtatttttcactttgcagtggagcataacatgctctcaaaagcctgtgccactctttgtctctttttcatttgcccagttcttgaagattagcgtggaaacttttagaaatttcctatctgcagtgacaagttgttcattatgccttttgttgccctgagtgggcagtctctatgttcctgcaatatgtagatacatgggcttggaaagagactggactcacagaataggtgatacacaataagaaaatgtctgagacaaccaaggtaattaatgaaacagcaaactgtatgcttttgattcaagatgcctgaatggatgtgctacataatttacaagcatgacagaagccaacaccttcctagttgaaaatgggcatctgagcatataaaagcacagggctgattgctggctgaagcttgtggaagatgatggttttttggaccaggtaggatccttcttgataggttctagaaggactaagggcattgctaggcatgtgtagctggagagaggcaaagacaaggattcagagtgtcactgagtccttcttctccaacacaaaccttctgtttctatttcctacagctaacatttctcatttctttctcttcttttgtttccttgtattgttttctccaattcagaatattggcattgatgtaatagtttcaattacagtaatatctgttgatttttttggatttattatttaattcttctttctgttcttagatttttagtctttttgcttcatttccattttcttgtatttttttttcttttctcttctattctaccaagaaagaaagagttgactcagcaggtccgggttgctcaamccctggacattccccaggaaggcctgttttcagaatta

SEQ ID NO: 79742 - DNA, 658 bp, Homo sapiens
gtacataaagtaattatagggaagtacagatgaagcaggttgatacttgattcatggggttgtgaaaacaatggcaaaagttgagttaacatttttcaaaagttttcttggggggttgtatyatgctttcttgttatatagctttctgcctacttttttttttttttcttattttgagagtggtgtatgctagttagaattcagaattatcaggaggaactttatcttagtctgttttgtactgctatgacagaataccacagactgggtaatttataatgaacagaaattacctgttcattatcctggaggctaggaagtccaagactgagggaccaaactcgcccttttatatggaactctctcctcagataacagcattaagccattcatgagggtggtgcccccatgacccaagtacctcccattccatcctgcctctcaacactgccacattggggatcaaatttccagcacatgaactttgggggacacattcaaatcatagcaaatttgctttaaaatgcttataaggtatgaaatgaactttgaagatgagtgtggggaggttctgagatgtttttgttttcacatttaggatacagcaaagtgtcttttaaggaaggaatcctttgttattaattcactagtttgatgc

SEQ ID NO: 79743 - DNA, 662 bp, Homo sapiens
tctctccccgtgattcaattacgtgccaccaggcccctcccacaacacatgggaattcaagatgagatttgggtgaggacacagccaaaccatatcactgccagacctattaactccaaagtattggatttatgtagtgatttctacttctgcccattctctgttttgtaaagaaaagaaagtacactagtctgttattgcctgattttgtcaccaacttgttcaaaattccaaagcttctggtcatactctctagttattgacagaaagaaagcctcctgtttcttaccatcagattcaattcatagcttttgacagatggcccccaacatgaaattggccaaatagtgatatttgaaaatatatttacaaataagatctacttgcatctttacaacaacctaaaaggtgggygagataactattgttccccccatttgacagatggggaaactaaggcacacttaaggatcttttttctttgcacatcacatatggaaagttataggagaagacaagactaacaacccaaactcttaataaacattcataatcctctataaaaccttcaaagccagatgtacttcaaagttcaaaaaatgttttattattttagaaagacaatgtggtttatattctatatacaacaaaataccccagta

SEQ ID NO: 79744 - DNA, 662 bp, Homo sapiens
tctctccccgtgattcaattacgtgccaccaggcccctcccacaacacatgggaattcaagatgagatttgggtgaggacacagccaaaccatatcactgccagacctattaactccaaagtattggatttatgtagtgatttctacttctgcccattctctgttttgtaaagaaaagaaagtacactagtctgttattgcctgattttgtcaccaacttgttcaaaattccaaagcttctggtcatactctctagttattgacagaaagaaagcctcctgtttcttaccatcagattcaattcatagcttttgacagatggcccccaacatgaaattggccaaatagtgatatttgaaaatatatttacaaataagatctacttgcatctttacaacaacctaaaaggtgggcgagataactattgttccccccatttgacagatggggaaactaaggcacacttaaggatcttttttctttgcacatcacatatggaaagttataggagragacaagactaacaacccaaactcttaataaacattcataatcctctataaaaccttcaaagccagatgtacttcaaagttcaaaaaatgttttattattttagaaagacaatgtggtttatattctatatacaacaaaataccccagta

SEQ ID NO: 79745 - DNA, 574 bp, Homo sapiens
ttataaattttacttataaattacagttctctgaccactacctgtcactttctagataccatggatgttgaaaacaattctactttggaaaaacacagtgggaaaagaagtaagaacaaataagaatttacttaatttttatgttacaaatgaactattttttaatgctaaggtttattatcatcattttcttttttcaacttttattatagattaaagggtgcatttgcaggtttgttacatgggtaaattgtgtgatgctgaggcttggtgtcccaaaaatcccatcacccaggcagtaagcatagtacccaacagatggttcttcagcccatgccaccctctccccctgccccatctagtggtccccagtgtctcttgttctcatcttcacatttatgtgtattcgatgtttagcttccacttgtaagtaagaacatgcagtatttggttttctgttcttgcattaagttgcttaggawaatggcctccgctccatccatgttgctgcgaagggtgtgatttcattctttttatggctgcatagtatttcatggtgtatatgtgtgccaca

SEQ ID NO: 79746 - DNA, 545 bp, Homo sapiens
  misc_feature (1)...(545): n = A,T,C or G
ctgggcaacagagcaagactctgtctcaaaaaaaaaaaaaaaaaaagaatatttgaaaaaataaatcatctgtgtccaaatatactcactgaagcattataagagtgaaaaaaacatacacatttactagtagaagaaaatctaagccacaacctacctatgtgcagtaaaatatcaggcagttattagaattaatgtttatgaagcatttataaaataggaatgtgttcataatatraggtaaaatgaggagaaaatgagagtacagaatggtatatgccagaagccaaaaatattctctgtaaaggaccaaacagtaaatatttcaggcttcttggcccaaatggcctctgttggnactcctcagcgctgccactgaagggaaaaagcactgtacccaataggtacttaataacatagctgtgtccaataaactttatttacaaaataacggggagaggatttggcctgggaccgcatttgccctttcctgtaattccgggagggaaagctttcaacaagaaactaggcttgaaaaaaatttt

SEQ ID NO: 79747 - DNA, 887 bp, Homo sapiens
tgtggctggtgggactgaagaccctgtgggcattgatgaaggcaaggatggkctcaaacaccatccgaaacccacacagatccacaccaggtcccagccctggaccagacaataccgcagccaaattttaaaacttagagtcctaaaacgacatgattgtttttatacatccaggcacatccctgaatggggagaaaaatgccaagtaaggggacaatcttccctgccattatcacctcccttcatctgctccaggcccgagctgcctgggttgccatggtgatgcagggctgacctctcactttttactcttccaggagctaaaaaggtaaaaatgagccatttggtagcaaatgaaaatcaacctccttcagttaaaagatgttgaattgctttcgcttcgtcaaacttaatgttccgtagccaagttaaaaaaaaaaaaaaagtcaaagaagaaggagagggggaagaggaggggcaaaacggaagaacgcaagcaagagatctcagaagcaagcggagatgttggctggagcagcagtggcgactgcagcagagaacagggatgggcatcagtgccggaggcatcagaccagtcttcagcaacagctttctcagagctcacaattgggtgctgagccacttccttcgacttgcccggccttgttggtgctggctccagctctttctccctgcttgtctcttttactcgctttgcaatggtacctggtgaagctggattgctggcttttacttttcatgtgcagagaaattgggtcaggaaatcaaaatattgattgaacccgattgcggtagctgttctagaagagattttaggggaagcaaattacattcttttaacattattcagcccgtgattaggcatg

SEQ ID NO: 79748 - DNA, 887 bp, Homo sapiens
tgtggctggtgggactgaagaccctgtgggcattgatgaaggcaaggatggtctcaaacaccatccgaaacccacacagatccacaccaggtcccagccctggaccagacaataccgcagccaaattttaaaacttagagtcctaaaacgacatgattgtttttatacatccaggcacatccctgaatggggagaaaaatgccaagtaaggggacaatcttccctgccattatcacctcccttcatctgctccaggcccgagctgcctgggttgccatggtgatgcagggctgacctctcactttttactcttccaggagctaaaaaggtaaaaatgagccatttggtagcaaatgaaaatcaacctccttcagttaaaagatgytgaattgctttcgcttcgtcaaacttaatgttccgtagccaagttaaaaaaaaaaaaaaagtcaaagaagaaggagagggggaagaggaggggcaaaacggaagaacgcaagcaagagatctcagaagcaagcggagatgttggctggagcagcagtggcgactgcagcagagaacagggatgggcatcagtgccggaggcatcagaccagtcttcagcaacagctttctcagagctcacaattgggtgctgagccacttccttcgacttgcccggccttgttggtgctggctccagctctttctccctgcttgtctcttttactcgctttgcaatggtacctggtgaagctggattgctggcttttacttttcatgtgcagagaaattgggtcaggaaatcaaaatattgattgaacccgattgcggtagctgttctagaagagattttaggggaagcaaattacattcttttaacattattcagcccgtgattaggcatg

SEQ ID NO: 79749 - DNA, 887 bp, Homo sapiens
tgtggctggtgggactgaagaccctgtgggcattgatgaaggcaaggatggtctcaaacaccatccgaaacccacacagatccacaccaggtcccagccctggaccagacaataccgcagccaaattttaaaacttagagtcctaaaacgacatgattgtttttatacatccaggcacatccctgaatggggagaaaaatgccaagtaaggggacaatcttccctgccattatcacctcccttcatctgctccaggcccgagctgcctgggttgccatggtgatgcagggctgacctctcactttttactcttccaggagctaaaaaggtaaaaatgagccatttggtagcaaatgaaaatcaacctccttcagttaaaagatgttgaattgctttcgcttcgtcaaacttaatgttccgtagccaagttaaaaaaaaaaaaaaagtcaaagaagaaggagagggggaagaggaggggcaaaacggaagaacgcaagcaagagatctcagaagcaagcggagatgttggctggagcagcagtggcgactgcagcagagaacagggatgggcatcagtgccggaggcatcagaccagycttcagcaacagctttctcagagctcacaattgggtgctgagccacttccttcgacttgcccggccttgttggtgctggctccagctctttctccctgcttgtctcttttactcgctttgcaatggtacctggtgaagctggattgctggcttttacttttcatgtgcagagaaattgggtcaggaaatcaaaatattgattgaacccgattgcggtagctgttctagaagagattttaggggaagcaaattacattcttttaacattattcagcccgtgattaggcatg

SEQ ID NO: 79750 - DNA, 643 bp, Homo sapiens
tggagatgttctgtccctcatgaaggagaaagaaaagttgccccaaatggggactctttaccttcagcatcttgaaactccttcaccatttgaagtattaaaatatttaatcaacatcaaatgctgctgcccctatttatacaagtgctttattatcctgtacattataccacaacctgcctggctcttaatgtgacctgaagagctagtsggcatttattacaaatgcgaggcagtaagcttctggctgagcaattaatcactgacaccaaggaatttcttctcttcaggtggggaacccatccaaaaactaagaaaaataatcgggctaattaattcttatctgcaaagagcaattagataaatgacctcaaaaaagacttgtcacccctagtgagacactcactttctaaatagaatgtgtcgagcctcttttcactgggcaagtgatactgtgaaatggagatgacagaaatgaacgggagggaaatgagaagggagcaggttaattagaatgaaggctgatgagagagggtggggggagagagagagagaggaagagagggagagagatagaaagatttgccatgatcttgtcaccctgctctcttttctttatgtacataggcaggtagcaaacaga

SEQ ID NO: 79751 - DNA, 1470 bp, Homo sapiens
gcataggaaaagaaaggcaggtggctggtgtttcttcacctgttctctttgatatcatctactgctgcttctgctcttttctcgtttggttgctgctatggtttggctgtgtccccgcccaaatctcgaattgcagttcccataatccgtacgtgtcatgggaggaacctggtgggaggtaattaaatcatgggagcagttaccccatgctattctcgtgagagtgagtaagttatcacaagatctgatggttttgtaaggggcttctccctttgcttgactctcattcttctccttcctgccaccatgtgaagaaggacatgtttgcttccccttccaccacgactgtaagtttcctgaggcctccacaggcatgtgtaactgtgagtcggttaaacctctttccttataattacccagtctggggcagttctttacagcagtgtgaggacagactaatacagttkttcttttagcaggtgctttcccccatttctagtaataaattcagctatcctttacattagaaatcctttctcttgaccatactgttgctttgaccttccattccttctctcactggcaaaattcttaaacattaatgacttgtagcaaattatcttaccacttgaattccgttccaactctactgaaacagatgaagtaattgtcctgtgctacttgtctcctatctgtctttctttctttgctctgatcctggagagtcagtgttgacatcctcgaactcctccctcaacatctgggacagcgaattctgcagtttttttcttcttcctcacggtgtgcttctctatcttctttgctgccctcccagtgttgcctctgcagcacgccaaattgtggctggttagtcacctgaccttttatattttgtctcttggagatttcccttattgccacaagcttatctctgtgtaagtgcttttcagacctatttatttgaattcaaacttcttcctgagttacagataagtttttgtggaaagctacactgggaaatatttttagtatctcaaatttaaaattcccaaaaccagagcatccaaaaagttttataagcccaccatagaaagggatctttattttcatctacttgtctccttctgaatcctcctcctcttcccctcccaatgtaaacatgacaaaaagcaatctgctttcttagctaccctgtatatgtacggtgtcatggttctcctaaaactaaaagtctaggccaaaaacctcagatgcatccttgacaactcctgcaccctctgcttcacatctagttgattaccaaattatgttaatctgggctctgtggtttcatatatactcactgcttggcatcctgttcccatcatcctaacataggccttgagcatagcttgcgtgtattcagcccaccttatcgattatttaggttgttgcccgtctcttaaaacacctctggtggctcactactgt

SEQ ID NO: 79752 - DNA, 724 bp, Homo sapiens
atgcracttttatctttgtatctcagcattctaaggtgccctcttgtggtgtggggtaggaaaagagcatcctaaatgcagctggctggagacacaaatccagatcaagttactgttgaacagccaacaagagaaacatggttgaactccaagaataatactcagatgcagcattctgaaagaatcattgatattcatatttgacaagtcctaaccactcttttttttttttaaaaaaataagcaaataaaataaacgtacaacttctggggctgtctcatttccaaataaaatttacaaggtggaatttttgtaaactggtgcctgtcatggagctcctgtttcctttcagtaaatgcggccagtcaggagtccttaaactgaagaacaggaaagccctgatcattccagatatcactcaagaaatcgggacagagcgctagtttaggcccccaggtcatatattagtacaatcaacacatgggcaagttatttcactcacttctatagatgataatccctaaccccattgctcagttgtcaacacgtgaaaaacgtaaaggggtagacaaacctatcaccaccctcatataaaaaaactaacgcacattccttacaccgagggagcccagagaaattatctttgtacaccaaagctgaaataatataaacttggaaagcaataggttatgaaaaccctataaatttatgttcaggcttccaa

SEQ ID NO: 79753 - DNA, 620 bp, Homo sapiens
ctctggttcttaatttggttactgccatgtttgtcgtggcagagtggtctagtatcacaaatgagaatggcacctatctaagtatgcaatataaatttgtaataattagtaataaatttattttattatagctaatattttaaatggaattgataaggtcaaagaaaaacaccagctccaaatctatatatgccttttgctggagttacatagaaagcacatctttttactcaaagatttggcttcctattggaagactctgaagaaaaccatggataattacacaatgtaggaaatactttggatatgcagaagtgtggctatattttgttgatgtttttaataatggctactctcattcataaacttcaaataaatcacccgaataaaagttgatactatcaccaaggtggcaagttaccatttaaataaaggggaaatgcagacacatgctgatgaacaagtgttcatcatcatcaatgtcttcccagttaaaagtgtacaaacccctacaagtcactttatctttstcggtcttagtttcttatgtgccatatgagagaaataagatgatgggtaagatttcttctaattcctagactacatgatattacagaaca

SEQ ID NO: 79754 - DNA, 491 bp, Homo sapiens
atatatctattaaatcctcttttcattcacttgctttggagatgaatttttatacctaatccatattattagtggcctgagaatatttagaatttctaggatctcaaaagagcrtatttcagtcagctttctttccctcggcacagagctcatagagttctcgtgacatattcatatctggcaatctgtccctagttaagaaatgttaaacttctgtgatttatttttattttatgttatcactctacaaagtggaaaatgggaaagatgtttatgctccttagcactcagaaaataagtttgccctctctatataaaagaataagaaaacattgaaaatagttttgctgtcttaattttccaatattttatccttggttctgccatacacagactgtcccccaagcttcttatcacaaattaatgatgaaaacctcttaacacatctgttttacagagttatacttaaataaaactcagattaccaagct

SEQ ID NO: 79755 - DNA, 511 bp, Homo sapiens
ttttctagcaaaaaaaaaattaaaccacactttaaaatttacattaatttgatctagacatttttattctcatagaaacttaagttttaatgattttcataagaaaaaagaattaataaatatattttatgatggttaaaataacccaaatttctaagacaagtaatttgacacccacagaatatcaactaagtgaaaccaaccaattaacaagctggccaaacttttaagcatttagactctgcctggcctttagaaatataatcagagaaacaaatgacatatttatttaaaaaaggaggaaaaattctgaaatgcaatattatatcggtacgtgtgcagacatrctgataaaattccttagcctttattgggccctggctatgtgctcagtaccatggtaaacattttacgtattttattgctttaaatatctccattttacaaagagaagcgctatggcttggtgaagtcatgcagataaggaaagatccgagaccctcactcaggc

SEQ ID NO: 79756 - DNA, 735 bp, Homo sapiens
ttctgttgctctgcaacttaattagcaaatagtactgtcaggttttttttttggaattttagattctaatacatgtatatcaatatctcattgttttaatttgcattttcctaatgacaaaatatgtgaaatttgtttttatatgtttatttgccctttatgtatcttttttggtgaaagatctaaacagatctttccctatactttgatagagttatatgttttcttattgttgagttttaggatttagtaaatcttatgaatagaartcctttactaggtatgtgattctaaagcattttctgacagtctgcggcttgtcttcttctttcctttataatgcaattcaaagagcaaattttaaattttgagttagtacaatttattaatctttaaacatttttattggtcaagattacagtgctttatctaataactaatcaacaaatctaaggtttcacagattttttcctgtttccttataaaattttactattctatattgtatgttttatttatgtataaatgtaaggtatgtgctaaagtgcatttgtttgcatattttactctgttctatcaatctataggtctgtctgtatgccagtaccatactattttttcaaataaattcaacaatttattttatttttctatttatttttatttgtaattttattttctgtgggtacatagtaggtgtatgtattttgggtatgtgagatattttgatacagg

SEQ ID NO: 79757 - DNA, 1631 bp, Homo sapiens
aggatctatggactacaagtaataggataaattcattgtttatttgagattctaacctgtaccttccaaatcctatttcaatgaattttatattaaatcagcctaaaatattttttcactcaggttcttttttacctttggaaagattaaaaaaacaatgctaatgttgaataaatcatccagctacattttaaaatgaatatgtattccatctctattttctttgattcttttcaagtctattttctgctattatccacagatggagaaagctattatctacagctgatttcacttgtgatactgcaacctatttacctttccatctttctgtaagccccaagattatatttttcaaataccctcaagtacttgttcattttcatgagcattatatctgtacctaagtgcamaatagcaccattttcaaacaatcagaactagacatctgaatggcagtgatctaagaagagatagatcacattaagaagcactccaaatgttctgtttctcaggttattacactaagtaggtcagtggttttcaacatatttggtgaacaagaatcacttaggagcttatgaaagatgcagatccccgggtataatcctaaacctaccaagtcaggatacctggaggttaacccaggaatctgtagagatgcttcattacgagttttaagtattcatcatgtttttctttttctagtcaaaatgtattatttcctacttaatattcttacccttaaaatggtaaatgaatatgttatttaaatacatatatgtgtgtgtgtgtgtgtgtgtgtgtgtgtgtgtgtgtgtgtatgagatattccatttgctaacttcccttttggaatatggtgttttttattgtatgcctgtttgtcttcaacctgtattagtcactaacttgagagtggtaaacattaattttcctttttcatctggctaaaggatggaaataataagtatgcatttattgatgactcaaattcatttttttcttatgatgataaaattttttaataaatagagtacattttagttggtggtttagtagaaaaagaaatgaacgatttttcacttgagctaaaaagaccagggaaagcttgcatggataagtgtgaaaacagagcagccacttcacagttacagcagcagagacattaaaatgataaagccaactggactaaatcaagtcaaaagagagcaatagaagaaagttcttattgctgtcaacctggagggtatttctataatggaatactcgttaaagtttgtcaaacacacacatgcagcgtttttgcattcttctcactagttttgcaaggtttagcaccttttataagattagaaaattgtttcgatgtcatgacatagttgcaatggtttaaatgtttgtgctcctccgaaattcatgttgaaactaattcccactgtggtgatattaaaaggtagggtttttaggaggtgtgtagctcataaggtctctgtcctcatgaatggaattagtatccttaagaaaaaggcttgagggaccctgttttcttctttctgctttgtggggacacatagaaggtgcaatctatgaggaacaggccctcatcagacactggtgacttgatctgg

SEQ ID NO: 79758 - DNA, 801 bp, Homo sapiens
tcaatcctggtcccaagcgactcctggggaaggagtgagttaaataggcatggagtggcccactcttgccatgctccatcagaatcctagctgcaggaaaccccatgacaccatgaacatttgagtcagcaggaagagctgctcggagagatgtcagggacaggactccagcctccacagaatccacagggtttggtttgagaatggctggaacacatccagggatgcccatccctctagtcttgccatgatcctccaggtgactttgtcctttgttgactgtcagactttgacagaacagggctttcttgcccgtgagacagggccagtctgatctgagcactgccctgtctgatggcctctaccagggcccctgcctcatttcacccacttgcagcacagcttcagatgccaaattagagtgtttcccagaggccattgccatagctcttttgctgacagaccccacctgtcagagagctttcgaagatgagtcctaacagtgcacacttgcctgaggcctcccwcaccactttactggcatgcactcacctgcaacctatccttaccactttgccagtgtgcgtacatgtgtggacttcactgtactgacaccgttggtgcatgtgccatgtggacctcaccaccactatcttgtccctgctggcacacaatacataaacccggctgcaccactgtactgctgctgcctcatgcacatgtgagaccatgttgccctgctgctgctggtgcatatgtgcccacagaccccgacacgttgctgccctgctgctgctgatg

SEQ ID NO: 79759 - DNA, 1260 bp, Homo sapiens
tgcattcacatatcttagtattttgttctgttttaatgacaaattacccttttagaaatgaaaaacacttgagattttttttttcctcctaaaatgggtcattctacagtggatattttgtagcagaggtagcctcacctcatcctcctggaaggcaaacatgataaataccatacttgtataattgaatagaaatgccttttccatgttcaggttttaaaatcttccacctgccaccctcaatattccattaccatcaacttctgcatttcatttatcctgcagattagatttgcaaataagaattgcggattctctcttcattttaaaccaggcttttcaagtactgcattatgttccattgagccaggtttcaagatgtggaaataaaactcaatgagagatagtcataaacactgtctttaacctctagaattatagtgatatgtggcattacaggaattggcaacatgacagaaagtcgtaagatggattatgaggtaaaacatctgatggaaggaaagagtgtaatggtgggttatatgaatgtagtaaatggtactccagaagagatatgtgggaactctgaggtttaatgcagacaggtgcccttagctgggtcaactgggaaatgaaatcctcaaatgaccagaagcctctttctagcaacaccatagtcttaatgcgtgaccttaggcaagtcacttacctgcacggtcctcacttgcctagctttaaaatgatgctcataatcgatacataaccagataatgcttacaaagagctctgagattcttggatgaaaggccctatttacatgtaaagtagtgttatcattcwaatcccccctctgctaaatactctgtaacaggtgtattaaaggagaggaaatgaggaaggagaaaaaggaaaattggctcctgaagggatagaaatctgattatctcaaattgactcattctgaaaagggggaagaggagggtagatctgctgcatttaaccatttccaaacagactttactttgaataagcgaataaacacaatgagaccaatctgtacattttccaatcatgagggaaaaaaaatctgagataagtccactaaacttctgagcataatccccctaaaaaacagtttcaaatacatgcatgtggcttccattaatatgtaccactataaaaatttaaaatacatctatttcaccacttattgacacgtaattttatatatatatatatatatatatatatatatatata

SEQ ID NO: 79760 - DNA, 881 bp, Homo sapiens
gatctcaacccccaatcaycacattatggttagtctttaattcatccaagtagaggtcccatatgttatgacgcagagacaagcattgtgtaatgtccatgtggctgtccttcagaatgtgagactgtaattaagaaatttcagataaagccactaagtctgacttgatctgtgatgcaatactagtaaccaaaatggtacattttaaataaaaatgtattatatttcaaacctatatccatattgtaaaataaatccacacatatctaagaatataaagccaaaagtaaaagatctcttcacacataccctcagaacaaaaggagttagtactcttggtaaaagtagtccccgtttgaagctagatgtgcattcttccagatactttatacacttacatattttatagatactctcttttgagggataataataataatttgtggaatactattcatatggttcaaaatttttgccatttgaatgtaactggttatgttggaaatcgtaacattgcagcttatgtataaatatatatgattgcttttaacatctaaatacagaaatgagatatgactttcatggacattagcaatttttttcttcataagcctcttaagatactaataatattctttattactttttggtataaatgagtataattaaggatgaactaatcatataataattgctataataattattatattcactgttttagttgattttgaaagattaaacttagaacatttgtgtcagctttaggcactgtgtctactaagcttagaagttggttctgacctaatagagtctttattgtggatgtttataatttgtttaatcatttttgaattgaatagttttttttgaagtttcta

SEQ ID NO: 79761 - DNA, 881 bp, Homo sapiens
gatctcaacccccaatcatcacattatggttagtctttaattcatccaagtagaggtcccatatgttatgacgcagagacaagcattgtgtaatgtccatgtggctgtccttcagaatgtgagactgtaattaagaaatttcagataaagccactaagtctgacttgatytgtgatgcaatactagtaaccaaaatggtacattttaaataaaaatgtattatatttcaaacctatatccatattgtaaaataaatccacacatatctaagaatataaagccaaaagtaaaagatctcttcacacataccctcagaacaaaaggagttagtactcttggtaaaagtagtccccgtttgaagctagatgtgcattcttccagatactttatacacttacatattttatagatactctcttttgagggataataataataatttgtggaatactattcatatggttcaaaatttttgccatttgaatgtaactggttatgttggaaatcgtaacattgcagcttatgtataaatatatatgattgcttttaacatctaaatacagaaatgagatatgactttcatggacattagcaatttttttcttcataagcctcttaagatactaataatattctttattactttttggtataaatgagtataattaaggatgaactaatcatataataattgctataataattattatattcactgttttagttgattttgaaagattaaacttagaacatttgtgtcagctttaggcactgtgtctactaagcttagaagttggttctgacctaatagagtctttattgtggatgtttataatttgtttaatcatttttgaattgaatagttttttttgaagtttcta

SEQ ID NO: 79762 - DNA, 881 bp, Homo sapiens
gatctcaacccccaatcatcacattatggttagtctttaattcatccaagtagaggtcccatatgttatgacgcagagacaagcattgtgtaatgtccatgtggctgtccttcagaatgtgagactgtaattaagaaatttcagataaagccactaagtctgacttgatctgtgatgcaayactagtaaccaaaatggtacattttaaataaaaatgtattatatttcaaacctatatccatattgtaaaataaatccacacatatctaagaatataaagccaaaagtaaaagatctcttcacacataccctcagaacaaaaggagttagtactcttggtaaaagtagtccccgtttgaagctagatgtgcattcttccagatactttatacacttacatattttatagatactctcttttgagggataataataataatttgtggaatactattcatatggttcaaaatttttgccatttgaatgtaactggttatgttggaaatcgtaacattgcagcttatgtataaatatatatgattgcttttaacatctaaatacagaaatgagatatgactttcatggacattagcaatttttttcttcataagcctcttaagatactaataatattctttattactttttggtataaatgagtataattaaggatgaactaatcatataataattgctataataattattatattcactgttttagttgattttgaaagattaaacttagaacatttgtgtcagctttaggcactgtgtctactaagcttagaagttggttctgacctaatagagtctttattgtggatgtttataatttgtttaatcatttttgaattgaatagttttttttgaagtttcta

SEQ ID NO: 79763 - DNA, 881 bp, Homo sapiens
gatctcaacccccaatcatcacattatggttagtctttaattcatccaagtagaggtcccatatgttatgacgcagagacaagcattgtgtaatgtccatgtggctgtccttcagaatgtgagactgtaattaagaaatttcagataaagccactaagtctgacttgatctgtgatgcaatactagtaaccaaaatggtacattttaaataaaaatgtattatatttcaaacctatatccatattgtaaaataaatccacacatatctaagaatataaagccaaaagtaaaagatctcttcacacataccctcagaacaaaaggagttagtactcttggtaaaagtagtccccgtttgaagctagatgtgcattcttccagatactttatrcacttacatattttatagatactctcttttgagggataataataataatttgtggaatactattcatatggttcaaaatttttgccatttgaatgtaactggttatgttggaaatcgtaacattgcagcttatgtataaatatatatgattgcttttaacatctaaatacagaaatgagatatgactttcatggacattagcaatttttttcttcataagcctcttaagatactaataatattctttattactttttggtataaatgagtataattaaggatgaactaatcatataataattgctataataattattatattcactgttttagttgattttgaaagattaaacttagaacatttgtgtcagctttaggcactgtgtctactaagcttagaagttggttctgacctaatagagtctttattgtggatgtttataatttgtttaatcatttttgaattgaatagttttttttgaagtttcta

SEQ ID NO: 79764 - DNA, 881 bp, Homo sapiens
gatctcaacccccaatcatcacattatggttagtctttaattcatccaagtagaggtcccatatgttatgacgcagagacaagcattgtgtaatgtccatgtggctgtccttcagaatgtgagactgtaattaagaaatttcagataaagccactaagtctgacttgatctgtgatgcaatactagtaaccaaaatggtacattttaaataaaaatgtattatatttcaaacctatatccatattgtaaaataaatccacacatatctaagaatataaagccaaaagtaaaagatctcttcacacataccctcagaacaaaaggagttagtactcttggtaaaagtagtccccgtttgaagctagatgtgcattcttccagatactttatacacttacataytttatagatactctcttttgagggataataataataatttgtggaatactattcatatggttcaaaatttttgccatttgaatgtaactggttatgttggaaatcgtaacattgcagcttatgtataaatatatatgattgcttttaacatctaaatacagaaatgagatatgactttcatggacattagcaatttttttcttcataagcctcttaagatactaataatattctttattactttttggtataaatgagtataattaaggatgaactaatcatataataattgctataataattattatattcactgttttagttgattttgaaagattaaacttagaacatttgtgtcagctttaggcactgtgtctactaagcttagaagttggttctgacctaatagagtctttattgtggatgtttataatttgtttaatcatttttgaattgaatagttttttttgaagtttcta

SEQ ID NO: 79765 - DNA, 865 bp, Homo sapiens
tttaaaatcataagtttagaaatgaaaaaactaaggcactgagaagataaacaccatgtcaaaaatcccatagctgaaaattagtggagtggagaaaagtagtggagtagtggaagcaatagctttgtgacctcagagtcttggtgctcaacactgcataggctcaaattttctgatctttagatttatcctccaatcagatcattacttatttgccttaaaccagtcatgatactccttgtaggtctcttttaggataattcattttttttttcacaaaaaaactcctgagtttgttaaccatacgaacatatatgatgtgcacacccacccgcagtcctccagataccagaaatacgtctgaatcacaggaacaaaaatgagtcaagcttgtgttagggacaaaactaaattttttatgaaagcatttgaaactttgccgtaaagttcattatgttcwcaacttgctgttgccaaaatcgttgagagcagggattagatcttagatatacttaactctttagcagcatgcacagtttctggcacatactaggaacttaatttaaaaataatgtggttggcaactaaacaaatgagtgttgggctacagaacttgcttgaggatttggtcagatggaacacggtccagagagttgtgtttggagtcacaatttggattagaggtttggacagcaagtggaagtgtttccacataatattcacagctgaaacatatgttacaaatccataaaaataaacgtggctagaaaccacactaaggaaaaaaacttatttgcaacaataggaaaagtggctgagtgaattcatattattgatctattaggaggaataaagtacatgtctt

SEQ ID NO: 79766 - DNA, 865 bp, Homo sapiens
tttaaaatcataagtttagaaatgaaaaaactaaggcactgagaagataaacaccatgtcaaaaatcccatagctgaaaattagtggagtggagaaaagtagtggagtagtggaagcaatagctttgtgacctcagagtcttggtgctcaacactgcataggctcaaattttctgatctttagatttatcctccaatcagatcattacttatttgccttaaaccagtcatgatactccttgtaggtctcttttaggataattcattttttttttcacaaaaaaactcctgagtttgttaaccatacgaacatatatgatgtgcacacccacccgcagtcctccagataccagaaatacgtctgaatcacaggaacaaaaatgagtcaagcttgtgttagggacaaaactaaattttttatgaaagcatttgaaactttgccgtaaagttcattatgttctcaacttgctgttgccaaaatcgttgagagcagggattagatcttagatatacttaactctttagcagcatgcacagtttctggcacatactaggaacttaatttaaaaataatgtggttggcaactaaacaaatgagtgttgggctacagaacttgcttgaggatttggtcagatggaacacrgtccagagagttgtgtttggagtcacaatttggattagaggtttggacagcaagtggaagtgtttccacataatattcacagctgaaacatatgttacaaatccataaaaataaacgtggctagaaaccacactaaggaaaaaaacttatttgcaacaataggaaaagtggctgagtgaattcatattattgatctattaggaggaataaagtacatgtctt

SEQ ID NO: 79767 - DNA, 673 bp, Homo sapiens
aatgaaggtaaatcatgaagtaaatacatagtaatgtattaagtgtatattgtctctaatcatccaatcatcattcttttataagtacaacacccagacatgcacaataataataaatttggtcttttttgatatttttggactgactttgactttcagtcacctaaaagctatacacgtttttggcttgaaggtatatttatcaatatagaagttatatattaatttattatatatgtgtttattagtttatgwtgttcaactctttaaatgtatgataaatcggtttccttttttatttctcactcagtcaccataaaagttaggtgaagccctgttcacatgaatggactgagactcacattgaaatgtcagcagccccctctacttctggctgtttaggcttagacttgatatccttatctgtaaagtaggacatcatcagtcccctcattgtatttctgggatgattacataagccaacgtctgtaaaagtgtctagcacttagctcatgctagtttcttctcataagcatattatatcacttgaacctcaaaataatgaggttggtttcattaagtgctctgttgttctttaataaatgataaaaatgagattctgggaagatggtacctactagagatcacaagtcagtgaatggtggatgtgggt

SEQ ID NO: 79768 - DNA, 1090 bp, Homo sapiens
tgatatatatattctttaatttttggcataatatatttttgaagtagctttaataatctaaataaggataacgtccaactctataattctagcctagatatctctcttaagattgagatctgatccaattgcctttcaaatatttccatctggacatgccatagcttcccactcagcctgtccataatgaacttatcaccctgtaaatctgctgctcctcatgggtgcccagtttcagggataggtacctccaaatatgaaggtattcaagccactgtctcttcccatgcactccctaccactctcatttctaatcaatcattaaattcagccaattttatattccaaatatcttctgaatcttttcacctccccctgcttttctagtttacatcacaattttctcttacctggactaatacaattgccttccaactggttcctgacttccaaccatgctgcaattcccaagtgccttacaaataaagtgtaaatattttattctttctttattttataaaatgaaaataatagggtctgtatctcacggtccggttattgtaaggaagtaattagattatagttgtaaaagtagaaggcattttaatcactgtttgaggaaaggcaaggattgtctggaccacctgaatcactaacatcctccaacttagatgatattgtgtccactttaagtgttgggaaactgaaattaggaacagcgataagatctgctcaaggtcagttgataagtgatactccagaattttttccgtgtaactatttgaccccacacctgtgaactttcctttaccatagcttggactcagttctgtgtgaacttgggaaccagggatgatttttgaggatgaccccaatactcagaagaggatttgttacatatttcccagtaatacaatacttctggccttgtgggaatgctttcttgaagcctagggtaggtagagagactgtgaagccataagcagaatgaggtgaatgggatacttgacctactgtgtgaaaaataaagaaaatggcatctcarggctgatgcaggggagcatatcagctccatctttggctcatatgg

SEQ ID NO: 79769 - DNA, 693 bp, Homo sapiens
ttttgtggccaccccaggcgtccagatgtacacaggagactgtggctggggggtgatctggacagggaagtgctcaccacactcctgacyttcatctgggtcatgtgagggatgggctcggcatcacagtgcccttcccaagcccacctggccagacctccctctgggccagaacagaggatcatgaggacagtgtgaggaagctgcccttgggccagtcgggtctgaccgcagggctccccaggccccactgggtacacatagacttactcttctgaaccttaaaagcaatgcttctgatcggcatcaacacctgtccttccagcaaatacatgtcccacaagcacagggtgagcccgagagagatctgtggggacagcaggtgtgagacaacctggcccttccaggctggggctggtggctcaagctgcacacattggggcttcagtctccagagtcagtgaccttccccatgagggtcgcctgagccatctagaatggtgggtcagacaaggtcttgcagctcctcatagggggcactcatttgagtggggatgtggctcctggacagaggggcttgcccagggcttgaggcttccctgagccctctcaagttgggtcctggcccagtctgcccatgaggctgggcctgagccccagccattgccctgggatgacccctcttgggcagag

SEQ ID NO: 79770 - DNA, 693 bp, Homo sapiens
ttttgtggccaccccaggcgtccagatgtacacaggagactgtggctggggggtgatctggacagggaagtgctcaccacactcctgactttcatctgggtcatgtgagggatgggctcggcatcacagtgcccttcccaagmccacctggccagacctccctctgggccagaacagaggatcatgaggacagtgtgaggaagctgcccttgggccagtcgggtctgaccgcagggctccccaggccccactgggtacacatagacttactcttctgaaccttaaaagcaatgcttctgatcggcatcaacacctgtccttccagcaaatacatgtcccacaagcacagggtgagcccgagagagatctgtggggacagcaggtgtgagacaacctggcccttccaggctggggctggtggctcaagctgcacacattggggcttcagtctccagagtcagtgaccttccccatgagggtcgcctgagccatctagaatggtgggtcagacaaggtcttgcagctcctcatagggggcactcatttgagtggggatgtggctcctggacagaggggcttgcccagggcttgaggcttccctgagccctctcaagttgggtcctggcccagtctgcccatgaggctgggcctgagccccagccattgccctgggatgacccctcttgggcagag

SEQ ID NO: 79771 - DNA, 693 bp, Homo sapiens
ttttgtggccaccccaggcgtccagatgtacacaggagactgtggctggggggtgatctggacagggaagtgctcaccacactcctgactttcatctgggtcatgtgagggatgggctcggcatcacagtgcccttcccaagcccacctggccagacctccctctgggccagaacagaggatcatgaggacagtgtgaggaakctgcccttgggccagtcgggtctgaccgcagggctccccaggccccactgggtacacatagacttactcttctgaaccttaaaagcaatgcttctgatcggcatcaacacctgtccttccagcaaatacatgtcccacaagcacagggtgagcccgagagagatctgtggggacagcaggtgtgagacaacctggcccttccaggctggggctggtggctcaagctgcacacattggggcttcagtctccagagtcagtgaccttccccatgagggtcgcctgagccatctagaatggtgggtcagacaaggtcttgcagctcctcatagggggcactcatttgagtggggatgtggctcctggacagaggggcttgcccagggcttgaggcttccctgagccctctcaagttgggtcctggcccagtctgcccatgaggctgggcctgagccccagccattgccctgggatgacccctcttgggcagag

SEQ ID NO: 79772 - DNA, 334 bp, Homo sapiens
catactttgagaaacattttcgttgaaatgatctgtgtcatggcaggcctgtgaaatagatgttgaacagataatgctcttatttttataaatacagaaattgaagcataaaatcacatagctcacttattatcacacagcaagttaatggtggaaacacaggcttccttccaggacactgctacttcctctgtcctgttgcttaaaaactgcacgtctgccargcacagtggtgcatgcctgtagcccaagctactcaggaggctgaggtgggaggatcatttgggctaaggattattaatagaatctagccttgacaagagaccctgtctct

SEQ ID NO: 79773 - DNA, 629 bp, Homo sapiens
tgagattgcagggcaaatccccaccccaaactgtagagacaggtgcattcasagacatacagcaaccaagatttgcttacatgaagcagaagccatgggagacataaactggtaggaacacttaaaaggtaatcttacaaattgctagaggttgagtgtggactattgtgagaatgaaaaaatcctgggggccacagtcttaggggtgactacatttctgtggacattccctccaggaattttaccaggttgtcatcacgaggattccaaaagattccctcctgtctctggcagggggagaggaagagtaaccatcatgaaacatgcccagaacctgttccagagaattaattgtgaaagcttatcccagctagaggaaagaaattccttgttcctccaattttcttcagctttcctgtttgacctaagtgggggttagaagagaatacgacaacccatagtcaagagaggacaggggcttcaggaaatagattgggaacactacagatgggaaagggaatagggaacagggggaagaaagctgtactactggagaaacacttgtgaaggtcacaaccataagacaagccccctgaaaacctgagacttaatcaaagatcatagcatgt

SEQ ID NO: 79774 - DNA, 629 bp, Homo sapiens
tgagattgcagggcaaatccccaccccaaactgtagagacaggtgcattcagagacatacagcaaccaagatttgcttacatgaagcagaagccatgggagacataaactggtaggaacacttaaaaggtaatcttacaaattgctagaggttgagtgtggactattgtgagaatgaaaaaatcctgggggccacagtcttaggggtgactacatttctgtggrcattccctccaggaattttaccaggttgtcatcacgaggattccaaaagattccctcctgtctctggcagggggagaggaagagtaaccatcatgaaacatgcccagaacctgttccagagaattaattgtgaaagcttatcccagctagaggaaagaaattccttgttcctccaattttcttcagctttcctgtttgacctaagtgggggttagaagagaatacgacaacccatagtcaagagaggacaggggcttcaggaaatagattgggaacactacagatgggaaagggaatagggaacagggggaagaaagctgtactactggagaaacacttgtgaaggtcacaaccataagacaagccccctgaaaacctgagacttaatcaaagatcatagcatgt

SEQ ID NO: 79775 - DNA, 629 bp, Homo sapiens
tgagattgcagggcaaatccccaccccaaactgtagagacaggtgcattcagagacatacagcaaccaagatttgcttacatgaagcagaagccatgggagacataaactggtaggaacacttaaaaggtaatcttacaaattgctagaggttgagtgtggactattgtgagaatgaaaaaatcctgggggccacagtcttaggggtgactacatttctgtggacattccctccaggaattttaccaggttgtcatcacgaggattccaaaagattccctcctgtctctggcagggggagaggaagagtaaccatcatgaaacatgcccagaacctgttccagagaattmattgtgaaagcttatcccagctagaggaaagaaattccttgttcctccaattttcttcagctttcctgtttgacctaagtgggggttagaagagaatacgacaacccatagtcaagagaggacaggggcttcaggaaatagattgggaacactacagatgggaaagggaatagggaacagggggaagaaagctgtactactggagaaacacttgtgaaggtcacaaccataagacaagccccctgaaaacctgagacttaatcaaagatcatagcatgt

SEQ ID NO: 79776 - DNA, 650 bp, Homo sapiens
attagctgtgattaattatgccatgtattttatacattatctgtcttgttttacgtatcagatttacattttccccccagtttttgtatccagtttctaccctactagactgagttctttgaggacaggactggatcttgtcaatctttagatccttagcacctaatgtagtagtgcctgatgctgtgtatttgaccacaacggattgcttaagaacatattctccgtacttctggataagatgtcagacagtaaattataatccattcttttatagtatgctatctgtattcagaatatttcagaatttcactttataaactttatatttttaaggtattactgtatgttagaaaagtctttacaattgctttataatcctttattggggcctkaatcattttggattggtttgcagttcttcttagatttttattgcatcagtggtcatgttagctttgagataaattccacattttacaagcttgaaataatttcctaatagttatgtaaatttattctgaaccacagtagcctcatttccatggtaactaaccaccttcagaagagaactttcagatattctagaaaagaccagaaatatccatgtgaaataaaatgaactaatgatgtaaagttagaactcagat

SEQ ID NO: 79777 - DNA, 754 bp, Homo sapiens
tgcaggggcagaactgggtagtagcaagagagaccacagggccccaaagcctgaaatatttactatctggccctttccagaaagagacaagccctgaagtagaaggttgatcatgttcctggctaactcattttgaatccggtgactttggggatacatgtcattatctccttcatctgtggaatgggtctgataaccatagaagctgcctcccaatgttttgggaggattcggtgaaatgcacatgagctttcagggargctgacacacacacagtgaagcttagctagagttacagtcacttccattcctgacattctccccttgcaagtggggaagaaggagtaatcaacatgatcactctggccatagactgtggctactatttatggaattggtatagcagagaagacagacaatgaaataaacaattattataacgtgtgaagagtactgtcaagaaccaaggatgcacagggggttcagggctctgggcagcagcacctgcctcccctggcagggcgggaatgattaggatgagagagtgaagggattaaacagaacatcttaaaagactaccaggccaggcacggtggctcacgcctgtaatcccaacactttgggaggctgagatgggcggatcacctgaagtcaggagttcgagaccagcctgaccaacatggagaaaacctgtctgtactaaaaataataaattagccaggcatggtggcacatgcctgtaatcccagctact

SEQ ID NO: 79778 - DNA, 754 bp, Homo sapiens
tgcaggggcagaactgggtagtagcaagagagaccacagggccccaaagcctgaaatatttactatctggccctttccagaaagagacaagccctgaagtagaaggttgatcatgttcctggctaactcattttgaatccggtgactttggggatacatgtcattatctccttcatctgtggaatgggtctgataaccatagaagctgcctcccaatgttttgggaggattcggtgaaatgcacatgagctttcagggaagctgacacacacacagtgaagcttagctagagttacagtcacttccattcctgrcattctccccttgcaagtggggaagaaggagtaatcaacatgatcactctggccatagactgtggctactatttatggaattggtatagcagagaagacagacaatgaaataaacaattattataacgtgtgaagagtactgtcaagaaccaaggatgcacagggggttcagggctctgggcagcagcacctgcctcccctggcagggcgggaatgattaggatgagagagtgaagggattaaacagaacatcttaaaagactaccaggccaggcacggtggctcacgcctgtaatcccaacactttgggaggctgagatgggcggatcacctgaagtcaggagttcgagaccagcctgaccaacatggagaaaacctgtctgtactaaaaataataaattagccaggcatggtggcacatgcctgtaatcccagctact

SEQ ID NO: 79779 - DNA, 938 bp, Homo sapiens
gggaattttgagctgggaaaatataagccatatttatctttttgaaaaatctttattaaaaatataccagaagtatgtggaagaaatgtagaagaaaaacagattgacaactaagagaatgaagtcactacagcaaagtttcaactgttgtgcagtgtttgagggtctgtaaatagttccactataaaccttcactccccacattttaattattttcacatataagtttgttcctagctgaaagtgtctagagtgaacttttttaggcttctcttttccaaattatggacaaattataactacagacaaaactgattatatgtatgggggcaggggtggcacaaacagggtcagggtagacccaaacaaagttagtttaacaagatggattgtctctaaagacaagatttgatttactgacatgtgtaaagaaagtgtttctaagaatagaagctgaccagcccttaacttgaaacagaaattgtcagagatgttggagataatgatgccacaatctgccccaggaagtacatgctttgctgggccaccatgatccattctttctacctggctgagatattctactgtctaagcggtgtgtggccaatggtaactcccaatccattcatttcttaattcactcactcattcttgtattcttactgaacttatgttttatgctaactcacttccagacaggtggtgcatacttattgaatcatgaataaattctgcgaccccttcttctgatgccctggtcatgatgaagtgatcttctgccaaggcatcttcctcttcacacagaatgccccagcttgaccttgggcagttctgtctsatgtacagttacggttttcattgcatctggtttttcatatcagttcttgcggcctttgccaatgtgacctggcatcttcgaagatgacactgagcatctg

SEQ ID NO: 79780 - DNA, 683 bp, Homo sapiens
ttgacttacatctacaaacataaaagaacaactggaatgtcatctagagcataccaagaattctcacagttattgtttataagttaaagagtttaaaccatcctggtatagatttctttattataatatttataaactgcaagacagttgtcaaaatctaaattttaggttacataagcttccaataagtaaaattatctttatgttgtaaggaagattagaagtttagcttcaatgatgaggtccctaagacataaaaatggtaataaaatatcttttctcaaaatctactcattaataaacaatctggcaatggagtctatagccagattttctgtgagtaattgtaagtataaatcatactatcatttgagaaaaacatgcatctcatctctaagaggaaaatttttagaaacattgagaaagagtgacctggttcaattaacatgaataccrtggacatttgaagaaaaaggagactaatgattctaaaaatcatttaataaagagcactttatttgatttaaaataaaaataaaaaccactattttgagggctgttttggttatttcttagtaataaattcacagggctctaggactctcagaagcatcctgaaaaatgtgaacacaggcactaaacatatacattaaagattaattagtagaaaacaattcctgtag

SEQ ID NO: 79781 - DNA, 776 bp, Homo sapiens
  misc_feature (1)...(776): n = A,T,C or G
ctctcattaacaatagcccaggatgaagaaacagcccattaaacaagcaatgatttctctatccaaatmgccagcagatactactcacctgattgacagactctgatattccagccattgttcaagcaaaattactcattcctcacaaacctggctggaagccttctgcatcacacctgtgacagtctgtggcggccttttccagacagcataaaagaacagtaggatgtccaggccacactgcacagggcctggggagagccctttaatgccattattcactgatttttatggcccaaagaaggtaacatagtatttatcagtatttaccattttttctatcttctagaacttatagccctctattaagtatgctcagttttcatcaactatccaccagttttatgaaaacctcagtgtacaatcaaacacttcatcttttctgaaaacaatcactctcttggtgaaatgatacacaatgaaaaataaattttaaaacagtttcctttaaataataaattgcactgtaaatttatccatgtaaccaaaaaccacccgtaccccaaaatctactgaaacaaattttcttttttaaagggagtggagaaggaaacctgtggtttgagagggacccaagcagcaaacatcagccaagtgcacggtgcagacatcttccggagtctgacgccaaccaatgggtaatgagatactaaagcactgtaatctctgcctagccggttgatgatagcacgaaatctggngatttttttcttgag

SEQ ID NO: 79782 - DNA, 776 bp, Homo sapiens
  misc_feature (1)...(776): n = A,T,C or G
ctctcattaacaatagcccaggatgaagaaacagcccattaaacaagcaatgatttctctatccaaatagccagcaratactactcacctgattgacagactctgatattccagccattgttcaagcaaaattactcattcctcacaaacctggctggaagccttctgcatcacacctgtgacagtctgtggcggccttttccagacagcataaaagaacagtaggatgtccaggccacactgcacagggcctggggagagccctttaatgccattattcactgatttttatggcccaaagaaggtaacatagtatttatcagtatttaccattttttctatcttctagaacttatagccctctattaagtatgctcagttttcatcaactatccaccagttttatgaaaacctcagtgtacaatcaaacacttcatcttttctgaaaacaatcactctcttggtgaaatgatacacaatgaaaaataaattttaaaacagtttcctttaaataataaattgcactgtaaatttatccatgtaaccaaaaaccacccgtaccccaaaatctactgaaacaaattttcttttttaaagggagtggagaaggaaacctgtggtttgagagggacccaagcagcaaacatcagccaagtgcacggtgcagacatcttccggagtctgacgccaaccaatgggtaatgagatactaaagcactgtaatctctgcctagccggttgatgatagcacgaaatctggngatttttttcttgag

SEQ ID NO: 79783 - DNA, 776 bp, Homo sapiens
  misc_feature (1)...(776): n = A,T,C or G
ctctcattaacaatagcccaggatgaagaaacagcccattaaacaagcaatgatttctctatccaaatagccagcagatactactcacctgattgacagactctgatattccagccattgttcaagcaaaattactcattcctcacaaacctggctggaagccttctgcatcacacctgtgacagtctgtggcggccttttccagacagcataaaagaacagtaggatgtccaggccacactgcacagggcctggggagagccctttaatgccattattcactgatttttatggcccaaagaaggtaacatagtatttatcagtatttaccattttttctatcttctagaacttatagccctctattaagtatgctcagttttcatcaactatccaccagktttatgaaaacctcagtgtacaatcaaacacttcatcttttctgaaaacaatcactctcttggtgaaatgatacacaatgaaaaataaattttaaaacagtttcctttaaataataaattgcactgtaaatttatccatgtaaccaaaaaccacccgtaccccaaaatctactgaaacaaattttcttttttaaagggagtggagaaggaaacctgtggtttgagagggacccaagcagcaaacatcagccaagtgcacggtgcagacatcttccggagtctgacgccaaccaatgggtaatgagatactaaagcactgtaatctctgcctagccggttgatgatagcacgaaatctggngatttttttcttgag

SEQ ID NO: 79784 - DNA, 776 bp, Homo sapiens
  misc_feature (1)...(776): n = A,T,C or G
ctctcattaacaatagcccaggatgaagaaacagcccattaaacaagcaatgatttctctatccaaatagccagcagatactactcacctgattgacagactctgatattccagccattgttcaagcaaaattactcattcctcacaaacctggctggaagccttctgcatcacacctgtgacagtctgtggcggccttttccagacagcataaaagaacagtaggatgtccaggccacactgcacagggcctggggagagccctttaatgccattattcactgatttttatggcccaaagaaggtaacatagtatttatcagtatttaccattttttctatcttctagaacttatagccctctattaagtatgctcagttttcatcaactatccaccagttttatgaaaacctcagtgtacaatcaaacacttcatcttttctgaaaacaatcactctcttggtgaaatgatacacaatgaaaaataaattttaaaacagtttcctttaaataataaattgcactgtaaatttatccatgtaaccaaaaaccacccgtaccccaaaatctactgaaacaaattttcttttttaargggagtggagaaggaaacctgtggtttgagagggacccaagcagcaaacatcagccaagtgcacggtgcagacatcttccggagtctgacgccaaccaatgggtaatgagatactaaagcactgtaatctctgcctagccggttgatgatagcacgaaatctggngatttttttcttgag

SEQ ID NO: 79785 - DNA, 927 bp, Homo sapiens
gaacacaacctagcacacagtttggtgtaacacctgttggcggttcccagatattaaaatgatgcgccggggatggaactgacgatcacatttgggtgttggttgatctgtttccagcacacctttggttgctttacatagggtgggtagtgggagggcccattgtcttcaagttcagtcacgttctcacactgaatgttttgctgtcctatttttgagtattacatatacttgtatgtggattagagatagagccgattttgcacactgactggtaatttccattcaaggtaatctcagtgattgaatttgatagttgcctttgtggaagtggaaattccttgtctaggtgaatgctgtataaatatgcgttgctgccaccatctctgtgggaacacattcttgkagaccgcttggtatgtctaggcccttgtttttacccctccaatagtcattcttttggagatattccatgagcatttagccgcaaacgacagtgacaggatactggagcagtaaaaactatgtcttagggattaaagtggtacattcccagaagaggtcaagagattggtgatttcttactctcttagaatcagaggttcttaatgagagctctgctgtcctgtggttcctggtttaggaatcccctgaaatcatatgcaaactgtacacatgtgcatttccaagcgaaaacactctgtggcattcattggccatgcagtgtttgagagcagtcgtcctagagattctacctgttgctgtccagggatctgtaccttctggatgctacgtgaggctgggccaggttcactcctccctggtgtattcttgagatccatgggtaaaggaaatggcctggtctgtcttcctaacttttttctttttagcaaatgtaaaataatcatcacttgctgtagcaaagca

SEQ ID NO: 79786 - DNA, 927 bp, Homo sapiens
gaacacaacctagcacacagtttggtgtaacacctgttggcggttcccagatattaaaatgatgcgccggggatggaactgacgatcacatttgggtgttggttgatctgtttccagcacacctttggttgctttacatagggtgggtagtgggagggcccattgtcttcaagttcagtcacgttctcacactgaatgttttgctgtcctatttttgagtattacatatacttgtatgtggattagagatagagccgattttgcacactgactggtaatttccattcaaggtaatctcagtgattgaatttgatagttgcctttgtggaagtggaaattccttgtctaggtgaatgctgtataaatatgcgttgctgccaccatctctgtgggaacacattcttgtagaccgcttggtatktctaggcccttgtttttacccctccaatagtcattcttttggagatattccatgagcatttagccgcaaacgacagtgacaggatactggagcagtaaaaactatgtcttagggattaaagtggtacattcccagaagaggtcaagagattggtgatttcttactctcttagaatcagaggttcttaatgagagctctgctgtcctgtggttcctggtttaggaatcccctgaaatcatatgcaaactgtacacatgtgcatttccaagcgaaaacactctgtggcattcattggccatgcagtgtttgagagcagtcgtcctagagattctacctgttgctgtccagggatctgtaccttctggatgctacgtgaggctgggccaggttcactcctccctggtgtattcttgagatccatgggtaaaggaaatggcctggtctgtcttcctaacttttttctttttagcaaatgtaaaataatcatcacttgctgtagcaaagca

SEQ ID NO: 79787 - DNA, 927 bp, Homo sapiens
gaacacaacctagcacacagtttggtgtaacacctgttggcggttcccagatattaaaatgatgcgccggggatggaactgacgatcacatttgggtgttggttgatctgtttccagcacacctttggttgctttacatagggtgggtagtgggagggcccattgtcttcaagttcagtcacgttctcacactgaatgttttgctgtcctatttttgagtattacatatacttgtatgtggattagagatagagccgattttgcacactgactggtaatttccattcaaggtaatctcagtgattgaatttgatagttgcctttgtggaagtggaaattccttgtctaggtgaatgctgtataaatatgcgttgctgccaccatctctgtgggaacacattcttgtagaccgcttggtatgtctaggcccttgtttttacccctccaatagtcattcttttggagatattccatgagcatttagccgcaaacgacagtgacaggatactggagcagtaaaaactatgtcttagggattaaagtggtacattcccagaagaggtcaagagattggtgatttcttactctcttagaatcagaggttcttaatgagagctctgctgtcctgtggttcctggtttaggaatcccctgaaatcatatgcaaactgtacacatgtgcatttccaagcgaaaacactctgtggcattcattggccatgcagtgtttgagagcagtcgtcctagagattctacctgttgctgtccagggatctgtacctyctggatgctacgtgaggctgggccaggttcactcctccctggtgtattcttgagatccatgggtaaaggaaatggcctggtctgtcttcctaacttttttctttttagcaaatgtaaaataatcatcacttgctgtagcaaagca

SEQ ID NO: 79788 - DNA, 498 bp, Homo sapiens
agaacctgatgcgtcatgaatacctaccaatcrgaatggatttctgccattctggagcaggatactggaggcttttgctgcatcaactgccaatgttttatttgctggatagtgggactatctgaggggtgtttggggaagaggccaaggaagcaggggaacactcagggtgcttagggcaaaggctatttaccgactattacagaaatatttcattgtttttataaatatcatggctgttttcttgtgtcatgctatatatagctgggatacaagctgggatacaggtgagccctcttcctctttcatcaagtcttacccttcccagggtagctggaagagctggcatttatgtacgcaacatatttagcattgtgcttggcatgtggaaggacctaaatgaggaagagctcttattagtgggtgcaaaagcattttattataaatataaatatttatgcccaatttctttgccagggccatgccatgtatctagga

SEQ ID NO: 79789 - DNA, 2307 bp, Homo sapiens
tgagtggtaagattatgtgtaatttttcatttcttctgtttattttttctaaagttttaacaacaaaatgtactacttttataataaaatccaggcaaaaacttattttaaatatttcactaaactattcacaggtttcctatttcttatgtccttctcataattatttatatagaaaggaggccaactggagatagaagacctaatatttgatgttgtcatttatgtgtcaaaaagccatattttccttatgcgttgcctggcctgctgttgaatataaattgtgtatcactgataaacttaaagtggtagagaattataacgctaatataatccctgttcatttacttactttcctcattaaagaaaacacacacacacagagaattccatttgtttacaaaaatcacaatcttcttaaatttgctttgatttttgcatggacacaacaaaatgttttaatatagaaagaaagtacttaacaccttgagttgctggtattatttttcaaatttgtggtccttcatctcataatgacacataaaagaaatgctttatgctcatctctgttctttgatttctttactcatgtaagtgaatttttttttcttttcctgtggactagcctagaaagccttatttccctcccccctcccttttttttggtgccataattagattgagtggtagatgtttctagtgaatcattctaccaattaggctaaaatattaaagacaagtaacttgagaaggaaactcacatatctatagcactttgcagcagatgtatcctatttacttctttattttattgcttaatgactggatctgaagtaattgcaccatttgacagatatttatttgtaaaatgtgattcattcagtcagacacttttcaaatgattttcatgccaagtgttaaaattgcgtaggcttgagtagctgtttcaaaagatgcaaacacacatgttaattccatgcatcaagcacatctactttcggctctttttattatagaaatattycagttgacaaagagtgctagtgaacagacggcagggacttctggactttaatcaaccgcaatcactggcagagttcagaattaatttcctaaccatgaatcacctgcagacaatgaatcacgttctagagaattttgccaaacaaaacaagccatcatgccctatacaacttttgaggacagggctatggaaactcatttgactagcacagttgaaacagtgaaagggaaagaatactagcgaatactggaacaagctatcaaagagtgcctggtgactttcaacttaaaaaagacaaaggaaagcaagagttcagcaagaaaacactcctttctgaaacaacctatccattggttggcttctatccctaaattctagctattgacaatcaagataaaggattttttgactaggataggttctatccattatagcacagacgtcaaaacattttcacctattctttaatcaaagaatcagaaacttcttatttagtttctgtttcagacactgtatctccttggacagaaataaatgagggcaattagacaaatattcagatcattcagctaaaaaatgtttttgaatgaaataaccaagttatttttatacttaaatttgtgattgtctcaattttccattttctcttctaggtatagaacaaagcacctttacatgcttctgtacactgtaaaaaagttgcagccataaaaaatgatgagttcgtgtcctttgtagggacatggatgaaattggaaatcatcattctcagtaaactatcgcaagaacaaaaaaccaaacaccgcatattctcactcataggtgggaactgaacaatgagatcacatggacacaggaaggggaatatcacactctggggactgtggtggggtggggggagcggggagggatagcattgggagatatacctaatgctagatgacgagttagtgggtgcagcgcaccagcatgtcacatgtatacatatgtaactaacctgcacaatgtgcacatgtaccctaaaacttaaagtataataaaaaaaaaaatagaaaaaaaaaaaagttgagacaaatttcagtttcaagacatgataaaatgtttagcactttacataacatcatcaaaatgaaaactgatcacttaaaaagaaaatatttttattgtcaaatttgaatatagttaacttcaaactacaccaacaagtaaacaatataccactaggaaaaataaaaggccttggccaacccaagatatttgacatactttgctcccatcatgca

SEQ ID NO: 79790 - DNA, 556 bp, Homo sapiens
ataaattgtgaaaaagactaaaggaaatcatcagaaggacctgggcaaaggaagctaacaaaacactaaatcttaatctctctttctctctctctstgtgtgtgtgtgtgtgtgtgtgtgtgtgtgtgtgtgtgtgtctgtctgtctgtctgtctgtctgtctctccctcccctctcccccaccccatcccactccctttctcctttaggtatataacaataacttcatgtaaaggcagagtcatctcactttttcttcacacaacttaaagtttaaagatagggttctgaaatcccacagtagttagactggccttgtttctcatgaaagggtcttcttgctatttaaataagaattatttagaagacctgatccatcttccccaataagtgaatgaaacaggaaagaaggttagaggaaaaggattttgcaaggggcttgcttcttcccctgttagcttgctttccatcagaaggtttctaaaacaataaataaatacaaggagccaaataccatcaccaattccctttattccttgggatttctggtgaaatc

SEQ ID NO: 79791 - DNA, 556 bp, Homo sapiens
ataaattgtgaaaaagactaaaggaaatcatcagaaggacctgggcaaaggaagctaacaaaacactaaatcttaatctctctttctctctctctgtstgtgtgtgtgtgtgtgtgtgtgtgtgtgtgtgtgtgtgtctgtctgtctgtctgtctgtctgtctctccctcccctctcccccaccccatcccactccctttctcctttaggtatataacaataacttcatgtaaaggcagagtcatctcactttttcttcacacaacttaaagtttaaagatagggttctgaaatcccacagtagttagactggccttgtttctcatgaaagggtcttcttgctatttaaataagaattatttagaagacctgatccatcttccccaataagtgaatgaaacaggaaagaaggttagaggaaaaggattttgcaaggggcttgcttcttcccctgttagcttgctttccatcagaaggtttctaaaacaataaataaatacaaggagccaaataccatcaccaattccctttattccttgggatttctggtgaaatc

SEQ ID NO: 79792 - DNA, 556 bp, Homo sapiens
ataaattgtgaaaaagactaaaggaaatcatcagaaggacctgggcaaaggaagctaacaaaacactaaatcttaatctctctttctctctctctgtgtgtgtgtgtgtgtgtgtgtgtgtgtgtgtgtgtgtgtgtstgtctgtctgtctgtctgtctgtctctccctcccctctcccccaccccatcccactccctttctcctttaggtatataacaataacttcatgtaaaggcagagtcatctcactttttcttcacacaacttaaagtttaaagatagggttctgaaatcccacagtagttagactggccttgtttctcatgaaagggtcttcttgctatttaaataagaattatttagaagacctgatccatcttccccaataagtgaatgaaacaggaaagaaggttagaggaaaaggattttgcaaggggcttgcttcttcccctgttagcttgctttccatcagaaggtttctaaaacaataaataaatacaaggagccaaataccatcaccaattccctttattccttgggatttctggtgaaatc

SEQ ID NO: 79793 - DNA, 556 bp, Homo sapiens
ataaattgtgaaaaagactaaaggaaatcatcagaaggacctgggcaaaggaagctaacaaaacactaaatcttaatctctctttctctctctctgtgtgtgtgtgtgtgtgtgtgtgtgtgtgtgtgtgtgtgtgtctgtctgtctgtctgtctgtctgtctctccctcccctctcccccaccccatcccactccctttctcctttaggtatataacaataacttcatgtaaaggcagagtcatctcactttttcttcacacaacttaaagtttaaagatagggttctgaaatcccacagtagttagactggccttgtttctcatgaaagggtcttcttgctatttaaataagaattatttagaagacctgatccatcttccccaataagtgaatgaaacaggaaagaaggttagaggaaaaggattttgcarggggcttgcttcttcccctgttagcttgctttccatcagaaggtttctaaaacaataaataaatacaaggagccaaataccatcaccaattccctttattccttgggatttctggtgaaatc

SEQ ID NO: 79794 - DNA, 621 bp, Homo sapiens
gaattcccaaatatctgtttttccgaggatcaaaaaacatattatatatcttgataattcacatgwgtacaaatgctacaatatcttctttcttaaacagacagaaaacccaggctggacacgatggctcacacctgtaatcccagcattttgggaggccgaggtgggtggatcacctgaggtcaggagttcaagaccagcctggccaacatggtgaaacctcatctctactaaaaatacaaaattagctgggtgtggtggcgtgcacctgtaatcccagctacttgagaggctgaggcaggagaatcgcttgaacccaggaggtggaggttgcagtgagccgagatcgcaccacagcactccagcctgggcaaaaagagcggaactccatctcaaaaaaaaaaaaaaaaaaaaaaaaattcagaaaacccaaaaaagccaatctttcacttgggcttttgccactgctcccccatacctagtgaaagactgcttctcagaagaactatctctgcctgttgtttccaatgtctctcctccatttgtctcttcagtatattccagtgagactttcacatcacccctacagaaacagctctcttcaggtcaccaaggacctca

SEQ ID NO: 79795 - DNA, 1140 bp, Homo sapiens
tcaccaatccctctgggaggaatcacttcttggggtgattgtcaagcaatctcaggggatagagctatccactgagatccgtcaatcttcagtagcgccctgatattaaaaattaggaaggaagaaaatatctgtgaagcaatatggtgaatttctgctttagcattctttgagttagaatgtttctgaacagacattttaaagcttgaaaaagactatagtatttttaaaaacttgccaagaatttgactccttggaactctgatgcatatgcgccctctaggaactcatgaggagcatctgtgtctatactgcagtaatggttacaaataagtctaataagaatccttttcagatttttttaaaaaccaagtggtttcattaattgaaatcaaggtcagtcttatttcttaccctaacatattttctatggctctcctgggaagatttccaaccaggctgccctctttttaaacaaactactttgcagtaatatcctaaatcattcttcattttattagcattattatctctaatgttaatatatatatttaatgctttttttcctcaaagtatcctccaatactttatctcagtttaatctactaacaactctaggagacagaggatctactactcaacttagaaagaaaaggaaacagtgcaaagctattacgtgatacctaatggcaaccaacgagttcatgacaaagaggagacttgaacctgcacttcttgagtctgaatccgcacgtttatatttggagagcttataaaatamgggcatggagggagagagagtgagtctctcaacaccatggaagtgtatgtactattttgcatatgtgcataatgtactttatttttcctatggagagaggataagcaccaatgaactagataatgttgctagtcttttttttttttttcaatcttcagggaaaaatctattcctagagacagaaacactggttaccagaaagtagctgtcagtccttatttgggtcacctgcaagcacctttccacagtgaggaggcaaatggggacaatttttgagacaactgacatcaaaactaaggaaatgtgtgtgcaaatgtttatttaataagtatttttaataaatacatacttttagtaag

SEQ ID NO: 79796 - DNA, 1594 bp, Homo sapiens
tggcattaattataattaaccactccttgtcttttagtttccttgaaagagcatcctataaacattttttggctggccaatctttccccaatgccaaaatggaaagattgagaagctccctttcttcttcaatactgtcttttgtattccagaataaagactcactgcccaattccatttagttaatcaaacatccattaagcatctaatatgtgccaggaattttactagatattataggtacagaagtggataatactcagttgagtccctggcagtggcatattgggaacatggacacagatgatggtcattagaatatggtgttttgttttacggatgaaaatgtgggctgctagaggagagacacttaactatttagtggtttgggaaattatttattttaagatgattcctgagctgagtcctgaagcataggtacgagttaggtttaaatatatacacacaaaggcagagaaaactgcacgagcaaaggcccagtgttgtgaaaagcatggcagagtttaggaaaatgcagatatatatcaaaggcaatgaagccacaggagccagatcagggagacttctacatgctgagccagaaagaaggatctctgtattctctaggggaagaggccttatcgaagggtttaatcaaggcattagtgagataagagttgcatttcagatagagcgctttgcctgcaagaaaggctatcccaaaggtagagccagcctggaagaattaaactagtagcaggttgttgaaattatccaattaagagacgacaaacactggcattagggtgacagacagtcaaagagtggcaatgttgaaaaatagctacattggcaagactgattagatgtgggaaattggagagagcaagatgtagggtaatttcttggtaaccaaccctcttgcctggaagagtagcggtctcaagataacatgtgtgctggacagtctactctcgagatcaactgtgctggatagtctgctcttgagatcaactcacctctccactgtgcccagtgccaggaagtgtccctctatggaccatttcttcctgttcccttgccctttggttcctagtgagtttggccaatagaaggcactagccaaagattactgctagaaggagggagaaatcaaatcatttattctcctagcctccaccctggccagcccccattaggcagtggcttcattctctcttccagttctatagtcagcccctcttacaaggctgatgttctggccaaattcctgaaacagttctctgtctttatcccttgagagcaatagcttctccctgcttctagaccctaagtatgttttctccatgcttaatacattatttctgctccaaaccttgatcsctttggctagtccatcccttcatttcattctctgggattttctttttgagtgtcctgctgggaccatgactgatataagacatggtaggtttggtggtagacctttgagtttgaagcagttgaaaacaaataaataaacaaaaacaggtacttgatatgagtctgaagggtagaggagatggaaggcctggagatgtgaatgggatcccct

SEQ ID NO: 79797 - DNA, 2222 bp, Homo sapiens
ttcctaaatatgtcgtgatcaatccaaaaccaaagagaagctatcaaaatatttctaaattttctacattgataaactattaagcatcaaaaatttcgccaaagaaatacttaatcagattaaaagactggtttaaatcaaggtatgaatcattatgttaatatttcaatatatgcttcaattgaaaattataatttgaaacataatgttctttttaacaacttgcttttctatacattaaagttccctatttacttattttagctcaaaaacataaaacttattctaccttcaatccattgcagtatcttgttttcttattctctgaaggttgtgcctctgctgttttattcaaatgttgattttggtccatgattgaaatatagatatcatacaaatgtttttgttgttgatgctcagtttgaaacaatcacctattaaggaagaaaaagtatagtttattttatttttacaatatataatttagaaataagaaaagccacaagatcatcatcaatcaatcaaccattcactaacattcactcagggtctactatgtcgttaccactctgctaggtcaatgctggaaacaaaagtaggaaagacagacacaaattctagcctaaggagattacaatttaatagaaaaataaatttgtggagagaaatttgaaacaagtaagtaatatagaatcacacaccagattacatgaacattttaaattatagaaatttaaattattatcttttctacacacctatattgtaaaatttataaaagcaaatatatgttttctttatccttctagttttaaaatgtgcctattagccccttgcacagagtagatattcaaaacagatacaaaaataatataaagaattaaattagaatggcctcagttttataaaggagacaccactggaatcaggctcaaaaagcaaacagaatttggatttgttaaaaagagcaaagtgtactccaagtacttctcagagcaactctggtattgcttgaccttaccaccatcatgatgttactttattttgattttgttcatttcttttccaagagaaaatgcatatagttgaaaatgcaaattaaaaaaataaaacaaagattcttcctctaactcttgtcccattatccagaaatataatatggatttttcattaagtacataatattttccttttcaatgcaaatggtagcataccttaaacatcattctctacctttttatcttctctatatacttaatcttaataagtctttctcatttttcttatggtagcagggtattaagttgtccataatatatgcaactggttctatattcatcagcttttaggttgtatctaatcatttcatattaaagatgttcttaatatatcatatgccattttggttttatgtggccatatctgcagaataaattcaacaactaaagttttggagtcaatgtatgagagaaattgttattttgagagtcattaaagtcctactttaaagactagtaaaatgagttaactttttacttcaactgactcttttatatagaatataatgtgttcttcatggagttttagaaatacattcttgctcctatgtatgtaaacaatacatatttatgtatctaagatatctatataagcagacacagcatagatacatgatttttaatagggcagtaattatacaatatgtctaatatatattatatgtacagttgatacttgttgcagtagttatgttttataaagttgctgggaacactgaattagcaaatattgaaccattgttccttggagagatgtggggttagttatatgcctgtctgcctctggtcacaatattttggtaaattgttcaatatagaactgtgttttatgtatgttttgtttaaagacactttatttaatacatactattgattcattaacattgaattagttgtcaacaacactgtagttcaggcctggaggaagcttatacagcatatgtatcttttccctcakatactcttgtgcaccggagagcacttcagcactatctttggggcccattcgaaacattcaactcagaaacacaaaacacaaaaatgccaaaaatgtggcaataaatacagtgtgaaaaggatatttctttatcatatgtgagcagaaacaagaagacagagcttcattttgttcaaccttagttgggaacatggcagctcaaattt

SEQ ID NO: 79798 - DNA, 2222 bp, Homo sapiens
ttcctaaatatgtcgtgatcaatccaaaaccaaagagaagctatcaaaatatttctaaattttctacattgataaactattaagcatcaaaaatttcgccaaagaaatacttaatcagattaaaagactggtttaaatcaaggtatgaatcattatgttaatatttcaatatatgcttcaattgaaaattataatttgaaacataatgttctttttaacaacttgcttttctatacattaaagttccctatttacttattttagctcaaaaacataaaacttattctaccttcaatccattgcagtatcttgttttcttattctctgaaggttgtgcctctgctgttttattcaaatgttgattttggtccatgattgaaatatagatatcatacaaatgtttttgttgttgatgctcagtttgaaacaatcacctattaaggaagaaaaagtatagtttattttatttttacaatatataatttagaaataagaaaagccacaagatcatcatcaatcaatcaaccattcactaacattcactcagggtctactatgtcgttaccactctgctaggtcaatgctggaaacaaaagtaggaaagacagacacaaattctagcctaaggagattacaatttaatagaaaaataaatttgtggagagaaatttgaaacaagtaagtaatatagaatcacacaccagattacatgaacattttaaattatagaaatttaaattattatcttttctacacacctatattgtaaaatttataaaagcaaatatatgttttctttatccttctagttttaaaatgtgcctattagccccttgcacagagtagatattcaaaacagatacaaaaataatataaagaattaaattagaatggcctcagttttataaaggagacaccactggaatcaggctcaaaaagcaaacagaatttggatttgttaaaaagagcaaagtgtactccaagtacttctcagagcaactctggtattgcttgaccttaccaccatcatgatgttactttattttgattttgttcatttcttttccaagagaaaatgcatatagttgaaaatgcaaattaaaaaaataaaacaaagattcttcctctaactcttgtcccattatccagaaatataatatggatttttcattaagtacataatattttccttttcaatgcaaatggtagcataccttaaacatcattctctacctttttatcttctctatatacttaatcttaataagtctttctcatttttcttatggtagcagggtattaagttgtccataatatatgcaactggttctatattcatcagcttttaggttgtatctaatcatttcatattaaagatgttcttaatatatcatatgccattttggttttatgtggccatatctgcagaataaattcaacaactaaagttttggagtcaatgtatgagagaaattgttattttgagagtcattaaagtcctactttaaagactagtaaaatgagttaactttttacttcaactgactcttttatatagaatataatgtgttcttcatggagttttagaaatacattcttgctcctatgtatgtaaacaatacatatttatgtatctaagatatctatataagcagacacagcatagatacatgatttttaatagggcagtaattatacaatatgtctaatatatattatatgtacagttgatacttgttgcagtagttatgttttataaagttgctgggaacactgaattagcaaatattgaaccattgttccttggagagatgtggggttagttatatgcctgtctgcctctggtcacaatattttggtaaattgttcaatatagaactgtgttttatgtatgttttgtttaaagacactttatttaatacatactattgattcattaacattgaattagttgtcaacaacactgtagttcaggcctggaggaagcttatacagcatatgtatcttttccctcagwtactcttgtgcaccggagagcacttcagcactatctttggggcccattcgaaacattcaactcagaaacacaaaacacaaaaatgccaaaaatgtggcaataaatacagtgtgaaaaggatatttctttatcatatgtgagcagaaacaagaagacagagcttcattttgttcaaccttagttgggaacatggcagctcaaattt

SEQ ID NO: 79799 - DNA, 2222 bp, Homo sapiens
ttcctaaatatgtcgtgatcaatccaaaaccaaagagaagctatcaaaatatttctaaattttctacattgataaactattaagcatcaaaaatttcgccaaagaaatacttaatcagattaaaagactggtttaaatcaaggtatgaatcattatgttaatatttcaatatatgcttcaattgaaaattataatttgaaacataatgttctttttaacaacttgcttttctatacattaaagttccctatttacttattttagctcaaaaacataaaacttattctaccttcaatccattgcagtatcttgttttcttattctctgaaggttgtgcctctgctgttttattcaaatgttgattttggtccatgattgaaatatagatatcatacaaatgtttttgttgttgatgctcagtttgaaacaatcacctattaaggaagaaaaagtatagtttattttatttttacaatatataatttagaaataagaaaagccacaagatcatcatcaatcaatcaaccattcactaacattcactcagggtctactatgtcgttaccactctgctaggtcaatgctggaaacaaaagtaggaaagacagacacaaattctagcctaaggagattacaatttaatagaaaaataaatttgtggagagaaatttgaaacaagtaagtaatatagaatcacacaccagattacatgaacattttaaattatagaaatttaaattattatcttttctacacacctatattgtaaaatttataaaagcaaatatatgttttctttatccttctagttttaaaatgtgcctattagccccttgcacagagtagatattcaaaacagatacaaaaataatataaagaattaaattagaatggcctcagttttataaaggagacaccactggaatcaggctcaaaaagcaaacagaatttggatttgttaaaaagagcaaagtgtactccaagtacttctcagagcaactctggtattgcttgaccttaccaccatcatgatgttactttattttgattttgttcatttcttttccaagagaaaatgcatatagttgaaaatgcaaattaaaaaaataaaacaaagattcttcctctaactcttgtcccattatccagaaatataatatggatttttcattaagtacataatattttccttttcaatgcaaatggtagcataccttaaacatcattctctacctttttatcttctctatatacttaatcttaataagtctttctcatttttcttatggtagcagggtattaagttgtccataatatatgcaactggttctatattcatcagcttttaggttgtatctaatcatttcatattaaagatgttcttaatatatcatatgccattttggttttatgtggccatatctgcagaataaattcaacaactaaagttttggagtcaatgtatgagagaaattgttattttgagagtcattaaagtcctactttaaagactagtaaaatgagttaactttttacttcaactgactcttttatatagaatataatgtgttcttcatggagttttagaaatacattcttgctcctatgtatgtaaacaatacatatttatgtatctaagatatctatataagcagacacagcatagatacatgatttttaatagggcagtaattatacaatatgtctaatatatattatatgtacagttgatacttgttgcagtagttatgttttataaagttgctgggaacactgaattagcaaatattgaaccattgttccttggagagatgtggggttagttatatgcctgtctgcctctggtcacaatattttggtaaattgttcaatatagaactgtgttttatgtatgttttgtttaaagacactttatttaatacatactattgattcattaacattgaattagttgtcaacaacactgtagttcaggcctggaggaagcttatacagcatatgtatcttttccctcagayactcttgtgcaccggagagcacttcagcactatctttggggcccattcgaaacattcaactcagaaacacaaaacacaaaaatgccaaaaatgtggcaataaatacagtgtgaaaaggatatttctttatcatatgtgagcagaaacaagaagacagagcttcattttgttcaaccttagttgggaacatggcagctcaaattt

SEQ ID NO: 79800 - DNA, 1135 bp, Homo sapiens
ttcttcctccccttgcttcccacccctcaacagtccccggtgtgtgatgttcccctccctgtgtccatgtgttctcattgttcaactcccacttatgagtgggaacatgcagtgtttggttttctgttcctgtgttagtttgctgagaatgatggtttccagcttcatccatgtccctgcaaaggacataaactcattcttttttatggctgcatagtattccatggtacacatgtgccacattttctttatccagtctatgattggtggtcatttgggttggttccaagtctttgctattgcaaatagtgctgcaataaacatatgtgtgcatgtatctttatagtagaatgccaatcttattactttttaaaaagaagaatgatatagcagtatggtggtaggggatctgtgtaatttgttcctgccaatgatgacagtttggtttcctcaatagcaaaaggcagtgtggctgaggatatttgttggagcagataatttctatgaggcaattttgtttttctggaaataaacaacaacaaaacaccatctttctgcctatggaacttcatctaaagccttttgcctctctcagatagagttctaaccctcagtaactcacactaaatctgcccagagcttaacaacataaaaattaatatatctttgtcatttrttaaaaaacatacagaacctgaactgacaaatcgctctacatacaggattaataatgtttaatccctcctataacttttccatatctttgtctaataagagttaacaaagatgaagtcttctctaggaaaaagctcaggctaggttactgggagtcaaaacattatttttcgattttaaacttttatcttaagatcaacaaagagattatctggaagcttggtctcctgcttcagtacattcattttcttgtttacttatgacctagttacataccacatgataagttgtttaattcatcatatatttatattgaatttctataatgtgtctacaatactagagttgtgggaagaataatacaaggaaactttccttaataagcacatctaaatgtgccattgaaaatagatattgtagcaaaaaatactctgtaaaatatatttgttttgaattatgc

SEQ ID NO: 79801 - DNA, 1135 bp, Homo sapiens
ttcttcctccccttgcttcccacccctcaacagtccccggtgtgtgatgttcccctccctgtgtccatgtgttctcattgttcaactcccacttatgagtgggaacatgcagtgtttggttttctgttcctgtgttagtttgctgagaatgatggtttccagcttcatccatgtccctgcaaaggacataaactcattcttttttatggctgcatagtattccatggtacacatgtgccacattttctttatccagtctatgattggtggtcatttgggttggttccaagtctttgctattgcaaatagtgctgcaataaacatatgtgtgcatgtatctttatagtagaatgccaatcttattactttttaaaaagaagaatgatatagcagtatggtggtaggggatctgtgtaatttgttcctgccaatgatgacagtttggtttcctcaatagcaaaaggcagtgtggctgaggatatttgttggagcagataatttctatgaggcaattttgtttttctggaaataaacaacaacaaaacaccatctttctgcctatggaacttcatctaaagccttttgcctctctcagatagagttctaaccctcagtaactcacactaaatctgcccagagcttaacaacataaaaattaatatatctttgtcatttattaaaaaacatacagaacctgaaytgacaaatcgctctacatacaggattaataatgtttaatccctcctataacttttccatatctttgtctaataagagttaacaaagatgaagtcttctctaggaaaaagctcaggctaggttactgggagtcaaaacattatttttcgattttaaacttttatcttaagatcaacaaagagattatctggaagcttggtctcctgcttcagtacattcattttcttgtttacttatgacctagttacataccacatgataagttgtttaattcatcatatatttatattgaatttctataatgtgtctacaatactagagttgtgggaagaataatacaaggaaactttccttaataagcacatctaaatgtgccattgaaaatagatattgtagcaaaaaatactctgtaaaatatatttgttttgaattatgc

SEQ ID NO: 79802 - DNA, 1427 bp, Homo sapiens
tcccgctctggtcactggtgccacacttgcatttcttttgttaggaaactgttctgagccatggagctcccttaggcagaggcagcagctggcagacaggacacagccttcctggactgggcctatgaaatgaggcatgtctcattctgcactggcccatgaacccgtgcatctcacccctctcagtgttctgagattsagaattcttcctctgcttgagtgctgggcaccaatctcagctcacactcccaagctatgcactgcagccctggggttttgggactagcctgtgtctccactgtctggcccctctggttcaggcagtagctacactgggggatctgaagtgctccaaggatactgaggaagtactcaggtgggggtccttgaaaaaaccctcaggctgagcagtggaggctgtgctgtgcacatattcttgcaggtgtggccaggcaggagtactgggagggactggcgggcagaagggcctacaatacagatgtgtcccagctcacaggaaagttggccccgctgtctcttcgctcagaagtcaggtgagttgagagctacttggtggaagaaagagagccttggatgttgggcgcctatggctgcgttctgctgcagctacccaacatgcaaaaccccctgggttcaaggctggctgtagttctatttctgcctactctctgggcagatgcccctgcctgttccaatgtctctgggggtcgtgggttctcttgtaggtaggatcccagatgtcaacagtgagagtaggctgtcccactgccactttactcaccccttagctaggagccactcagggctggaaactatctctggtgttcaacaaccctgcactgggtttccagctttctctctcttcagcctcagtgtctgtgtcacctctctattgactttcagtgttttctctcaaaagatatgctcgaagtatgttagtttattcaatattttgggcttcctcagtggaagtggtgcttcctgagtgtgtctagttggccatcttgtaccctctaataagtttaatttcttataatagatttgtgtatattttatggtagtaaatgataaaatagtggagtatctaaacatactttatgcactcatgatatacctttttcttagggtttcctttacttctacactatgcaattcatctataaattttctcaaattttcacaaatctccccaaattttttcaatatatttattgaaaaaagtctgtgcataagtggacgagcataatttaaacctattgttcatgggtccactgtatgtttcaaaacctgttaagaaggtagatgtcattttaattgttcttaccataataaaagaaaaataataagaaataaaaaagcatatgcatacagaaacacacaccacagaagtttgtggcacgattaaa

SEQ ID NO: 79803 - DNA, 1427 bp, Homo sapiens
tcccgctctggtcactggtgccacacttgcatttcttttgttaggaaactgttctgagccatggagctcccttaggcagaggcagcagctggcagacaggacacagccttcctggactgggcctatgaaatgaggcatgtctcattctgcactggcccatgaacccgtgcatctcacccctctcagtgttctgagattcagaattcttcctctgcttgagtgctgggcaccaatctcagctcacactcccaagctatgcactgcagccctggggttttgggactagcctgtgtctccactgtctggcccctctggttcaggcagtagctacactgggggatctgaagtgctccaaggatactgaggaagtactcaggtgggggtccttgaaaaaaccctcaggctgagcagtggaggctgtgctgtgcacatattcttgcaggtgtggccaggcaggagtactgggagggactggcgggcagaagggcctacaatacagatgtgtcccagctcacaggaaagttggccccgctgtctcttcgctcagaagtcaggkgagttgagagctacttggtggaagaaagagagccttggatgttgggcgcctatggctgcgttctgctgcagctacccaacatgcaaaaccccctgggttcaaggctggctgtagttctatttctgcctactctctgggcagatgcccctgcctgttccaatgtctctgggggtcgtgggttctcttgtaggtaggatcccagatgtcaacagtgagagtaggctgtcccactgccactttactcaccccttagctaggagccactcagggctggaaactatctctggtgttcaacaaccctgcactgggtttccagctttctctctcttcagcctcagtgtctgtgtcacctctctattgactttcagtgttttctctcaaaagatatgctcgaagtatgttagtttattcaatattttgggcttcctcagtggaagtggtgcttcctgagtgtgtctagttggccatcttgtaccctctaataagtttaatttcttataatagatttgtgtatattttatggtagtaaatgataaaatagtggagtatctaaacatactttatgcactcatgatatacctttttcttagggtttcctttacttctacactatgcaattcatctataaattttctcaaattttcacaaatctccccaaattttttcaatatatttattgaaaaaagtctgtgcataagtggacgagcataatttaaacctattgttcatgggtccactgtatgtttcaaaacctgttaagaaggtagatgtcattttaattgttcttaccataataaaagaaaaataataagaaataaaaaagcatatgcatacagaaacacacaccacagaagtttgtggcacgattaaa

SEQ ID NO: 79804 - DNA, 1427 bp, Homo sapiens
tcccgctctggtcactggtgccacacttgcatttcttttgttaggaaactgttctgagccatggagctcccttaggcagaggcagcagctggcagacaggacacagccttcctggactgggcctatgaaatgaggcatgtctcattctgcactggcccatgaacccgtgcatctcacccctctcagtgttctgagattcagaattcttcctctgcttgagtgctgggcaccaatctcagctcacactcccaagctatgcactgcagccctggggttttgggactagcctgtgtctccactgtctggcccctctggttcaggcagtagctacactgggggatctgaagtgctccaaggatactgaggaagtactcaggtgggggtccttgaaaaaaccctcaggctgagcagtggaggctgtgctgtgcacatattcttgcaggtgtggccaggcaggagtactgggagggactggcgggcagaagggcctacaatacagatgtgtcccagctcacaggaaagttggccccgctgtctcttcgctcagaagtcaggtgagttgagagctacttggtggaagaaagagagccttggatgttgggcgcctatggctgcgttctgctgcagctacccaacatgmaaaaccccctgggttcaaggctggctgtagttctatttctgcctactctctgggcagatgcccctgcctgttccaatgtctctgggggtcgtgggttctcttgtaggtaggatcccagatgtcaacagtgagagtaggctgtcccactgccactttactcaccccttagctaggagccactcagggctggaaactatctctggtgttcaacaaccctgcactgggtttccagctttctctctcttcagcctcagtgtctgtgtcacctctctattgactttcagtgttttctctcaaaagatatgctcgaagtatgttagtttattcaatattttgggcttcctcagtggaagtggtgcttcctgagtgtgtctagttggccatcttgtaccctctaataagtttaatttcttataatagatttgtgtatattttatggtagtaaatgataaaatagtggagtatctaaacatactttatgcactcatgatatacctttttcttagggtttcctttacttctacactatgcaattcatctataaattttctcaaattttcacaaatctccccaaattttttcaatatatttattgaaaaaagtctgtgcataagtggacgagcataatttaaacctattgttcatgggtccactgtatgtttcaaaacctgttaagaaggtagatgtcattttaattgttcttaccataataaaagaaaaataataagaaataaaaaagcatatgcatacagaaacacacaccacagaagtttgtggcacgattaaa

SEQ ID NO: 79805 - DNA, 1427 bp, Homo sapiens
tcccgctctggtcactggtgccacacttgcatttcttttgttaggaaactgttctgagccatggagctcccttaggcagaggcagcagctggcagacaggacacagccttcctggactgggcctatgaaatgaggcatgtctcattctgcactggcccatgaacccgtgcatctcacccctctcagtgttctgagattcagaattcttcctctgcttgagtgctgggcaccaatctcagctcacactcccaagctatgcactgcagccctggggttttgggactagcctgtgtctccactgtctggcccctctggttcaggcagtagctacactgggggatctgaagtgctccaaggatactgaggaagtactcaggtgggggtccttgaaaaaaccctcaggctgagcagtggaggctgtgctgtgcacatattcttgcaggtgtggccaggcaggagtactgggagggactggcgggcagaagggcctacaatacagatgtgtcccagctcacaggaaagttggccccgctgtctcttcgctcagaagtcaggtgagttgagagctacttggtggaagaaagagagccttggatgttgggcgcctatggctgcgttctgctgcagctacccaacatgcaaaaccccctgggttcamggctggctgtagttctatttctgcctactctctgggcagatgcccctgcctgttccaatgtctctgggggtcgtgggttctcttgtaggtaggatcccagatgtcaacagtgagagtaggctgtcccactgccactttactcaccccttagctaggagccactcagggctggaaactatctctggtgttcaacaaccctgcactgggtttccagctttctctctcttcagcctcagtgtctgtgtcacctctctattgactttcagtgttttctctcaaaagatatgctcgaagtatgttagtttattcaatattttgggcttcctcagtggaagtggtgcttcctgagtgtgtctagttggccatcttgtaccctctaataagtttaatttcttataatagatttgtgtatattttatggtagtaaatgataaaatagtggagtatctaaacatactttatgcactcatgatatacctttttcttagggtttcctttacttctacactatgcaattcatctataaattttctcaaattttcacaaatctccccaaattttttcaatatatttattgaaaaaagtctgtgcataagtggacgagcataatttaaacctattgttcatgggtccactgtatgtttcaaaacctgttaagaaggtagatgtcattttaattgttcttaccataataaaagaaaaataataagaaataaaaaagcatatgcatacagaaacacacaccacagaagtttgtggcacgattaaa

SEQ ID NO: 79806 - DNA, 1427 bp, Homo sapiens
tcccgctctggtcactggtgccacacttgcatttcttttgttaggaaactgttctgagccatggagctcccttaggcagaggcagcagctggcagacaggacacagccttcctggactgggcctatgaaatgaggcatgtctcattctgcactggcccatgaacccgtgcatctcacccctctcagtgttctgagattcagaattcttcctctgcttgagtgctgggcaccaatctcagctcacactcccaagctatgcactgcagccctggggttttgggactagcctgtgtctccactgtctggcccctctggttcaggcagtagctacactgggggatctgaagtgctccaaggatactgaggaagtactcaggtgggggtccttgaaaaaaccctcaggctgagcagtggaggctgtgctgtgcacatattcttgcaggtgtggccaggcaggagtactgggagggactggcgggcagaagggcctacaatacagatgtgtcccagctcacaggaaagttggccccgctgtctcttcgctcagaagtcaggtgagttgagagctacttggtggaagaaagagagccttggatgttgggcgcctatggctgcgttctgctgcagctacccaacatgcaaaaccccctgggttcaaggctggctgtagttctatttctgcctactctctgggcagatgcccctgcctgttccaatgtctctgggggtcgtgggttctcttgtaggtaggatcccasatgtcaacagtgagagtaggctgtcccactgccactttactcaccccttagctaggagccactcagggctggaaactatctctggtgttcaacaaccctgcactgggtttccagctttctctctcttcagcctcagtgtctgtgtcacctctctattgactttcagtgttttctctcaaaagatatgctcgaagtatgttagtttattcaatattttgggcttcctcagtggaagtggtgcttcctgagtgtgtctagttggccatcttgtaccctctaataagtttaatttcttataatagatttgtgtatattttatggtagtaaatgataaaatagtggagtatctaaacatactttatgcactcatgatatacctttttcttagggtttcctttacttctacactatgcaattcatctataaattttctcaaattttcacaaatctccccaaattttttcaatatatttattgaaaaaagtctgtgcataagtggacgagcataatttaaacctattgttcatgggtccactgtatgtttcaaaacctgttaagaaggtagatgtcattttaattgttcttaccataataaaagaaaaataataagaaataaaaaagcatatgcatacagaaacacacaccacagaagtttgtggcacgattaaa

SEQ ID NO: 79807 - DNA, 1008 bp, Homo sapiens
  misc_feature (1)...(1008): n = A,T,C or G
agttaccaggatctgtgcttgcagaaagatcgttgcaccgaagaagaggaactccaaattaaaaatttaggagttatacagggactgcagcttcctttctcttctcctgaaaaaagaagagaaaccatatttccctaagacaggtaaatcttctgtggggagagaagaggaatttaaaggaatgtctctgagttgtatctcccttcataacatgaaacatatctctaaggggagctgaatactctgaattttgctgaaggtctcttgctctctgcgggttgctattcagttttaatctccagagttgcccttccagtctgctctcagtttatttgctcagaaaaccctaaccatgcagaaatgtggacatatgtcttcaacaattccacaaaattctctcatagcactacattttctatgatgaatattctctttacatgttaacacatgaccatagaactgggaacataaatcttcaaaatcacttcacctagcattaatttctagaagtgtnttggagatctgttttcaataacttatatgagatgtagatagataccagatttgntatgtggttnctaaatattctggggtctyatatcccatcttcaagatttcttattttgccaaatgaccctgcacccctttctgtgtttacccatttttttgaataaatagtaaatggttctaacatgattgtatattaagattgggacacatttgatgacctttgagagagttgtaagcatggaaatacggagattctatggactgtggtgaggagtcgtcactttgaaccagaagaaattccagttgtagctgaacccaccaaaccttagagtgagagaagcatgtagctattgtttgaatgtatataggaaattcctttttgtagtaggggatatctgagtttttttttatcctaaaaggtaatagcaaagagtaagaatgtcaggatagttgataaataaatcaaaatatagaggggaaagggagtaaataaaatgg

SEQ ID NO: 79808 - DNA, 837 bp, Homo sapiens
tccagggaattttctggctgttagaccaggcccaagcccttcatgaacaggccattcccagggcctcggatttcaggatgaggtgattagcaagggggtttcagacccggcagagccctctcctggctgtgcatctgcagaactaaggagctgctrtgtctgcagctgctgggagctgcagcttgctctgtctctgagggtcagcgagggcgtgacagagggtaacaggcagaactgttagcagactggcattgcttctcagtctcagtctgtagtgaaactgaagagaaagctcttctgtgctggcttcaaagatgacaagcagaagaattccacctctctttagtattctgaaattttttccatgctctcttcttcccacacacaaaatcctagaattggagaattgcaatacactaatatactttaaaagcctttggagtacagttctcctcattttacatatagggaaacagtcatgaaaagagggagagtggcttgccacagaccacacattaaagagtgtcagggtggggataaaaagctttcttacttcttacccctgagaaccatcccattgattcccaacatctggtcatgagcacagaattttcattatttttggcatatctgtaaacacctgtgctattacttaatactttttctttagccagatccattttttacttaaatgcagttattttaaaaggaaactatgtcactaatgcctatggaaaagcagcattacttgccttaaatattggagaccaaaaggcaaatgtgattaatggaaaatgacattgtggaatgagctgggtactgtagtctgttgagggt

SEQ ID NO: 79809 - DNA, 837 bp, Homo sapiens
tccagggaattttctggctgttagaccaggcccaagcccttcatgaacaggccattcccagggcctcggatttcaggatgaggtgattagcaagggggtttcagacccggcagagccctctcctggctgtgcatctgcagaactaaggagctgctgtgtctgcagctgctgggagctgcagcttgctctgtctctgagggtcagcgagggcgtgacagagggtaacaggcagaactgttagcagactggcattgcttctcagtctcagtctgtagtgaaactgaagagaaagctcttctgtgctggcttcaaagatgacaagcagaagaattccacctctctttagtattctgaaattttttccatgctctcttcttcccacacacaaaatcctagaattggagaattgcaatacactaatatactttaaaagcctttggagtacagttctcctcrttttacatatagggaaacagtcatgaaaagagggagagtggcttgccacagaccacacattaaagagtgtcagggtggggataaaaagctttcttacttcttacccctgagaaccatcccattgattcccaacatctggtcatgagcacagaattttcattatttttggcatatctgtaaacacctgtgctattacttaatactttttctttagccagatccattttttacttaaatgcagttattttaaaaggaaactatgtcactaatgcctatggaaaagcagcattacttgccttaaatattggagaccaaaaggcaaatgtgattaatggaaaatgacattgtggaatgagctgggtactgtagtctgttgagggt

SEQ ID NO: 79810 - DNA, 729 bp, Homo sapiens
ggatccctgcctgggggtagaggattagccttggcctgggcctaaggtgataagctgtggcttagctcatgagcacccagcttcctgcatgcctactaccacctggcagcttgaggatctttcttgggactatgacttgagagatacagcacactttgggtctctccaccccatcttagcataaacaatggtatctgagattaggtttctagaaaataaacagcaaaggagaagtgaagttacatgattcaaggctaattatttgtcaggctctgggctaggtgctttaaagactatmtaaaatgtttataatggcagataaggaaactgaggcacaaaaaagtatgactggcccaggatcacacattaagttacaccgctgctgtccacacccagacatgttttggctccagtgttcctcttcacagaaccgtattactgtggaagaaacttcactgcaggaggggagggtattcaggagtgtaaactatggaccatggacaaccacccaacaattgtcttgaccatcttagtcttcccggagtcttaagtccatttttctgatccaggtggagcaaactttgcatgggtttcctgggtatggacttttttctggtctccttgtcttttggtttctcagccctaatcattctctgttctaggtgactttcggcgcattagtaaatttctctgtggttccatttcttcttctgtaagatggggacaaaa

SEQ ID NO: 79811 - DNA, 614 bp, Homo sapiens
aggttacagactgtccgtaacgcatagtcttcaattttcccaaggactgaagcaaggatgtaaaaagacctctttcctcacacttagccctgttttggaatcgtggcccattggattcttatagcctgcccatttaaataacaaagtgagctcctggcatggatacagactaagaagcygaggccctggcctggctctgacacctatgcactgtggggccctcaacaaatcatccacttctctaggtctcagtcctcatttgcaataatgagatacttcacccatccttcccagcttgcaatactgtgacatttgtcttttcagcattcaacacatcgccaggtatctattaaccaccaaccaggtgtccagtactctgctagtggatataagcagagctctccagctttttttttttttttttttttcatagaatgggacacatacaaagtgatttgcaaaattcaccagaataaattaatgaggccacctgcagccagaggtcatgtcctgatgctccagaccccactcagtggtcctgagaaccgaggacatcagggtcttgggacatcataaaaaggactgcagcaccctggtcaggcagtgcggctgaa

SEQ ID NO: 79812 - DNA, 614 bp, Homo sapiens
aggttacagactgtccgtaacgcatagtcttcaattttcccaaggactgaagcaaggatgtaaaaagacctctttcctcacacttagccctgttttggaatcgtggcccattggattcttatagcctgcccatttaaataacaaagtgagctcctggcatggatacagactaagaagccgaggccctggcctggctctgacacctatgcactgtggggccctcaacaaatcatccacttctctaggtctcagtcctcatttgcaataatgagatacttcacccatccttcccagcttgcaatactgtgacatttgtcttttcagcattcaacacatygccaggtatctattaaccaccaaccaggtgtccagtactctgctagtggatataagcagagctctccagctttttttttttttttttttttcatagaatgggacacatacaaagtgatttgcaaaattcaccagaataaattaatgaggccacctgcagccagaggtcatgtcctgatgctccagaccccactcagtggtcctgagaaccgaggacatcagggtcttgggacatcataaaaaggactgcagcaccctggtcaggcagtgcggctgaa

SEQ ID NO: 79813 - DNA, 780 bp, Homo sapiens
agcgctatgtcctgcaggctgcagaccctgctatcagtcaggcctggatcaagcatgtggctcagatcttggagagccaacgggacttcctcaacggtgaagctctcatcctttcttcccgatgtgctctctcagccccttaacctcctgaatccctcactgcccagtctccagtacctaccctctgaccatggcccatccccttttccactgctagctcaaaatttgatagaatcccctaaagccctaagcaattgacattggctgacagggagggagggcaaagtgggagaatgatacaggccctagggagcagacctgtctctgcggtaaccctccttctgttcctctctttgctccagcattgcagtcacccattgagtaccagagacgggagagccagaccaacagcctggggcggccaagagggcctggagtggggagccctggaagaattcrgcttggagatcaggcccagggcagcacacacacacccatcaatggctctctcccctctctgctgctgtcacccaaaggggaggtggccagagccctcttgccactggataaacaggtatgacgaatagagctccctcattgtagggataaaaaggggagagcctctcttgttctgggaccccaagttccctccccatatcattccttccttttatctggtccttcctacttcccatcccttacgcttctcccctctattttaactctggagaagctgatagtctcagacagtctaagatatctagcaagaggaggtggctt

SEQ ID NO: 79814 - DNA, 941 bp, Homo sapiens
tatgcatgcatcatggtccccccaaaaggaggatatgtgggtgggtgggagggctggggcaggggccagatagaaattattggttttgttttttaattttgtttttcctgttttctgagaataaaggttttgttatatcaccgaggctgctgtcttggcagagggaaggggaggctgtagtgggggtaggtggggtgaagtgatatggaagagatcggttggccccagccattggaggagggggtctggtgaaaggagaaggggacagggtgtaagataaaagatgttgctatctttgtccctcaactgcagttgcagcagttgagggacaaagactgaggcatggaaccactggaaagcccttagattcttcttcttccctttttttttttgtagagttagggtctcactatgtagcccagggtcttgaactcctgggctcaagtgatccaccagtcttgccctcccaaagtgctgggattgcagccatgagccgttgcatctggccagccctagattcttgatgtatcctctttacccagcccttctttttccctacccaccctctggtctagaccccaccagaaagcccaatgcagtgtgacttctcaccattcccycaacacccagatacgaaagcacaaaatgccaatgtacctttccttctgaggctaccatgttcagctgagggaggatgggaaggtggagaggatcctgggggctgagaccttttcctggctctgggtctccttatctttgctctctgcgaggtcataagccatgttcatagtgagcagaaggggattcttcttcaagccatggacccaagagcggacagcccaaggggatcttcacccctcccaacttctgggagagccgctggaacagagcgagccaaacattcacacagccatgtccagatgccctgtcctgggtcctta

SEQ ID NO: 79815 - DNA, 529 bp, Homo sapiens
tgaaaactctttcttattctcaaattacacactttgaatcaatgcccacactaattttattgcaacatcttgaatttcactgggacactatgaattgaggggttttgtttgcttgctttctttttgttcagtcctttccaataatacgtttatctgggaaccattggccctgagtgctaaaagttgggtcttcacttttgaactgtggcctctatgtttcttgtgatcccctcccaccccccatctgcttgtatttagaaatggagrtgtaagttttcagtaatgacggtatttcttgcactcccagagaaaaagagaatggacagtttacatttattataattttgcctgggataggggtggaggttaagacagagggagctatgctagccagactaatttgcagctctgcatgtgtccttcataactggactcaggcgtctgtgctgctgtctgtgcatgagtgatattgtttaacaacgcggtttttggaaagcatggaccagaaacttcctgcttaatcttgtaa

SEQ ID NO: 79816 - DNA, 1272 bp, Homo sapiens
ttatttttccatgtacaattattagaacaacctgatatacagcaagaactcaataaatatattaactattcttcttttcttctccacctcctccttaccatcttaacagatggttgaaagtagctggccgagagcatccccatggccttgagtcctgtgttacagagcattccctgtgggtggggccagactgtgttacctgaaagtaactcaagatgatgaatacaaactgtgctttaggtgggaagccagtccttaactagaggaggaagcaagatcataaccaaacaacaaacaacaatarcaaaaagcaggactgtaaatagcaaggaatatggaggcctggtcagatggagatctgaacattgtatagtagccacgagtccattttttagtgtcagttgaatgacctggaagtgggcctactggatttaagagcagtgaaggggaccacttgccacttcctgtgttgattcctctgaatgggcaggactggtgtttcaccagtttcactggaaagtcacgaagctcctcagaatgtggttatgatggaatggaattcctaagtttgcttacctggtttctgtctctttgaacagaccaggtactagagcttgcatccatggctatgagagcccagtacctcttgcctcacttgtatatgctgatgactaggcagattgagtggcttggctatagtgctggtgcagggagacatgggcatatataaccatgtgtttccctgcttaatccctttagtggcttccgactgctatgaagacaattcctaaaccccttcccatggccctgtgaaccctcaactctcatgctttctctagatcccgggatgcccctagctgtactgaccttttttcaattccttgaagatgccaatcagatcttctagacatttgcctatagcacttactcttcccacaccctcatgatcccttttgttccccgctcctggtggccctggctaattcctactatttatctgggttttagttgagatgttttcttcctctgagtgcccctctcagatatcctggagtagttaggtcctcctgctccatatattcatgagccctgaatttcggtggtggtgccctttgtactttattgcaatgatttgtttcactgtttgccttttgcccttttctgtaagctctggaagcctggaaccatctctgtctttgtttgcctagcacagtgtcaagcataggaagaaactcaataaatatttgttaataagaatcagttcatcaaaga

SEQ ID NO: 79817 - DNA, 1272 bp, Homo sapiens
ttatttttccatgtacaattattagaacaacctgatatacagcaagaactcaataaatatattaactattcttcttttcttctccacctcctccttaccatcttaacagatggttgaaagtagctggccgagagcatccccatggccttgagtcctgtgttacagagcattccctgtgggtggggccagactgtgttacctgaaagtaactcaagatgatgaatacaaactgtgctttaggtgggaagccagtccttaactagaggaggaagcaagatcataaccaaacaacaaacaacaatagcaaaaagcargactgtaaatagcaaggaatatggaggcctggtcagatggagatctgaacattgtatagtagccacgagtccattttttagtgtcagttgaatgacctggaagtgggcctactggatttaagagcagtgaaggggaccacttgccacttcctgtgttgattcctctgaatgggcaggactggtgtttcaccagtttcactggaaagtcacgaagctcctcagaatgtggttatgatggaatggaattcctaagtttgcttacctggtttctgtctctttgaacagaccaggtactagagcttgcatccatggctatgagagcccagtacctcttgcctcacttgtatatgctgatgactaggcagattgagtggcttggctatagtgctggtgcagggagacatgggcatatataaccatgtgtttccctgcttaatccctttagtggcttccgactgctatgaagacaattcctaaaccccttcccatggccctgtgaaccctcaactctcatgctttctctagatcccgggatgcccctagctgtactgaccttttttcaattccttgaagatgccaatcagatcttctagacatttgcctatagcacttactcttcccacaccctcatgatcccttttgttccccgctcctggtggccctggctaattcctactatttatctgggttttagttgagatgttttcttcctctgagtgcccctctcagatatcctggagtagttaggtcctcctgctccatatattcatgagccctgaatttcggtggtggtgccctttgtactttattgcaatgatttgtttcactgtttgccttttgcccttttctgtaagctctggaagcctggaaccatctctgtctttgtttgcctagcacagtgtcaagcataggaagaaactcaataaatatttgttaataagaatcagttcatcaaaga

SEQ ID NO: 79818 - DNA, 544 bp, Homo sapiens
ataatcattttaaagaccctataataactatacttcccattttatgaatatttaacaatgaccaggcatagcggccccgggctttagtgcattatctcttcattctcacatcttctcccaggagtaagtactattattatycccatttcgcagtggaagacacagaggtcgcttgtctaagggcacttactgttcagagcagagctaggattcaaacactggcaatctaagtggtggtggcgttgatgacagtggtgtgatcataggtgaagggtaccatttgaactggctgattagtttgagaagggtggggatgagcagagggtgggaagatacgcccccctcctcgtgagaaggaaggcggggcggacggacaggggcggggatttgctggccgaaatttacagcccttaagttcgtaaaattcttgctccccactgtttgtcactggggcccttcccaactccctcccttggtggcttcaaaaggacccagctgagcccttagtaccaaagtgtgggggaagttgtgggagctgagtggg

SEQ ID NO: 79819 - DNA, 544 bp, Homo sapiens
ataatcattttaaagaccctataataactatacttcccattttatgaatatttaacaatgaccaggcatagcggccccgggctttagtgcattatctcttcattctcacatcttctcccaggagtaagtactattattatccccatttcgcagtggaagacacagaggtcgcttgtctaagggcacttactgttcagagcagagctaggattcaaacactggcaatctaagtggtggtggcgtygatgacagtggtgtgatcataggtgaagggtaccatttgaactggctgattagtttgagaagggtggggatgagcagagggtgggaagatacgcccccctcctcgtgagaaggaaggcggggcggacggacaggggcggggatttgctggccgaaatttacagcccttaagttcgtaaaattcttgctccccactgtttgtcactggggcccttcccaactccctcccttggtggcttcaaaaggacccagctgagcccttagtaccaaagtgtgggggaagttgtgggagctgagtggg

SEQ ID NO: 79820 - DNA, 544 bp, Homo sapiens
ataatcattttaaagaccctataataactatacttcccattttatgaatatttaacaatgaccaggcatagcggccccgggctttagtgcattatctcttcattctcacatcttctcccaggagtaagtactattattatccccatttcgcagtggaagacacagaggtcgcttgtctaagggcacttactgttcagagcagagctaggattcaaacactggcaatctaagtggtggtggcgttgatgacagtggtgtgatcataggtgaagggtaccatttgaactggctgattagtttgagaagggtggggatgagcagagggtgggaagatacgcccccctcctcgtgagaaggaaggcggggcggacggacaggggcggggatttgctggccgaaayttacagcccttaagttcgtaaaattcttgctccccactgtttgtcactggggcccttcccaactccctcccttggtggcttcaaaaggacccagctgagcccttagtaccaaagtgtgggggaagttgtgggagctgagtggg

SEQ ID NO: 79821 - DNA, 901 bp, Homo sapiens
ttttctccccccttgtttttattcccttcccacatggcttttcaattcagactgaaatgtacttgaggaccaaagttaatacagttttattctgttagggatttttgttaaataagtagagtttcagctgcccttgtcacacacaaaaaataagatagatgataggtgttaatctccttgactaaaataaccattttactatctgtgtgtatcctataatgtcaacttgtaaacctcaaatatacacattaacattttttaaaaaaagaagtttcaccaaaaaagacacttctatttaatgtatgtcttatttcttttaccttaagaaatgtttctcttaacctttctccattttcaaccccatttgtttgctcttctctgcaacaaaaatcctctaaagagttttctatgctccatgttccaattcctctttttctacctctgcatcttcattggtatatttaaaagatatcttgaactcagatgtcccagaccgaactcctttcctcccaaacctttcccattctttctcatctgaattgatggcaactttatacagccagttgctcagttaaatctttggagtcatccttgactccttcctttctcttgtattccaacaaatctgttggctttttctatgaaatatatctagaattcaacagttttctactatttctgctattagtatactgatcatctcttgctcagatttttgttattacccactatcatttcttgcytggattatagtaattgtgttctgttctctctgcttttttcagtccttgcctccctacagtctattctcatatgtcagccagagtgatacttttaaaatataaataaaaaattgtgtatttacatgtaagattctaaatgcaatatgttatgctagatt

SEQ ID NO: 79822 - DNA, 712 bp, Homo sapiens
ttttaggcatttattgccatcagttcaagaaattttgtgtatctaattgtgtgttcactgtgcaatttgaacattttgaatatctaacttatataagaattgtttgaaatttacatttataacaaactttctttttttcttaaaaggaagtaaccactattttagtattcaaaaatacctgatattttgaaaatcctgtcttatgttttgtctgagtgaaagaattaccagtttctctctctcttttttkttttttttttttttttttttttttgagatggagcctcactctgtcacccaggctggagtgcaatggtgcaatctcagctcactgcaacctctgcctcccaggttcaagtgattctcctgcctcagtctcctgagtagctgggattacaggtgcatgtcaccatgcccagctgatttttgtatttttagtagagacggggttgtgccatatgggccaggctggtctcgaactcctgacctcaagtgatctgcctgcctcggcctcccaaagtgctgggattataggcatgagtcactgtgcccagccagaattaccaatttctaatgtagtgaaatatttaaaatttttagcttgtttgtcaatatttatactcatgttttgggagcagtgggtcagcaattttcatgagattgcttttgagcttatcctcccaaaacttcccttaggctttaattggctttt

SEQ ID NO: 79823 - DNA, 2258 bp, Homo sapiens
taatttattttaaaaattaattatttttctttttgtggagatggaatctcactatgtaggattaatctaacttctaggtctktttttttttttttttcaaattgtggtaaaatataagtaatacaaaatttaccatcttaactatttttaagcgtacagttcaatagggttcaacatgaccttgtttgcaaccagtctccagaactgttttccttttataaaactgaaactctggacctgttaaggaataactccccagaccccagttcccccgttcccttattactactatgctactttcttcctctatgaatttgactctcaggcatctcatatatgtggaatcatgtagtatttgtctttttgtgactggcatatttcagttagcataagtctgtgtctgtttttattcagtcactttaaggactaacaccttctcttgctgttattgagggaaaagaaatgtcaagtctttggtcttgcattcccagccttcgctgtggcattcccagcactcccagcccctaacctcccagtgtttttccgtgtggcccgcgctctagctagtccactgtgttcttagctccacgcttttgcctacgatgctccctcttcattcctttcttcttttctcctccttatcatgcttctcccatcctgttgcagtgcctgggtcacatgtgctccttctttgaaattatcaccagcctttccggatcccagtgaaactgcccttttatggatcattacatagcttaagtgttaaactacgtactactactatggtttttcattttatctgacattgctcatcaagtcttactttctctctaaagatctttattttctttgcttccccaactagattgtgacttagcattatgggctatattttttttttatggtgttgcttagtagagtatttggtgtagagtaggcctttaagtattttctagaagaataaagaactcttcttacctttagaggtttaggtcatttggaagcctccacaaaaaccagtttgtcagccgggtgcggtggctcatgcctataatcccagcactttaggaggccgagacgggtgtttcacctgaggtcaggagttcgagaccagcctggtcaacatggcaaaatcctgtctctactaaaaacacaaaaaatagctgggtgtggtggcaggcgcctgtaatcccagctaatcgggaggctaaggcaggagaatcacttgaactcgggaggtggagtttgcagtgagctgagatcgcgcactgcactccagcctgggtgacagagcgagactccaactcagggaaaaaaaaaaaaccagtttgttaattccatcaatttctgtatttttctcccaacccctgttagagagttccagtgaatccgagtgtgagtctgatgaggacagcacctgttctagcagctcagactctgaagtttttgacgttattgcagaaatcaaacgcaaaaaggcccaccctgaccgacttcatgatgaactttggtacaacgatccaggccaggtgcgtgtttttatgcccttgctgtgaaggttgcaaacccagacataacggttattgctctgggctcagaagatacatgttgcctagtattgaaactgaattttactgtcagggttttgtccttcagagctatttcttttcagcttcaggttagttccaaagcataagcaccagagcagctgtcccttgaatcatttttgatgatgtttgtaaattccatgttggggagaggagtaatggccctgcctcattaaattgcagtagatggaaggagacacatggtaggatgaggagagagaacttggaggtctttttagaagtagttcacctggaaggtatcttgctgcaaaatagtaaataagtcctataagatttcttttttttagttggtaacagtcacaagttctcttccttgttaagcatgtttgagctaaaaacataataggtggacataattatttttatttttaattactgtcttaatatgaagtaatacataataaaattagcattgttaaaaaagatttgtgtcacacagatatataatacatacaaaaattatatctttaatgcatgtaaagttaggaagctaaggcatatctgtaaaaagataatttaaaatttatattttgtgagtaaatttataacattctatattaattaaaatgcttttctcctggttcttgttagatgacagctatccatcttttttttatagaacgtctggca

SEQ ID NO: 79824 - DNA, 2258 bp, Homo sapiens
taatttattttaaaaattaattatttttctttttgtggagatggaatctcactatgtaggattaatctaacttctaggtctgtttttttttttttttcaaattgtggtaaaatataagtaatacaaaatttaccatcttaactatttttaagcgtacagttcaatagggttcaacatgaccttgtttgcaaccagtctccagaactgttttccttttataaaactgaaactctggacctgttaaggaataactccccagaccccagttcccccgttcccttattactactatgctactttcttcctctatgaatttgactctcaggcatctcatatatgtggaatcatgtagtatttgtctttttgtgactggcatatttcagttagcataagtctgtgtctgtttttattcagtcactttaaggactaacaycttctcttgctgttattgagggaaaagaaatgtcaagtctttggtcttgcattcccagccttcgctgtggcattcccagcactcccagcccctaacctcccagtgtttttccgtgtggcccgcgctctagctagtccactgtgttcttagctccacgcttttgcctacgatgctccctcttcattcctttcttcttttctcctccttatcatgcttctcccatcctgttgcagtgcctgggtcacatgtgctccttctttgaaattatcaccagcctttccggatcccagtgaaactgcccttttatggatcattacatagcttaagtgttaaactacgtactactactatggtttttcattttatctgacattgctcatcaagtcttactttctctctaaagatctttattttctttgcttccccaactagattgtgacttagcattatgggctatattttttttttatggtgttgcttagtagagtatttggtgtagagtaggcctttaagtattttctagaagaataaagaactcttcttacctttagaggtttaggtcatttggaagcctccacaaaaaccagtttgtcagccgggtgcggtggctcatgcctataatcccagcactttaggaggccgagacgggtgtttcacctgaggtcaggagttcgagaccagcctggtcaacatggcaaaatcctgtctctactaaaaacacaaaaaatagctgggtgtggtggcaggcgcctgtaatcccagctaatcgggaggctaaggcaggagaatcacttgaactcgggaggtggagtttgcagtgagctgagatcgcgcactgcactccagcctgggtgacagagcgagactccaactcagggaaaaaaaaaaaaccagtttgttaattccatcaatttctgtatttttctcccaacccctgttagagagttccagtgaatccgagtgtgagtctgatgaggacagcacctgttctagcagctcagactctgaagtttttgacgttattgcagaaatcaaacgcaaaaaggcccaccctgaccgacttcatgatgaactttggtacaacgatccaggccaggtgcgtgtttttatgcccttgctgtgaaggttgcaaacccagacataacggttattgctctgggctcagaagatacatgttgcctagtattgaaactgaattttactgtcagggttttgtccttcagagctatttcttttcagcttcaggttagttccaaagcataagcaccagagcagctgtcccttgaatcatttttgatgatgtttgtaaattccatgttggggagaggagtaatggccctgcctcattaaattgcagtagatggaaggagacacatggtaggatgaggagagagaacttggaggtctttttagaagtagttcacctggaaggtatcttgctgcaaaatagtaaataagtcctataagatttcttttttttagttggtaacagtcacaagttctcttccttgttaagcatgtttgagctaaaaacataataggtggacataattatttttatttttaattactgtcttaatatgaagtaatacataataaaattagcattgttaaaaaagatttgtgtcacacagatatataatacatacaaaaattatatctttaatgcatgtaaagttaggaagctaaggcatatctgtaaaaagataatttaaaatttatattttgtgagtaaatttataacattctatattaattaaaatgcttttctcctggttcttgttagatgacagctatccatcttttttttatagaacgtctggca

SEQ ID NO: 79825 - DNA, 986 bp, Homo sapiens
aagagaaaagagaaaatgaatagcatacttacactcttttggaaaatttcccaaagttgcayaattaattttacatttcatcaagcaaaaatatagccacatctagatatatgtacagagtctaaggcaatagcttctttagtctgcagtgccatgtaccagcaaacagttacagattctatcactggtgaatgggagatgggatattcagatacaacaaaaaataacgtcccagggggatagacgctatacttgtgaacaaaggcaggtgtgtaggctaaaaaacttctacttatatatagcatggattttgttatggcctgaattttgtcccaataaaattcatatattgagaggttcactcacagaagaaaaactacatgaggacccagtgagaaggtggccatctacaagccaaggaaagaagcctcagaaaaaaaaaataataataatataaaataaccctgcccacaccttggtattgaacttcttagcctctttaactgtgagaaaataaatttttgttgtttaagctatttggtctttgttattttgaaatggtagccttagcaatttaatgcaaatgtttctgggatctgtctgagaaagtataagtatcaaaagcctacagagtggactaatgctggggaattatatagctgttatatagctgtttcttgatgtgccaaccaaattcagatcattcagtgatacagttataagatcgattattttgactcagaaacattttagatgaatagatgaatgtaatgtcagaatagtgatacaaattaagacaaaaaacataagctggaaaatattgatgatactaacaacaaaagtccttaatataaaaacagaaatttgtattaaaaaattatttcaatgcacaaagtatgtgaacaaacaattcacagaaaaaataataaataatatcaattgtcaataaatatatgtagtaatgtttttaaaaacccaatttttcc

SEQ ID NO: 79826 - DNA, 908 bp, Homo sapiens
gtcttgcctcctggggtgttacactccagcagaggatycagaaacatttcaaaagatacaatgacatttttttttaaaatctatcttttagaagaagaaaagtcctgtgggaaaagacagaagtagagcagaatgaaaggaaagtcaaggcctggtccagaaggactcagtgagttcgggttgaaggagtgaataaattaatccatcgatgccctaagcctcttcaaagttacttgacattaaattccccatcctcacagccttctctgcttatctgcctctgccctttgtttcccaatcttcagcacagaaggaacttagtaaatgttagatgaatagatggacttttgctgtgggtcccgaatgagggcttcctcccatctcaagtggacattgcagtggagactcagttctgaattcggagtcccccagggtctctcctcatcaattcagaagccatcctacctcacagcagcttgatcataaaacacagcccagccagcactgggcactttgactcactgttttattaatgggttccttctgcaaatatttatcacctcctttgggatttcaggtagctctaggccctagtctgcatttactttgtccttgagaaagaacagaagctgggtttttctagttgtcccctgtgagagtggggttcagatgaatggtctggacagaaacaaatcataccatctcacccaggggaccaaccaacaacctcccgaagaacagatgagggacgtcctttgaaaagtaaggtctagatcaatgtgattatctgtgattcataggcccgcagagcctcaccaccctccctaggggcactgcacatagtctttgcttggctaatgcttgacggttgctgccgcagagtcaggtggataaggcgggggttggtg

SEQ ID NO: 79827 - DNA, 908 bp, Homo sapiens
gtcttgcctcctggggtgttacactccagcagaggattcagaaacatttcaaaagatacaatgacatttttttttaaaatctatcttttagaagaagaaaagtcctgtgggaaaagacagaagtagagcagaatgaaaggaaagtcaaggcctggtccagaaggactcagtgagttcrggttgaaggagtgaataaattaatccatcgatgccctaagcctcttcaaagttacttgacattaaattccccatcctcacagccttctctgcttatctgcctctgccctttgtttcccaatcttcagcacagaaggaacttagtaaatgttagatgaatagatggacttttgctgtgggtcccgaatgagggcttcctcccatctcaagtggacattgcagtggagactcagttctgaattcggagtcccccagggtctctcctcatcaattcagaagccatcctacctcacagcagcttgatcataaaacacagcccagccagcactgggcactttgactcactgttttattaatgggttccttctgcaaatatttatcacctcctttgggatttcaggtagctctaggccctagtctgcatttactttgtccttgagaaagaacagaagctgggtttttctagttgtcccctgtgagagtggggttcagatgaatggtctggacagaaacaaatcataccatctcacccaggggaccaaccaacaacctcccgaagaacagatgagggacgtcctttgaaaagtaaggtctagatcaatgtgattatctgtgattcataggcccgcagagcctcaccaccctccctaggggcactgcacatagtctttgcttggctaatgcttgacggttgctgccgcagagtcaggtggataaggcgggggttggtg

SEQ ID NO: 79828 - DNA, 977 bp, Homo sapiens
tcgcagagcctgacaagcattttttaagtgctcaataaatgttrttattattattattattattatttttttttttttttggagacagagtcacgctctgtcccccaggctggagtgcaagggcatgatctcaactcctcaactcactgcaacctccgcctcccaggttcaagcaattctcctgcctcagcctcccaagtagctgggattacaggtgtccgccaccacgcccagctaatttttgtatttttagtagagaaggggtttcaccatgttggccaggctggtcttgaactcctgacctcaggtgatccacccaccttggcctcccacagtgctgggattacaggagtgagccactgcgcccggtctataaatattattattatttggaatcacttgctggttgggtcctgggagaggggactgggtgccctcactgctttcctttctcctaaaagaggaacaatgtaagataatattttaggactttggaaacaagagacctgggtttgtgctcagccttgccattttatagcaagtaatctggggcaagttacttaaactttctgagattaatgtgtcacctataaaatgggaataatagtacataactcataggattcaactgaacgttttttgtaatgctcctagcctggcatctatgcacgttaagcatttaataaataatagtctctataatgaagacgataatcatgaaaatgtccactgattctcctcccaggtgtggtttctgcagctgacaccccagataagaaagagcatttggtcctggtggagacaggaaggtaaattgcccctgcccttgacctggggctccccttcctggagcagagcccatactctgcaacctggcctgctgggccattgcccacttcctcaaagtttcttcccttgctccaggatgatttgggttgggtgttgctgccctctgctggtggctctgggaagtctgg

SEQ ID NO: 79829 - DNA, 977 bp, Homo sapiens
tcgcagagcctgacaagcattttttaagtgctcaataaatgttgttattattattattattattatttttttttttttttggagacagagtcaygctctgtcccccaggctggagtgcaagggcatgatctcaactcctcaactcactgcaacctccgcctcccaggttcaagcaattctcctgcctcagcctcccaagtagctgggattacaggtgtccgccaccacgcccagctaatttttgtatttttagtagagaaggggtttcaccatgttggccaggctggtcttgaactcctgacctcaggtgatccacccaccttggcctcccacagtgctgggattacaggagtgagccactgcgcccggtctataaatattattattatttggaatcacttgctggttgggtcctgggagaggggactgggtgccctcactgctttcctttctcctaaaagaggaacaatgtaagataatattttaggactttggaaacaagagacctgggtttgtgctcagccttgccattttatagcaagtaatctggggcaagttacttaaactttctgagattaatgtgtcacctataaaatgggaataatagtacataactcataggattcaactgaacgttttttgtaatgctcctagcctggcatctatgcacgttaagcatttaataaataatagtctctataatgaagacgataatcatgaaaatgtccactgattctcctcccaggtgtggtttctgcagctgacaccccagataagaaagagcatttggtcctggtggagacaggaaggtaaattgcccctgcccttgacctggggctccccttcctggagcagagcccatactctgcaacctggcctgctgggccattgcccacttcctcaaagtttcttcccttgctccaggatgatttgggttgggtgttgctgccctctgctggtggctctgggaagtctgg

SEQ ID NO: 79830 - DNA, 977 bp, Homo sapiens
tcgcagagcctgacaagcattttttaagtgctcaataaatgttgttattattattattattattatttttttttttttttggagacagagtcacgctctgtcccccaggctggagtgcaagggcatgatctcaactcctcaactcactgcaacctccgcctcccaggttcaagcaattctcctgcctcagcctcccaagtagctgggattacaggtgtccgccaccacgcccagctaatttttgtatttttagtagagaaggggtttcaccatgttggccaggctggtcttgaactcctgacctcaggtgatccacccaccttggcctcccacagtgctgggattacaggagtgagccactgcgcccggtctataaatattattattayttggaatcacttgctggttgggtcctgggagaggggactgggtgccctcactgctttcctttctcctaaaagaggaacaatgtaagataatattttaggactttggaaacaagagacctgggtttgtgctcagccttgccattttatagcaagtaatctggggcaagttacttaaactttctgagattaatgtgtcacctataaaatgggaataatagtacataactcataggattcaactgaacgttttttgtaatgctcctagcctggcatctatgcacgttaagcatttaataaataatagtctctataatgaagacgataatcatgaaaatgtccactgattctcctcccaggtgtggtttctgcagctgacaccccagataagaaagagcatttggtcctggtggagacaggaaggtaaattgcccctgcccttgacctggggctccccttcctggagcagagcccatactctgcaacctggcctgctgggccattgcccacttcctcaaagtttcttcccttgctccaggatgatttgggttgggtgttgctgccctctgctggtggctctgggaagtctgg

SEQ ID NO: 79831 - DNA, 1263 bp, Homo sapiens
accactgtaattttttttccaagcagaatgcttcctaggcatagttaataatccacatatttcaagtgatatttgataatatgtttaacacacagtttgtgctaaggaaaagttcacataatgaataagtgaggaatgcatacatgaataagatagcaaactttcactgatacattaattctattcaaacacctacttgcgaggaatgttctcaaaactgaggatagaacaatgaacaaagtgctttagtttcttgagaaggatccatattcattccttcaagttcaaagaatcagaattccatataacaaggtgccttgcataatcaagttttatttgaggctaccaatagcattatgctagagacagcaataacaatcattgacaactgcagatataaaaaaaatgcatgggcactaatgacagctctttacctctgtgacaagtctttccatctattaggcatatagtgggaatattctatggctttcttatgcacacactgagaaataggaagtaccaattaaacagtgaagtagcaaaggagaatgtgcacctgatcagaaccaaggtccctatgaggggcaccgtgatcatttctatagaatcatgtctccgcctagagcgcctacatgcccgctgaggcctggggatgtgctttatttggcccacacagtgattttaaagtttcgaattaggtaacatctacaaaaataaaaaattytttctgcttttaaaaactctgaagacatggtaacactgtgttcatattttaacatggcagagtctggcttttagttgggcatataccttgtagttggccaccatcactatcacttgctaatatttaagagcaagatgacatttaaaaaaaaaagcaacaaaacttgtctggtacccatggaaatttgagtttcagatacctgccaccaatctgaaagagtagagttagtgacataaatctctgtgttgagaaaaatgcaaaatatttggaatagaaaaactgtaaataaatgtaattttgacacatattttaaaagttattttctgggacaaacactttgtagttaatatgtatctacttgagtaaaaacaatctatgcctatcatctgtaaatatgttttcttgtaggagatgacacaaaataaacagtacaaatgtacataaattttgtttaaagtcgtaagtttctacttcagcatttatgtgctatttccaaatagaactgtaattgccatactagtttggtatgttagcatcaa

SEQ ID NO: 79832 - DNA, 1263 bp, Homo sapiens
accactgtaattttttttccaagcagaatgcttcctaggcatagttaataatccacatatttcaagtgatatttgataatatgtttaacacacagtttgtgctaaggaaaagttcacataatgaataagtgaggaatgcatacatgaataagatagcaaactttcactgatacattaattctattcaaacacctacttgcgaggaatgttctcaaaactgaggatagaacaatgaacaaagtgctttagtttcttgagaaggatccatattcattccttcaagttcaaagaatcagaattccatataacaaggtgccttgcataatcaagttttatttgaggctaccaatagcattatgctagagacagcaataacaatcattgacaactgcagatataaaaaaaatgcatgggcactaatgacagctctttacctctgtgacaagtctttccatctattaggcatatagtgggaatattctatggctttcttatgcacacactgagaaataggaagtaccaattaaacagtgaagtagcaaaggagaatgtgcacctgatcagaaccaaggtccctatgaggggcaccgtgatcatttctatagaatcatgtctccgcctagagcgcctacatgcccgctgaggcctggggatgtgctttatttggcccacacagtgattttaaagtttcgaattaggtaacatctacaaaaataaaaaattttttctgcttttaaaaactctgaagacatggtaacrctgtgttcatattttaacatggcagagtctggcttttagttgggcatataccttgtagttggccaccatcactatcacttgctaatatttaagagcaagatgacatttaaaaaaaaaagcaacaaaacttgtctggtacccatggaaatttgagtttcagatacctgccaccaatctgaaagagtagagttagtgacataaatctctgtgttgagaaaaatgcaaaatatttggaatagaaaaactgtaaataaatgtaattttgacacatattttaaaagttattttctgggacaaacactttgtagttaatatgtatctacttgagtaaaaacaatctatgcctatcatctgtaaatatgttttcttgtaggagatgacacaaaataaacagtacaaatgtacataaattttgtttaaagtcgtaagtttctacttcagcatttatgtgctatttccaaatagaactgtaattgccatactagtttggtatgttagcatcaa

SEQ ID NO: 79833 - DNA, 765 bp, Homo sapiens
taacagaatcaaagaagatttagggatcaatgagactcaagagaggactaaatctacatgaaattcagatttttgtttacctgttttcaaaagtcctccctgaaggagattatactttttgctaactcacatcactatgttagcaagatgcaaacgtgagagatcttgatcataactttaataattaacacatataaaagcctaaaagaaragtgaagaaaaacgtattaaatttgacttatctaatagcaccagaaatttttcatatgtaaacatcaacctcaggcaaataaagagtgtgatcaaatatgagcaaatcctaaatagaaattctcagctttgattctttaggtcacatgaggtttaaaattccaaaaccactgccctgctcccgtggggcccttcttgtcctctgctcccagttgatttttcttcatagcacttgtgcttgtcggacacactctattttgtatttcctctctctgcagtgaatttcctatagggtagaattcttttcctaattattcattgttctagctccaatgcctagtgccatgcctatcataatacaggcacaaaaatcattaataaatagattaattaatgtgtgagacaatacattgtgtattgttcatgagactgaagtcatgggacagatgtatattcaaaatataaaaattcatcctatcttttgattcctagcctagattaagatttggaaaatttgagaaaaaaatatgtgataccttataaattaactgaaca

SEQ ID NO: 79834 - DNA, 765 bp, Homo sapiens
taacagaatcaaagaagatttagggatcaatgagactcaagagaggactaaatctacatgaaattcagatttttgtttacctgttttcaaaagtcctccctgaaggagattatactttttgctaactcacatcactatgttagcaagatgcaaacgtgagagatcttgatcataactttaataattaacacatataaaagcctaaaagaaaagtgaagaaaaacgtattaaatttgacttatctaatagcaccagaaatttttcatatgtaaacatcaacctcaggcaaataaagagtgtgatcaaatwtgagcaaatcctaaatagaaattctcagctttgattctttaggtcacatgaggtttaaaattccaaaaccactgccctgctcccgtggggcccttcttgtcctctgctcccagttgatttttcttcatagcacttgtgcttgtcggacacactctattttgtatttcctctctctgcagtgaatttcctatagggtagaattcttttcctaattattcattgttctagctccaatgcctagtgccatgcctatcataatacaggcacaaaaatcattaataaatagattaattaatgtgtgagacaatacattgtgtattgttcatgagactgaagtcatgggacagatgtatattcaaaatataaaaattcatcctatcttttgattcctagcctagattaagatttggaaaatttgagaaaaaaatatgtgataccttataaattaactgaaca

SEQ ID NO: 79835 - DNA, 635 bp, Homo sapiens
tggtaaaaacagcaattacttttgcaccaatctaatatgaactcgacactggcagccctgagtacttcctttgctttctctgcaaactgctcaggggtctctccccactaggccttggcaatggtggtttcctctgccaggagcaccctttcccacaggtctactctatctggtgagctcttatattacctccaaaacccaatcccattgtgcccttccccagcagagtcatgggttcaagcctcgactcaggggcactggggggcatttatgatcggctgtgtcttctctccagattgaggaagagtctggkgacacaccagaaaaggacaggatcaaggtgggacctgagggcccttggggcctctcccaacttccccagggacccttgcccatgtagaaagggcctgttgtctaatgggtgggaggaagtggactctgggccaagctccctttgttcaaacaccagctgtgctgacttttgctgtgagtcacttggtctcagttttctcatctgtgtaacaggaataataacagctcttctcaggactcatggcctggagctttggtaagcaggagattgtcatcaatgaccctcactcctctctccccacttcccagatactctgacccat

SEQ ID NO: 79836 - DNA, 635 bp, Homo sapiens
tggtaaaaacagcaattacttttgcaccaatctaatatgaactcgacactggcagccctgagtacttcctttgctttctctgcaaactgctcaggggtctctccccactaggccttggcaatggtggtttcctctgccaggagcaccctttcccacaggtctactctatctggtgagctcttatattacctccaaaacccaatcccattgtgcccttccccagcagagtcatgggttcaagcctcgactcaggggcactggggggcatttatgatcggctgtgtcttctctccagattgaggaagagtctggggacacaccagaaaaggacaggatcaaggtgggacctgagggcccttggggcctctcccaacttccccagggacccttgcccatgtagaaagggcctgttgtctaatgggtgggaggaagtggactctgggccaagctccctttgttcaaacaccagctgtgctgacttttgctgtgagtcacttggtctcagttttctcatctgtgwaacaggaataataacagctcttctcaggactcatggcctggagctttggtaagcaggagattgtcatcaatgaccctcactcctctctccccacttcccagatactctgacccat

SEQ ID NO: 79837 - DNA, 636 bp, Homo sapiens
cagactttggaggggatgacgctctggagaaaaggctgagctttagacagaactgggaggtgcatcaataatggccatagtcacatgtgtgtagatcctcaggaaaaccacaactgggttctttctgggtcctgcatcctctcctttcttcccttgtctcttctttctaccagcagtagcaacttcccactactactttcctgggggcttcacaatttctcgttggcttccacaccgctaaaatcagtccctttattcaattcyctgctgacacccctttggactgtgccatctgtttcctcctgagaccccaaatgatgcacccagttgcaggtatttttaaaagttcagtttattaaaaagtcaggtttcttgttattttccctcatgccaaacactcaagcacacacctgctaggcaccaaaccagcccataactagctaaagctgaagacttccattgccaagcctggatgcaaaaacacagatctaggtctgctgcaggatatagttttctactggtaattcctgaactccttcatgaagggaagtcttgtggtttccatggggcactagactgtgagcccctcgagggcagacatggtttctgcatttgcttacccttggctgtctagca

SEQ ID NO: 79838 - DNA, 704 bp, Homo sapiens
aaataataggtcattaataaataacaactgcttattgtggatagtgctgtttagttgtttactaaagattcctgtgggaagtttcttatgggagatggtgtacactgactaggcctttgagcagcagacatttgtttrtgtagaagacttctatctcattgacagtgataatgttgatctcagaattgtcctgctacaagtttaggccacaaggagcccctaagttcttatcattgcaggccgggtcaacctccttgctcttgccagattgctaggataatttccaaatgctcatatggctgcaaaggtattttctattatttatttggaatataggagaaatgcctggtgccaccatcaatggtagaaagaaaaacaatagcagaatatgtcttcatgttctttgctggcaatacactaggtcagtaaatgaatgatatttaattgtgcattcttacaatgccagatattttggtatggcaagaaaatacaatagttatggaagtaaatagctactaggtgtgttactttttaaaaagatttttttttaatttattttatttttatttatttattttttaaattttactttaagttctggcatacatatgcagaacgtgcaggtttgttacataggtatacttgtgctatagtggtttgcttcacctatgaacctgtcatctaggttttaagccccacatgca

SEQ ID NO: 79839 - DNA, 704 bp, Homo sapiens
aaataataggtcattaataaataacaactgcttattgtggatagtgctgtttagttgtttactaaagattcctgtgggaagtttcttatgggagatggtgtacactgactaggcctttgagcagcagacatttgtttgtgtagaagacttctatctcattgacagtgataaygttgatctcagaattgtcctgctacaagtttaggccacaaggagcccctaagttcttatcattgcaggccgggtcaacctccttgctcttgccagattgctaggataatttccaaatgctcatatggctgcaaaggtattttctattatttatttggaatataggagaaatgcctggtgccaccatcaatggtagaaagaaaaacaatagcagaatatgtcttcatgttctttgctggcaatacactaggtcagtaaatgaatgatatttaattgtgcattcttacaatgccagatattttggtatggcaagaaaatacaatagttatggaagtaaatagctactaggtgtgttactttttaaaaagatttttttttaatttattttatttttatttatttattttttaaattttactttaagttctggcatacatatgcagaacgtgcaggtttgttacataggtatacttgtgctatagtggtttgcttcacctatgaacctgtcatctaggttttaagccccacatgca

SEQ ID NO: 79840 - DNA, 704 bp, Homo sapiens
aaataataggtcattaataaataacaactgcttattgtggatagtgctgtttagttgtttactaaagattcctgtgggaagtttcttatgggagatggtgtacactgactaggcctttgagcagcagacatttgtttgtgtagaagacttctatctcattgacagtgataatrttgatctcagaattgtcctgctacaagtttaggccacaaggagcccctaagttcttatcattgcaggccgggtcaacctccttgctcttgccagattgctaggataatttccaaatgctcatatggctgcaaaggtattttctattatttatttggaatataggagaaatgcctggtgccaccatcaatggtagaaagaaaaacaatagcagaatatgtcttcatgttctttgctggcaatacactaggtcagtaaatgaatgatatttaattgtgcattcttacaatgccagatattttggtatggcaagaaaatacaatagttatggaagtaaatagctactaggtgtgttactttttaaaaagatttttttttaatttattttatttttatttatttattttttaaattttactttaagttctggcatacatatgcagaacgtgcaggtttgttacataggtatacttgtgctatagtggtttgcttcacctatgaacctgtcatctaggttttaagccccacatgca

SEQ ID NO: 79841 - DNA, 704 bp, Homo sapiens
aaataataggtcattaataaataacaactgcttattgtggatagtgctgtttagttgtttactaaagattcctgtgggaagtttcttatgggagatggtgtacactgactaggcctttgagcagcagacatttgtttgtgtagaagacttctatctcattgacagtgataatgttgatctcagaattgtcctgctacaagtttaggccacaagragcccctaagttcttatcattgcaggccgggtcaacctccttgctcttgccagattgctaggataatttccaaatgctcatatggctgcaaaggtattttctattatttatttggaatataggagaaatgcctggtgccaccatcaatggtagaaagaaaaacaatagcagaatatgtcttcatgttctttgctggcaatacactaggtcagtaaatgaatgatatttaattgtgcattcttacaatgccagatattttggtatggcaagaaaatacaatagttatggaagtaaatagctactaggtgtgttactttttaaaaagatttttttttaatttattttatttttatttatttattttttaaattttactttaagttctggcatacatatgcagaacgtgcaggtttgttacataggtatacttgtgctatagtggtttgcttcacctatgaacctgtcatctaggttttaagccccacatgca

SEQ ID NO: 79842 - DNA, 704 bp, Homo sapiens
aaataataggtcattaataaataacaactgcttattgtggatagtgctgtttagttgtttactaaagattcctgtgggaagtttcttatgggagatggtgtacactgactaggcctttgagcagcagacatttgtttgtgtagaagacttctatctcattgacagtgataatgttgatctcagaattgtcctgctacaagtttaggccacaaggagcccctaagttcttatcattgcaggccgggtcaacctccttgctcttgccagattgctaggataatttccaaatgctcatatggctgcaaaggtattttctattatttatttggaatataggagaaatgcctggtgccaccatcaatggtagaaagaaaaacaatagcagaatatgtcttcatgttctttgctggcaatacactaggtcagtaaatgaatgatatttaattgtgcattcttacaatgccagatattttggtatggcaagaaaatacaatagttatggaagtaaatagctactaggtgtgttactttttaaaaagatttttttttaatttattttatttttatttatttattttttaaattttactttaagttctggcatacatatrcagaacgtgcaggtttgttacataggtatacttgtgctatagtggtttgcttcacctatgaacctgtcatctaggttttaagccccacatgca

SEQ ID NO: 79843 - DNA, 726 bp, Homo sapiens
ataatgtttaattttttctgatatgaatgggacttattggtaatggcatagtcttattgtaaacacacccatttctcaataaattcacagcwtggtgctttggcaaaaaggaaatgccatttaaaggacagactgcaaactgaaataggatgcagagaaacaggagtgaggaaattattcaaaataaaactcattccactactagttgaacattattgaatcaatcaagattataatttgggggctaatttcacctgctaatggagaagtctgtcacaacctctaagattttgaactcagattttatatgttttacaaacttaaaagataaagcaaaggtttgactactgtttcccacccctttctgagtctttaacttatgcaaaagctttgttaggcaggctggcagcagccttaagtattttatttctccactgctacatgaagtcaaattgccatggagtgataattgctcagaaactgaactataggaggctctgtccatacggtgtatcatcagacaaatatttcaaagggaatattgaaactcagagaggcacaaatgatctcggctgtggaagtcttaggatttcaacttcaatcaaagggaataggacctgcttcaaaatagtcgtctccacgcacactgcagcctgaagttagccctgcataattacagacagtccgtgtcaagtgaatggaaggctccccttaaagcaggaatgc

SEQ ID NO: 79844 - DNA, 726 bp, Homo sapiens
ataatgtttaattttttctgatatgaatgggacttattggtaatggcatagtcttattgtaaacacacccatttctcaataaattcacagcttggtgctttggcaaaaaggaaatgccatttaaaggacagactgcaaactgaaataggatgcagagaaacaggagtgaggaaattattcaaaataaaactcattccactactagttgaacattattgaatcaatcaagattataatttgggggctaatttcacctgctaatggagaagtctgtcacaacctctaagattttgaactcagattttatatgttttacaaacttaaaagataaagcaaaggtttgactactgtttcccacccctttctgagtctttaacttatgcaaaagctttgttaggcaggctggcagcagcyttaagtattttatttctccactgctacatgaagtcaaattgccatggagtgataattgctcagaaactgaactataggaggctctgtccatacggtgtatcatcagacaaatatttcaaagggaatattgaaactcagagaggcacaaatgatctcggctgtggaagtcttaggatttcaacttcaatcaaagggaataggacctgcttcaaaatagtcgtctccacgcacactgcagcctgaagttagccctgcataattacagacagtccgtgtcaagtgaatggaaggctccccttaaagcaggaatgc

SEQ ID NO: 79845 - DNA, 726 bp, Homo sapiens
ataatgtttaattttttctgatatgaatgggacttattggtaatggcatagtcttattgtaaacacacccatttctcaataaattcacagcttggtgctttggcaaaaaggaaatgccatttaaaggacagactgcaaactgaaataggatgcagagaaacaggagtgaggaaattattcaaaataaaactcattccactactagttgaacattattgaatcaatcaagattataatttgggggctaatttcacctgctaatggagaagtctgtcacaacctctaagattttgaactcagattttatatgttttacaaacttaaaagataaagcaaaggtttgactactgtttcccacccctttctgagtctttaacttatgcaaaagctttgttaggcaggctggcagcagccttaagtattttatttctccactgctacatgaagtcaaattgccatggagtgataattgctcagaaactgaactataggaggctctgtccatacggtgtatcatcagacaaatatttcaaagggaatattgaaactcagagaggcacaaatgatctcggctgtggaagtcttaggatttcaacttcaatcaaagggaataggacctgcttcaaaatagtcgtctccacgcacactgcagcctgaagttagccctgcataatwacagacagtccgtgtcaagtgaatggaaggctccccttaaagcaggaatgc

SEQ ID NO: 79846 - DNA, 1001 bp, Homo sapiens
ttttacacatgttttctttgtctgcctcttggctgttatctattgtcttcaggcaaagcccacgtggcgtggctgaggatgttgcccccactaagttgctggttgcagcagctactagaagagccagtagactcgtcatctggtcagactatttgctatgttcaaatggacactgcctgtctttcactgtctttttctctaaagaaaacattaaatttactgaaaacttgagatttagaaaggttggaaaggctacataacacaggactttagatttggtggttgcatatggtacatgcaaaaggctgcttaattatgaaataatgccagagtgctacttgaaccattttttcctggaaggaaacttcaaataaatgtcaaaaagttatcaattattgaatgcaaattccatgagttcacctgggtgtgtgtggtatcctttaaggaataatattcaaaaaagaagcagtgggctttgaaggtctccttttactttcgttttagtttactaagacactgtgtcttttaggttcattcctaagtttcctttgctgcatttttctttgtagcattatcatcaatccacccagattgaggcatgaggtctatgtttacaaagtactaatgccttcatttgggctcccaatctttctttctgatcttcatacctgctgttacagacaaagtccagctctttaaacaatagagtttcagacaaacatctgtctcccctcagaagcatttcttcacagtccagatagtcaggaagccattaaattccaaatccaaggtttcttcccaggacaaagcatgaagccagaatctcaaatctatagtctgttcacattttcaaatgaacatggttgccttttaaggagaggctagtgcctctgaaaaacttcacttaagaattaattgcatatatgaatcaaaaacagactaatcaacaagtmaatgttgaatttttcataggcttttggcaattgttattataatagaca

SEQ ID NO: 79847 - DNA, 587 bp, Homo sapiens
tttcagtaattacattgaagttgtcccaaaggcagaagaaagaaaaagaaatcaagtctccaaaatttctctrtcctttagaaagaaactccaccttaatttttggtgaggagtaacagatctcacttgggtggtagttacattttgtgatgtgagggtgtcagctttttctccaaggatgacctcccaagaagggcagggtcactcacttctgctacacttcccagctgtctcttttggctttgcacattcctgtctcatgactctacagggaaatccatgatgtagattttcctgtattcaagcaggcaaagatacgggtcaaacatttaaggccgttaacaagaagttaaatcagcaacaacatttatatagaggcattaattcagggtgaacgcaaaatgtgttgcagcatcgattctggcatttttctctgctcctaatagctctgagcatttgatctatatgttatatggacctaaatgaagggaaataaacatctggacagattccttccaatcgagtttccttcttaccatttttctgctgtgatagttaaccaaggccatgggcttcgttcacctaga

SEQ ID NO: 79848 - DNA, 1078 bp, Homo sapiens
gatttgcttcaaaagaatgtctgtgtgaaggcaatcgtaagcagggatagagatgaaactagattggttatgagttgatacctcttgaggctggctgatggttatatgcaaatttatttttactactatgtcttctcttatgtatgttggaaagtttccataataaaaagttaaaaataaagtaatcctttatgtgacactatttctttacatagatacagaatgtcatttttttgcagagtatgttttaggattaacagatatcatgattcacacatttatcaaaaagaattgtcttattcccactgaagttcagcaacaaaatgagcaaccgatgtgctttatttttcttttaaagggcatatgatataatgaattctataaagaactcgagcaaaattgcatcacccaggatttgagaatatatatttgactgatacaaataacaccatttgaagacaggaggattgtgtagaaaaatgtaaaaatgcacagccagcctttgttaagagctgtgagtgtcaatgtatttgggactttaggtttggaaatttgacttccaacaccaaccagactgaagatagcaccactctttctagactgaatcttggagaaatgagtttcccrgaacctctgatgcccaccatcagaaaaggggaatcccaacagccattgcaatttgacattattataaatgagaccttagttcctgtgaaaatgccattaaagctttgctttcagtttgtcttgttttagtctgttctgttttgacttaccatttttgtggttggttttatttgttttttcaccagttgtggtcatttctccaagaggtttcaatgaagtttcttatgattatttcaacataccatgtctgcttctattctgagtttatttacacaaagtggctaacagtaaaatataatttgctaaaagggatttgcatagtttttatagagcttcaaagaggagatagtctaaaaaggcagatacctacgttcaacttttgccctgccatccttgagggtgttaggataaagcccctgattctggatattggcctctgagttaaaataaa

SEQ ID NO: 79849 - DNA, 2227 bp, Homo sapiens
aaaagacaccgaagaatatataaggacacacacattaaacagcaatgatttttttgggaaataatcccaaggctagtgtcccttttagcacattttgggagtgctggattagaaaagtcatctcagattccaggtaaataaattacttcttttctttatggcagacttgctgtaatgagaagaaataaacattactaaactcatcaaggttcgggtaaaatttcagtgctgtcactcatcagccatgttgactgggacgtattatttagtagtatcagtactatgttatctcatctgcaagaaggtggtaacaatctcgaaagaataaaacttttgttgaggactgagaaaaatggaaagcacttagcgtagtacttggcaggcagttggcattcagtcagtgatgataacttttctttcccccacaacttgatctgagtctttgctttccattcctggactactgaagacaatttctaaagataacacttgtcaatggccctcatccaagagaatatcacacaaatatgatctgcagagcacagggtataacagttctcacacattgtggaaatgtcaaggtttattatgcccctgtgacatattgccatggcttaatttacatttccatttgctttatgagaagtttcttactctggaacatctgacctctccttgatgcctcttttattcttcaaactgctttcctagcccatctggccacatattctaacccttcacttctgaacctgaaatctaatgaagcaagagtataaaacaagcctcatttcattactctgcattttgtgagccagtggtttcaacagtgtatagttatgggaccattatagtacttttcctatgggaatatctaatggccttctgtggaacaattttcttcttcttttgacctctatcttaatataatcattcaaaggatrttcagtgctttgtgccaaattttagccatgacaaactacttcaagatttcaacttcataagcaagagagacatattttcataaaatgcttttttcccccacttaagttaggtgcttattttattaaaatgagaaactcagttgacatttttctacactcaaacccctttttaatgggagaaagggttgagagagagaaaaggaagggaggaaagaaaagcaaaagaaggtatgtatgcacacccaaatactttttaagaaataggaactgtctctcaaacttgattttttttcctttggcaaagaagggaaccatgcatcttcatgggcaaagtcaaggttggcatatttgactcccatctggctgggggccaaagtgtagatgaacaagccattatttaattagtccaggcagaaccgaagcttctgatctgtttatcttacttcatctaaggtaatcaggatctgccattatgtgagactagcgtggctatgtgcagatatttcaagcaggtgacagactggcaaccggccttccccaggtaagatgaaagaaaccaaaagaggatccaagtattattgggagcttcaaccacactgtgggccttaaaagaatttcaaagagaaggtctcatttagtttagtccttaccatggtcccgtgacataaataccaatcatttcactcacaggtgaagaaaaggaggctcagaaaagctgagcaacttttccagggtcacagagcaaatgattggcaggcagaggctgcaaatctaattctatctgcttagacttaagggttccgggcactaagcaaccctgcttttcactcacattacatcttttggctgctacaggccattgtttactcctggagacttctcatttggctctgcaaattccattttatttttttttttaatgagaaatcatttattttttgactacctttccaagtacctggataatccctaaaagtagtactcataaacccatggagaagttgtaagacctgatgtttttcttgtagtagatggagtatttgctatgaacagcaacatgatggcttatttccaaggactttcctctcttgctctcctcctttccccgtctcctcatacacacacagacacacacacacacacacacacacacacacaccacacacattcatgctctcgatctcacatgcacatatggctcacttgccctaaatacagtgaaagagattttacattatttaattcattttgagagagagactgacttgattcctgctggtgattag

SEQ ID NO: 79850 - DNA, 2227 bp, Homo sapiens
aaaagacaccgaagaatatataaggacacacacattaaacagcaatgatttttttgggaaataatcccaaggctagtgtcccttttagcacattttgggagtgctggattagaaaagtcatctcagattccaggtaaataaattacttcttttctttatggcagacttgctgtaatgagaagaaataaacattactaaactcatcaaggttcgggtaaaatttcagtgctgtcactcatcagccatgttgactgggacgtattatttagtagtatcagtactatgttatctcatctgcaagaaggtggtaacaatctcgaaagaataaaacttttgttgaggactgagaaaaatggaaagcacttagcgtagtacttggcaggcagttggcattcagtcagtgatgataacttttctttcccccacaacttgatctgagtctttgctttccattcctggactactgaagacaatttctaaagataacacttgtcaatggccctcatccaagagaatatcacacaaatatgatctgcagagcacagggtataacagttctcacacattgtggaaatgtcaaggtttattatgcccctgtgacatattgccatggcttaatttacatttccatttgctttatgagaagtttcttactctggaacatctgacctctccttgatgcctcttttattcttcaaactgctttcctagcccatctggccacatattctaacccttcacttctgaacctgaaatctaatgaagcaagagtataaaacaagcctcatttcattactctgcattttgtgagccagtggtttcaacagtgtatagttatgggaccattatagtacttttcctatgggaatatctaatggccttctgtggaacaattttcttcttcttttgacctctatcttaatataatcattcaaaggatattcagtgctttgtgccaaattttagccatgacaaactacttcaagatttcaacttcataagcaagagagacatattttcataaaatgcttttttcccccacttaagttaggtgcttattttattaaaatgagaaactcagttgacatttttctacactcaaacccctttttaatgggagaaagggttgagagagagaaaaggaagggaggaaagaaaagcaaaagaaggtatgtatgcacacccaaatactttttaagaaataggaactgtctctcaaacttgattttttttcctttggcaaagaagggaaccatgcatcttcatgggcaaagtcaaggttggcatatttgactcccatctggctgggggccaaagtgtagatgaacaagccattatttaattagtccaggcagaaccgaagcttctgatctgtttatcttacttcatctaaggtaatcaggatctgccattatgtgagactagcgtggctatgtgcagatatttcaagcaggtgacagactggcaaccggccttccccaggtaagatgaaagaaaccaaaagaggatccaagtattattgggagcttcaaccacactgtgggccttaaaagaatttcaaagagaaggtctcatttagtttagtccttaccatggtcccgtgacataaataccaatcatttcactcacaggtgaagaaaaggaggctcagaaaagctgagcaacttttccagggtcacagagcaaatgattggcaggcagaggctgcaaatctaattctatctgcttagacttaagggttccgggcactaagcaaccctgcttttcactcacattacatcttttggctgctacaggccattgtttactcctggagacttctcattyggctctgcaaattccattttatttttttttttaatgagaaatcatttattttttgactacctttccaagtacctggataatccctaaaagtagtactcataaacccatggagaagttgtaagacctgatgtttttcttgtagtagatggagtatttgctatgaacagcaacatgatggcttatttccaaggactttcctctcttgctctcctcctttccccgtctcctcatacacacacagacacacacacacacacacacacacacacacaccacacacattcatgctctcgatctcacatgcacatatggctcacttgccctaaatacagtgaaagagattttacattatttaattcattttgagagagagactgacttgattcctgctggtgattag

SEQ ID NO: 79851 - DNA, 2227 bp, Homo sapiens
aaaagacaccgaagaatatataaggacacacacattaaacagcaatgatttttttgggaaataatcccaaggctagtgtcccttttagcacattttgggagtgctggattagaaaagtcatctcagattccaggtaaataaattacttcttttctttatggcagacttgctgtaatgagaagaaataaacattactaaactcatcaaggttcgggtaaaatttcagtgctgtcactcatcagccatgttgactgggacgtattatttagtagtatcagtactatgttatctcatctgcaagaaggtggtaacaatctcgaaagaataaaacttttgttgaggactgagaaaaatggaaagcacttagcgtagtacttggcaggcagttggcattcagtcagtgatgataacttttctttcccccacaacttgatctgagtctttgctttccattcctggactactgaagacaatttctaaagataacacttgtcaatggccctcatccaagagaatatcacacaaatatgatctgcagagcacagggtataacagttctcacacattgtggaaatgtcaaggtttattatgcccctgtgacatattgccatggcttaatttacatttccatttgctttatgagaagtttcttactctggaacatctgacctctccttgatgcctcttttattcttcaaactgctttcctagcccatctggccacatattctaacccttcacttctgaacctgaaatctaatgaagcaagagtataaaacaagcctcatttcattactctgcattttgtgagccagtggtttcaacagtgtatagttatgggaccattatagtacttttcctatgggaatatctaatggccttctgtggaacaattttcttcttcttttgacctctatcttaatataatcattcaaaggatattcagtgctttgtgccaaattttagccatgacaaactacttcaagatttcaacttcataagcaagagagacatattttcataaaatgcttttttcccccacttaagttaggtgcttattttattaaaatgagaaactcagttgacatttttctacactcaaacccctttttaatgggagaaagggttgagagagagaaaaggaagggaggaaagaaaagcaaaagaaggtatgtatgcacacccaaatactttttaagaaataggaactgtctctcaaacttgattttttttcctttggcaaagaagggaaccatgcatcttcatgggcaaagtcaaggttggcatatttgactcccatctggctgggggccaaagtgtagatgaacaagccattatttaattagtccaggcagaaccgaagcttctgatctgtttatcttacttcatctaaggtaatcaggatctgccattatgtgagactagcgtggctatgtgcagatatttcaagcaggtgacagactggcaaccggccttccccaggtaagatgaaagaaaccaaaagaggatccaagtattattgggagcttcaaccacactgtgggccttaaaagaatttcaaagagaaggtctcatttagtttagtccttaccatggtcccgtgacataaataccaatcatttcactcacaggtgaagaaaaggaggctcagaaaagctgagcaacttttccagggtcacagagcaaatgattggcaggcagaggctgcaaatctaattctatctgcttagacttaagggttccgggcactaagcaaccctgcttttcactcacattacatcttttggctgctacaggccattgtttactcctggagacttctcatttggctctgcaaattccattttatttttttttttaatgagaaatcatttattttttgactacctttccaagtacctggataatccctaaaagtagtactcataaacccatggagaagttgtaagacctgatgtttttcttgtagtagatggagtatttgctatgaacrgcaacatgatggcttatttccaaggactttcctctcttgctctcctcctttccccgtctcctcatacacacacagacacacacacacacacacacacacacacacaccacacacattcatgctctcgatctcacatgcacatatggctcacttgccctaaatacagtgaaagagattttacattatttaattcattttgagagagagactgacttgattcctgctggtgattag

SEQ ID NO: 79852 - DNA, 1034 bp, Homo sapiens
gcgcccctgcaaaaatgagataataacaaccttgaaggtggttgggaggagtgtgggaatggataaagagggaagtgtatgtggttcttggtagatgctccagagtctggaataatggttaatattgggaacttgcatctcccaatccacttaccttacctaaactagtagcacagatttccctgtagtagtgccttagcctactgtgctgttctttacttctaatgactagatagtaaatactgaaagaatgtcttttctaacttttatttttcacaacttttctctctgaggagggatttcaaggctgaactaaagttttgttttattttctttaaaggggcccaggttctgttttctcctgagagtcatacacacattttgaacagaattgtttttcttgatggttttctcaataaacaccactgactgaaacatggagtaaaatgtgttatttggcatctcctactagaccaacaacaacaagaaaatacattttgctattgaacttttccttgttaaacaacagaggttaggtcatttccagtgacatggaatctaagagagggtttggaatctgaacaggtttggcaggactgctgaaacttgagcccactctggttttgtttaatgactgttaacaaggaggtgctccagagcccaccatactggtgagctccagacatttccaaaaggcctaaacctggtgtgaacatattaactcatcatgattctgctgttttctgagcaggcaaattcaataaaacacaaactacaatgtgttcttcttgttgaacatggcaggagctctgcatagataaggcctcagtggattatttctcttctggagtcaacagggaatgagccatcctagcaaatatactttcacaatctccaggtagtacttgctttcmcctcactctcaggaattattgttaatgggtcgattgtgtgttcttttcacatgaatattcatcaaatcatcatagatctactacatatatactacagtaccctatcctaatttgcctttt

SEQ ID NO: 79853 - DNA, 1122 bp, Homo sapiens
cttattttgctacatttaagtaaacaatgattttctgcctttgaccccaggttactgaagcctggggcccctaatggttctgaagagtttgagattagatgcttgagatggaggaagtcaggagtaaagttgccaaaaatctagttaagtgtttcacaaaaccctggactcaacagcaatccctgcccctacctgtcctgtacatacctgagctcctctcagaccctgcagtagatttattccttgtttgctcagcatcccttgctttgctcataaactgagagaattagtgctgaggaaaaggtactcaggatgcttcaggtgcagagagagaggccagtaagaaggaccaataacaggatggagagacgccaacagggaagacttcccagagtgggggacaaacactaagtattgaagtgtgatttaaagtggatgcaagagcttktcaaaataaaattttcaaaagtgtttgtgtgtgagagagagagaaagaaagagagggtttaatttaaccttttaatgaaagaaccagcaggataacaaaatcagtacaaagagaacataagaactgagattttatagtctgtgaaataaaaaggaaagctgagaagagatacctaagtgagatacaaagctggttcattctgcagggcaataaaactgtaacttttaagattctttactactagcatttccccttgtcagttttctataagttcacctctaacctttaaagagtacaaaatatctgcaccctaatcaatagtaaatagtatatcaaacacagtcaagtcttcctagagcagaggtcagcaaactagttctgttagggcccacgtagtaaatgttttaaactctgtgggccaaaaggtctctatcacaactactcagtcagaccattgtagcacaaagcagcataggcagtatttaaatgaacgggtgtgaaaaacagtggtgggctgcatttgtcctgcaggctctagaggcccgacctctgttggtggagcaaagatatatagccttaaagggtcatataatcatctttgaaaacttatattcaggttttgttttgttttttttttttcttaataggcttaaagcaaatgaaacagcaagtgc

SEQ ID NO: 79854 - DNA, 1122 bp, Homo sapiens
cttattttgctacatttaagtaaacaatgattttctgcctttgaccccaggttactgaagcctggggcccctaatggttctgaagagtttgagattagatgcttgagatggaggaagtcaggagtaaagttgccaaaaatctagttaagtgtttcacaaaaccctggactcaacagcaatccctgcccctacctgtcctgtacatacctgagctcctctcagaccctgcagtagatttattccttgtttgctcagcatcccttgctttgctcataaactgagagaattagtgctgaggaaaaggtactcaggatgcttcaggtgcagagagagaggccagtaagaaggaccaataacaggatggagagacgccaacagggaagacttcccagagtgggggacaaacactaagtattgaagtgtgatttaaagtggatgcaagagcttgtcaaaataaaattttcaaaagtgtttgtgtgtgagagagagagaaagaaagagagggtttaatttaaccttttaatgaaagaaccagcaggataacaaaatcagtacaaagagaacataagaactgagattttatagtctgtgaaataaaaaggaaagctgagaagagatacctaagtgagatacaaagctggttcattctgcagggcaataaaactgtaacttttaagattctttactactagcatttccccttgtcagttttctataagttcacctctaacctttaaagagtacaaaatatctgcaccctaatcaatagtaaatagtatatcaaacacagtcaagtcttcctagagcagaggtcagcaaactagttctgttagggcccacgtagtaaatgttttaaactctgtgggccaaaaggtctctatcacaactactcartcagaccattgtagcacaaagcagcataggcagtatttaaatgaacgggtgtgaaaaacagtggtgggctgcatttgtcctgcaggctctagaggcccgacctctgttggtggagcaaagatatatagccttaaagggtcatataatcatctttgaaaacttatattcaggttttgttttgttttttttttttcttaataggcttaaagcaaatgaaacagcaagtgc

SEQ ID NO: 79855 - DNA, 1710 bp, Homo sapiens
aaaaggaggaggtagggggaagggaacactctcttgtcttctgagaagttcagtctatggggcaaatcacacacaaatacaccaattacaatacaacctacaagcgactgacaaggaaaggctttccctggttgcgatcctccagagtcctggttgaccgctagctttggagcatagaatggataattcaatgtctaagcctaagtatcctgattcacacttcctccttggtcttcaagccacctttagctgctactcctctatctgatgacccaacgccatgctttgtgaaaatagaagctaccagacaacagctcctttaccatccttcctttagtggaagcaatgtcctcatgcctttcagggctaatttttcacctgatctgcaatgatgccctcctttaacacccctctctcccagatcattttcatcagcatacaaacagggccaactacctgatattaaaaacaacataaaatttaaatccctgtcttttcttcacatcaccttcaattacatccaaaaatccctaccatccttctcagcaaaacattactcatctctctgaacaccagagtatttttttctttaaaagggggctaatattaatagttgtcccatgtggttattaaaaagtrgacatggatccatgaattcatgtaaaacatatagaaagagcctggcccgagatgagctttcactatatgttagtgcttattactctccaatgccttgcgtactcatggccccgcctcctcactttattactctctctcccctccaggctgtcctcccttcctaatatgtatctgaaactgcctttgtcaaggtcaccagtaaatgacctgatgctaaatcagataagtgcttcccctccccccccaactttctgctggacctctcccatcactcagcaatgctgactgcccctcccctttgaaacacctttctctcctgcattctgtgattccattgtctcttgaacttccttctcagttgtctttgctgcctccttttcttccaccagacagccaaataatggagtcttttattcattgtttctgccccttcctccaaaattatcctctgggccatccatatgctggcaacttcccccatctccagacgagatctctcatgaactccagtcctgcgtattcccctgtctgcttggcatctccactctaccatctcaagcactttaatccaatgccaaaaggagaactttgccgcctcctcacacctcaaatgattgtccctcagtcatccgtgtctgaaagatgagcttccaaccactccaactcagaatcagccttgattcctctgcccattaacaccacagtacaagtctcaccagctgccgcttgaaaacttgtctcaaactggtgtgtcctctccatctccatcccacctggaggaccacatgagcctcctaactggtctccctactccacctcacctttcctcaatgtattctccactcaaagctggaggatctttctaaaacaaaatctagatcatctttctcccctcctcaattcaattcaaagactttcaatgtctttacagtaaaaacaatgcctctgtccatggcctataaaacccccatgacctatctaaggcttgcctcccaagcactcctcttgccacccctttccttgctcaggacacccaaaccctctcacctctctccattcctccaacaggct

SEQ ID NO: 79856 - DNA, 662 bp, Homo sapiens
acgctttgcttccaagcccggagtctgttcacagaaaggctgtgagagccactccaggaaagattagagccacacttcactttctctcaaggtaaaacaagggaacagacttttaaatcctggatgtgatggccacctcagcaaagcatctccataggccctctatccattcctgctgcccacagtcattcataatttctgcccagactcacttcaactgtccatgaagtcacccccmactttccacctctctccagtctcggtccaggtcacatgccactgtcagtctaatcttcccaaataccagtctgatcacaccatttccccactcaaaattcctcagttactcccctttccctgtaagttccttgcctagacctcaaaagcctcgaagctccctttctacacatgtttttcttttcttcttcttctttttttttttttgagacagtctccgtcacccaggctggagtgcaatggcctgatctcggctcactgtgacctctgcctcctaggttcaagcaattctcctgcctccgccttctgaggagctggtactacaggcatatgcaggcatatgccaccacatctggctaatttttgtgttttcagtagagacagggtttcatcatgttggccaggctggtcttggactcctgacc

SEQ ID NO: 79857 - DNA, 887 bp, Homo sapiens
tgggctttaaaacaccaagaaaaaatatacaggagagtccttccttttgttatatactagctgtgttcctgaaaacgtatatgaaaacattaaaaaactgatccctattcagaacgcaacaggtgagctcactaaagggctcttaccagaaagtcttataaattgaggcacttgaagggctgggactagggtgaggtaaggaaggggatgcctagactctcggtaattaggataaatggtatttkaatgcagtattttagcaaatcaaaattaatgcaaaagaactgatcatgaacaataaccaaaatattaagtaaagataggattcaccccttccccattctttttgggggtttcaaatatttgcaattgctttattttttgttttgagacagggtctcactctgtcacccaggctggagtgcagtggcacgatcatagcacactgcagccttgacttgctgggctgaagcaattctcccatctcagcattctaagtagctgggactacaagcagatgccaccactcccggctaattttgtttgtattttgtactgacaaggtctcgctatgttgcccagtctggtcttgaactcctgagctcaagcgatcctcccgcctcagcttcctatagtgctagtgtcagagtcatttgaaccagaacaactccattttgaatagagactgggtaaaataaggctgcgacctactgggctgcattcccagaaggttaggcactcaagtcacaggatgacataggagatcggcacaagatacaggtcacaaagaccttgctgataaagcaggttgtggtaaagaagccagcaaaaacccaccaaatccacgatggcaatgaaagtgacctctggtcatcctcactgctcat

SEQ ID NO: 79858 - DNA, 887 bp, Homo sapiens
tgggctttaaaacaccaagaaaaaatatacaggagagtccttccttttgttatatactagctgtgttcctgaaaacgtatatgaaaacattaaaaaactgatccctattcagaacgcaacaggtgagctcactaaagggctcttaccagaaagtcttataaattgaggcacttgaagggctgggactagggtgaggtaaggaaggggatgcctagactctcggtaattaggataaatggtattttaatgcagtattttagcaaatcaaaattaatgcaaaagaactgatcatgaacaataaccaaaatattaagtaaagataggattcaccccttccccattctttttgggggtttcaaatatttgcaattgctttattttttgttttgagacagggtctcactctgtcacccaggctggagtgcagtggcacgatcatagcacactgcagccttgacttgctgggctgaagcaattctcccatctcagcattctaagtagctgggactacaagcagmtgccaccactcccggctaattttgtttgtattttgtactgacaaggtctcgctatgttgcccagtctggtcttgaactcctgagctcaagcgatcctcccgcctcagcttcctatagtgctagtgtcagagtcatttgaaccagaacaactccattttgaatagagactgggtaaaataaggctgcgacctactgggctgcattcccagaaggttaggcactcaagtcacaggatgacataggagatcggcacaagatacaggtcacaaagaccttgctgataaagcaggttgtggtaaagaagccagcaaaaacccaccaaatccacgatggcaatgaaagtgacctctggtcatcctcactgctcat

SEQ ID NO: 79859 - DNA, 887 bp, Homo sapiens
tgggctttaaaacaccaagaaaaaatatacaggagagtccttccttttgttatatactagctgtgttcctgaaaacgtatatgaaaacattaaaaaactgatccctattcagaacgcaacaggtgagctcactaaagggctcttaccagaaagtcttataaattgaggcacttgaagggctgggactagggtgaggtaaggaaggggatgcctagactctcggtaattaggataaatggtattttaatgcagtattttagcaaatcaaaattaatgcaaaagaactgatcatgaacaataaccaaaatattaagtaaagataggattcaccccttccccattctttttgggggtttcaaatatttgcaattgctttattttttgttttgagacagggtctcactctgtcacccaggctggagtgcagtggcacgatcatagcacactgcagccttgacttgctgggctgaagcaattctcccatctcagcattctaagtagctgggactacaagcagatgccaccactcccggctaattttgtttgtattttgtactgacaaggtctcgctatgttgcccagtctggtcttgaactcctgagctcaagcgatcctcccgcctcagcttcctatagtgctagtgtcagagtcatttgaaccagaacaactccattttgaatagagactgggtaaaataaggctgcgacctactgggctgcattcccagaaggttaggcactcaagtcacaggatgacataggagatcggcacaagatacaggtcacaaagascttgctgataaagcaggttgtggtaaagaagccagcaaaaacccaccaaatccacgatggcaatgaaagtgacctctggtcatcctcactgctcat

SEQ ID NO: 79860 - DNA, 1585 bp, Homo sapiens
atgtaaggttctattttaatctttcctaaagaactcctccttccaccatttttatcatagtctgtatcaagtatcctatttactctgttaatttcttgtgcacatatgagtctatcataccatgctattcaacatatatgattatcttccccaataggctgtgaatgtcttgaagctacccacagggtcctattaatctttgtgttaccaatttccatccaaaaatgggcaaatagtagttagtattcaaacattgaatggtatgcaggttttagatgttcataatgatgttattccaacatggtgctgcatcacattattaatgattattttaaaaagaaattgattattcaatacctaaatgagttccataagtagaaaattgtatagtagttgaaaacttrgtttaaaaatttcaaggaaagggtgatatttgaactttatggtacaagatttgactaagtgaaagaaacagaagcagatatttaggaaaaaggaactataaaaaaaggacagaaggaactagtatatagcaaatgttctctgtgtgctaagcaccaagttggccctgagataatggtttttgttagttactttttcacttaactctcacttactttttgagatggatagctgataacgctaatggtcaaaagatttaagtaaatcgatcatgttcacactgtgttagctagtgaagatgggattcaaatacaattctgcctgactttgaaggattgctttctccacaatgggcttatgcaccacatatagaatgaccatgtgaaatcggaacaatgagagtaagtaatcctgaatttagattatgatagaaattcaaagtcagcccaaggaagcatttggtattccctattaagtaactgtaacattctttcagctctctatacagtggaattgtagaggctgtatcaaaatcaagaactggcaaaaatgtacaggaggtctgctaatactatccttttctgcacccatggtaggcaatgctattagatcatatgctatttcttactgggcctgggtatagcctcaaaactcttattaacgaatagatattcattagaagattttaactgatttagaacaatttattcttcctaggatcactttaattttcttatagggaattaccacaccaccattttaagcaagctgaataaaattgcaaatcaaattaaaccattatttttatggaggatgaagggttttctagaggctataacaggttacttctgccagatcttactgcctcagtaggaccaaaaattgagcatgtgacttaagcttgaccagacaaaagccttctgttcaaagagttaaaatctcaagcaaagttattcaggattaaagtaagaaaaacaaagaaacaaccccaccctgctgtccccccaaagaaaaaccccaaaacaactacattcctttcagagcaaaaaccctaatgattagaggcagtagagggtgacctgctacttttctggtttctttttttatttctaagcatcttttctacccttcctatttattctttgagctttctaataatatttttccagtaaggttttttttt

SEQ ID NO: 79861 - DNA, 659 bp, Homo sapiens
gtggttccacctcgggaaagtcactcaggcggctccagcctcagcttcctcagctgtaaaacggagacactgggcttgatgagctttgagatccttcccagtttccaagtttagtgattctggaaagcaatgacttccctgactactttctatcctgcagtaagagcattggagtggtagctggtgtccttctgaatctaaaaggtcttctccagagtttcatatctgcccatgagtcaatgctgagcaagagtcagtgctgaggccaggcgcggtgtttcacacctgtaattccagcactttgggaggctgaggcaggcagatcacctgaggtcaggagttcgagaccagcctggccaacatggtaaaaccccatctttactaaaaacacaaaaataagccaggcgtggtggtggtgcacacttgtaatcccacctaactgggaggctgaggcaggagaatcgcttgaacctggggtgggggcggaagttgcaacgagccaggattgtgccattgcacttccagcctgggtgagagaacgaggttctgtctcaaaaaaaaaaaaaaaaaaaaaagagtcactgctgaggggcccacccaggaatccctcagggacagrggggaacttccagtgtattcacaaccccagcctggaatga

SEQ ID NO: 79862 - DNA, 659 bp, Homo sapiens
gtggttccacctcgggaaagtcactcaggcggctccagcctcagcttcctcagctgtaaaacggagacactgggcttgatgagctttgagatccttcccagtttccaagtttagtgattctggaaagcaatgacttccctgactactttctatcctgcagtaagagcattggagtggtagctggtgtccttctgaatctaaaaggtcttctccagagtttcatatctgcccatgagtcaatgctgagcaagagtcagtgctgaggccaggcgcggtgtttcacacctgtaattccagcactttgggaggctgaggcaggcagatcacctgaggtcaggagttcgagaccagcctggccaacatggtaaaaccccatctttactaaaaacacaaaaataagccaggcgtggtggtggtgcacacttgtaatcccacctaactgggaggctgaggcaggagaatcgcttgaacctggggtgggggcggaagttgcaacgagccaggattgtgccattgcacttccagcctgggtgagagaacgaggttctgtctcaaaaaaaaaaaaaaaaaaaaaagagtcactgctgaggggcccacccaggaatccctcagggacagargggaacttccagtgtattcacaaccccagcctggaatga

SEQ ID NO: 79863 - DNA, 1184 bp, Homo sapiens
agtttaccctccaactcccatcaggcattggctgagagttgcttcaggaggtgttaactcgtcacacttctggccttccagatgcataggctggacgtactcctgcagccaggggaagccccaaacaaagttgcaggtatatgtgtgagataccttgatcagggatgtgggggatgggggcagagcactatcagacatgttgcgtttttgcaacaatgggcataagaaggatatttgaaaatctttaagcacactattagtggttaagaagacctattgatttttggatgcccatcatgtgctgaataccatgcccgacccccaagtgcatcatctctaggtgttaccatgattgtccctatgataaagcaacccatgtgtctccgtgaattctgcaaactctgctgaaaatggcaaaatggagttggggtcctctgtgctggtgacatttagaatggaaagcaagtgctattttgaagatgactcagtctgaggaggcgctagttttctcaagcaaacacttttgtaacacccttccagccaaaactctgagctaacgtagaagggtgagtcctgtctttctctttgctatccactttgcatgtggcccagcagggatggtgacattgctgagggtggacaatctatacctgtcctcttctctcccaaactccaaaaatgtaagcgccctaagggcaagaggtctttatttattttgagacagggtctgtctgtcactcagggtggagtgcagtggtcggctcactgcagcctggaactcctaggctcaagcgatcctccctcctctgcctcctgagtagctgggaacacaagcgagggccaccgccacgcctggctaattaaaaaaaaaaaattttgtagagacagagtctcgctctgttgccgaggctggtctgtaactcctgggctcaagcgatcctcccacctcagcctcccagtgttkggatcacagccgtgagccactggaccaaaaaaaaaagaaacctaatatacaaaacaatggcagggtgcggtggccctagcactttgggaggctgaggcaggcggattgcaggcaggagtttgaggccagcctgagcaacatctttttcttttctttctttattttattttatttattttttgagatggagtctctgtctgttgcccaggctggagtgcac

SEQ ID NO: 79864 - DNA, 1184 bp, Homo sapiens
agtttaccctccaactcccatcaggcattggctgagagttgcttcaggaggtgttaactcgtcacacttctggccttccagatgcataggctggacgtactcctgcagccaggggaagccccaaacaaagttgcaggtatatgtgtgagataccttgatcagggatgtgggggatgggggcagagcactatcagacatgttgcgtttttgcaacaatgggcataagaaggatatttgaaaatctttaagcacactattagtggttaagaagacctattgatttttggatgcccatcatgtgctgaataccatgcccgacccccaagtgcatcatctctaggtgttaccatgattgtccctatgataaagcaacccatgtgtctccgtgaattctgcaaactctgctgaaaatggcaaaatggagttggggtcctctgtgctggtgacatttagaatggaaagcaagtgctattttgaagatgactcagtctgaggaggcgctagttttctcaagcaaacacttttgtaacacccttccagccaaaactctgagctaacgtagaagggtgagtcctgtctttctctttgctatccactttgcatgtggcccagcagggatggtgacattgctgagggtggacaatctatacctgtcctcttctctcccaaactccaaaaatgtaagcgccctaagggcaagaggtctttatttattttgagacagggtctgtctgtcactcagggtggagtgcagtggtcggctcactgcagcctggaactcctaggctcaagcgatcctccctcctctgcctcctgagtagctgggaacacaagcgagggccaccgccacgcctggctaattaaaaaaaaaaaattttgtagagacagagtctcgctctgttgccgaggctggtctgtaactcctgggctcaagcgatcctcccacctcagcctcccagtgtttggatcacagccgtgagccactggaccaaaaaaaaaagaaacctaatatacaaaacaatggcagggtgcggtggccctagcactttgggaggctgaggcaggcggattgcaggcaggagtttgaggccagcctgagcaacatctttttcttttctttctttattttattttatttattttttgagatggagtctcygtctgttgcccaggctggagtgcac

SEQ ID NO: 79865 - DNA, 696 bp, Homo sapiens
gaacttcagacagcctgttgagccagaaagcaaggaagcactcaaatattaatgggatttagtcaggagagcrtggaagctagcttgaaggggctcccattgaccaaatttggggccatttaagaatccaaaagaaataatgaggctgtatatttttgaagaattcaaattaattttcatattattccaactaaaattagttggaaagttcatacaccttcgctgcaatacatgaaaatggtatgtcttccaaaaaatggctatcactgattgaaatacattaactatattaaaatccatgtgtctgtaagaaggaaacaagaaaacactcttttgccatctttggagaagattattacacctattacttaccctggaatttgtattgaagaaacagaaacatttatcttggtttgctattggaatcatatttgagtaaccaaattaacatagctaatgagaaagctctttctcaaactagaatgacagctgacaagtgtagaataaatgattaaattagaaagccatcaattggtagcctctcatgtagcccttcattcagacaaggattatccacagatgttaaaaccactaggtaaactggtgatggggaattgaataatcacatgttattagagaatcacctcagatattacaaactgtttgccagaagggcaatgtaacttaacaagggag

SEQ ID NO: 79866 - DNA, 638 bp, Homo sapiens
attttttctactcataggctctgatatctggggtaaattgcttaacttttctactgaacctctgttcctgtgtctataaaatgagaatttatttttaccttacaccataaaattggtttgagactcatatatgatagtgctataaaactgatacaaaagaatacataattgtgttgtactattatgcctttatgtctagctcttatctctgccaatctacacacacacacacacacacacacacacacacatacacacagagagagatgaaaaacacgcatgcacagatacattatatggatgggaacagcttcttgacataagagaaaatgatgtgaagtgaaagcccaggtcctaaatttgtatctaactatatctatgactataagcaaatcatattcccttgagctttcaattaataataatagctaaaatttactcwgtagaattaattaaaactaatattttctaaaaagaaaaaaagctttaactgctttgcattttaacttatttaatccacacaacaaccctgtaaggtagatactgttattattcttccaattttataaatgaggacactgaagcagagaaattaaatagtgtgctgaagcctacacagctaataagtgatggagctg

SEQ ID NO: 79867 - DNA, 2221 bp, Homo sapiens
cgtacgagggctgcaggtggagctgcctgccagtcccgcgccgtgygctcgcattcctcagcctttgggtggtcgatgggactgggcgctgtggagcagggggtggtgctcgttggtgaggctcgggctgcatgggagcccatggagtgggtgggaggctcaggcatggctggctgcaggtcccgagccctgccccgagggaaggcagctaaggctcggtgagaaatcgagtgcagcgcctgtgggctgtcactgctgggggaccagtacaccctccgcagccactggcccgggtgctaagcccctcattgcccggggccagcagggctggccggctgctccgagtgcggggcctgccaagcccacccccacccagaactccagctggcccgcaagcgccgcatgcagccccggttcccgctcgcgcctctccctccacacctccctgcaagctgagggagtgggctccagccttggccagcccagaaaggggctcccacagtgcagcggcgggccgaagggctcctcaagtgccgccaaagtgggagcccaggcagaggaggcgccgagagcgagcaagggctgtgaggactgccagcacgctgtcacctctcaaaagcagtgaaatcctttcagaggcaactgtttgctccaggtttcccgagtttcctaacatcttgtttctgtcttccaatcagtgttctattgtttaaactcccagagggagagtagagaagatgaaaagcaaaatacacaatgctataggtcttgaactcctggactcaagcgaacctcctgcctcagcctccaaaagtgctgggattacaggcgtgagccatggcacctggccacacaatgctacaggtttgctgttgagttggttgggaagaagctgctggctggttgtttttcataagctgttgggaaggaagggaagaggacaggtggtaaataattttcccaaaagtaaaatagccagtaattggaagagttgggtatagaagcaagatctttccactaacatgccacaccccaccccaataccaacttctttctacaattctgtactgtcacaataagaaactgaaatagtagtcagtcacacacaatttacctagagtggccaaatgaagcctcatcaaattaaacagcttggagtttgtgaccagcctggccaacatggtgaaaccccatctctactaaaaattcaaaaattagctgggtctggtggcatgctcctgtaatcccagctacttgggaggctgaggcaggagaatcgcttgaacctgggaggcagaggctgcagtgagccgagatcacgccattgcactccagcctggggacagcacgagactccgtctcaataaataaataaataaacaagtttgtccttagcttgtgtttaagccataaaagtgaggcacacctttgtgtgagggacatcatcaaaacatctcccttagctctccccacaagctggcattcttctgaagcagttaacaaaagccagcctcattgtacatagtctaactgtccccagaaggcagtcatgactggagtcagtggtattggctcttaaaagctggatgtgcaaatttgtttccaaattttgcattcggttatgtcatgttggtagcttgaaattggccatggtaggcatttctacaccacagaaactggcaaacactacaaaccaagtgcttgtaattttttactggggatttggatgttaaacattttaccagcacatcactactcaacgactagtgtccatgacaaaatgtcattatgttgcctctggtggtcaggtaaatcatgtgatgaagtgctttctatattgaaagcagccatatatcatatattgttctgttattctcattggggaaaacaagcgtcctaactgatttctgagtcattcttcttgtgactaacaaactaattcagagaagcttattattccgtgactctccacttaaagagggacctttgccctctatgacaagcctaagaagatgaaagttacagaaaaagctgtttgttttaatgacttcttttagcacagtacagttggaagtctcacatcaaaccaaagtttttctctcaaagtagctgtctccagtcctgacctagagtggaaatcacatgagacacagaaattcacagctcaaggagaattatctgccagcatcattgagcaaccaatttagcatcactgccactg

SEQ ID NO: 79868 - DNA, 2221 bp, Homo sapiens
cgtacgagggctgcaggtggagctgcctgccagtcccgcgccgtgtgctcgcattcctcagcctttgggtggtcgatgggactgggcgctgtggagcagggggtggtgctcgttggtgaggctcgggctgcatgggagcccatggagtgggtgggaggctcaggcatggctggctgcaggtcccgagccctgccccgagggaaggcagctaaggctcggtgagaaatcgagtgcagcgcctgtgggctgtcactgctgggggaccagtacaccctccgcagccactggcccgggtgctaagcccctcattgcccggggccagcagggctggccggctgctccgagtgcggggcctgccaagcccacccccacccagaactccagctggcccgcaagcgccgcatgcagccccggttcccgctcgcgcctctccctccacacctccctgcaagctgagggagtgggctccagccttggccagcccagaaaggggctcccacagtgcagcggcgggccgaagggctcctcaagtgccgccaaagtgggagcccaggcagaggaggcgccgagagcgagcaagggctgtgaggactgccagcacgctgtcacctctcaaaagcagtgaaatcctttcagaggcaactgtttgctccaggtttcccgagtttcctaacatcttgtttctgtcttccaatcagtgttctattgtttaaactcccagagggagagtagagaagatgaaaagcaaaatacacaatgctataggtcttgaactcctggactcaagcgaacctcctgcctcagcctccaaaagtgctgggattacaggcgtgagccatggcacctggccacacaatgctacaggtttgctgttgagttggttgggaagaagctgctggctggttgtttttcataagctgttgggaaggaagggaagaggacaggtggtaaataattttcccaaaagtaaaatagccagtaattggaagagttgggtatagaagcaagatctttccactaacatgccacaccccaccccaataccaacttctttctacaattctgtactgtcacaataagaaactgaaatagtagtcagtcacacacaatttacctagagtggccaaatgaagcctcatcaaattaaacagcttggagtttgtgaccagcctggccaacatggtgaaaccccatctctactaaaaattcaaaaattagctgggtctggtggcatgctcctgtaatcccagctacttgggaggctgaggcaggagaatcgcttgaacctgggaggcagaggctgcagtgagccgagatcacgccattgcactccagcctggggacagcacgagactccgtctcaataaataaataaataaacaagtttgtccttagcttgtgtttaagccataaaagtgaggcacacctttgtgtgagggacatcatcaaaacatctcccttagctctccccacaagctggcattcttctgaagcagttaacaaaagccagcctcattgtacatagtctaactgtccccagaaggcagtcatgactggagtcagtggtattggctcttaaaagctggatgtgcaaatttgtttccaaattttgcattcggttatgtcatgttggtagcttgaaattggccatggtaggcatttctacaccacagaaactggcaaacactacaaaccaagtgcttgtaattttttactggggatttggatgttaaacattttaccagcacatcactactcaacgactagtgtccatgacaaaatgtcattatgttgcctctggtggtcaggtaaatcatgtgatgaagtgctttctatattgaaagcagccatatatcatatattgttctgttattctcattggggaaaacaagcgtcctaactgatttctgagtcattcttcttgtgactaacaaactaattcagagaagcttattattccgtgactctccacttaaagagggacctttgccctctatgacaagcctaagaagatgaaagttacagaaaaagctgtttgttttaatgacttcttttagcacagtacagttggaagtctcayatcaaaccaaagtttttctctcaaagtagctgtctccagtcctgacctagagtggaaatcacatgagacacagaaattcacagctcaaggagaattatctgccagcatcattgagcaaccaatttagcatcactgccactg

SEQ ID NO: 79869 - DNA, 668 bp, Homo sapiens
tttgtctgccctatggattatttttagggccttccttttgaaatttttatcttaagaaaagcctgtcatggatcatcatggttttggctgcagagaatttttaataaagtatactgggttaccttatgagtaagaagaaaactaaaagggccagatagctaaagagtggtgggtttttgttttgttttgccttaggtgatcaataaaaacaaataaagttcttaaacaagtttcagattttgattatctaggccaggggctggcaaattgtttctgtaaagccaaatagtaaatatttcaggctttgcwggccacactgtttctgttcagctccactactggagcacaaaagcagccatagacaatatataaataaattagtgtgactatatttatggatactgaaatgtgttccaataaagttgtacttatggatacgaaaatgtgaatttcatataattttccattgtcattaaatatttttctttggattttttccaaccatctataaatacaaaaaatcattgctagcttgtaggctgcacaaacataggccgcagaccaaatttgacattcatgctagagtttgctgagccctaatctaggtaaattgttctttggaatattgtcagtaccaagaagtgtcctaaacacccacaaaataaagt

SEQ ID NO: 79870 - DNA, 1011 bp, Homo sapiens
ccatagattaaaataccctattttttctgtcctttttctatgtttagatacacaaatacttgccattgtcttacagttgcctacagtattcagtccagtaacatactgtccaggtttgtagcctagaaggagtaggctatcccatagagccgtggtgtgtagtaggctttactatccagggttgtgtaggtgcactctatgatgttcacacaatgatgaaatcacctaaggatgcatttctcagaatgtatatccatcatcaaacaacacatgactgcatatactttcaaaatagtggctggcacaccgaaactctatttaaatgttagccaggattccaaaatcgaatccgtaaatgattctggagtgtctactagtaactccagccaccatttactcaaacagcatgtaccagtcattgtgctttgcacgggtcacgtcatttaaggcttggaggagctaggcacaccccccttagttagtggggtgctcgtctcccaggccaagctggcctgtccagcggtaccccctctgcctcccttgtggggcaggctctgagctggacattcagcaaggaggcttagcctcccccatcctctgaccatagcccctgccctgccacctctcccctgcctgactcatttctcctttcctcagatgcttcttaccgaaaaaacagcctcctgttgccctcctctcctgggtccccgggctactccaagctctgctcttgcccagctccccttgtcaatcaaaacagattcagccttcacaggaagcaatttggcatctggtatcaagaggtttaaaatcctctttcctaaaaatgccactcctaggaccctctcctaaagaagtaatmaaagatgcaaagaatgatgaacaaaggtgatcttcacattcataagatacaaaacgttaaaggatctaagtgagcaataattggagaatgattagataaatgatgctgtacccacgtactgaaggattataccacaaacgtgaacagca

SEQ ID NO: 79871 - DNA, 1598 bp, Homo sapiens
cctacagatggtcacagaggccagaaccagagctcccaactctccacccaccctcctttgcttggccactacaagctgcacagccgaattcattattggtgctctccaaaatcttactagcactayaacccatatgtaaatcatattgttttatccgtcaaggtagcctgatgcgaggactatacccctctgagactcagaaggtcacttcagcaaccggtgatgacccacattgtcatgcagcagtccccacctagtgaagctaccaagaatattaaagacaatgatagggacattaagaagcaaaatacaaaaaatacatttttatatataacatataaccaaaaaaatcaaataataaggattggactagaatataaaaatattttttaatataacaacaacaaaaagaagcaaaatacacattgctgcttcatgactcctacaagaggaatgcctgcagaaagctgtcttagatcatgctggccagctaaatggccctaggggctcagtgctgggggccagggcaaggagggccagggtggagtctctgggaataggtggaaccaactgcatcacacaggtagcgggaatgcttcctagagaacaagagatggggcaccattgaatgcatggcgagtgcagcgtggtctccacctcagcctgaacctcatcacctctgcggaagcatgaggcagtgccagcactgccctctttgtcagacccactggctgactgcacagacttcaactcacaggctgggcaatgacaactgtcccactctatttgtactcttggcccccatctctgccctctcacactgcactggaatggcatgctgacttggctgcacaatgggcttacagaataggtctgccatgaacattagagaagtcacgtgcctttagatcagagatggctaaactgggatccagggctggttttcagagatccatgaatcccctgaattatatgtccaactttgtacatcaacgttccctgggcttctcatcaacatattaaagaggctgtgactcaagaagacaaaacctattactctgaactccagacactcagcctttatggctacctgtcccatgcaggaacttgctggaagtggcactgatatcccattcctgtgtacagagaccttccaagagcagagagcatctttgggagatctgagctctgcttaatcttacttactgttatttgggttttgttacttgcagccaaagcatccccattgattcagtactacagggctcagaggcatgatctaagacttaggagggctgacagggactcagagtccagcaagaaaattcctcttaaagcttgaattctctgctgagtccctagacaatgggtacctgccaggtgtcccaggtctcagggaactcctccagctccttttttacctgtctccagataaaggtgactgtaccttctatgcctgcccagggcctggcaggtacagagcctctggaactcaatgcacatcctctggacacttaagaacattccagcattgcacaagaatgcattcccattcagttcacatgagtatgcttgtacaaactacacaatgctcatga

SEQ ID NO: 79872 - DNA, 1598 bp, Homo sapiens
cctacagatggtcacagaggccagaaccagagctcccaactctccacccaccctcctttgcttggccactacaagctgcacagccgaattcattattggtgctctccaaaatcttactagcactacaacccatatgtaaatcatattgttttatccgtcaaggtagcctgatgcgaggactatacccctctgagactcagaaggtcacttcagcaaccggtgatgacccacattgtcatgcagcagtccccacctagtgaagctaccaagaatattaaagacaatgatagggacattaagaagcaaaatacaaaaaatacatttttatatataacatataaccaaaaaaatcaaataatawggattggactagaatataaaaatattttttaatataacaacaacaaaaagaagcaaaatacacattgctgcttcatgactcctacaagaggaatgcctgcagaaagctgtcttagatcatgctggccagctaaatggccctaggggctcagtgctgggggccagggcaaggagggccagggtggagtctctgggaataggtggaaccaactgcatcacacaggtagcgggaatgcttcctagagaacaagagatggggcaccattgaatgcatggcgagtgcagcgtggtctccacctcagcctgaacctcatcacctctgcggaagcatgaggcagtgccagcactgccctctttgtcagacccactggctgactgcacagacttcaactcacaggctgggcaatgacaactgtcccactctatttgtactcttggcccccatctctgccctctcacactgcactggaatggcatgctgacttggctgcacaatgggcttacagaataggtctgccatgaacattagagaagtcacgtgcctttagatcagagatggctaaactgggatccagggctggttttcagagatccatgaatcccctgaattatatgtccaactttgtacatcaacgttccctgggcttctcatcaacatattaaagaggctgtgactcaagaagacaaaacctattactctgaactccagacactcagcctttatggctacctgtcccatgcaggaacttgctggaagtggcactgatatcccattcctgtgtacagagaccttccaagagcagagagcatctttgggagatctgagctctgcttaatcttacttactgttatttgggttttgttacttgcagccaaagcatccccattgattcagtactacagggctcagaggcatgatctaagacttaggagggctgacagggactcagagtccagcaagaaaattcctcttaaagcttgaattctctgctgagtccctagacaatgggtacctgccaggtgtcccaggtctcagggaactcctccagctccttttttacctgtctccagataaaggtgactgtaccttctatgcctgcccagggcctggcaggtacagagcctctggaactcaatgcacatcctctggacacttaagaacattccagcattgcacaagaatgcattcccattcagttcacatgagtatgcttgtacaaactacacaatgctcatga

SEQ ID NO: 79873 - DNA, 664 bp, Homo sapiens
  misc_feature (1)...(664): n = A,T,C or G
tagatgacgagttagtgnggtgcagcacaccagcatggcacatgtatacatatgtaactaacctgcacattgtgcacaggtaccctaaaacttaaagtataaataataataaataaataaaaaataaaaataaaataaataaataaaagtctcttccagtctgctcytgttaaggaaatctctccctttctatcattacacacttgatttttttaagtccaagtgcaaagcttcatacttatcacagtttaattataaacactgaaaaaactcaagacatagaggaggtgacaaagatttttcatttgatacttaaacgtatgctagggggaatatattccagatcatgtttgaaattttaacagacactaaggtttaagcatcaaaccagtggtttccagccttttatgtaatatagatcaataggcacacagtcagttgtacttttaagatacactgattaagaaaagacagagagacaaaacacatctataaactcagtcacacttttaaatgaagttagttttttttcaatcacaatggcatcatctctgttttggaaaactacaccacaaatatgtcaaggtgtattaattactcagtacaaagccaatgctgggggcatatatgaattggcctcagccaatggggaccatcgaatcag

SEQ ID NO: 79874 - DNA, 1752 bp, Homo sapiens
caggtatgtatgtaaaagcacatacgcattttctctgggagacaggtccagtacttttatcagactttctcagtgggtcagggatgccagaaggatatttctctccagttcaggaagaagaatcaagtggaaaaggtttgagttaggcttcaggaggtaatggcccaagaagacaatggaacagaaactgccaataaccctacaaaagaagcagcagcacaaggctgtttcctgcaggtaatcctgcagtgtgcacgcctttgtgaagcgtaatttcaacacgatgagaccagagcttccagggtcagaatttagtgcttataggccgaccctggaatcaatctggcatctattaatttgaggaaccaaaagagagtggtcctttgaagggaggcatgccactctcagggtaaatgcagaggtcttttattgagttttttgcttttacatttaaaatatctttccccttcagaggtgaacaaaagtaaaacattactaaaatgtaaaaaaataggaagtagcagttcccgttaattctatttaccaaggttcattttgaaatgaaaatgactttaaattttgtcttgattataaaaagtattctctatgcaccataaaagtaaaaaaggtaggtaatatgggaaagtataatgataagagggaaaaactccacccataatcccattttttctatgtgttgttatgtaggttcacacaaaaaaagggctgatactgtacatggttgtttataatcaagacccttgtaaagaccacattgaagagggggggaaaaaaagcaactgtcccatgtgcatgcaaaagaaaatgagtatggtatccatcatttacattttctcactctggccctgggagctgaattcactgttggaggagaaactgttgaagttggcagagccaggttctatcaactctggaatggcaaccaaatctgagctgagcacttgatcctcaaaagagaaaaatggtgacgtgggattatgatggtgtttgttcccacccaaacatcagcgtgttttcctggcatctgcaacagtgtatgtttttccccttgaattgaagtgaattaagcctctcatacagttttcccaagacctccaggataggttagaatatggtcctcaaatttctcctgcaggcacatcaagtataattttaaacagtctaccttgccttcattgaatgcatgtccaattgttctcaattttgaatccttgccaatacctscattcaaatctgtaatagtcaagagcagatgaagtttttgtcctccttgggctttcttcagatacttgtttcaaagcaattactggaaggagaggaagtatagggacctgagaattaaatgaagggaccttgcaaatttccagcagaattccaggggaatgaaagatgaaggatactcggggagacagcaaggaagaatggccttgataggattgatcggaacacctggtggaagatttgggctctataaagaacttcagggatctagaatgatcaaggtcaaagctcttataaagtactttaaaaccacgagctctacaggatctataaaagagaatggagagccctttcctgtcctctaccccatacaatgctttaaatcagctaagtatagtgacatggtgtctatggtatatgaggcatgactgcaggattttttgttttgaatagggaatgctaaacacctgagattaccacagtcttttattggagaaaataagaactaca

SEQ ID NO: 79875 - DNA, 1012 bp, Homo sapiens
taatttttttaaagttacgtgggaatatagcaaagggaagagaaaaagggttgaaaagggaaagagaaggttaagtgttaataaattaaagcattaagcaaatgttattaaaggagagctctgcaccgatggtcaaaacattggcaatactcagggtgtctgtataaggagctactgccctgaaactagaattcattgctgccatcctttccagattcaaaattaggggaatccccagctttcctccttaaaccaatkacaaaatttgggatagttggcaacttcaaagatttttaagagccccaaaataactggctgttcgcttattttgggactgcaaatgtgaaacccaaggctgggatggatgcttttactcattctgtgttcatgtcacttcatttttgccagctgttgtttaagcttctgccaatgttttgttctttctctgtttagaaaaataatcactgggcatctggtgaggcataagagtctgctagcaccaaaaattcaatctgaaaacacctgatgaacaaacactcagactttctgccttctccccagaatgatgaaagctttagaaaaagggtgtaattataagagatgagccaagaaagcacccaaccttgaagcttatttttccttttaggacctttgctcaagcagctagtcttatgtgctttcagagcgtggcctgactggttcattagctctgaaatcattctgctgcctcacaaaaatcccctcaaaggactacgaaaatctagtacctattcaggctgaggacattgatccaaagctaggttcaaatcattcctcaccctttttcctttaatcatctcctttctcatcatcagttacccatatcaaagaccgagaaaagtgcatttggagagaaaggtttattcgtgcactttgaggcactgcatgtcattgctaacttctagagagaggtggctggctttgaggcctgacataggatttctggttaatctagttaatcatgtattgagtt

SEQ ID NO: 79876 - DNA, 632 bp, Homo sapiens
tatctctctcaaaaagctaaaatctgtggagacagagtcccataaatcaggggtcagtatactttctctaaatggccagatggtacatagtttartctttgggggacacctatagtctctgttgcatattcttctttgtttgtttccttttaaccatttaaaaatttaaaaaccactataccaaaatatactttggctagatttgactctcagaacatattttctcaacccctggaaatgatttcaatgcaatgtgatgatgattccaataggagattgttattcttatggtatttagaaaatgcttatagagggagcttagaggaaggcacacgaaagtctttgtctagaaatgtggcagagacactttggaaaagttattcagagttattcaaagttattcagaaaagttattcagttctacattttgtacttaataatatcaaaatggaagatgctagaaaagtttcttaaaaatctttgaatttggcattgtcctaagtgtgttctgaagaatgctggttctgcaggatggtagtatgagcaactgtgaaaagacaaaggggaattatatggttaaatttagtaaatactgagttaaacaaagctaattctagtctgcctgcagcaat

SEQ ID NO: 79877 - DNA, 632 bp, Homo sapiens
tatctctctcaaaaagctaaaatctgtggagacagagtcccataaatcaggggtcagtatactttctctaaatggccagatggtacatagtttaatctttgggggacacctatagtctctgttgcatattcttctttgtttgtttccttttaaccatttaaaaatttaaaaaccactataccaaaatatactttggctagatttgactctcagaacatattttctcaacccctggaaatgatttcaatgcaatgtgatgatgattccaataggagattgttaytcttatggtatttagaaaatgcttatagagggagcttagaggaaggcacacgaaagtctttgtctagaaatgtggcagagacactttggaaaagttattcagagttattcaaagttattcagaaaagttattcagttctacattttgtacttaataatatcaaaatggaagatgctagaaaagtttcttaaaaatctttgaatttggcattgtcctaagtgtgttctgaagaatgctggttctgcaggatggtagtatgagcaactgtgaaaagacaaaggggaattatatggttaaatttagtaaatactgagttaaacaaagctaattctagtctgcctgcagcaat

SEQ ID NO: 79878 - DNA, 667 bp, Homo sapiens
ttgtagttctattatagccttatcttacaataatgaccagaagaaaaacaaccaaattataccacatgaaagtagatacggcaagtggtaggctcctcctctcaaaaaaaaaaaaaaaaaaaaaaaaaaaaaaaaaagttttccctgtaccccacagagtaattgctgcaaagtggaagaaaaaaaaaaaaaaaaaaaagcattgttccaaacgtaggttggctgctccaggccattatgatcacactaacgatgtttgactatttggtaagtagcactataaactctcaaggcttcatttcacacaccacttgtatttacttgacctacatttctgagttattggaataataaagaatgatattttataaggacatttttaggcttgaatagtaaacctcttagtaagaagagacaatgaatagaattaaacaaggtgacagataagaataaatattggaatggagarctttgtagttatcttcaggcaaacccatagcaaaaagactcactttagagttataacaatagtagaaacttgtctagtccctgagaaaatgatcatatttgattattttattagtatttaaaacactgtcatttagtcaaaacccatactgtgccaaagattgtgaggtatgtttgatgtatgttagccagtttaatt

SEQ ID NO: 79879 - DNA, 645 bp, Homo sapiens
aaagtcagtgcttaagatctataaaaatgtgttaaaactgaaaatatatatctgttggcttcaagatacataaagtgcaaacctctaatgaaaataatacttgcttaaatatcctctagatttaaaaatgtaataatagtccaggttattatacatagtatatatataaattctattacatttgctaatgaagttagatattttcacttggcaagaatccctaaacatgatgatgatcactgagaaaccaaagccaaccatattatggcagttagaataggccaaataattttttattaatgcttttatgttttgtactgtaaaatatttatatttattgctgatttagggaccttttgatgtttgatatttcggttggtgyctccaaataaagatttgaaaatagtaaaatttctcaatggaacttcaagataacaccactggtgcaggcagcaggattagaaatcaagtcgaccactaggattaggtagaaacttaattaagaaggtgattagctgagaatgtccagccagactaaaaatttacgtacagcctgttaatcaaagtgtgagtcccctaagagactgacaaagcaggtgagagggctgaaggatgaagcttggtgaagctcatcagggagcatct

SEQ ID NO: 79880 - DNA, 592 bp, Homo sapiens
ggctgggtggggtctttctttgtggtcagcagaaaaccaaacatggggccttcccatgcccttggtggccaggccacatcagctctgcaggagataaggctccggcagcgaggcactcccagcaggccacacgccctggcctgggagtagaaacccacagcattctcagaaacagctccagaaagtttcagcccgtgaggggcagtgcggcggcccgggagggaagagctgactgggagggtcatgctgggctgtgccatggtcagccgcccggatgatggcgcttacattctgcccccagttcctctccatttctcagccctcgacccgtgaccagcaaagcacaggacaatgtgggccaggccccagcagccagygggggcgggtggggctgctgtgaggcaagttaatgcacctgactggagcagaggaaaccagttctttggtattgaagcaacaaaaagctatcacggaagagccacatctcctaagcaaaggtgggggcgtcaagctgtatccttcccagtagccctgggagtcccaggggaagaaaggaccagggattacccctccaggcagggttccttcccat

SEQ ID NO: 79881 - DNA, 592 bp, Homo sapiens
ggctgggtggggtctttctttgtggtcagcagaaaaccaaacatggggccttcccatgcccttggtggccaggccacatcagctctgcaggagataaggctccggcagcgaggcactcccagcaggccacacgccctggcctgggagtagaaacccacagcattctcagaaacagctccagaaagtttcagcccgtgaggggcagtgcggcggcccgggagggaagagctgactgggagggtcatgctgggctgtgccatggtcagccgcccggatgatggcgcttacattctgcccccagttcctctccatttctcagccctcgacccgtgaccagcaaagcacaggacaatgtgggccaggccccagcagccagcgggggcgggtkgggctgctgtgaggcaagttaatgcacctgactggagcagaggaaaccagttctttggtattgaagcaacaaaaagctatcacggaagagccacatctcctaagcaaaggtgggggcgtcaagctgtatccttcccagtagccctgggagtcccaggggaagaaaggaccagggattacccctccaggcagggttccttcccat

SEQ ID NO: 79882 - DNA, 684 bp, Homo sapiens
gttaggacattcaccccattggcactggacaccaacagtcttttgagcaacaacatggctggcttttatgcccagaaggtcgctgctaacagggtgggctstcagctctgtttgaagacagccacaaggctagaatctagaattctgtgttctgtgtggtcactgaggttccatgattggatggaggtggcactgaggatgacattcaggagcacatcatggcaccactgcagaaacaggaacacagatgaggggcttgtccacagatgcctttggttcagacacattgactgagaggaccctgtccaggacggctgtccagaggacggtgcacaaggcatgccctgcgcagtgctgcagtgtggggtggggctaaggccagagggatgtgtgggatgaaggaagaagtggttggaaaagaggcaatcagggtgaccctggccacctgctgggcagtcgtccccctgtccctgtgaggctggcaggcagcctggttgggagtcgctgccattctgccccttacctagtctcccctggctctgagctgccatctccttagctatgggagctgtagcagcaaagggcatgtgcagatgaaaacgtgtgtgaaagtggggtgggctgaggctgaagcccctgcttttccacaggtgtctggcaggaaaagggtggggaaggagagtg

SEQ ID NO: 79883 - DNA, 684 bp, Homo sapiens
gttaggacattcaccccattggcactggacaccaacagtcttttgagcaacaacatggctggcttttatgcccagaaggtcgctgctaacagggtgggctctcagctctgtttgaagacagccacaaggctagaatctagaattctgtgttctgtgtggtcactgaggttccatgattggatggaggtggcactgaggatgacattcaggagcacatcatggcaccactgcagaaacaggaacacagatgaggggcttgtccacagatgcctttggttcagacacattgactgagaggaccctgtccaggacggctgtccagaggacggtgcacaaggcatgccctgcgcagtgctgcagtgtggggtggggctaaggccagagggatgtgtgggatgaaggaagaagtggttggaaaagaggcaatcagggtgaccctggccacctgctgggcagtcgtccccctgtccctgtgaggctggcaggcagcctggttgggagtcgctgccattctgccccttacctagtctcccctggctctgagctgccatctccttagctatgggagctgtagcagcaaagggcatgtgcagatgaaaacgtgtgtgaaagtggggtgggctgrggctgaagcccctgcttttccacaggtgtctggcaggaaaagggtggggaaggagagtg

SEQ ID NO: 79884 - DNA, 777 bp, Homo sapiens
tcagccttttgccgctgaatactacgaaggttcagccttttgccactgaatactacgaaggttcagcctttgcctctgaatactacgaaggttcagccttttgccgctgaatactacgaaggttcagccttttgccactgaatactatgaaggttcaggctttgcctctgaatactatgaaggatcaggctttgcctctgaatactatgaaggttcaggctttgcctctgaatactatgaaggttcagcctttgcctctgaatactatgaaggttcaggctttgcctctgaatactacgaaggttcagcctttgcctctgaatactacgaaggttcagccttttgccactgaatactatgaaggttcagcctttgcctctgaatactatgaaggttcaggcttttgcatctgaatacygtgaaggttcagcctttgcctctgaataccatgaaggttcagcctttgcctctgaatactatgaaggttcagcctttgcctctgaatactacgaaggttcagcctttgcctctgaatactacgaaggttcaggctttgcctctgaatactacgaaggttcagccttttgccactgaatactacgaaggttcagcctttgcctctgaatactacgaaggttcagcctttgcctctgaatactacgaaggttcagccttttgccgctgaatactacgaaggttcagcctttgccactgaatactacgaaggttcagcctttgcctctgaatactacgaaggttcagcctttgcctctgaat

SEQ ID NO: 79885 - DNA, 533 bp, Homo sapiens
ctcctgagtgtccatagtacctcactttttctggtagcccctatagcaccctgtgtgttcaccattattgagcttaggagagctcttcatggagccctgggtctccaggacctggcacttacgggctgtctttttttgtcggttttttttgttgttcgtttgtttgttttgagacagggtcttgctctgtctcccaggctggagtgcagtggctcggtcttggctcattgaaaccttcacctcctgggttcaagcgattctcctgcctcagcctcctgagtagctgggattacaaccgtatgccacaacgtccggctaattttgtaattttagtagagacagggtttcaccatgttggccaggctggtctcaaactcctgacctcaggtgatccgctcacctcggcctcccaaagtgctgggattacaggtgtgagccascgcctggcttaggggccatctttgagtcggccctggctctgctccccaggtctcagtgctgtgccccccccagagcctagaggatgtttcatg

SEQ ID NO: 79886 - DNA, 1351 bp, Homo sapiens
tgcattgctttgaaacttggaagaataaactcagaacaatgagaaaagagatggacttgcatatagggctaatttctggagtaataaacacttattttgaattatcataatatctatcagatattgattatagtttaaaagcaagagcagacaaccccgatctcttttatacaggttcaaatagagtaaaaatattagtaagagatttattatagttaaatggaagtctgaattggtaagcttttttttcttcctctctcccatcaagaccttccattctagtttcttccttcactccctcaacaaatccctagggagcatttatccatggtgggctggtgtacatttctatagtgaatgataccatcatgtggcctatttggtgaaaagaacaacaatggaaggcttagactaacaatagtgactcaccccaaaaccggaggaatgattaggagcagtgaaagtgacgctcttgcaagcaggtacaactaaatactcagaaacatgaaggctccagttgatggaattttcagtaacaagcttaaccttaattccccctttttccctcttgactttttaaaaaagcgtttcttcctgagcatcatttaatgagtgtgactgtttcttcctttgataattgaaggctttgtagttttaaattgtgaagcccagttctcttgttatagaactattatctagacatggagggctgaatgttagcatgccacagacaaggcatgctttacacatcttgcttaaaaaattactgatttcatcttgcttgttgtctttagaaaagtgaagtgtgagagaggagaatctcatggtgatctgtgtgattttcaagacctttaatccattttgaaagaatcaatttcatatttgcaatgggttgccatgtggaagagtgattatgcttttttgctggtagcttcagaaagcacaggagggagagcaatgttgttcagagaaagatcaacaggaggagaaactgtcagagctgtctgaaatagggtggttttgggaggcattaattccctctygttgggggtaaaagcagaacgcaggttggtagtaaaatgcatgacagacagtaggggacgataaactttaaaattctttatagtcttggagtctttgagatagaaaagaatatctttttggccttatgtcaaaagaagtatggaaaggtgaaagggcggaagaaagcaggaaaaggaagaaccatgtattatatagaggacaatggtgacaaggtttttcttgaaataatgcaaatatgatagattagaggaatttcagtagggaatgcttttcacttgaatttgggtttcctcttcgattaagtttg

SEQ ID NO: 79887 - DNA, 691 bp, Homo sapiens
caacatgtatgaattctatagatatagcattaagtaaaataatcagatgtgagttgtatgtatggagctcagaaactggtactattaaataatgtcattttagaaatactatttttacaaaagctatgacagcggttgccttgctttggaattaagacacatacttcggaaggagtagacagtgggtttctaaggtattagcaaaattgcaaacctggcttattattatctgaatgtttactatataatagattataaaactgtactcacagattttacacactttttgacatttatgagacattttcacaataaacatgaagttacaaacaacattgtataatctaaattatagtggagaatcattaactattttatatacattataagtgacattaggaaaacaatattgacctagaacttgatyaaacaggcttcaactcattcttctatcactgcctagatttggactttgggaacactcgacttctcatgtatgaaagagacataggattgttatcaaggttaaatgagataatacaaagtgcttatattttgttatcttcccaaacacacttgtttttatttttaacatttgcagatggtaccactatttccttcccgattttcagaccagatattgattagtcagaattttccttattttacctcattcttcagtttaattttg

SEQ ID NO: 79888 - DNA, 1168 bp, Homo sapiens
acataccatctgcttaataaatatgaattttctttgaagtaagaggacagaggcagtggtaaaagctactatgccttaaggtccaaaataaatatcctagaactttaatcatctggcttcaaaagacacaaaactccattctgaggtgaytatttgggggaaggaccaacaggaaagcttgatgagcaaaagagtaatgcgtgctgcaggttctatttgggcttcagcaaattggcactgaagtacctggttgatattgatgaaaatttatcttaacgtattttgggctgtaaaaactgaagaaaggtgtccttttatcttgatatgtccctaagcacagtatcggtaatatttgccctggttttatagctttacaaatgtaaacctggctccccgcatggtttcctttttccagtcttggcatttctggaacacagttattatgtattctcctggtgaatgaactcaatgcagcgtaacaaagtatctgaggttcaggatattttgtaggggggtaattagatcggccttccattcaactgtttcactccaaatggatgaaggaatctgtagcagtttaaatacttgtagattattttaaagtatcacaggagattcattttgattactcagctgcttactgaatttgttttgcaacaatgggatcacttttgattcaattgcacagttttttcaagtcaaaagtcaaaattatagacataaaatgactccaatttctggcacaacttgcaattctgatgcttgtaaaaatggcagatacttgcttttagaataaagaggcatgggtaccctattccttcctttacagtctaacaaaactgagaaagggtgtttttgttacttttacccctaagttggcagtgggggctaaatcagatttccccacagccaccaactgcaagaacttagaagtaatcagtaagtacgacatccaaaaccttgacatctgcattcatcattcataggtgattatggtggaggtgatgcacttccctttcttctatgaggaaaattctcatccagtcattttaatcatgttaataagagagtcagaatgaggccttgaatctctgccttaaattgaataagggccttggcagggcctcaaatacatgggtgatttggcaagaaaaactaatgctgtcca

SEQ ID NO: 79889 - DNA, 1168 bp, Homo sapiens
acataccatctgcttaataaatatgaattttctttgaagtaagaggacagaggcagtggtaaaagctactatgccttaaggtccaaaataaatatcctagaactttaatcatctggcttcaaaagacacaaaactccattctgaggtgactatttgggggaaggaccaacaggaaagcttgatgagcaaaagagtaatgcgtgctgcaggttctatttgggcttcagcaaattggcactgaagtacctggttgatattgatgaaaatttatcttaacgtattttgggctgtaaaaactgaagaaaggtgtccttttatcttgatatgtccctaagcacagtatcggtaatatttgccctggttttatagctttacaaatgtaaacctggctccccgcatggtttcctttttccagtcttggcatttctggaacacagttattatgtattctcctggtgaatgaactcaatgcagcgtaacaaagtatctgaggttcaggatattttgtaggggggtaattagatcggccttccattcaactgtttcactccaaatggatgaaggaatctgtagcagtttaaatacttgtagattattttaaagtatcacaggagattcattttgattactcagctgcttactgaatttgttttgcaacaatgggatcacttttgattcaattgcayagttttttcaagtcaaaagtcaaaattatagacataaaatgactccaatttctggcacaacttgcaattctgatgcttgtaaaaatggcagatacttgcttttagaataaagaggcatgggtaccctattccttcctttacagtctaacaaaactgagaaagggtgtttttgttacttttacccctaagttggcagtgggggctaaatcagatttccccacagccaccaactgcaagaacttagaagtaatcagtaagtacgacatccaaaaccttgacatctgcattcatcattcataggtgattatggtggaggtgatgcacttccctttcttctatgaggaaaattctcatccagtcattttaatcatgttaataagagagtcagaatgaggccttgaatctctgccttaaattgaataagggccttggcagggcctcaaatacatgggtgatttggcaagaaaaactaatgctgtcca

SEQ ID NO: 79890 - DNA, 1168 bp, Homo sapiens
acataccatctgcttaataaatatgaattttctttgaagtaagaggacagaggcagtggtaaaagctactatgccttaaggtccaaaataaatatcctagaactttaatcatctggcttcaaaagacacaaaactccattctgaggtgactatttgggggaaggaccaacaggaaagcttgatgagcaaaagagtaatgcgtgctgcaggttctatttgggcttcagcaaattggcactgaagtacctggttgatattgatgaaaatttatcttaacgtattttgggctgtaaaaactgaagaaaggtgtccttttatcttgatatgtccctaagcacagtatcggtaatatttgccctggttttatagctttacaaatgtaaacctggctccccgcatggtttcctttttccagtcttggcatttctggaacacagttattatgtattctcctggtgaatgaactcaatgcagcgtaacaaagtatctgaggttcaggatattttgtaggggggtaattagatcggccttccattcaactgtttcactccaaatggatgaaggaatctgtagcagtttaaatacttgtagattattttaaagtatcacaggagattcattttgattactcagctgcttactgaatttgttttgcaacaatgggatcacttttgattcaattgcacagttttttcaagtcaaaagtcaaaattatagacataaaatgactccaatttctggcacaacttgcaattctgatgcttgtaaaaatggcagatacttgcttttagaataaagaggyatgggtaccctattccttcctttacagtctaacaaaactgagaaagggtgtttttgttacttttacccctaagttggcagtgggggctaaatcagatttccccacagccaccaactgcaagaacttagaagtaatcagtaagtacgacatccaaaaccttgacatctgcattcatcattcataggtgattatggtggaggtgatgcacttccctttcttctatgaggaaaattctcatccagtcattttaatcatgttaataagagagtcagaatgaggccttgaatctctgccttaaattgaataagggccttggcagggcctcaaatacatgggtgatttggcaagaaaaactaatgctgtcca

SEQ ID NO: 79891 - DNA, 1293 bp, Homo sapiens
taactggctaagaaatacataaatacaaaataaatatggcactttaccttgaaaggtttgcttggggaggtgagcgccggaagggttgcagcttgtgagattttgtgaaggggtgcaaggaaggttgtccaaaatcagatagacagttataatatcagatgtggatgggtgtggctcgcagcacatggtgaactgagggagctggtagattattgaggtgtgtgcatgtgtattttgtggattagtccagctggaagaagttttctgcattcacttagtgtttttcacaaaagaaatcacgtataagcaaaaatgcaaaattcatgatacacccaaatttttccctaatgtatcaattaggttggaatgaatttggatacagcagaactgattgcagtcttacccccttagtttttatataaagaaattgagacccagtcagactaaatgaagttttgtagccaggttagtggctgagctgaggatggattcctagacatcggttccttttctagcgggagtgtccaccatgctctgtttcctctttcgctgtattttataaattcctgctatttgctgatgataatattgttttagtacttaaatattttaacgtaggtctcagagctagatccttaatgtagataccagaacttaatatttggaatccaataaatgtttgttagttaatgaatgaattaattaatgaaggtggtgaatggacataatcaagtccaggttcactatggatccagttccagacctaagagtgtagacaaaaagatggagaagatgtgatggcrtatttaaagttaatgacagcagtgatctttccatgttctattcaagccttcttgggttggattttagtaaaatgatttagagtgtggggggctttgtgacagaccacaggcaagttatttaacctctctagataatatgggatttacctctttgggtttttgtaagagttaggggagatatacatatataaaatctccttagcacagtgcctggcacatggcaagagttcaataagtggctacacttattattactactgctgctgctactaccacttctactgccgctactgctttcccaacatactatgtgttgaagggaaccgaggaccagtaaatgtgggggaaggagccctggcactcctcctaggcactggcccagttttcttaactgcttattgctggacctctccacccagctgtgtaacaggacttcaaactcaacatgtcacactcattaccttgcttccagtgtgctcctcctcatgca

SEQ ID NO: 79892 - DNA, 633 bp, Homo sapiens
ctcaactgacaaaagtacaaacccatcgaaggatggcagatgaactggcagaatctatagataaaagaaagcaggtcagcttgattcaccactgctgtcagaacatcctggaaagagtccaggcaattccagcgcagaagcacagaggagagaaacggtaattacaactgtggcatcactatgtctctcagaaggaaaaaaataaaggcacctttcagatgttcccccatcaaacacgaggtgcctacctactatgtgccaggcactagcacacttccttactgctcatcagatcaccagatcctggggatgcgctatcatcctactatcatcctgcttgcttaggcagaaagaccagttccttcatctctgaagcggagggagataacacactacccgcctgataggtgtcaggaaactctcctctaccagccaggagaagcctgctccaacccgacaaaccaggaactggtgtgcaaataactgggcacccgccccggcctacaaagcctccccagaggcgtgaacctgggccaggtcattgcctctscttagacctcagctgtaaaatgaggacttctggggtcccttcctgaggaagaagggctgtggcaactggaagggagaacaaga

SEQ ID NO: 79893 - DNA, 534 bp, Homo sapiens
ttggagccagtaacttccacctgtaatttggagtgaatgcttctgaggcccattcatagccatctgtccagaagttcttttcaccagactcccaggagccatcaattctttttgcccacttccccacatcatgacctccttcatagtcttcgccattgttttgctgttgtagatcctcaagatgagcgggaggtcaactttaagtccttgcacatcaggaatggcctttactttcccccttatacttgattggttttggctggatgtatcctagggctgctgtaccaaattcccacaaacttgggggcttacatgacaggaatttattttctcacagctctggagggcagaaatccgcagtcagttgactgggytgaaaccaaggtgtcgccagggccatgctgcctccagaggctctagggttggaagctctaaggaagcatccattgccccacctttcccagcttctagagctgcgttccttggctcatggcctcctcctccatcttcaaagcctgcagcaaagcatcttca

SEQ ID NO: 79894 - DNA, 1444 bp, Homo sapiens
caagttattgttgcactgtcctgaatgtgtatacttgcatctctctctctctctctctctctctctctctctctctctctctctctaacattcaaatakatataattctctggacaggttcccagtggacagcttgagctggtcagccccagtaattcatgtatctacaacattgcaaatgcacaaaccagatacgtggtgaagggcctcagattttaattatatcttacttcacagctgcagccaattcctgctatggcttaataaccaggttgcactagccgtgaacactttctcttgctaattttgctcaggcaaattgagtttttactaccattttggcagaaatgcttatcataacaattatgataaagtgatgaggattggaaacatctgcaggaacgaacttggagacagaaggatgtcagttagtctggttgcgcaggaaaacatgctgtaggaagtctgggtgatggctctattacctgctaaggacaatgggatgagcagaggacctgggcctcccccgactctcttgttggcatgcccaagggagcccaggagcccttggtggcatggactgacttcactgtagtacccactctctgctatgactttgggggagatttgaaatgaggcaaaagatgctctggggctagtcagagaatataacaataatcttagagaacacctcattgtacagatgagaaaactgaggctgggggaggaaggagtgataccaccaaggtcatacagctgatgggtgatatctgagccttctgctcctgtgccagagctctctcctctgtctaaaataaatccaattgaggcttaagtcaagcatgaatggaatctcctgggatccctgggaggagatcccagatggtctctctgctaaagcagagacatgataaataggaaaatacaagaaatgtgtcaccatctgtggcattgtttgggaatcgggaaatagtctagaaccaggaatgctggtcattggtgccaaagagaaagaggggtgacagaagaatctggagtgccaacaacctggagcaataagaaagaagaaaataactgcaaagatgttgagttccagtatattgttggctgatgtcgcctacaccagcttcttccgagggaaactcctggtcatcagtgtcttttactgttgatgccgttcaagaaggtcttgagaaggggaccctcttttctcctctggtaaggcatctgaaggaaggctctcactagattttatttagtgctagaatagatgtgtttaagactaagctaccagatttcctctattttttagacaccatcaattagtaaaatgcatcatcaatttaataagagtttttgggggaagaaaacaagcactatactaaatgtgcacatccatcatgagacacagccctattttagaaatgtgaaaattaaaaaaaaa

SEQ ID NO: 79895 - DNA, 1444 bp, Homo sapiens
caagttattgttgcactgtcctgaatgtgtatacttgcatctctctctctctctctctctctctctctctctctctctctctctctaacattcaaatatatataattctctggacaggttcccagtggacagcttgagctggtcagccccagtaattcatgtatctacaacattgcaaatgcacaaaccagatacgtggtgaagggcctcagrttttaattatatcttacttcacagctgcagccaattcctgctatggcttaataaccaggttgcactagccgtgaacactttctcttgctaattttgctcaggcaaattgagtttttactaccattttggcagaaatgcttatcataacaattatgataaagtgatgaggattggaaacatctgcaggaacgaacttggagacagaaggatgtcagttagtctggttgcgcaggaaaacatgctgtaggaagtctgggtgatggctctattacctgctaaggacaatgggatgagcagaggacctgggcctcccccgactctcttgttggcatgcccaagggagcccaggagcccttggtggcatggactgacttcactgtagtacccactctctgctatgactttgggggagatttgaaatgaggcaaaagatgctctggggctagtcagagaatataacaataatcttagagaacacctcattgtacagatgagaaaactgaggctgggggaggaaggagtgataccaccaaggtcatacagctgatgggtgatatctgagccttctgctcctgtgccagagctctctcctctgtctaaaataaatccaattgaggcttaagtcaagcatgaatggaatctcctgggatccctgggaggagatcccagatggtctctctgctaaagcagagacatgataaataggaaaatacaagaaatgtgtcaccatctgtggcattgtttgggaatcgggaaatagtctagaaccaggaatgctggtcattggtgccaaagagaaagaggggtgacagaagaatctggagtgccaacaacctggagcaataagaaagaagaaaataactgcaaagatgttgagttccagtatattgttggctgatgtcgcctacaccagcttcttccgagggaaactcctggtcatcagtgtcttttactgttgatgccgttcaagaaggtcttgagaaggggaccctcttttctcctctggtaaggcatctgaaggaaggctctcactagattttatttagtgctagaatagatgtgtttaagactaagctaccagatttcctctattttttagacaccatcaattagtaaaatgcatcatcaatttaataagagtttttgggggaagaaaacaagcactatactaaatgtgcacatccatcatgagacacagccctattttagaaatgtgaaaattaaaaaaaaa

SEQ ID NO: 79896 - DNA, 1444 bp, Homo sapiens
caagttattgttgcactgtcctgaatgtgtatacttgcatctctctctctctctctctctctctctctctctctctctctctctctaacattcaaatatatataattctctggacaggttcccagtggacagcttgagctggtcagccccagtaattcatgtatctacaacattgcaaatgcacaaaccagatacgtggtgaagggcctcagattttaattatatcttacttcacagctgcagccaattcctgctatggcttaataaccaggttgcactagccgtgaacactttctcttgctaattttgctcaggcaaattgagtttttactaccattttggcagaaatgcttatcataacaattatgataaagtgatgaggattggaaacatctgcaggaacgaacttggagacagaaggatgtcagttagtctggttgygcaggaaaacatgctgtaggaagtctgggtgatggctctattacctgctaaggacaatgggatgagcagaggacctgggcctcccccgactctcttgttggcatgcccaagggagcccaggagcccttggtggcatggactgacttcactgtagtacccactctctgctatgactttgggggagatttgaaatgaggcaaaagatgctctggggctagtcagagaatataacaataatcttagagaacacctcattgtacagatgagaaaactgaggctgggggaggaaggagtgataccaccaaggtcatacagctgatgggtgatatctgagccttctgctcctgtgccagagctctctcctctgtctaaaataaatccaattgaggcttaagtcaagcatgaatggaatctcctgggatccctgggaggagatcccagatggtctctctgctaaagcagagacatgataaataggaaaatacaagaaatgtgtcaccatctgtggcattgtttgggaatcgggaaatagtctagaaccaggaatgctggtcattggtgccaaagagaaagaggggtgacagaagaatctggagtgccaacaacctggagcaataagaaagaagaaaataactgcaaagatgttgagttccagtatattgttggctgatgtcgcctacaccagcttcttccgagggaaactcctggtcatcagtgtcttttactgttgatgccgttcaagaaggtcttgagaaggggaccctcttttctcctctggtaaggcatctgaaggaaggctctcactagattttatttagtgctagaatagatgtgtttaagactaagctaccagatttcctctattttttagacaccatcaattagtaaaatgcatcatcaatttaataagagtttttgggggaagaaaacaagcactatactaaatgtgcacatccatcatgagacacagccctattttagaaatgtgaaaattaaaaaaaaa

SEQ ID NO: 79897 - DNA, 1444 bp, Homo sapiens
caagttattgttgcactgtcctgaatgtgtatacttgcatctctctctctctctctctctctctctctctctctctctctctctctaacattcaaatatatataattctctggacaggttcccagtggacagcttgagctggtcagccccagtaattcatgtatctacaacattgcaaatgcacaaaccagatacgtggtgaagggcctcagattttaattatatcttacttcacagctgcagccaattcctgctatggcttaataaccaggttgcactagccgtgaacactttctcttgctaattttgctcaggcaaattgagtttttactaccattttggcagaaatgcttatcataacaattatgataaagtgatgaggattggaaacatctgcaggaacgaacttggagacagaaggatgtcagttagtctggttgcgcaggaaaacatgctgtaggaagtctgggtgatggctctattacctgctaaggacaatgggatgagcagaggacctgggcctcccccgactctcttgttggsatgcccaagggagcccaggagcccttggtggcatggactgacttcactgtagtacccactctctgctatgactttgggggagatttgaaatgaggcaaaagatgctctggggctagtcagagaatataacaataatcttagagaacacctcattgtacagatgagaaaactgaggctgggggaggaaggagtgataccaccaaggtcatacagctgatgggtgatatctgagccttctgctcctgtgccagagctctctcctctgtctaaaataaatccaattgaggcttaagtcaagcatgaatggaatctcctgggatccctgggaggagatcccagatggtctctctgctaaagcagagacatgataaataggaaaatacaagaaatgtgtcaccatctgtggcattgtttgggaatcgggaaatagtctagaaccaggaatgctggtcattggtgccaaagagaaagaggggtgacagaagaatctggagtgccaacaacctggagcaataagaaagaagaaaataactgcaaagatgttgagttccagtatattgttggctgatgtcgcctacaccagcttcttccgagggaaactcctggtcatcagtgtcttttactgttgatgccgttcaagaaggtcttgagaaggggaccctcttttctcctctggtaaggcatctgaaggaaggctctcactagattttatttagtgctagaatagatgtgtttaagactaagctaccagatttcctctattttttagacaccatcaattagtaaaatgcatcatcaatttaataagagtttttgggggaagaaaacaagcactatactaaatgtgcacatccatcatgagacacagccctattttagaaatgtgaaaattaaaaaaaaa

SEQ ID NO: 79898 - DNA, 1444 bp, Homo sapiens
caagttattgttgcactgtcctgaatgtgtatacttgcatctctctctctctctctctctctctctctctctctctctctctctctaacattcaaatatatataattctctggacaggttcccagtggacagcttgagctggtcagccccagtaattcatgtatctacaacattgcaaatgcacaaaccagatacgtggtgaagggcctcagattttaattatatcttacttcacagctgcagccaattcctgctatggcttaataaccaggttgcactagccgtgaacactttctcttgctaattttgctcaggcaaattgagtttttactaccattttggcagaaatgcttatcataacaattatgataaagtgatgaggattggaaacatctgcaggaacgaacttggagacagaaggatgtcagttagtctggttgcgcaggaaaacatgctgtaggaagtctgggtgatggctctattacctgctaaggacaatgggatgagcagaggacctgggcctcccccgactctcttgttggcatgcccaagggagcccaggagcccttggtggcatggactgacttcactgtagtacccactctctgctatgactttgggggagatttgaaatgaggcaaaagatgctctggggctagtcagagaatataacaataatcttagagaacacctcattgtacagatgagaaaactgaggctgggggaggaaggagtgataccacmaaggtcatacagctgatgggtgatatctgagccttctgctcctgtgccagagctctctcctctgtctaaaataaatccaattgaggcttaagtcaagcatgaatggaatctcctgggatccctgggaggagatcccagatggtctctctgctaaagcagagacatgataaataggaaaatacaagaaatgtgtcaccatctgtggcattgtttgggaatcgggaaatagtctagaaccaggaatgctggtcattggtgccaaagagaaagaggggtgacagaagaatctggagtgccaacaacctggagcaataagaaagaagaaaataactgcaaagatgttgagttccagtatattgttggctgatgtcgcctacaccagcttcttccgagggaaactcctggtcatcagtgtcttttactgttgatgccgttcaagaaggtcttgagaaggggaccctcttttctcctctggtaaggcatctgaaggaaggctctcactagattttatttagtgctagaatagatgtgtttaagactaagctaccagatttcctctattttttagacaccatcaattagtaaaatgcatcatcaatttaataagagtttttgggggaagaaaacaagcactatactaaatgtgcacatccatcatgagacacagccctattttagaaatgtgaaaattaaaaaaaaa

SEQ ID NO: 79899 - DNA, 788 bp, Homo sapiens
ttgcatgctaagtgttcttatacatacatgcacacacacatacatgcacataagaacatcagtaaacttttggagctgatggataggttttgtaccttgattgtggtgatatcacaggtgtatacatatgtccaaactcattaaaatatatacattaaatatgtacaattatatatatcatttgtatcttaataaagcaaatatatgtaatatataataacgtaaatatatatatgtgtgtatgatatgagccaaaaaaagacataagaaagaaaacctcagactctaagtagactcaatgaaaacacgatttccttagcactcaccacaccccatccagaggaaactgtggttagaatgtgagtgtgtaggccaggcgcggtggctcacacctgtaatcccagcattttggggggccaaggtgggcggatcacgtgaagtcagaagttcgagaccagcctggcaaacacggtgaaaccccgtctstactaaaaatacaaaaaattagcctggcgtggtggtgcatggctgtagtcccagctactcggaaggctgagacacgagaatcgctcgaacccaggaggtggaggttgaacccgggaggcagaggttgcagtgagccgaaattgcgctactgctctccagcctgggcgacagagtgagactctgtctcaaaaacaaacaaacaaacaaacaaacaaacaaacaaacaaaaacaatgtgagtgtgtattgctttggagcttcttctttgaatgtgcatgtgtgtgtgtgtgtcctggatgggat

SEQ ID NO: 79900 - DNA, 788 bp, Homo sapiens
ttgcatgctaagtgttcttatacatacatgcacacacacatacatgcacataagaacatcagtaaacttttggagctgatggataggttttgtaccttgattgtggtgatatcacaggtgtatacatatgtccaaactcattaaaatatatacattaaatatgtacaattatatatatcatttgtatcttaataaagcaaatatatgtaatatataataacgtaaatatatatatgtgtgtatgatatgagccaaaaaaagacataagaaagaaaacctcagactctaagtagactcaatgaaaacacgatttccttagcactcaccacaccccatccagaggaaactgtggttagaatgtgagtgtgtaggccaggcgcggtggctcacacctgtaatcccagcattttggggggccaaggtgggcggatcacgtgaagtcagaagttcgagaccagcctggcaaacacggtgaaaccccgtctgtactaaaaatacaaaaaattagcctggcgtggtggtgcatggctgtagtcccagctactcggaaggctgagacacgagaatcgctcgaacccaggaggtggaggttgaacccgggaggcagaggttgcagtgagccgaaattgcgctactgctctccagcctgggcgacagagtgagactctgtctcaaaaacaaacaaacaaacaaacaaacaaacaaacaaacaaaaacaatgtgagtgtgtattgctttggagcttcttctttgaatgtgcatgtgtgtgtgtgtgtcctrgatgggat

SEQ ID NO: 79901 - DNA, 663 bp, Homo sapiens
cagcacaggccagtttagccatctgcttctgtctctgacgccacatacaacagagagtcttttgtcattgttgttgttgttgttgttgttgttgttgttttgagacgaagtcttgstctgtctcccaggctggagtgcagtggcacgatctcggctcactgcaagctctgcctcctgagttcacgccattctcctgcctcagcctcctgagtagctgggactgcaggcgcccgccaccacgcccggctaattttttgtatttttagtagacacggggtttcaccgtgttagccaggatggtctcgatctcctgacctcgtgatctacccgcctcggcctcccaaagtgctcggatcgcacccagcccagagctgcattttcatacaccattgaaatcagtgaaccctcaccgtgtgatgagaatgctggatgaaattttatgctgagtgagggaacaatctgttgaaaataaaggttagaaatgtgtagtgtcctatcgtgtcagtgccacaaaaaagatggggagtcctgccacatggtggaatggtgccacataagtcagagcaggaagcgagtgcagaaggacccaagtgactggagagatgattgcaaatgcaacagaaattctagggttcatcggatgctgtggctatgcttaagaaa

SEQ ID NO: 79902 - DNA, 663 bp, Homo sapiens
cagcacaggccagtttagccatctgcttctgtctctgacgccacatacaacagagagtcttttgtcattgttgttgttgttgttgttgttgttgttgttttgagacgaagtcttgctmtgtctcccaggctggagtgcagtggcacgatctcggctcactgcaagctctgcctcctgagttcacgccattctcctgcctcagcctcctgagtagctgggactgcaggcgcccgccaccacgcccggctaattttttgtatttttagtagacacggggtttcaccgtgttagccaggatggtctcgatctcctgacctcgtgatctacccgcctcggcctcccaaagtgctcggatcgcacccagcccagagctgcattttcatacaccattgaaatcagtgaaccctcaccgtgtgatgagaatgctggatgaaattttatgctgagtgagggaacaatctgttgaaaataaaggttagaaatgtgtagtgtcctatcgtgtcagtgccacaaaaaagatggggagtcctgccacatggtggaatggtgccacataagtcagagcaggaagcgagtgcagaaggacccaagtgactggagagatgattgcaaatgcaacagaaattctagggttcatcggatgctgtggctatgcttaagaaa

SEQ ID NO: 79903 - DNA, 663 bp, Homo sapiens
cagcacaggccagtttagccatctgcttctgtctctgacgccacatacaacagagagtcttttgtcattgttgttgttgttgttgttgttgttgttgttttgagacgaagtcttgctctgtctcccaggctggagtgcagtggcacgatctckgctcactgcaagctctgcctcctgagttcacgccattctcctgcctcagcctcctgagtagctgggactgcaggcgcccgccaccacgcccggctaattttttgtatttttagtagacacggggtttcaccgtgttagccaggatggtctcgatctcctgacctcgtgatctacccgcctcggcctcccaaagtgctcggatcgcacccagcccagagctgcattttcatacaccattgaaatcagtgaaccctcaccgtgtgatgagaatgctggatgaaattttatgctgagtgagggaacaatctgttgaaaataaaggttagaaatgtgtagtgtcctatcgtgtcagtgccacaaaaaagatggggagtcctgccacatggtggaatggtgccacataagtcagagcaggaagcgagtgcagaaggacccaagtgactggagagatgattgcaaatgcaacagaaattctagggttcatcggatgctgtggctatgcttaagaaa

SEQ ID NO: 79904 - DNA, 663 bp, Homo sapiens
cagcacaggccagtttagccatctgcttctgtctctgacgccacatacaacagagagtcttttgtcattgttgttgttgttgttgttgttgttgttgttttgagacgaagtcttgctctgtctcccaggctggagtgcagtggcacgatctcggctcactgcaagctcygcctcctgagttcacgccattctcctgcctcagcctcctgagtagctgggactgcaggcgcccgccaccacgcccggctaattttttgtatttttagtagacacggggtttcaccgtgttagccaggatggtctcgatctcctgacctcgtgatctacccgcctcggcctcccaaagtgctcggatcgcacccagcccagagctgcattttcatacaccattgaaatcagtgaaccctcaccgtgtgatgagaatgctggatgaaattttatgctgagtgagggaacaatctgttgaaaataaaggttagaaatgtgtagtgtcctatcgtgtcagtgccacaaaaaagatggggagtcctgccacatggtggaatggtgccacataagtcagagcaggaagcgagtgcagaaggacccaagtgactggagagatgattgcaaatgcaacagaaattctagggttcatcggatgctgtggctatgcttaagaaa

SEQ ID NO: 79905 - DNA, 663 bp, Homo sapiens
cagcacaggccagtttagccatctgcttctgtctctgacgccacatacaacagagagtcttttgtcattgttgttgttgttgttgttgttgttgttgttttgagacgaagtcttgctctgtctcccaggctggagtgcagtggcacgatctcggctcactgcaagctctrcctcctgagttcacgccattctcctgcctcagcctcctgagtagctgggactgcaggcgcccgccaccacgcccggctaattttttgtatttttagtagacacggggtttcaccgtgttagccaggatggtctcgatctcctgacctcgtgatctacccgcctcggcctcccaaagtgctcggatcgcacccagcccagagctgcattttcatacaccattgaaatcagtgaaccctcaccgtgtgatgagaatgctggatgaaattttatgctgagtgagggaacaatctgttgaaaataaaggttagaaatgtgtagtgtcctatcgtgtcagtgccacaaaaaagatggggagtcctgccacatggtggaatggtgccacataagtcagagcaggaagcgagtgcagaaggacccaagtgactggagagatgattgcaaatgcaacagaaattctagggttcatcggatgctgtggctatgcttaagaaa

SEQ ID NO: 79906 - DNA, 663 bp, Homo sapiens
cagcacaggccagtttagccatctgcttctgtctctgacgccacatacaacagagagtcttttgtcattgttgttgttgttgttgttgttgttgttgttttgagacgaagtcttgctctgtctcccaggctggagtgcagtggcacgatctcggctcactgcaagctctgcctcctgagttcacgccattctcctgcctcagcctcctgagtagctgggactgcaggcgcccgccaccacgcccggctaattttttgtatttttagtagacacggggtttcaccgtgttagccaggatggtctcgatctcctgacctcgtgatctacccrcctcggcctcccaaagtgctcggatcgcacccagcccagagctgcattttcatacaccattgaaatcagtgaaccctcaccgtgtgatgagaatgctggatgaaattttatgctgagtgagggaacaatctgttgaaaataaaggttagaaatgtgtagtgtcctatcgtgtcagtgccacaaaaaagatggggagtcctgccacatggtggaatggtgccacataagtcagagcaggaagcgagtgcagaaggacccaagtgactggagagatgattgcaaatgcaacagaaattctagggttcatcggatgctgtggctatgcttaagaaa

SEQ ID NO: 79907 - DNA, 673 bp, Homo sapiens
atttttatggattaaacagagaagaatgtctaatgaattgtctagaaattgaaatacgcaccttttatgaatagggacatttcataagaccattctgtattgtgagttaggaattcagatcagttgaagcattaaaaaaatcaaaccttctgcagctcattaaagcataaacctaatttttagaatttatccgactaatatagtaagacctccacctgcttagaataatattaatacttgrcctcatttacctccaagagggggataggcccctgaccaatcttcccatttcaccgaggacagacacttcccttgaatcaggtggaggttttccagtcatatttgcaacactgtttaatgctcaattgccctatttctttcctctgtgaagtgaatacaataacttaaatgaaggttgtttgaaactcctactattgggtaggagtttgcaacctggttactatgatcagagctataatttttttgtttattataattaggttttttgcaagactaaaattgtgcttcttttaaagtgctgaagaatttccaggcttgtcagcactaatacgtattctaattgcaaaaacagacacgaatatcaacccaggtgcatagacctcatagtgtcaatcaaatctcatcagaaactacttgtcttgcaggaggaagg

SEQ ID NO: 79908 - DNA, 2338 bp, Homo sapiens
aaacctcgtctccactaaaaatacaaaattagccaggcgtggtggcacatgcctgttatcccagctactcgggaggctgaggcrggagaattgcttgaacccaggaggtggaggttgcagtgagccaagatcatgctccatccagcctgggcaacaagagcaaaactccatcaaaaaaaaaaataaatccaaactcttagctactgcccttatactaattgtcaagaaagaagaaaacacaacccaaattcttgaaaggaacagggtgtgggcagccagggagtgctcccaggtgtgtgggcccagcggcaccagactctgcacacaagagtgcctcctttccacccaggcctggtttcatggaatgcctgcttcacctgccagcatttgcctcagacacataaacttcccatggagtatatgagtaagctctgacagctccattgttggtgagctactagatagcaggaattataacccaattaaattcaatactctatggaaaaggaaaaggcaatgcagtccatcttactgatagacaattttagaataggtgtctgtgatagaacacacacattatttaatccccaaataagggtaaagttttaaaagacagtaaaccatagcagtctcagatattatctctaaagattttatttgatatccaggatccaagaatgaaaaacatccaacaattatgaaaccagcttttgcaatggctatcatcacccaggaaaaggcattgtttaaaaatccaaagaaaatggagcaatgttaaaaccaatcaagcattcaagaacagataagggattaaataaataatggtgaatccatgttatgaaatattggagctgtgcaaatgatatttcaagtaatctttatgacatggggaatattttcactatataatgtcatctgaaaaaacatgcataacgccaatctgtttacacaatttcatctcaattattgaaaagaacacatatctataagaaaaaaaaaaaaaggaagaggcagactcccgtggagggcagttgtgccaagcagaggcatggcctgatgggctcattggcaccacagacgttgctctgtggttgggaagaggaggctggggggccaaatctaagatgtgtggctctctgcatatatagctacgtgcgcgcgcacacacacacacacacacacacacacacaaaggattttcaacagagatgcaatctacaaacttcctagtgacaggtatcatgtagtgagtaaacccccaaaaggatcttatgcctatgaggcagaaaattacagatttatcaaactttcccaattatccatatctgtccctgtccctttcctccccttggcagaggatgtctcatgcttgtcttctcaaaaaatgacagttttggaaaggcccaatggcttcatccgtgagtcgctaaggtgccagaaaccttgcaggatttcccgtggtcttctgctttttcagtctctttgagttcatatttaggggcagaaaagcaggagagcctgaacttgaggccctggagctgctgtcagtaaacctggagagaagggctgtgtgtctacactccgaggtgctagatcattatccccttcagtctgggtgtctgagaagcttggtctatcagtctagcagaacagactgaagattccataggaactcaaggggaactgactcccgccctccctccagcctccaagcatgagagggcatcactaagtcctcctggggctctggctagagttcatctgggaggtcttagaaggcttaatttttccaaattctccttctgcttttacagaataatcccaaagttgattttttattgaagaaaaaagatctatattataagggttcttatgtaattattacaaaggtagcctacatagtgcagaaattggaacttgattagtataaatgcatttttatctgaatttttgcaaagtaagttcaataagtcatttgatttgttaatattcagtgtttataattttgtagagacgtgttttaacttttactctgtatttctgtgctcagagagttgtttgataagcctgtgcaacttgacttcggagttttatttcaagcatatgtagtttgtatcaggaaatcatatttttttagaattatgtattcatcatagaaaaatccttaattagcagtagtgaaggaaagctcttagactgaagactgattagcccagcctccagaggagatgtacgttagtgggacaacgtcctctaataaaggaacattcaagtcagaaatcacagtgaaacaccttaaattgttaaccacgaaggaaacagcgcctccaaattgata

SEQ ID NO: 79909 - DNA, 2338 bp, Homo sapiens
aaacctcgtctccactaaaaatacaaaattagccaggcgtggtggcacatgcctgttatcccagctactcgggaggctgaggcgggagaattgcttgaacccaggaggtggaggttgcagtgagccaagatcatgctccatccagcctgggcaacaagagcaaaactccatcaaaaaaaaaaataaatccaaactcttagctactgcccttatactaattgtcaagaaagaagaaaacacaacccaaattcttgaaaggaacagggtgtgggcagccagggagtgctcccaggtgtgtgggcccagcggcaccagactctgcacacaagagtgcctcctttccacccaggcctggtttcatggaatgcctgcttcacctgccagcatttgcctcagacacataaacttcccatggagtatatgagtaagctctgacagctccattgttggtgagctactagatagcaggaattataacccaattaaattcaatactctatggaaaaggaaaaggcaatgcagtccatcttactgatagacaattttagaataggtgtctgtgatagaacacacacattatttaatccccaaataagggtaaagttttaaaagacagtaaaccatagcagkctcagatattatctctaaagattttatttgatatccaggatccaagaatgaaaaacatccaacaattatgaaaccagcttttgcaatggctatcatcacccaggaaaaggcattgtttaaaaatccaaagaaaatggagcaatgttaaaaccaatcaagcattcaagaacagataagggattaaataaataatggtgaatccatgttatgaaatattggagctgtgcaaatgatatttcaagtaatctttatgacatggggaatattttcactatataatgtcatctgaaaaaacatgcataacgccaatctgtttacacaatttcatctcaattattgaaaagaacacatatctataagaaaaaaaaaaaaaggaagaggcagactcccgtggagggcagttgtgccaagcagaggcatggcctgatgggctcattggcaccacagacgttgctctgtggttgggaagaggaggctggggggccaaatctaagatgtgtggctctctgcatatatagctacgtgcgcgcgcacacacacacacacacacacacacacacaaaggattttcaacagagatgcaatctacaaacttcctagtgacaggtatcatgtagtgagtaaacccccaaaaggatcttatgcctatgaggcagaaaattacagatttatcaaactttcccaattatccatatctgtccctgtccctttcctccccttggcagaggatgtctcatgcttgtcttctcaaaaaatgacagttttggaaaggcccaatggcttcatccgtgagtcgctaaggtgccagaaaccttgcaggatttcccgtggtcttctgctttttcagtctctttgagttcatatttaggggcagaaaagcaggagagcctgaacttgaggccctggagctgctgtcagtaaacctggagagaagggctgtgtgtctacactccgaggtgctagatcattatccccttcagtctgggtgtctgagaagcttggtctatcagtctagcagaacagactgaagattccataggaactcaaggggaactgactcccgccctccctccagcctccaagcatgagagggcatcactaagtcctcctggggctctggctagagttcatctgggaggtcttagaaggcttaatttttccaaattctccttctgcttttacagaataatcccaaagttgattttttattgaagaaaaaagatctatattataagggttcttatgtaattattacaaaggtagcctacatagtgcagaaattggaacttgattagtataaatgcatttttatctgaatttttgcaaagtaagttcaataagtcatttgatttgttaatattcagtgtttataattttgtagagacgtgttttaacttttactctgtatttctgtgctcagagagttgtttgataagcctgtgcaacttgacttcggagttttatttcaagcatatgtagtttgtatcaggaaatcatatttttttagaattatgtattcatcatagaaaaatccttaattagcagtagtgaaggaaagctcttagactgaagactgattagcccagcctccagaggagatgtacgttagtgggacaacgtcctctaataaaggaacattcaagtcagaaatcacagtgaaacaccttaaattgttaaccacgaaggaaacagcgcctccaaattgata

SEQ ID NO: 79910 - DNA, 2338 bp, Homo sapiens
aaacctcgtctccactaaaaatacaaaattagccaggcgtggtggcacatgcctgttatcccagctactcgggaggctgaggcgggagaattgcttgaacccaggaggtggaggttgcagtgagccaagatcatgctccatccagcctgggcaacaagagcaaaactccatcaaaaaaaaaaataaatccaaactcttagctactgcccttatactaattgtcaagaaagaagaaaacacaacccaaattcttgaaaggaacagggtgtgggcagccagggagtgctcccaggtgtgtgggcccagcggcaccagactctgcacacaagagtgcctcctttccacccaggcctggtttcatggaatgcctgcttcacctgccagcatttgcctcagacacataaacttcccatggagtatatgagtaagctctgacagctccattgttggtgagctactagatagcaggaattataacccaattaaattcaatactctatggaaaaggaaaaggcaatgcagtccatcttactgatagacaattttagaataggtgtctgtgatagaacacacacattatttaatccccaaataagggtaaagttttaaaagacagtaaaccatagcagtctcagatattatctctaaagattttatttgatatccaggatccaagaatgaaaaacatccaacaattatgaaaccagcttttgcaatggctatcatcacccaggaaaaggcattgtttaaaaatccaaagaaaatggagcaatgttaaaaccaatcaagcattcaagaacagrtaagggattaaataaataatggtgaatccatgttatgaaatattggagctgtgcaaatgatatttcaagtaatctttatgacatggggaatattttcactatataatgtcatctgaaaaaacatgcataacgccaatctgtttacacaatttcatctcaattattgaaaagaacacatatctataagaaaaaaaaaaaaaggaagaggcagactcccgtggagggcagttgtgccaagcagaggcatggcctgatgggctcattggcaccacagacgttgctctgtggttgggaagaggaggctggggggccaaatctaagatgtgtggctctctgcatatatagctacgtgcgcgcgcacacacacacacacacacacacacacacaaaggattttcaacagagatgcaatctacaaacttcctagtgacaggtatcatgtagtgagtaaacccccaaaaggatcttatgcctatgaggcagaaaattacagatttatcaaactttcccaattatccatatctgtccctgtccctttcctccccttggcagaggatgtctcatgcttgtcttctcaaaaaatgacagttttggaaaggcccaatggcttcatccgtgagtcgctaaggtgccagaaaccttgcaggatttcccgtggtcttctgctttttcagtctctttgagttcatatttaggggcagaaaagcaggagagcctgaacttgaggccctggagctgctgtcagtaaacctggagagaagggctgtgtgtctacactccgaggtgctagatcattatccccttcagtctgggtgtctgagaagcttggtctatcagtctagcagaacagactgaagattccataggaactcaaggggaactgactcccgccctccctccagcctccaagcatgagagggcatcactaagtcctcctggggctctggctagagttcatctgggaggtcttagaaggcttaatttttccaaattctccttctgcttttacagaataatcccaaagttgattttttattgaagaaaaaagatctatattataagggttcttatgtaattattacaaaggtagcctacatagtgcagaaattggaacttgattagtataaatgcatttttatctgaatttttgcaaagtaagttcaataagtcatttgatttgttaatattcagtgtttataattttgtagagacgtgttttaacttttactctgtatttctgtgctcagagagttgtttgataagcctgtgcaacttgacttcggagttttatttcaagcatatgtagtttgtatcaggaaatcatatttttttagaattatgtattcatcatagaaaaatccttaattagcagtagtgaaggaaagctcttagactgaagactgattagcccagcctccagaggagatgtacgttagtgggacaacgtcctctaataaaggaacattcaagtcagaaatcacagtgaaacaccttaaattgttaaccacgaaggaaacagcgcctccaaattgata

SEQ ID NO: 79911 - DNA, 829 bp, Homo sapiens
ttccctaatttttgctttatttattttgaaactatattatgtagatttagaagtattatatctacttatctgaagctatgttatagagatttagaatagtatagctatttagaaaagtatagctttattttcctttataatttagaatagtcttcatctctagaaagtctttttacctttaagcacatgttttattagaatcgtgacataagctttcgaaaagtatttttattgttttccatcattttagttttaaactttattttttatttaaarcctgtctcacacatgtatcattgagttaaatatttaatatttttatggcattacatagtttgggcttcctgagaagaccatgagatgaggattttgatatacagagtttattcagtgatgatcttatgcttcactgacacgcttcactacattttagttggcaaattagatagggaaggagaggaagcctctgttggtaatttgagcttaatctgaccagggtcaatgacagacagcacagaaggcacacctcagagataatttccacactccaaaaaatgaagtgtttaggctgttcattttctaactctgaggagtcgttggttgaaggttattcctgggaggcacacaggtgtagagtaggatgctatagccaaagaaggcctccagccaaacgtgcacaggggtaggagaatagagactggaccattatgaaagaaacaataaaagctggttgatatgggcagataattaacactagcagctatatccagtcctacaatgtttgtctttaattaaattacttagaacatttatatacttagtgtaagta

SEQ ID NO: 79912 - DNA, 661 bp, Homo sapiens
tccttgcatttccctcctgacactaaggctgaatgttcagtgaaagggaggatacaaaatgaatgactagagattgtttttaaactcagtatttctagcttcagtgatctctgctataattatgatcaagacaaagagccacttacctctgacttaagaagtattactacaaggttagtaattaacatcattaacatgtcttgaacttggcatcatcaattaattaaaagtaagttttttgttctcttgggaatttagttaattgcatataataattgtggtgtgtatatgccagtggtagggggaagacaaaaacgactttataaagagacagcagatgggagtttcaactaaattctgtctctaagtgtcaaatctgagcaaatcacttaacaccaatttatttccccaacagttaaataggaagaataaaagagacttcataaccttccagggatgcctttggtctttaaaactaagacagaggaatggacatatttttcacggggaggaarggagcggagttgaggatcttttaaagtatatcctaggttctgctaggtttagtcatgccatttggatttaatagtagaatcaacactaagaatctttagcagcatcttggcttgtcaaacctgtactaagcaaaatactcagactt

SEQ ID NO: 79913 - DNA, 764 bp, Homo sapiens
cactcacatgcctgataacgtgcacttatttctgagccccaccccattcgttgtgggctctgcagagtggaaaccagccaaggctctgccctgctctgcaggcctgtccttttgcttgtcagagatgcaaccaaactgaagcctgaatttcaatccaagtgaaatatctgaggccattgcctgagccaaaaataaaaatgcagcaggagaagaacccaacatgaacacagcagaagcatttcagtgacctcaactcggggcagcggcctttagcagtttcctgtgacctccctgtgtgcagctagaatctggaagggtgcagacaaagccattgggcctgtctctaattggtctcacatcatcagcattccagaacaggaaactctgcagccaggaattcttgcctctttgccataatatttgagaagcaaaccttttccccctgcacatacttagttctgctagtttgcagcaggttcattttcctagtttcaataactacaataagagcatcgtgtctggcctatctcttggtgatggactattagatttctagggtatgaacttcttcctcacttgctatgggtcaataagctaatgtttgggtcaaagactgttcataaaatatatagtctcattccatggcgctttttttttttttttattagactctctctctgtcgccyaggctggagtgcagtggcatgatctcggctcactgcaacctctgcctcctgggttcaagtgattctcctgcctcagcc

SEQ ID NO: 79914 - DNA, 618 bp, Homo sapiens
caagggatgacataacattgaaattaagaaaccaaggaaagttgagaactaaagaaaacagaacccagtcagccaagaggcatccttgagggccaaccaagccgtcaaacctggatgcccccgacragtcagaaagtcgggtgcctcaagagccaagcagccaagaaatggggtctggaactggcactttggtccgcctctgtgcactcacccagaaagggtggaagggaccctgggaccaagtgccaaggtcacacaacggatgaatagagctgctggacttcaaactgaaccatgccattttgccaaagcagtcatcaccttccgtgaatcataaatgtttgttcaaagccacaaatgtatatactctttgtatgtatacagattttttctaaaggttaacatctaaacagatcaattaaggtcagccttaatttgtctgagctttttggttaaagtttcctgagtaattgagcgaattcaagtttctggctttctcctttttctttctccatttaaaacatgatctcatgaaatttttgtcccaagaaaggcaggattacattttcttttaacagtttgagttggtgtagtgtattcttggttatcagaatactc

SEQ ID NO: 79915 - DNA, 742 bp, Homo sapiens
cctccccaatatgctcacccattacctaaagatttctgtttagtcagtttctctttttgagaagcgtatgtataaagcacacataaaggatagtggattattccccacctccccaactgttcggcaaaaacattgtgtaactcaaggcagtactttatgatggaacaaagtttgaatctttaaaggccatattttaacatgccaccttcccgtttaaaaatatataggagttccccggtgcttatcaaattaatyccaaatttacctgcttgaccttgaagactttctaccaacttcatctcattaaccttgtttctcattcgtgcttaaaaagaaaatagtcttgttttttcctttgtcctcgtttccataatttaaacatctctgtctccaattcatgtgcctcctctttaaacctttttcaaaattcacctgtttctggaagaatgctgcttaatccactcacaaggatcagttaatgaatcctggtaataagtaccctaaggttaatatatgcttgtttagatatagtttaatatcttcttaagctttttttttttcttaagtttttatgttacctactctgtttccttaattttcttaggttaaaaaaattaaaataggaatagcgtcttttgtattgtcttatgaatttagttcatttttcaacaatgctacttttaaaagttgctaatttttaaaaaggataaatactgtaacaacgtttacccttgatcaccac

SEQ ID NO: 79916 - DNA, 1101 bp, Homo sapiens
tgcaccccagcctgaatgacagagcgaaccaagaccctgttgcctctttatttaaaaaacaaacaaacaaaaaaacttttaaaaagtaggttctggagcccgactttctggcccaactccagctttgccactgtctcaggcaggggctcagagtcagactccgggacaaggattccagagcaagtgcttggcttgggagatgcaggaagccccaggggagggcacgagagggagggaagggaagaagccagtaaagtatgtgttatcaaggcagttaccagggaagcaccaggctctgtgctgtggggagccctgggagacagcgtggagcaggccccagaggttgccctgctgaggagcaaggggttggagtagttgtccgccacccccatagccactgttggctgagaccctctcctggggcagggactctccaggcctccagcggtggagcctgcccatcgttgcagctgggagaagcagcccaaggatcctgctcgggcgtcccaggcttagacgtgaagaggcgagtcctgcatggggagggtgggtgactgatggatgggacaccagctgtgtcctctgcggtcactgggcagctgtgtgacctcaggcagttgctcagcctctctgtgtcttctcatcctcctttggtaggaggctgcctaggcccagtaaaggtagagggcctagaactgcgcctgacacagcactacgcatgccaggatctcaggagcycaagaggtagtcctgtcgcaccccgtttcacagaggaggatgtggaggtcagagtggctaagacaactgctcgatgccactgggcaccagagggcagatggggcctgggggaccctgatcccacactcacaggacccctgtccagtgcgctcctgtgggtagataaaggcaacgctgcctccaggaccacctccctcttgcccccgcaccagccaggcatcctctgggcagggaccatggcaccatgacccccacctgtggccgggccttctgggtcctctccaggaggtgtcttggcaccacgctgtggcatcagcatcacacacaatgctgagatgaaaagtcttacgcaggtgtcttcgc

SEQ ID NO: 79917 - DNA, 937 bp, Homo sapiens
atagcaaggattaaattattttatagcactgagtacaagaaatgttatatcttatttttctgatttttattcccctcttaccctacctgctgaaaaggacagtcccattcatattttgactgctctttgcttctccctggggatgcgcaagaataagagggaggattatattttttgaaaaacaaaggacagcatcagtaaatctcagctatagtaagctgcatagtccagactacaaagtagagggaagggaatggctgggtttcctctgtgctaagctttggacttgggatcttttaggcaggctttgaaagccaygggaggtggtgtttattccctactcttccctccatatgccatcccatcagagtttctgttactttctaggacatgctgggggcaggtctctcctattgacacaattggtaggtaacactgccatcagggattgtcctcccaggttaggtcacatctgccctactacacagttcttccctcaatcagctggattttgcaggggtggagggcagttggcttgcccgctgagtaccacccatcttctggggaggcattagaaatatccaaggtcagaacagccagtggcttcccaagaagtgggcaggaaaactcccactgtctccttgctgtacctgccaacagccagtcagtggccaaaccaagcatcaagtcttatcctgctgcacatacacactttgtagtgcagaacaaggcttcagtgattcatactttttaaagaaatacatgaacagaaaatttgatgctacttacatccttttaaaataattaccagattaatgcttgattcacagctgagaatttattctgataggaacacagtatatgagtcattccatataagaagtacagagatgatgcaacaaaattacaattaagcatcaccattaagatacatgca

SEQ ID NO: 79918 - DNA, 841 bp, Homo sapiens
tttcagacttgtaaaggtgtcagactcaatctctcccagatctgtgaaaggcctagaaagggaagccctggctgcattaatggagattctctacagatgcaaatttgcccaacaagagacagctttgcaaggccacttctgtctgctggctctgtggcagccatttcaaaatgtgtcaaggaaatatactttggggtaaaatatttttattttcttcaagtgcaattaactgtaaagacataaactgtaccttttgcgggtggcggcgagcgcggagaggacgccatgaaggtctcgggcacactacgagagtacaaggtggtgggtcgctgcctgcacaccccggaatgccacacactgccccactaccacatgcaaatctttgcgcctaatcatttgtcaacargtcccacttctggtacttcgtatctcagttaaagacaaagaaggcttcaggggagattgtctactgtgggcaggtgtttgagaagcccccactgcgggtgaagaacttcgacagctggctgcgctaatgttactgggggtccttgctcccagagctcccaagatggtggcgggctgcttccaagatggtggcaagccttgtcttctctgacctggggttcttggcctcacggattccaaggaatgcaatcttgggccatgcggtgagtgttatagctctattagaagtcgtgggtcacggaagagaaccttggaacccagtgactagtgttgagctggattaggacaaacccgtgcaggaacaatggcaagtctttagcccgatcaggagcggcaatgggcgcctccctggatggggagcacagcggacaccctg

SEQ ID NO: 79919 - DNA, 726 bp, Homo sapiens
gtgcatatttacataaaatttasgtatagctttatatctccattttctcaccacagctatattctttgctggtccacccatacctaccgtgactctccagcctgcttacctgtatcctctctttcttcctcccttccctctcctcccttcttttctgtcttccttttttcctttcttttgaaataatgccagctttgtccttaaaacaggaagaataatgtagaagggtaatccattattcataaattccagggaaactttaagacttctgttttcttatccctttcccctaaatgtgaggctaaagtacaatgagactgatttcatatgttgatgcaaaaaagaaatggtctcattattttgtggatgtgcttgaagccctctaaagaaatcacctctttatttctcattgcttaaagaaatgatgcaaaatttcatccagatatgtgactatgcctccattgtaacggacccgggtgaaattttgtatcatttcttgggcccccccccagcatccactgaatcagagcctacttttcaacaagatcctcagatcattttcatataccttagtttggaagccttagcctaggggatttttatttgcccatctctggattgtacttcagatcttctaaatcaaattctttgggagtagagaccaggtacttgtacatttaaagaattccccagatgacctgataaccctccagattgaaaacgtgc

SEQ ID NO: 79920 - DNA, 742 bp, Homo sapiens
gatcctaggtttgcctgaaacacattttacgctggaaatcagatcctaacgttaaatcagctaatctttcacatttccaccacatccccatttctaaccttagccccaaattaagtcaggattccaggcatagctggcatacttgggtttgtctgggtaagttaaatggtcaaatagtattagccaaattcctacagagtcctgtacctggtatgccaaacactaaggaaaaagcaagcggatatctgcttacaaagtcaataatctaacatagggggagagtctggggtaggctatgggggaaggctggtctagggcatagaactggggggctggagagaaagaatgatgtcgtgaacagcagacattctcttcaaggaacagacagtaaatacctggggctttctcggtctaggccaagaggtaaagtgaaagctatcatatgggtacttatcaaaccatttaaaatgtaaccacttaaaaatataaaaaacgttttttcttcacagggccatttaaaaaatccatgctggggcmgggcacagtggctcacacctgtaatcccagcattttgggagaccgaggcgggcggatcacgaggtcaggagatgagaccatcctggctaacacagtgaaagcccgtctctactaaaaatacaaaaaattaccccggcgtggtggcgggcacctgtagtcccagctatttgggaggctgaggtggagaacggcgtgaacccgggag

SEQ ID NO: 79921 - DNA, 1425 bp, Homo sapiens
aggttgcagtgagctgagtttgtacctttgcactctagcttgggggacaagagtgagactttgtctcaaaaaaaaaaaaaaaaatccatgcttgtcttggtcctagggcctcagtgtatggaaccccagctcagtgtcactttaatgtaaatgagtttttattttatttcattttaagttctgggctacatatgcaggatgtgcaggtttgttacataggtaaacggtggctgttagctgcacctatcaacccaccacctaggtattacgcccagcatgcattagctattttacctaatgctctcccgctacttcccgccctcccctgacaggccccagtgtgtgttgtttccccacatgtgtccatgtgttctcattggtcagttcccacttataagtgagaacatgcagtgtttggttttctgttcctgggttagtttgctgaggataacggcttccaattctatccatgtccctgcaaaggataagaactcggctgggcacagtggctcattcttgtaatctccagctctgagcaacagagcaagactccatctcagaaaacaaacaaacaaacaacaacaacaaaaacaaataaaaaggacatgatctctctctgcttttttttgagatagaattttgatcgttgcccaggctggagtgcaatggcacactcttggctcactgcaacctccatctcctaggttcaactgattctcctgcctcagcctcctgagtagccgggatcacaggcacctaccaccatgcctggctaatttttgtatttttagtagagatggggtttcaccatattggccaggctggtctcgaactcctgacctcgtgatccacccaccttggcctcccaaactgctgggattacaggcgtgagccaccatgcccagccgatctcattcctttttgaggctgcatagtattccatgctgtatatgtactacattttctttatccagtctatcatcactgggtatatatacccaaaagaatataaatcattctattataaagatacctgcacgcgtatgttcattgcagcactattcacaatagcaaagacatagaatcaacccaaatgcccatttttcttctataaaatgcggaaaatactaggtatccctaattatccaacatgattgtttttgaagatccaacgagggaacaaatgtgaaaaaaactgtgatggatctaaaatttctatatcaacacaaggtattattatgaatactactacttacccacaggcaagtttcatcataaaaatcctgacatgggtcctcttaactggcaatcatcacaaaagattaaaatatatgctgaacactctcacaagaagaatgggagaaggtcctgtgyggtggctcatgcctgtaatctcaacactttgggaggctgaggtgggcagat

SEQ ID NO: 79922 - DNA, 560 bp, Homo sapiens
tgacctggatatgtgctaaattccagttttaaaatatttctgctttatttgtctacctactaattgtcttcttaaaaatgtttcaccacttttattctgtggtcacaaaaaaaaaaatagaaacaattctaaatcatttatgaatctataaacaaatactggtatggttgtatgcatgggctggaaaacgtatgtttatttccaagctctgtttgtggaaacggcctataagcaatggcactactgtagtgaacacacctagagcccacccagattttgttttctacaaaatcatttatccaatgaaaggaaccagggctccttaaatccaaggtgagtgtggggtatctttgtagtgccacagcataagagacaactcaaaaagaggaagagccatatcaaaaawaaacataggaaatgataaagttttaagtttagttaattgcatggtatcaatgtcaatttcttagttttggtaattgtaccatggttatggtacaattcccaatggccgaaactggaacaatttgagaaaaaaaaattaatagtatctatagaac

SEQ ID NO: 79923 - DNA, 1527 bp, Homo sapiens
aattactttatttagttattaatgtattttcttcctgctaaaatgtaagctgaatgagggcaaagtccatgcttatgtgtcctttttaccagcacctaatacgattactggaaatggaggacacaaaaatttttttgttgaattaagggatacgcaaattaaaacattatatgtaattataaraaactggaaataatacaatgaactggataaataaattatggcatcttcccataattaaatagtataaagccattaaaaagaatgatatctgtatttactgaaataaagaatacacttatgggttatcttacatcatatagctgagaaattaaaaaagcaatagccctaaaaagaattgaaatacatttggttaaaaacatattctacaacagagaatatgcacataggcaggttccaggacctcaagtggtgagtccaaagtttttccctgccagggctgtcatctggggtaattttgccccaaggagatatttgaccatgactgcagacattttttattgtcacaactcggggcttgtggggaggtgctattggcatctagtgagtagacaccagggttgctattaagcatcctacagtgcatgggatagctccttttaaaaagaattatccagtttccagtagtgctgaggtagagaaactctgggtgggagggaagggggggatgcagcatatctatctgtctatcactgtctcatatctgcgtggagatctgagctacatggagtgggggtgccacttcaagtcttcactttaaaaaaactgtgcccacatctggcagctgtcatgagtcatagtaattggcatgtttaccagcaactattagaatagccgaaatatttcctaagtcactcagcctgagtaatttgctaatttttagttgttttctgcatagttcaggcttgagatgcatctctaaaatattgtaggaggtatctgctttgcgactacttttctgcttctcttctctgtggataattagaaggatttatttcctggagatgtcaagtaggcacctttctcattacctaaattcacttagagaaaaataaatcagtatacagatgaaagtacaggaagtgaccatgggagttgttttaatccagagaaaataagttctcctatgtataatcagagaactgctgaagaattcttcacctctctttttttttttgaataaccttcctacatccccaaaactgtgttgaggcagaatttataacttgcttaatttatagtacaaagaagagcctctcctctctaggtttttttgtttgtttgcttttttaatcagtacagcctaagttccagggtcgtgtgaggtgaaaggggatcatacgtttcccaggatagagtgaaaatatcagtttgagtagaaatagtgttattatccatcttttagaaagatccaatgaaagaaaatcagatatgtgccaaggaacagcacaatctggaagttgctgcataaggagaaggaaaatattgccagaaggctgggtataa

SEQ ID NO: 79924 - DNA, 1527 bp, Homo sapiens
aattactttatttagttattaatgtattttcttcctgctaaaatgtaagctgaatgagggcaaagtccatgcttatgtgtcctttttaccagcacctaatacgattactggaaatggaggacacaaaaatttttttgttgaattaagggatacgcaaattaaaacattatatgtaattataaaaaactggaaataatacaatgaactggataaataaattatggcatcttcccataattaaatagtataaagccattaaaaagaatgatatctgtatttactgaaataaagaatacacttatgggttatcttacatcatatagctgagaaattaaaaaagcaatagccctaaaaagaattgaaatacatttggttaaaaacatattctacaacagagaatatgcacataggcaggttccaggacctcaagtggtgagtccaaagtttttccctgccagggctgtcatctggggtaattttgccccaaggagatatttgaccatgactgcagacattttttattgtcacaactcggggcttgtggggaggtgctattggcatctagtgagtagacaccagggttgctattaagcatcctacagtgcatgggatagctccttttmaaaagaattatccagtttccagtagtgctgaggtagagaaactctgggtgggagggaagggggggatgcagcatatctatctgtctatcactgtctcatatctgcgtggagatctgagctacatggagtgggggtgccacttcaagtcttcactttaaaaaaactgtgcccacatctggcagctgtcatgagtcatagtaattggcatgtttaccagcaactattagaatagccgaaatatttcctaagtcactcagcctgagtaatttgctaatttttagttgttttctgcatagttcaggcttgagatgcatctctaaaatattgtaggaggtatctgctttgcgactacttttctgcttctcttctctgtggataattagaaggatttatttcctggagatgtcaagtaggcacctttctcattacctaaattcacttagagaaaaataaatcagtatacagatgaaagtacaggaagtgaccatgggagttgttttaatccagagaaaataagttctcctatgtataatcagagaactgctgaagaattcttcacctctctttttttttttgaataaccttcctacatccccaaaactgtgttgaggcagaatttataacttgcttaatttatagtacaaagaagagcctctcctctctaggtttttttgtttgtttgcttttttaatcagtacagcctaagttccagggtcgtgtgaggtgaaaggggatcatacgtttcccaggatagagtgaaaatatcagtttgagtagaaatagtgttattatccatcttttagaaagatccaatgaaagaaaatcagatatgtgccaaggaacagcacaatctggaagttgctgcataaggagaaggaaaatattgccagaaggctgggtataa

SEQ ID NO: 79925 - DNA, 546 bp, Homo sapiens
ctgtacatctcaaagggagtcaacttcacatatttgttcattaaacaatagtaatgatcttaataaggtactatgcatatttgatgagttttaatgtaaagcatatttcctaatatacaaaatataccaaaagtaatctttcaattcgagtaattttcttccctagaatttattaasagcagaaacttccaaatgaatagaaatgaattatatataaatgattttttttctggaaaatcccacgcaaccaaaagagttaatattgcataaaaaatagataggcaaattaactgtggtacaagcattaaaagtatataaatgctggccaaaaaagctaaacagcccatggaaaaggacaactgtaattcaacaaatttaaattctaggcctaagggtaacaaaaatatagaccctaataagatggttccaactcaagttttcagaggaatcactatttctgtggaatgactacaaatagtttctaatgctattatcaacaaaataataaaagcctggaggcaagataaaacgcacatcaacacttta

SEQ ID NO: 79926 - DNA, 1973 bp, Homo sapiens
cattgatgtaaattttagggactccaaaactcactgtgcctgaactatgaatgtcccccaagctgcttagcccttgtgtctgcttttaaaagttctgctttgcttctatatttttaaagatttcttcctcatgagatatcagcagttacttctcaccacgttatcatgactcctttggatgaaaaaccaataaccagtgtgtatcaggattgtctgtagtgtaagagttcataatcaatgaatgagaggactctctgatgagtcagggatgtggatttttgacatttgttttggcagctgagaataaggggtagtttttttctttctaattttcaccccaatagcagctgctttctgagagttttctagataaatgtgaaatgagtgtagatcgatttttccatgtaactaatttacattctgggtgaactcattttgcttctgacttagaggtgctttcatttccttctcatctgcaccctgttcttggagaagctgctccacccctagcccatgatacatgacgcatgacccagcccactgggccccctgatgccacctgggccaatcagattttccagtcaggaaatttgcaattgagattcagagctggaaagagtcacctgytctgatgggagctgcatttgtggactgtgactcagaggctgaggccccagggagccgaccccatgggccctgggcaagcccagagtgaatgtggaagccgggctgtggaggttccctgagcagacagtccgggtgtgtgtgcgtgtgtttgtctgtgtgtgtgcgcacatgctggaggatggggcagaacgtagggtcccaagcccctgagggaggggcttgtcctaatcaagtcacagaaatcagggcagggagagcatgaaagagtcttgttcccctctctgcatttgggagattcaggccccggggagaggagagactgacccatgatcatccagaggggacttggttaagctggtcctgagctctgccatgcatgttctgttttcctaccctggcagctggctcagagcatggataggccttgtctctcttctctttctttctgccaaattcttttctgttgggaatctgaacagtgggtagatgcagtcatggcatgatttgctccaaatatctccccaacaggtggtcacggtgtctacaattccatcaccagatcttccatttccaggagtaaccctgggcaggtgtataccatgtgtcttgtttacagtggggattaatagttcaaggagcccaaggtaaggaaacccatatttgatgaatctccagacaatttatacccaccacacagccttatgaagatagcccaatcacgcctattttacagaggggaaaactgaagttctgagaggtgagctgacttgcccaaggtcacatagcacgtcaaaatcggggctcacatctgcatccagagtccaggctctttgccctaaagcaagctcatctgatctgggagctggggataggctgaggaggcgagcgggtgacaaaatgaacttgtcccatggagtcattcagtgggaaaagttgtggtttgggaattagggccaaatggctccttaaccttgggcatcatggtgggcctcaatttccttacatctgcaggagggaaggaccggatgtactctgcaatcccagaaaactcaatgggctgaggcaggaggacctactggccattgaagactgtccactcctggtccagattccaagtgaccaggcagaaagagcatggactttggagtttgattgcctggctttaaatccccctgctccactcgctactgtggtgtggactcaagtaggttaattaactgctccagctgcagttttctcatctataaaatggggataataatagtatctacctcatagtaatgattaaataagttaatgcctgtaaagccgcgacagtgctggatacctaggaaatgcttaatgca

SEQ ID NO: 79927 - DNA, 1118 bp, Homo sapiens
ttacagaacataggttccaccctctgattcagaacccrgcagaaggccctaaagaaggtaagacaaattttgcctcaattcagaggagcagggtgtgtgctactcagaaagataggagcccattcgacaaatgcgtaggaattttgtatcaggcaaagtcactgccatttctctgctctcccatacattcctggacatcactgaaagaagttgaaggaagtgcacaggtagagaaagtttatatcctggcaaaatttgtcacctaagattagatattgcaagagtgggcataaagagaaggcacagttggtgcaggaggtgaagtttctcatgttctgtgtagttcaaaggagcattgtaactgcatctgaggctttagtttagtcatagaaccagtcaatctgaaaagagaaaatatgtgcctaagatctgcagattcagtgcctactgggcatcacactgagaaaatagtgaaaaacaatctttaaaaaaaattttttggggacagaatcctgctttgtcacccaggctggagtgtagtggcacaaacagagctcacttcagccttgacttcctgggctcaagcgatcctcccacctctggctccaagtagctgccaccatgtccgggtaatttttttgtattttttgtagagatgggattacactttgttgcctggcttgtctcgaactcctgagccaaggtgggaggatctctagagcccaagagtttgagaccagcctgggtaacatggtgagactccgtttctatttttttatttaaaaaattaaaaattaaattaaatgttaaaaataaatacatgtaaatatttcgagaaatagtgaccaaaaactttccaaattcaatgaagaacattaatgaaagcaataaaaagtacaatgaactcaaagtaggatacagagatccactcgtagacacatcagagtcaaactgctaaaagccaaagatgaaaaaaaaatcatgaaagcagcaagagcaaaaaacactcatcacagaatggttagagcatctgaatctggagttaatgtttttaatcaataaaggagagagaccagtaagggtcaatagatacagcaaccagcaggagtggaaagtaa

SEQ ID NO: 79928 - DNA, 1118 bp, Homo sapiens
ttacagaacataggttccaccctctgattcagaacccggcagaaggccctaaagaaggtaagacaaattttgcctcaattcagaggagcagggtgtgtgctactcagaaagataggagcccattcgacaaatgcgtaggaattttgtatcaggcaaagtcactgccatttctctgctctcccatacattcctggacatcactgaaagaagttgaaggaagtgcacaggtagagaaagtttatatcctggcaaaatttgtcacctaagattagatattgcaagagtgggcataaagagaaggcacagttggtgcaggaggtgaagtttctcatgttctgtgtagttcaaaggagcattgtaactgcatctgaggctttagtttagtcatagaaccagtcaatctgaaaagagaaaatatgtgcctaagatctgcagattcagtgcctactgggcatcacactgagaaaatagtgaaaaacaatctttaaaaaaaattttttggggacagaatcctgctttgtcacccaggctggagtgtagtggcacaaacagagctcacttcagccttgacttcctgggctcaagcgatcctcccacctctggctccaagtagctgccaccatgtccgggtaatttttttgtattttttgtagagatgggattwcactttgttgcctggcttgtctcgaactcctgagccaaggtgggaggatctctagagcccaagagtttgagaccagcctgggtaacatggtgagactccgtttctatttttttatttaaaaaattaaaaattaaattaaatgttaaaaataaatacatgtaaatatttcgagaaatagtgaccaaaaactttccaaattcaatgaagaacattaatgaaagcaataaaaagtacaatgaactcaaagtaggatacagagatccactcgtagacacatcagagtcaaactgctaaaagccaaagatgaaaaaaaaatcatgaaagcagcaagagcaaaaaacactcatcacagaatggttagagcatctgaatctggagttaatgtttttaatcaataaaggagagagaccagtaagggtcaatagatacagcaaccagcaggagtggaaagtaa

SEQ ID NO: 79929 - DNA, 1118 bp, Homo sapiens
ttacagaacataggttccaccctctgattcagaacccggcagaaggccctaaagaaggtaagacaaattttgcctcaattcagaggagcagggtgtgtgctactcagaaagataggagcccattcgacaaatgcgtaggaattttgtatcaggcaaagtcactgccatttctctgctctcccatacattcctggacatcactgaaagaagttgaaggaagtgcacaggtagagaaagtttatatcctggcaaaatttgtcacctaagattagatattgcaagagtgggcataaagagaaggcacagttggtgcaggaggtgaagtttctcatgttctgtgtagttcaaaggagcattgtaactgcatctgaggctttagtttagtcatagaaccagtcaatctgaaaagagaaaatatgtgcctaagatctgcagattcagtgcctactgggcatcacactgagaaaatagtgaaaaacaatctttaaaaaaaattttttggggacagaatcctgctttgtcacccaggctggagtgtagtggcacaaacagagctcacttcagccttgacttcctgggctcaagcgatcctcccacctctggctccaagtagctgccaccatgtccgggtaatttttttgtattttttgtagagatgggattacactttgttgcctggcttgtctcgaactcctgagccaaggtgggaggatctctagagcccaagagtttgagaccagcctgggtaacatggtgagactccgtttctatttttttatttaaaaaattaaaaattaaattaaatgttaaaaataaatacatgtaaatatttcgagaaatagtgaccaaaaactttccaaattcaatgaagaacattaatgaaagcaataaaaagtacaatgaactcaaagtaggatacagagatccactcgtagacacatcagagtcaaactgctaaaagccaaagatgaaaaaaaaatcatgaaagcagcaagagcaaaaaasactcatcacagaatggttagagcatctgaatctggagttaatgtttttaatcaataaaggagagagaccagtaagggtcaatagatacagcaaccagcaggagtggaaagtaa

SEQ ID NO: 79930 - DNA, 1060 bp, Homo sapiens
tttccagcggttccttgtaaatttacatcttttccataagaatagcccaaaaacctcaaactcatcatcaaaaagctgatgtttgactattaaacatgaacttgtacaaaattttgaaaataacacttatatagtcaccaawctatttatagctgccaggacatattatatacacagagatattttccttttctctttttttaagtgtattggaaacccttgaactactctattgtctgtctgtgtatctatctatctatctatctatctatctatctatctatctatctatctatctacctacctacctatctatctacctacctacctacctacctacctgtctacctatttatttcttcatacattcttttatttagaaagcaaagaattcaactagaatgttctgggtcctgggaaggatgtccttgaatcttagaatttttatagatgtcccctatctactcttaagccataagtgaacaatatcaatgggaggaatccagtacactagcatctttcatgttcagaaaaattgagttctaaagacataaaatggctcatctaggggaaagcagcatgttttgagcaggactgagactggaagaccagtttccttctccattactattttcacttcactgaaacatagtaggatgattttacttgtattatgtcctatttcaaattgcatgctttctaacagttctagaagaagtagagggaattgagaagaaataaataaaatgagatttttaaaggcttaatttaagaggatcaaatgaccacctttgtgatttggattataaagtttggataaattacctaactttcttccagtatatgaaagaagatttaagatagagtagtagacagtgccttggcatcatagctgaggttaaaacaagaagaaatagacttcataatagtggatttgtactacaattgaagaactttctaattccaaaagttggaaaaaatactagattctatgagtaaggccatagaagactcttctttggggatttttttaaaaataaaagaacaggccatcatatca

SEQ ID NO: 79931 - DNA, 1060 bp, Homo sapiens
tttccagcggttccttgtaaatttacatcttttccataagaatagcccaaaaacctcaaactcatcatcaaaaagctgatgtttgactattaaacatgaacttgtacaaaattttgaaaataacacttatatagtcaccaatctatttatagctgccaggacatattatatacacagagatattttccttttctctttttttaagtgtattggaaacccttgaactactctattgtctgtctgtgtatctatctatctatctatctatctatctatctatctatctatctatctatctacctacctacctatctatctacctacctacctacctacctacctgtctacctatttatttcttcatacattcttttatttagaaagcaaagaattcaactagaatgttctgggtcctgggaaggatgtccttgaatcttagaatttttatagatgtcccctatctactcttaagccataagtgaacaatatcaatgggaggaatccagtacactagcatctttcatgttcagaaaaattgagttctaaagacataaaatggctcatctaggggaaagcagcatgttttgagcaggactgagactggaagaccagtttccttctccattactattttcacttcactgaaacatagtaggatgattttacttgtattatgtcctatttcaaattgcatgctttctaacagttctagaagaagtagagggaattgagaagaaataaataaaatgagatttttaaaggcttaatttaagaggatcaaatgaccacctttgtgatttggattataaagtttggataaattacckaactttcttccagtatatgaaagaagatttaagatagagtagtagacagtgccttggcatcatagctgaggttaaaacaagaagaaatagacttcataatagtggatttgtactacaattgaagaactttctaattccaaaagttggaaaaaatactagattctatgagtaaggccatagaagactcttctttggggatttttttaaaaataaaagaacaggccatcatatca

SEQ ID NO: 79932 - DNA, 473 bp, Homo sapiens
attcagacatgcaggtggacactgcagtagtcatctaaaacaattctttcttctctctgaactagttcaatgtgaaaatatatagctttccatgccctgttaatgtcttaatgaaacctgcttccttaagagtgtcctgcaccaagaatacagacatgattagtcctaaggtgccactacaatccatagagcgccgtgggcactaagagagaaatctcaatgcacaggtaaatttctcaagttctctgaggaactaaggatatttacacttaaagagttatattccaaccacatataaaaaacacataattaaatcacagaatccactccagtgaaatataattcaagcagcctttgtaacctataaagaaaaaggaattagcttccagtgctttccctttctaaagmataaagcataaagcagcatggcacatgtatacatatgtaactaacctgcacattgtgcacatgta

SEQ ID NO: 79933 - DNA, 582 bp, Homo sapiens
ttatccagttctcaccatgcatttgaagagttcacttttttttttttttttaactcatttgctacctttatcatatgctaaatttatgtgtctatttctgggccttctgttctgtaccattatcatgagtactacacactttaagtattaaggctttataataagtaagttctttaggacaagtgcccttcttcctcagtttccccaggtagtcctgcatgtttagtcttctaggtgaacattaaaatcttctaaaaagtttctattttcatgagaatagtgttgaatttacaaattaatttggagattactggctgaatactaccctgagaagctgtaaagtggcttaatctgggaagcaagccctagattgaaatttcatcttggctgttttaacaggtgcctgacctcggaaaatttatttgcttctcagtttttatatatatgaraggaggactttaacgtctgccctgtaggattaaatgagataaaaagcataaaatgccttcttgggagtaagcaatcctttcttcacatggtccattctagtcaactcacaaatccctgagagggaagcctcca

SEQ ID NO: 79934 - DNA, 904 bp, Homo sapiens
gcatatatatagatgttaagaggtacagtcccacacaagctggcagtcacttttgctggttctttacctattgcttttaataaatcattattactttctgtgtacagcctctcagccaaactataaatctttggaagataattggcatctacttatgtaaagcaataatcatagtgtatttactatttgctgagtatttgttacatgggagacactgaaatggctctcttaattttcacagtaagcccaggaaatatgtattattaacctcacactacagatgaggaaagttaaataatatgttcaacactattttgttagcaagggtgggctgggaattggaatttgagttttttttctggrtagggtctctttaggaatctgtaaacatttgctaaatgagtgaatgagtaagggactctaaaacctatatttttaatctctatgttatacaggactaatttatagccatgataataagccttggacattgcatatgttccctaactgtaggtgattaaaattacataaaattaacagttgtcttcaaaatgtaacactaagggaaaaaaatccaggaagctgcacaagtaaggggacctatgagtggaggttccctaccctatacactggtcatctttatagccatcactgaccaccaccgttccctaggtctgaaagtggactccaacaggccgcacctatcaaggactggccaaaagaaatagatcggtttcgccttgggccattaaattcacacatcaagattatgtcttcagggaaccggaagacattggcagaggacttcctgtgagcaagtcatggtgctagagcctagggttgagttccaaccttctcatccacagtctgggttctggagtccatttccactatgtgggatgca

SEQ ID NO: 79935 - DNA, 904 bp, Homo sapiens
gcatatatatagatgttaagaggtacagtcccacacaagctggcagtcacttttgctggttctttacctattgcttttaataaatcattattactttctgtgtacagcctctcagccaaactataaatctttggaagataattggcatctacttatgtaaagcaataatcatagtgtatttactatttgctgagtatttgttacatgggagacactgaaatggctctcttaattttcacagtaagcccaggaaatatgtattattaacctcacactacagatgaggaaagttaaataatatgttcaacactattttgttagcaagggtgggctgggaattggaatttgagttttttttctggatagggtctctttaggaatctgtaaacatttgctaaatgagtgaatgagtaagggactctaaaacctatatttttaatctctatgttatacaggactaatttatagccatgataataagccttggacattgcatatgttccctaactgtaggtgattaaaattacataaaattaacagttgtcttcaaaatgtaacactaagggaaaaaaatccaggaagctgcacaagtaaggggacctatgagtggaggttccctaccctatacactggtcatctttatagccatcactgaccaccaccgttccctaggtctgaamgtggactccaacaggccgcacctatcaaggactggccaaaagaaatagatcggtttcgccttgggccattaaattcacacatcaagattatgtcttcagggaaccggaagacattggcagaggacttcctgtgagcaagtcatggtgctagagcctagggttgagttccaaccttctcatccacagtctgggttctggagtccatttccactatgtgggatgca

SEQ ID NO: 79936 - DNA, 904 bp, Homo sapiens
gcatatatatagatgttaagaggtacagtcccacacaagctggcagtcacttttgctggttctttacctattgcttttaataaatcattattactttctgtgtacagcctctcagccaaactataaatctttggaagataattggcatctacttatgtaaagcaataatcatagtgtatttactatttgctgagtatttgttacatgggagacactgaaatggctctcttaattttcacagtaagcccaggaaatatgtattattaacctcacactacagatgaggaaagttaaataatatgttcaacactattttgttagcaagggtgggctgggaattggaatttgagttttttttctggatagggtctctttaggaatctgtaaacatttgctaaatgagtgaatgagtaagggactctaaaacctatatttttaatctctatgttatacaggactaatttatagccatgataataagccttggacattgcatatgttccctaactgtaggtgattaaaattacataaaattaacagttgtcttcaaaatgtaacactaagggaaaaaaatccaggaagctgcacaagtaaggggacctatgagtggaggttccctaccctatacactggtcatctttatagccatcactgaccaccaccgttccctaggtctgaaagtggactccaacaggccgcacctatcaaggactggccaaaagaaatagatcggtttcgccttgggccattaaattcacacatcaagattatgtcttcagggaaccggaagacattggcagaggacttcctgtgagcaagtcatggtgctagagcctagggttgagttccaaccttctcayccacagtctgggttctggagtccatttccactatgtgggatgca

SEQ ID NO: 79937 - DNA, 830 bp, Homo sapiens
tcccacagtttytgtagatcaggagtcaaccatgacttagttgggtactctgctttagggtgtttcacaaagctgcaattaagttgctggctagggctgcaatctcatctgagactcaactggggaagcatgtgcttccaagctcacatgattgttggcaggattcagtaccttatagattgtttgacctaaagcttcagtacttttctggttgttgcctggggtccacctttagtagcttccatgtggacctctccgtatagcagcttgcttcattaaagccaggaagacagtcaatagagaaactccgccaacaatgtagcataaattatgaaagtgacacccatcatagttgctgcattctaatggttgaaagcacgtcagaggtcccatccatactcagaaggaaggggctacacaaaggcataagtaccaggagatggggataatttgggggtcatattgtagtccatctgctacagattttgtctttcatatataagtatttaatctactttatattaattgttgtctctattctgacttttattttgtatgaataacctattgtcctaaagagattgaataatcatgtttttttgtttgttttttttccccactaaccttcaatgccatctctaccaaatatcaagtctccgtattttgtaggaggctactttgggctttctcttctattccactggcaaatttgattacatcaatggcaataccacactgtctttattactacagtcttattgttagccttgaaatctggcaagatgagtctttattttctttctcattgttgtcttggattttcttaagcc

SEQ ID NO: 79938 - DNA, 830 bp, Homo sapiens
tcccacagtttctgtagatcaggagtcaaccatgacttagttgggtactctgctttagggtgtttcacaaagctgcaattaagttgctggctagggctgcaatctcatctgagactcaactggggaagcatgtgcttccaagctcacatgattgttggcaggattcagtaccttatagattgtttgacctaaagcttcagtacttttctggttgttgcctggggtccacctttagtagcttccatgtggacctctccgtatagcagcttgcttcattaaagccaggaagacagtcaatagagaaactcygccaacaatgtagcataaattatgaaagtgacacccatcatagttgctgcattctaatggttgaaagcacgtcagaggtcccatccatactcagaaggaaggggctacacaaaggcataagtaccaggagatggggataatttgggggtcatattgtagtccatctgctacagattttgtctttcatatataagtatttaatctactttatattaattgttgtctctattctgacttttattttgtatgaataacctattgtcctaaagagattgaataatcatgtttttttgtttgttttttttccccactaaccttcaatgccatctctaccaaatatcaagtctccgtattttgtaggaggctactttgggctttctcttctattccactggcaaatttgattacatcaatggcaataccacactgtctttattactacagtcttattgttagccttgaaatctggcaagatgagtctttattttctttctcattgttgtcttggattttcttaagcc

SEQ ID NO: 79939 - DNA, 830 bp, Homo sapiens
tcccacagtttctgtagatcaggagtcaaccatgacttagttgggtactctgctttagggtgtttcacaaagctgcaattaagttgctggctagggctgcaatctcatctgagactcaactggggaagcatgtgcttccaagctcacatgattgttggcaggattcagtaccttatagattgtttgacctaaagcttcagtacttttctggttgttgcctggggtccacctttagtagcttccatgtggacctctccgtatagcagcttgcttcattaaagccaggaagacagtcaatagagaaactccgccaacaatgtagcataaattatgaaagtgacacccatcatagttgctgcattctaatggttgaaagcacgtcagrggtcccatccatactcagaaggaaggggctacacaaaggcataagtaccaggagatggggataatttgggggtcatattgtagtccatctgctacagattttgtctttcatatataagtatttaatctactttatattaattgttgtctctattctgacttttattttgtatgaataacctattgtcctaaagagattgaataatcatgtttttttgtttgttttttttccccactaaccttcaatgccatctctaccaaatatcaagtctccgtattttgtaggaggctactttgggctttctcttctattccactggcaaatttgattacatcaatggcaataccacactgtctttattactacagtcttattgttagccttgaaatctggcaagatgagtctttattttctttctcattgttgtcttggattttcttaagcc

SEQ ID NO: 79940 - DNA, 830 bp, Homo sapiens
tcccacagtttctgtagatcaggagtcaaccatgacttagttgggtactctgctttagggtgtttcacaaagctgcaattaagttgctggctagggctgcaatctcatctgagactcaactggggaagcatgtgcttccaagctcacatgattgttggcaggattcagtaccttatagattgtttgacctaaagcttcagtacttttctggttgttgcctggggtccacctttagtagcttccatgtggacctctccgtatagcagcttgcttcattaaagccaggaagacagtcaatagagaaactccgccaacaatgtagcataaattatgaaagtgacacccatcatagttgctgcattctaatggttgaaagcacgtcagaggtcccatccatactcagaaggaaggggctacacaaaggcataagtaccaggagatggggataatttgggggtcatattgtagtccatctgcyacagattttgtctttcatatataagtatttaatctactttatattaattgttgtctctattctgacttttattttgtatgaataacctattgtcctaaagagattgaataatcatgtttttttgtttgttttttttccccactaaccttcaatgccatctctaccaaatatcaagtctccgtattttgtaggaggctactttgggctttctcttctattccactggcaaatttgattacatcaatggcaataccacactgtctttattactacagtcttattgttagccttgaaatctggcaagatgagtctttattttctttctcattgttgtcttggattttcttaagcc

SEQ ID NO: 79941 - DNA, 830 bp, Homo sapiens
tcccacagtttctgtagatcaggagtcaaccatgacttagttgggtactctgctttagggtgtttcacaaagctgcaattaagttgctggctagggctgcaatctcatctgagactcaactggggaagcatgtgcttccaagctcacatgattgttggcaggattcagtaccttatagattgtttgacctaaagcttcagtacttttctggttgttgcctggggtccacctttagtagcttccatgtggacctctccgtatagcagcttgcttcattaaagccaggaagacagtcaatagagaaactccgccaacaatgtagcataaattatgaaagtgacacccatcatagttgctgcattctaatggttgaaagcacgtcagaggtcccatccatactcagaaggaaggggctacacaaaggcataagtaccaggagatggggataatttgggggtcatattgtagtccatctgctacagattttgtctttcatatataagtatttaatctactttatattaattgttgtctctattctgacttttattttgtatgaataacctattgtcctaaagagattgaataatcatgtttttttgtttgttttttttccccactaaccttcaatgccatctctaccaaatatcaagtctccgtattttgtaggaggctactttgggctttctcttctattccactggcaaatttgattacatcaatggcaataccasactgtctttattactacagtcttattgttagccttgaaatctggcaagatgagtctttattttctttctcattgttgtcttggattttcttaagcc

SEQ ID NO: 79942 - DNA, 605 bp, Homo sapiens
agagcaattcctttccagagagacacctccaaaaaagcagggaggcagggaccacagcagattttataggcaggctggagaaggtggtgtttgatttactacgwagggaacacagattggtttgatcagtgatgatgtttacatagcatggggaaggctggccgccgtgccctaatcttaacacaaatgggctttccagttgatcggtgccatcttgtctgctttttactctacacgtggctgacaaagaggagggaagatggagccgccatcttgaacatgtctaggccctggttccttctggcattcacccgtgcaagctgagagcttgcttgtctatgtctgcagcttgattttacaagctgctcattgttaggaaacgatttggggctgcttttcattaaagagaaaagtcttaccgaggactcctagtcccttactttctccctaagtgatttcttaactcctatatcaatatgactaggttttatttctagagtgcttaatcttccaagttgaattaccataacagcatatatacatgttcaaatagatttctttcctaataaaggcttgatattgaatttacaggtatatttgtaaat

SEQ ID NO: 79943 - DNA, 605 bp, Homo sapiens
agagcaattcctttccagagagacacctccaaaaaagcagggaggcagggaccacagcagattttataggcaggctggagaaggtggtgtttgatttactacgtagggaacacagatwggtttgatcagtgatgatgtttacatagcatggggaaggctggccgccgtgccctaatcttaacacaaatgggctttccagttgatcggtgccatcttgtctgctttttactctacacgtggctgacaaagaggagggaagatggagccgccatcttgaacatgtctaggccctggttccttctggcattcacccgtgcaagctgagagcttgcttgtctatgtctgcagcttgattttacaagctgctcattgttaggaaacgatttggggctgcttttcattaaagagaaaagtcttaccgaggactcctagtcccttactttctccctaagtgatttcttaactcctatatcaatatgactaggttttatttctagagtgcttaatcttccaagttgaattaccataacagcatatatacatgttcaaatagatttctttcctaataaaggcttgatattgaatttacaggtatatttgtaaat

SEQ ID NO: 79944 - DNA, 605 bp, Homo sapiens
agagcaattcctttccagagagacacctccaaaaaagcagggaggcagggaccacagcagattttataggcaggctggagaaggtggtgtttgatttactacgtagggaacacagattggtttgatcagtgatgatgtttacatagcatggggaaggctggycgccgtgccctaatcttaacacaaatgggctttccagttgatcggtgccatcttgtctgctttttactctacacgtggctgacaaagaggagggaagatggagccgccatcttgaacatgtctaggccctggttccttctggcattcacccgtgcaagctgagagcttgcttgtctatgtctgcagcttgattttacaagctgctcattgttaggaaacgatttggggctgcttttcattaaagagaaaagtcttaccgaggactcctagtcccttactttctccctaagtgatttcttaactcctatatcaatatgactaggttttatttctagagtgcttaatcttccaagttgaattaccataacagcatatatacatgttcaaatagatttctttcctaataaaggcttgatattgaatttacaggtatatttgtaaat

SEQ ID NO: 79945 - DNA, 605 bp, Homo sapiens
agagcaattcctttccagagagacacctccaaaaaagcagggaggcagggaccacagcagattttataggcaggctggagaaggtggtgtttgatttactacgtagggaacacagattggtttgatcagtgatgatgtttacatagcatggggaaggctggccgccgtgccctaatcttaacacaaatgggctttccagttgatcggtgccatcttgtctgctttttactctacacgtggctgacaaagaggagggaagatggrgccgccatcttgaacatgtctaggccctggttccttctggcattcacccgtgcaagctgagagcttgcttgtctatgtctgcagcttgattttacaagctgctcattgttaggaaacgatttggggctgcttttcattaaagagaaaagtcttaccgaggactcctagtcccttactttctccctaagtgatttcttaactcctatatcaatatgactaggttttatttctagagtgcttaatcttccaagttgaattaccataacagcatatatacatgttcaaatagatttctttcctaataaaggcttgatattgaatttacaggtatatttgtaaat

SEQ ID NO: 79946 - DNA, 1144 bp, Homo sapiens
tttttctaaatattcttccaaattgatactgatgtatgcagtggtcaggttgaaaactgatgttctatactctgctcttctttctagatcacttcacacggtgcgctagatggcagaggcttcctaagggaaaggaagcctcatgccggctagtaagttactcatggggagatccttcacattacttttcataaaacgtagtacagtctctgaatgtggagaggcatcaaaagttcaaaaggcatggtaccmaaaggcaccatttagcaccatctcaaaatgatggtagcaggtttcaaacccacatcgtctgtttccggagccccctccccacgccccctcccccgtttttttcttttttttttttttttttttttttgacatggagtttcattcttgttgcccaggctggagtgcagtggcgtgatctcggctcatcacaacctctgcctcctgggttcgagcgattctcctgcctcagcctcccgagtagctgccattacaggcatgcgccaccactcccagctaattttgtattttcagtagagatggtgtttctccatgttcgttaggctggtctcgaactcctgacctcaggtgttccgcccaccttggcctcccaaagtgctgggattacaggcatgagccactgcacccggcaatcccccatttttttttttttaccagagtctctgtaaataatacagccctagaacgtggcttcattttatccatattaatttaaagtcttcataagaagcaaattgaaccttagctaatatttaaccttattatcaaaagacttaactagtctttattatgctgacaccagtctcctaaaataaaatagttctgaccttataaggtttgactgtttcattgtaatatgacatttcagattcttaggaataattgctgtgctattttattttaattgccatgcacaacataaaacggaatgagaaattcttctcccaccaaacttgaactaacagatacttttttgataatgaatcatggaattttaagtgtttggttctgttttatttattttgtcattgacggtaatcacattgtttatattagcacgactaggctgactccacctgtgatatcaccatatatattattgtattttatattt

SEQ ID NO: 79947 - DNA, 1144 bp, Homo sapiens
tttttctaaatattcttccaaattgatactgatgtatgcagtggtcaggttgaaaactgatgttctatactctgctcttctttctagatcacttcacacggtgcgctagatggcagaggcttcctaagggaaaggaagcctcatgccggctagtaagttactcatggggagatccttcacattacttttcataaaacgtagtacagtctctgaatgtggagaggcatcaaaagttcaaaaggcatggtacccaaaggcaccatttagcaccatctcaaaatgatggtagcaggtttcaaaccyacatcgtctgtttccggagccccctccccacgccccctcccccgtttttttcttttttttttttttttttttttttgacatggagtttcattcttgttgcccaggctggagtgcagtggcgtgatctcggctcatcacaacctctgcctcctgggttcgagcgattctcctgcctcagcctcccgagtagctgccattacaggcatgcgccaccactcccagctaattttgtattttcagtagagatggtgtttctccatgttcgttaggctggtctcgaactcctgacctcaggtgttccgcccaccttggcctcccaaagtgctgggattacaggcatgagccactgcacccggcaatcccccatttttttttttttaccagagtctctgtaaataatacagccctagaacgtggcttcattttatccatattaatttaaagtcttcataagaagcaaattgaaccttagctaatatttaaccttattatcaaaagacttaactagtctttattatgctgacaccagtctcctaaaataaaatagttctgaccttataaggtttgactgtttcattgtaatatgacatttcagattcttaggaataattgctgtgctattttattttaattgccatgcacaacataaaacggaatgagaaattcttctcccaccaaacttgaactaacagatacttttttgataatgaatcatggaattttaagtgtttggttctgttttatttattttgtcattgacggtaatcacattgtttatattagcacgactaggctgactccacctgtgatatcaccatatatattattgtattttatattt

SEQ ID NO: 79948 - DNA, 698 bp, Homo sapiens
tgccttccggccaccgtcaactcatgtgtcctcccaagacctctgccttggcctgggtgtgtgcattgcttcgttggctctttggtatatacagggaagacctttggacacccactgtgtatgccaggcccccaaggatgtgacgacatgccaggatgttacaacatgatgatgccctctcaaaatcaaataggggaccacacgtgtgatagcatcgcacagagcgacacacacatgcacgcacatgcacgcacacacatgcaagagcgtgtataactggtgcaatctgaataagctctgtgggctgtaccaatgtcaatttcctggtgttgatattgtactctagttttgcaggatgtcaccattgagggaggctgggtgaggggtgcacaatccctccctgtatgtttctttgcaacttcctatgaatgtctatttcaaaacagaaagtcatgaaatcaacccagcagggaggctgtgtgataagggckgttgtggaaagacacagcagtgagtgcgggaggatgcaggagtacagagcagggcaggccccggagtaaccccgagggatggggggtcctcagcaggggtcactgtgtgcagagtctctgggtgcgagagtgtgccgcatttggatgcagggcggtcagtgggtggctcagggtgagtcgcaagcgtcaatgccagagaggtcagag

SEQ ID NO: 79949 - DNA, 798 bp, Homo sapiens
ccttgcaaaaggaccacattggctgctgagttgggacagtagtggccaggagaccaatggcggtggctttgagtaacatcgtactggtgtaggtggtgggaagtgctggggttccagctacattttgacagtagagctgacaagatctcctaaagaattgggtattgaatgtgtgagaaagaggagtcatggatgactccaaggtttttgggccaaggagctggcaaaatggagttgccgttttcagaagggaaagaccaagggggcaaacacatgaaaagaacattagcccctgaattttagatactttctttgctccatatgaaaggaacttgaaatttgaaaggatgcacatctctgattatataagtaaatattacagttgcctagttcttgagattacagttgatccgtgaacaacgcaggttggggtgcccaacctgtgcagtcagaaatccacgtataccttttgactccccaaaaacttaactactaatagcctactgttaatcagaagccttaccaataacatagtcaattaacatgttttgtatgttgtatgtattatatactgagattcctacagtaaagtaagctagagtcaaggaaaatgttattaagaaaatcataaggaagagagaatacatttacgatttgtttaatggaagtggatcatccgaaaggccttcctcctcatcgtcttcatgttgagtgggctgaggaggaggaggaggatgagtggctggtcatgctgtctctgggrcggcagaggcagaagaaaatccacatgtaaatgga

SEQ ID NO: 79950 - DNA, 563 bp, Homo sapiens
cgctttcctgttccatccctcccgccagatagcatcttagcagcacgtgccttcatttttggcagcccctccacttaaaacttgcagttccattcagcacaggtctgaaaatcctcatatatacaatgttagtaaatgaccaaatacattcctaaagcctgctcaccatttattcctttctatttccactttacagcaagaaacatactactcatccatcagcgggtgtaactcacctacattattacacaaccaaggcrttgaaaagacagaaagctcctttttaatgctctaagctcctagaaggccagggactgtttttaactcctctatacattgctcatgtcccataaccaaagaattaatgaagtgctgatgaaaagatatgaaagcccaacagcataaacacagagacaaaaacaaaacaagggtttcactccattcctgggaacagctggcagagcaaacacaaaatacttgaaagccacaggtaaggggaaaaaaattaagctgattgcttcatcccaaccaactctttcatacaagcagatgataaaacaaaa

SEQ ID NO: 79951 - DNA, 1803 bp, Homo sapiens
aggcaatggaaggatggcccaacatttttaacaaatattaatgtaatttaccacatcaacagatttaaaaagaaaaaatatgatattaatagatgcagaaaaaccattagaatattttttaactattgtgagggttgtaagtaatgacccaaataaatggagagatattttgtaagtggattgaaagattaaatatgaaaatgttaactctctaaaaatcagttcaggaatttaatataattctgtcaaaatattgacaggcaatttcaaagaactttacaaactgctcaaaaagtaaatggaagaacaatgagtggggcttttccttccaatgatgttacattagcacttttgggctaagtgaatcaactagaaaactagacaaaatatttctttaatttctttgaaagcattggaaagctaatagaaatagtgagggattacttggctcagaatcaggtatggagaccctggaaagcaattcccttctcatggaatagttgagaggctaagcagaattttgacagagactcgtgggctggcagaactgatactgaaatctaaaatcaatcaagagggtctctgtgaaaattccatcatctgagtaacctataaatattcaagttcttgctgcatgtctgattataaaatcatattaaagtatcctgattgataacattctatgtgcttaggaaaagcaaacagaaatcctttgtgaagaaagaaaatttcatcctagtcattaagatagttgtacaattttgcaaatacgttatctggcacaaaatttaaaataacccacaaaattaaggcaatatgcctgcaagatattatgtaatttgaaccgaaaccaagagaaatgacacacaaaaaaaatctgaaacgaacccacaggggctccagatgttaacgatcttcaggcacatgctttatattttattttaagttctgagatacatgtgcaggatgtgcaggtttgtcatataggtaaatgtgtatcatggtggtttgctgcacctatcaacccatcacctaggtattaagcccaacatgcattagctatttttccggatgctctccctcccctcactccacccccaacaggccacagtgtgtgttgytcccctccctgtgtccatgtgttctcattgttcagctcccacttataagtgagaacatgaagtgttgggttttctgttcctgcattagtttgctgaggataatggcttccagctccatccatgtccctgaaaggacataattgctttcattttatggctacaaagtattccatggtgtatatgtaccacattttctgtatccagtctatcattgatgggcatttggattgataacgtgtctttgctatggtgaacagtgcttcacaataaacctgcatgtatctttataacagaatgttttatattcctttgggtacaatgatatttctggttctaggtctttgaggaattgccacactgttttctacaatggttgacctaatttatattcccaccaacagtgtaaaagtgttcctatttctccacagcctcgccagcatctgttgtttcttgactttttaataattgtcaggcacatactttacatatctaagcttactatgtcaagaaaataaaagaaaaaattgaaaactttggcagaaaactgaaaactattaaaaacaaatggaatttcaataatataaaaatacgtaaactaaaaataagattagtagatttagacagatgaaaagagaattgtttgagaagaaatgggtccgaaaaaatctaaactgaatcaaaa

SEQ ID NO: 79952 - DNA, 1803 bp, Homo sapiens
aggcaatggaaggatggcccaacatttttaacaaatattaatgtaatttaccacatcaacagatttaaaaagaaaaaatatgatattaatagatgcagaaaaaccattagaatattttttaactattgtgagggttgtaagtaatgacccaaataaatggagagatattttgtaagtggattgaaagattaaatatgaaaatgttaactctctaaaaatcagttcaggaatttaatataattctgtcaaaatattgacaggcaatttcaaagaactttacaaactgctcaaaaagtaaatggaagaacaatgagtggggcttttccttccaatgatgttacattagcacttttgggctaagtgaatcaactagaaaactagacaaaatatttctttaatttctttgaaagcattggaaagctaatagaaatagtgagggattacttggctcagaatcaggtatggagaccctggaaagcaattcccttctcatggaatagttgagaggctaagcagaattttgacagagactcgtgggctggcagaactgatactgaaatctaaaatcaatcaagagggtctctgtgaaaattccatcatctgagtaacctataaatattcaagttcttgctgcatgtctgattataaaatcatattaaagtatcctgattgataacattctatgtgcttaggaaaagcaaacagaaatcctttgtgaagaaagaaaatttcatcctagtcattaagatagttgtacaattttgcaaatacgttatctggcacaaaatttaaaataacccacaaaattaaggcaatatgcctgcaagatattatgtaatttgaaccgaaaccaagagaaatgacacacaaaaaaaatctgaaacgaacccacaggggctccagatgttaacgatcttcaggcacatgctttatattttattttaagttctgagatacatgtgcaggatgtgcaggtttgtcatataggtaaatgtgtatcatggtggtttgctgcacctatcaacccatcacctaggtattaagcccaacatgcattagctatttttccggatgctctccctcccctcactccacccccaacaggccacagtgtgtgttgttcccctccctgtgtccatgtgttctcattgttcagctcccacttataagtgagaacatgaagtgttgggttttctgttcctgcattagtttgctgaggataatggcttccagctccatccatgtccctgaaaggacataattgctttcattttatggctacaaagtattccatggtgtatatgtaccacattttctgtatccagtctatcattgatgggcatttggattgataacgtgtctttgctatggtgaacagtgcttcacaataaacstgcatgtatctttataacagaatgttttatattcctttgggtacaatgatatttctggttctaggtctttgaggaattgccacactgttttctacaatggttgacctaatttatattcccaccaacagtgtaaaagtgttcctatttctccacagcctcgccagcatctgttgtttcttgactttttaataattgtcaggcacatactttacatatctaagcttactatgtcaagaaaataaaagaaaaaattgaaaactttggcagaaaactgaaaactattaaaaacaaatggaatttcaataatataaaaatacgtaaactaaaaataagattagtagatttagacagatgaaaagagaattgtttgagaagaaatgggtccgaaaaaatctaaactgaatcaaaa

SEQ ID NO: 79953 - DNA, 1803 bp, Homo sapiens
aggcaatggaaggatggcccaacatttttaacaaatattaatgtaatttaccacatcaacagatttaaaaagaaaaaatatgatattaatagatgcagaaaaaccattagaatattttttaactattgtgagggttgtaagtaatgacccaaataaatggagagatattttgtaagtggattgaaagattaaatatgaaaatgttaactctctaaaaatcagttcaggaatttaatataattctgtcaaaatattgacaggcaatttcaaagaactttacaaactgctcaaaaagtaaatggaagaacaatgagtggggcttttccttccaatgatgttacattagcacttttgggctaagtgaatcaactagaaaactagacaaaatatttctttaatttctttgaaagcattggaaagctaatagaaatagtgagggattacttggctcagaatcaggtatggagaccctggaaagcaattcccttctcatggaatagttgagaggctaagcagaattttgacagagactcgtgggctggcagaactgatactgaaatctaaaatcaatcaagagggtctctgtgaaaattccatcatctgagtaacctataaatattcaagttcttgctgcatgtctgattataaaatcatattaaagtatcctgattgataacattctatgtgcttaggaaaagcaaacagaaatcctttgtgaagaaagaaaatttcatcctagtcattaagatagttgtacaattttgcaaatacgttatctggcacaaaatttaaaataacccacaaaattaaggcaatatgcctgcaagatattatgtaatttgaaccgaaaccaagagaaatgacacacaaaaaaaatctgaaacgaacccacaggggctccagatgttaacgatcttcaggcacatgctttatattttattttaagttctgagatacatgtgcaggatgtgcaggtttgtcatataggtaaatgtgtatcatggtggtttgctgcacctatcaacccatcacctaggtattaagcccaacatgcattagctatttttccggatgctctccctcccctcactccacccccaacaggccacagtgtgtgttgttcccctccctgtgtccatgtgttctcattgttcagctcccacttataagtgagaacatgaagtgttgggttttctgttcctgcattagtttgctgaggataatggcttccagctccatccatgtccctgaaaggacataattgctttcattttatggctacaaagtattccatggtgtatatgtaccacattttctgtatccagtctatcattgatgggcatttggattgataacgtgtctttgctatggtgaacagtgcttcacaataaacctgcatgtatctttataacagaatgttttatattcctttgggtacaatgatatttctggttctaggtctttgaggaattgccacactgttttctacaatggttgacctaatttatattcccaccaacartgtaaaagtgttcctatttctccacagcctcgccagcatctgttgtttcttgactttttaataattgtcaggcacatactttacatatctaagcttactatgtcaagaaaataaaagaaaaaattgaaaactttggcagaaaactgaaaactattaaaaacaaatggaatttcaataatataaaaatacgtaaactaaaaataagattagtagatttagacagatgaaaagagaattgtttgagaagaaatgggtccgaaaaaatctaaactgaatcaaaa

SEQ ID NO: 79954 - DNA, 1019 bp, Homo sapiens
aaagctttaaacttctgcagtaagttgagagaagggttgagaagaggaaaagaacttctcattttctatcagataagaatcacattagaaactaagtacaagattagacaacaaattatgtggtcaaataatatagtcattagcyacctaaacattttaattccagatattatttaattccatataataactgaattcttgtgagtggattacaggtttttgatcccaaaattccagagctttcaactctctgaatttgtagtcctgaatatcccagtggtgggggttcccagcattgtgggtgctacttgcaaggccatagaatctagatggccctgtcttgaccctgaaatgaaccttaagccttagaacaaagtcatgcagatgccccatttgataataatcttattcacctgtgctctggtcctcggtttctgcatgtgttagcattgcattgataactcagaatcttgataaacacttaatatttgggcctgaagcattaaactttctttttattgtatatacttaaaaaatagaactcactgccctatcatacattgtagccctcttattctttggtctttcatatgcattagttaaatcccttaaagtagacattcataaaaacttacattgtttattggagtataaaatattacccaagtttcttcatgagttgacatgagctgttttaaatactggtgtattttcagaacagtaaaattactgaatatcagaaaaaatgttaattgatgatgaagcttattcccaaaatgccttttgtgcatatgatacttggaaagtcactaatgtgcctcagttaatacatcagtaaaatgttgtgtttcttttccagtgtagtgtttttggaatataaattccccatgctagtatagtatctcagcaaagagaatttccccccaggaggctcagtaaaggaataccgtgtcttacccatcgttatgatggaaggctgctttgaaaatggctgttttaccttataaggttaaaatttt

SEQ ID NO: 79955 - DNA, 1268 bp, Homo sapiens
gcagtaataattagcctaaccaccaaaaaaaaaaaaaaaaaaaaaaacagctcaggaccagaaagatttacagctgaatctaccagaggtacaaagaagagccagtaccatttatactgaaactatcccaacaaactttttaaacttttgattgaaaaaatatatgtaaagacatgtccttttgagtcaagttataaaagccatcaaccacaaaagtgctcatttattcattcatttgttcaaaccatagatttttgtcagatgtctgttttatgtctggaaaygtcagataccagaaatttcacaataattaaaaatcgaggtggccttaagtcaatcgtgaatgcaaagcaataccaataaaaatatgaacaatatttttacaagtctatacaaaagttcatattcaaaataaaatatgcaagaatagacatgcaagaataactacaaaaataattaaaaatagagctatcagaggaagtagacatatgagatactaaatatatcataaattaaacagtaaggccctagcacatgaataattagacaagaaaacagaatagaaagttcaaaaataggctcaaatacatttactacataatataagtaacatctcaagtcatggaaataaaaaactttttataaattattttggtactacaaaatatctatttgaaaaaagataaagtaggatctattatctcacaccatacacaaaaataaactccaatggataagagatgtaaatatatataatgaaactatacatatactaaaagaaagcaggtggggaaaagctaacttatgacttaaaatccagagtccataaaggtaaacaatgataaattttaatacataaaattttaatgaaataacataagcaaaatcaaaggcaaataagaaacagggaaaatatatatttgtaatatataaaatggaaaaagaagctactgtccctaataaacacagaacccttacaatccagggaaagacccagcacctgatggaaaagtggccgaaatacacaagtaaacaattcacacaaaaaatatagaaatggctcatagacatatgaaaagatgttccacctcacatattttttaaagaaaggaaaattaaaactatgctgatatttctcacctgtcagattgggaaacattcaaaatcttgaatatactttgttgatgaagctatggggaaatggacattctaatatattgctagtgggaatgcagaatggtacaatgtgggaagggaagtttcatgat

SEQ ID NO: 79956 - DNA, 2257 bp, Homo sapiens
ttatccatcaaacatgcaccatgcgtgctgtgctgggtgttgagggaaatcctgatcttctcagctgacatttccttcccagtagggatgcatccattagcgtaacatccccagcctcctgctgctgctctctcacttctcaagggaggtgaggttatttatccaaccgatgagtttggaaggagaaatgaaacatgagcagcttagccccttccagtctccctcctgagagcttgctggccaaggagaaccaacactctcttcttctcagcaccctaagtttacaagtgcaggcacccacatgggaagcctacggctggttagtactgtctgtgacagagtgttcagtctaattctgggatgctatattaagaagttcattgttactgcatatgtaagtcatcccccccaagccagtttgtgttagtaataaagtttatatacttacatataaactttatatgcacatgcatatacacacacacatttattgtgcaattggctctgaattggttctcaggcaggaaaaggtggtattcttttattggatcccttcagacccaacattggactctgaggttgtgggtagggagaagggaactcattgttccatttataataagctgactctttaccgaggtctcagcaagttctcacaacggtgataggtcagtgctagcattcctattttgctgctatggaaaatggagcttagttatgtgcctggaaccaccaataacaagcagtaaagccaaactcaacaccaggtctgcctgctgcagaaactcttgtctccctctgcattaccctatctcatacagataaacagtagagagtcactgtccttgaggagctctagcttagccacaacctgctattttagcctggctcctgaaagcctgacatttctgccatgttcctgggaagtatcatggctttatatttcttcagagtaacaaatctaagtatgtagtagtagcttcatatgacacatatatactgaaataattttaaatatactgagggaggaggattgctgtttatttgtaaagtaaagcactcttcagtaattcaaatatttatcatttatgtttttgtatatttaaatatttaaatgatggtgttcctttcattaggacatatcaattctgtaactatttttattgcagagttactttttaacattgatataaaaactgaagtgttgtactttttttgtctttacaattacaaggttggatttgaaatagatgtctgaaaaggttgtatgaagcataaaagtcctatttattaatttcttaactttgcaaagcagtttacagttgtcaaaacattttagcatgcattctctcattaaatcctgacaacaaccctgatgaaggagagtgcagctattatyatctctctgttcttaatgagaaaatatgtttcagcccattctttaatgtggctcaggttgcagataagggaagctgagagctcaggttttgaaatttatctcttgaattctggatctatgctgagaaacagttctctcttcaacagttgggaaaatgtagatttaccagcatatagtgcttgcaatcaatttagatactgagattagatagtcaatagtcaggactgctgagggagagtttttctgtagctacaaaaaagaaaaagaaaagaaggaaaaaaaaaacaggctttaaacagagatatgaaacaagatttggactgacattcagaatcaaggtccccaaaatttgttccacctgcccaagccctgaagcccagcaccccaccccattcctacacacacacacacacacacacaaacacacgcacacacgtgcgcgcacacacgcgcacacatacacacacacacgcacacacgcacacacgcgcgcgcacacacacacacacgcacacacacacacgtcattggccctgcagacaaagttctttctgccccttattcaaaatgcagttccaggccattctacagagacaggaaggagtaaagagccaaagacacttgaggcatgccgagagaacgttagaaccatttaagaacattcagtgctctgagtaagaaacatagtgagcagcttgggagtcagtacggaagcaattaaagtttgttttcttctatgtccttaaaagctactgagtgaatgctggaatgaatgatcagggttcagtgtaacttccacacagacgaaaatattttaaaaggttcggtttgtgataatggcacttagtttgagatgct

SEQ ID NO: 79957 - DNA, 2257 bp, Homo sapiens
ttatccatcaaacatgcaccatgcgtgctgtgctgggtgttgagggaaatcctgatcttctcagctgacatttccttcccagtagggatgcatccattagcgtaacatccccagcctcctgctgctgctctctcacttctcaagggaggtgaggttatttatccaaccgatgagtttggaaggagaaatgaaacatgagcagcttagccccttccagtctccctcctgagagcttgctggccaaggagaaccaacactctcttcttctcagcaccctaagtttacaagtgcaggcacccacatgggaagcctacggctggttagtactgtctgtgacagagtgttcagtctaattctgggatgctatattaagaagttcattgttactgcatatgtaagtcatcccccccaagccagtttgtgttagtaataaagtttatatacttacatataaactttatatgcacatgcatatacacacacacatttattgtgcaattggctctgaattggttctcaggcaggaaaaggtggtattcttttattggatcccttcagacccaacattggactctgaggttgtgggtagggagaagggaactcattgttccatttataataagctgactctttaccgaggtctcagcaagttctcacaacggtgataggtcagtgctagcattcctattttgctgctatggaaaatggagcttagttatgtgcctggaaccaccaataacaagcagtaaagccaaactcaacaccaggtctgcctgctgcagaaactcttgtctccctctgcattaccctatctcatacagataaacagtagagagtcactgtccttgaggagctctagcttagccacaacctgctattttagcctggctcctgaaagcctgacatttctgccatgttcctgggaagtatcatggctttatatttcttcagagtaacaaatctaagtatgtagtagtagcttcatatgacacatatatactgaaataattttaaatatactgagggaggaggattgctgtttatttgtaaagtaaagcactcttcagtaattcaaatatttatcatttatgtttttgtatatttaaatatttaaatgatggtgttcctttcattaggacatatcaattctgtaactatttttattgcagagttactttttaacattgatataaaaactgaagtgttgtactttttttgtctttacaattacaaggttggatttgaaatagatgtctgaaaaggttgtatgaagcataaaagtcctatttattaatttcttaactttgcaaagcagtttacagttgtcaaaacattttagcatgcattctctcattaaatcctgacaacaaccctgatgaaggagagtgcagctattattatctctctgttcttaatgagaaaatatgtttcagcccattctttaatgtggctcaggttgcagataagggaagctgagagctcaggttttgaaatttatctcttgaattctggatctatgctgagaaacagttctctcttcaacagttgggaaaatgtagatttaccagcatatagtgcttgcaatcaatttagatactgagattagatagtcaatagtcaggactgctgagggagagtttttctgtagctacaaaaaagaaaaagaaaagaaggaaaaaaaaaacaggctttaaacagagatatgaaacaagatttggactgacattcagaatcaaggtccccaaaatttgttccacctgcccaagccctgaagcccagcaccccaccccattcctacacacacacacacacacacacaaacacacgcacacacgtgcgcgcacacacgcgcacacatacacacacacacgcacacrcgcacacacgcgcgcgcacacacacacacacgcacacacacacacgtcattggccctgcagacaaagttctttctgccccttattcaaaatgcagttccaggccattctacagagacaggaaggagtaaagagccaaagacacttgaggcatgccgagagaacgttagaaccatttaagaacattcagtgctctgagtaagaaacatagtgagcagcttgggagtcagtacggaagcaattaaagtttgttttcttctatgtccttaaaagctactgagtgaatgctggaatgaatgatcagggttcagtgtaacttccacacagacgaaaatattttaaaaggttcggtttgtgataatggcacttagtttgagatgct

SEQ ID NO: 79958 - DNA, 2257 bp, Homo sapiens
ttatccatcaaacatgcaccatgcgtgctgtgctgggtgttgagggaaatcctgatcttctcagctgacatttccttcccagtagggatgcatccattagcgtaacatccccagcctcctgctgctgctctctcacttctcaagggaggtgaggttatttatccaaccgatgagtttggaaggagaaatgaaacatgagcagcttagccccttccagtctccctcctgagagcttgctggccaaggagaaccaacactctcttcttctcagcaccctaagtttacaagtgcaggcacccacatgggaagcctacggctggttagtactgtctgtgacagagtgttcagtctaattctgggatgctatattaagaagttcattgttactgcatatgtaagtcatcccccccaagccagtttgtgttagtaataaagtttatatacttacatataaactttatatgcacatgcatatacacacacacatttattgtgcaattggctctgaattggttctcaggcaggaaaaggtggtattcttttattggatcccttcagacccaacattggactctgaggttgtgggtagggagaagggaactcattgttccatttataataagctgactctttaccgaggtctcagcaagttctcacaacggtgataggtcagtgctagcattcctattttgctgctatggaaaatggagcttagttatgtgcctggaaccaccaataacaagcagtaaagccaaactcaacaccaggtctgcctgctgcagaaactcttgtctccctctgcattaccctatctcatacagataaacagtagagagtcactgtccttgaggagctctagcttagccacaacctgctattttagcctggctcctgaaagcctgacatttctgccatgttcctgggaagtatcatggctttatatttcttcagagtaacaaatctaagtatgtagtagtagcttcatatgacacatatatactgaaataattttaaatatactgagggaggaggattgctgtttatttgtaaagtaaagcactcttcagtaattcaaatatttatcatttatgtttttgtatatttaaatatttaaatgatggtgttcctttcattaggacatatcaattctgtaactatttttattgcagagttactttttaacattgatataaaaactgaagtgttgtactttttttgtctttacaattacaaggttggatttgaaatagatgtctgaaaaggttgtatgaagcataaaagtcctatttattaatttcttaactttgcaaagcagtttacagttgtcaaaacattttagcatgcattctctcattaaatcctgacaacaaccctgatgaaggagagtgcagctattattatctctctgttcttaatgagaaaatatgtttcagcccattctttaatgtggctcaggttgcagataagggaagctgagagctcaggttttgaaatttatctcttgaattctggatctatgctgagaaacagttctctcttcaacagttgggaaaatgtagatttaccagcatatagtgcttgcaatcaatttagatactgagattagatagtcaatagtcaggactgctgagggagagtttttctgtagctacaaaaaagaaaaagaaaagaaggaaaaaaaaaacaggctttaaacagagatatgaaacaagatttggactgacattcagaatcaaggtccccaaaatttgttccacctgcccaagccctgaagcccagcaccccaccccattcctacacacacacacacacacacacaaacacacgcacacacgtgcgcgcacacacgcgcacacatacacacacacacgcacacacgcacacacgcgcgcgcacacacacacacacgcacacacacacacgtcattggccctgcagacaaagttctttctgccccttattcaaaatgcagttccaggccattctacagagacaggaaggagtaaagagccaaagacacttgaggcatgccgagagaacgttagaaccatttaagaacattcagtgctctgagtaagaaacatagtgagcagcttgggagtcagtacrgaagcaattaaagtttgttttcttctatgtccttaaaagctactgagtgaatgctggaatgaatgatcagggttcagtgtaacttccacacagacgaaaatattttaaaaggttcggtttgtgataatggcacttagtttgagatgct

SEQ ID NO: 79959 - DNA, 1264 bp, Homo sapiens
attttcactgggcataatagtttttctaattccatagtgatttatttattattttcacatattcatctatgtyatactacacagcagaacaatggtacgtgtgctggttctgaacaactatagctgtgagaaatcaccagtgtacttaagaacaagaaaagcaaaaacttttgcaaggcattcctagaataacaaaaaggagcactgaacttgagttcaaaatgcccaggtttgactctcagctctgtcattttattactatgtgagcttggttaacttatatataaatgctatgtttctcatctataaaaagagaataattaatttactatttactggaataagttgatgtcaaattcaattagaatactcacagaaatgctttgcaaactctgtagcactacataaaaatattaagctttaacttgtgcgttgaattttcccaataattttttatttatagatatatttaatgtaattttttaactcataattcctgaatttggaatgacaacttttatttattcattcaatagatatttactgagtattcatttttttttagcaggcattgtggattcaataggaaacaagacaggcccagttcctgccgtgagggtataatgatttattggaaagaggtataaccaacaaaaaagagtggctgtgatcgattgaactctgattaacagagcaagtatgcttccactcagccatttcttttggacaaactttcttcattcaccgttttttccaagaacttcacaaagatcagaagtcagagcttggctgcacttaaatcactgagtgcctgcgtgataatcgatattataataagtgctgtgcaacaacaatatgcaatgttgttttttctgagaattgaggtaatcactttaaagttaacaaaattatgtatacgtctactgtcatactgttttgattcataataaaatttgcctcctttctcttttacactaaacacatactcttctttatgaagtcaaaattatcttaggcgttccaacttatctttttattttgattgaatattggaatgtagtagaaagaatgtcagcagctaaggactttggtgtgcatattccccaaatttgagtttaaatttaacaattgtttaagaaaggtccttatatggactttttatcatataacattataagcttaatgtttatataaaaattattcttgtcttctccaatgtgaactcaagtacatttagcaagttttaggaaagtagaccaagctt

SEQ ID NO: 79960 - DNA, 548 bp, Homo sapiens
atgcctgttgacagtgcccttgaatatgatgaagataatgatgtctttgcaccagtggagaaaagaagtgttctccttatagaagagaccatagtcactaataaytccaatgcacttgagtcccatgaattctatgccggtgctgcagcctctgaaactttttctcaaggaactccaattgatatcagtaccagaaaaaaacaccaaatcttgatcttcaaagaggaaaatcctaacaatgatattactgttctcaaaggttctactgccaattttaacaccaagactccaaggttcatgatttattctctaactgatccaagttggaatttttttgcctgaatttctagatgaaataaatctgaaaaatcatcctctaattggagacaacaccatcgtcattctccctaaaagcaaaaaaatgaagtaccctcttgttttagaactagaactaatgtcaacaatgggagagagcaagatgttcacagctgattccattgatcctgtcatgatcaccattcctacagaatacagggacctgttcaata

SEQ ID NO: 79961 - DNA, 518 bp, Homo sapiens
acggatgaaaaatattaatggttactattaataatagcaatatcactattaataataaaatagtggtatcactaatgttacttcaatcaatcataagtgawgttggtaataaagcaataattaatattaagattaataactaatattaaaagtgacattaatattaataattaattttaatatgcataatcatatctagaaaataatcactaatgattaataacgttatactgttaattaatattaccattgattatttataagactgatgtttaataattcagaatattattactgctaataccacagggggtgtacacctacctgtgatattgttcctaatatccagggatggagagcatgatattagttttcatactgcagtaggtctacgctcaccctgtgacacccatcctaatacccagcgggtagagtatgacatgactgccaacatagcaatcaaggtacagccacgcggtgatatcgctcctaatattcacggaagaagcgtatgaaat

SEQ ID NO: 79962 - DNA, 518 bp, Homo sapiens
acggatgaaaaatattaatggttactattaataatagcaatatcactattaataataaaatagtggtatcactaatgttacttcaatcaatcataagtgaagttggtaataaagcaataattaatattaagattaataactaatattaaaagtgacattaatattaataattaattttaatatgcataatcatatctagaaaataatcactaatgattaataacgttatactgttaattaatattaccattgattatttataagactgatgtttaataattcagaatattattactgctaataccacagggggtgtacacctacctgtgatattgttcctaatatccagggatggagagcatgatattagttttcatactgcagtaggtctacgctcaccctgtgacaccsatcctaatacccagcgggtagagtatgacatgactgccaacatagcaatcaaggtacagccacgcggtgatatcgctcctaatattcacggaagaagcgtatgaaat

SEQ ID NO: 79963 - DNA, 624 bp, Homo sapiens
cacctaagacagcctggggagtgaaaaagcaagtcataaaattgaaggtattttcccaaaagtttcataaggagaatatcttttaaaatcactcactgtctcactcacacacacacacacacacacacaccaacaagaataaaacaaccaagcacatatataaagtcaaaacacactttaggccaggcacggtggttcacgcctgtaatcccagcactttgggaggccgaggcgggcggatcatgaggtcaggagatcgagaccatcctggctaacayggtgaaaccccgtctctactaaaaatacaaaaaaaaaaaaaattagccaggcgtggtggcaggcgcctgtagtcccagctactcggggggctaaggcaggagaatggcgtgaacctgggaggcggagcttgcaataaaccgagatcacgccactgcactccagcctgggcgacagagcaagactctgtctcaaaaaaaaaaaaaaaaacacttcataaatacacaaatttagtcaatacacttgacttgggtagtggttatataagtgtgttcatattataaaagtttaccatgctgtttacatactattcgtacacattaaactatcttacaattcaataagata

SEQ ID NO: 79964 - DNA, 676 bp, Homo sapiens
ggtgctgatcatgtccaggtaaagaccacactctcttagaaattgcttagccactgtgggttggggtggaggtcaatgggaagggggatttatttccctgaccctggctggggtcctgcattttagtttgcactgggccccacaagttatgtagccagctctgaggagcagtcagtgagtagttgaatagtgtgatctggcatgctttttaaaaggatcactgactgctctgytgagggtagggaagcaagggtgaaaacagaaagaccagtaagaagacaagaatctagctgagagaattgtgtgtcaaatcagggggatcagggaggatggtaggaaatagtcaaaaatatttatgtatttttaagatggagtctcagctatcattcaagctagagtgcagtggcatgatcatagttctctgcagcctcaacctcctgggctcatgtgattctcccacttcagcttcccaagtagatggtactacaagtgtgtgctaccacacccagctatttttgttttttaattttttgtagagatgaggtctcaatatgttgcccaggctgcaaaatccgtttttgtaattaactttccagatatccatttaataaagggaataacacatggctctgtaatgtaatgttaaactatgagattaaaagcttacaaccaagag

SEQ ID NO: 79965 - DNA, 632 bp, Homo sapiens
ttaagtgagttaataaatcacttgggtattcaagrgcatgacttttaatgatggaaatccagagtgagggtagtatttttagatataatgtcccttgccagacccctcaaataataccacatagtttactatggacttacacccagatgagtcctgaattgtcctctaagtaaagaaggaagaaaccactgttaaagttagtttcctaattttgcccctgggcaacccctttagagcacagcctcagtcttgagctttgtgggtcacgcttttccttgtcaggcagagaaagtctttatttcagctttgactttggcaaaaacctcagcatcttttcctgggcttgcaaaatggcagagttcttgctttcagatgaccaaaacttgtccagtgagaccaaaacgctaggctgcctgtcacagcagagagccgtgggtttccatgtgttctgcggctcacttcttcatctcccaccctcacagtaggtgagaacaaactgaaagcccctcaaagccccagcactgcctgtttcttctgcaaggtgacatttccacagactcaagcatgaacaagagcggggggtcaattcctgctccaccaatgcaccgctgcatttcctgtctgctgttgcc

SEQ ID NO: 79966 - DNA, 657 bp, Homo sapiens
ttaggctcatcatctgtaaaacaggcacaatgctgcttacatcagaaggctttatgaaggtaaaaataaataatgtggacaaattgctaagtgcagtttctagcatagaatactcagtaaaagtaaagggagtaaatattattatgttgaaatccattcttcttattggtctggagcttctcgatcactagaattaatcattaatcaactcagtattcccaggcatatcacagtgactggggcagatgaaggtctaagtcagtgtttatcaaatgaataaatgaattaatgatgtcctttctggtttagttgggagtttttacactaatactcaaaagattgtgtttctgtgacctcagtggaaacccattagtgagtggcctgttggatgaataaacaaatgacctcagagagccagagacatggagcagctacatttggcatttagactttcacccctcctgaatgagwtggacctattgcatggttctcaaacttggctgcacaatagaaccccctgatacctggttcccaaagactgatgtgattggtctggggtttgacctggacatcaggagttttgaaagctccccaggtgattctactatgcactcaagtttgagaagcactgcttgggaacagaggttcccaaattat

SEQ ID NO: 79967 - DNA, 657 bp, Homo sapiens
ttaggctcatcatctgtaaaacaggcacaatgctgcttacatcagaaggctttatgaaggtaaaaataaataatgtggacaaattgctaagtgcagtttctagcatagaatactcagtaaaagtaaagggagtaaatattattatgttgaaatccattcttcttattggtctggagcttctcgatcactagaattaatcattaatcaactcagtattcccaggcatatcacagtgactggggcagatgaaggtctaagtcagtgtttatcaaatgaataaatgaattaatgatgtcctttctggtttagttgggagtttttacactaatactcaaaagattgtgtttctgtgacctcagtggaaacccattagtgagtggcctgttggatgaataaacaaatgacctcagagagccagagacatggagcagctacatttggcatttagactttcacccctcctgaatgagatggacctattgcayggttctcaaacttggctgcacaatagaaccccctgatacctggttcccaaagactgatgtgattggtctggggtttgacctggacatcaggagttttgaaagctccccaggtgattctactatgcactcaagtttgagaagcactgcttgggaacagaggttcccaaattat

SEQ ID NO: 79968 - DNA, 865 bp, Homo sapiens
ccaggtctctttccgactccatgacattgttatgagaaatttcacagctgagttaggtagtgtgttataactgcatttctacattttctatcttgaccaaaattttctttttcttctaatgcttgtcttaattgccttgtttgctttggtttctgtgtacatctcacaggttgtctgacatagttgtaaaattcctctgggcacagccaaatgcttcagatagtcccgcccatatcttgaagcactccttttgctatcctccacacccttgctcttctgtgctggatttacttttctggaccttcatgtcttccccttttttggtttactcacaattttttcttaatagcgtccctatttatgaaatgtcacacttcctcattgctcttctagctttctttttcattcatttcttcatctttacttttctgcttttttcctacatttactttgtcttctattcatatattgaatttttattctaatgccaaatgtttaatttccaagagttctttcctctttcctgaatgtgtttcaaatatgttcttatttcttaggtgcacagcttatgtctctgagtacgttaatggaggacaggaaaagatatagggaattagtcgggtgttttactgratatttttaaaaggtgaattaggaagcgttagattcttttctaaactttgaaacacttcagataacttgggtggcatctattcactgaaggtttgaaagaattcttgtgaaaaactgtcagaaaccagcgtcctcttcttaatttttgttttacatcttccccagttttagctctggttgttgttatattggggcgttttttccttccatgatcaatattggtaatttacag

SEQ ID NO: 79969 - DNA, 2202 bp, Homo sapiens
tgcatgactcatatttaatagcaaaactaactctgttgcttttgcccactggtcctgttgctgcccactggagacattcaggtaagctctcaccttcccagataccaggcctctgggctttcgaagtcagtgaccgtgtctccccaccatttctctccagtccaaacacccccatttcttcatttgatcctcaggtaactctttctagtcctgtcactatcctggactcccttccagggggaagtcatgtttgtctctgtcaatctaagcacatcttctctagcagcttgtatctaagaaaaaaaattctgttgcataaatacatccagggattcttggtagccatggcttgctcagaaccatggggcagttgtatctgagcctggtgagattttcttagtgttcctaaaccccaagagagacaccgtgtttcagctctgatctgacccaaaggtccatatgagacagtctacttacagctagactgatccctggcttatacagggcttgcacgaactctgcagagacaaagacccagatctcttgcttacattgcagcactgaatgaaaaatcagagggagggagggcatgattggagggaaaagaaaagaaggaaggaagaaagaagaaaggaaggaaggaaagaacaaagaagggagggagggaaagatggagaaaggraggaaagaaatcctatttttttctggagtgtcttccacattttaaaggctcgcaggatgattctgaagatgaaagaccatcagtcattacaatattcattgcacaggattttactgggtgtctacactgtgccaagcactgtgctagtcatcatgtacatcaacattttagttatccatagacataaacaaatggagctcccaccctaggatccgatatagtacagaaaatagacaggaaataaaattatgacaaaggaaacagtaacacacactagcagcaatgaagcaattatatgataccaaactgtgctgctgttgctttgcagaggacttaatggtcttaccaggaaatgagtttcctccatcctccccacactcagtcagccatggcctcccaggtattgacagtgaagccaaggaccagtctggtttgtagttattaggaaatgtcgcaaagctcgtggtacttgcagccatatcaggcataggtgatggatacaagatgaatatgcattctggtttacccaggacagacatggtttacacctgctttcccagtgtaattcttaatagtatactctgtcactctcaaatgtgtcccaacatggatggtaaattatatggtcaccccagtgataaaatataatctcaatcccagcttcccttcaagaagaaaactttcccaaattttatacagcctaaatcacattttatatccaacacttttcctaatttcctacttgttctgaccctttccatcattattgcaaatgacatcctatcatcaacaatggaggtagtggctgatagtgattagaagccaggagtgtttaattttatttttttatagattgtgtgcataattgcccttctgtggacacttaccaccctgcgatttggagcccccaacaatcagtgtcaggtgtgtgtgactttgaaggtgtgccacactttgaagcaccaaggtcctgcttagattcatccttgtcttctagagtgagttctcgcccagatgaaaaaaaaaaaaatgccagtattaaataatccccagtgagcaaatatgaggaaactcggactttctcaagggccccaatcacaaagggagtcagaaaaacatcctaagacaaagaaacattccaaattaataagacaaaaaatcctcagactgtgtcagaaaatgtcacaataaaaaggggacaaaggggaatgcaaggtaaattggtgaagtgggtttgagacacctaatttcctaaagaagagcaggatagtatagaggttttaatcattataaagatatatccaaagggataaagaagaaaaggaattgcagcagcaaagccaactatttcttccccatgtgtacccatcttggatcatccacttcccacagttctgggacccctgtttgtatgggcactggaagccactcctaactggtcacacctggttggaccaaaggtggacgagtgaccccagacaaatcaagccaccaactaccgactgggttgagctgatcct

SEQ ID NO: 79970 - DNA, 2202 bp, Homo sapiens
tgcatgactcatatttaatagcaaaactaactctgttgcttttgcccactggtcctgttgctgcccactggagacattcaggtaagctctcaccttcccagataccaggcctctgggctttcgaagtcagtgaccgtgtctccccaccatttctctccagtccaaacacccccatttcttcatttgatcctcaggtaactctttctagtcctgtcactatcctggactcccttccagggggaagtcatgtttgtctctgtcaatctaagcacatcttctctagcagcttgtatctaagaaaaaaaattctgttgcataaatacatccagggattcttggtagccatggcttgctcagaaccatggggcagttgtatctgagcctggtgagattttcttagtgttcctaaaccccaagagagacaccgtgtttcagctctgatctgacccaaaggtccatatgagacagtctacttacagctagactgatccctggcttatacagggcttgcacgaactctgcagagacaaagacccagatctcttgcttacattgcagcactgaatgaaaaatcagagggagggagggcatgattggagggaaaagaaaagaaggaaggaagaaagaagaaaggaaggaaggaaagaacaaagaagggagggagggaaagatggagaaagggaggaaagaaatcctatttttttctggagtgtcttccacattttaaaggctcrcaggatgattctgaagatgaaagaccatcagtcattacaatattcattgcacaggattttactgggtgtctacactgtgccaagcactgtgctagtcatcatgtacatcaacattttagttatccatagacataaacaaatggagctcccaccctaggatccgatatagtacagaaaatagacaggaaataaaattatgacaaaggaaacagtaacacacactagcagcaatgaagcaattatatgataccaaactgtgctgctgttgctttgcagaggacttaatggtcttaccaggaaatgagtttcctccatcctccccacactcagtcagccatggcctcccaggtattgacagtgaagccaaggaccagtctggtttgtagttattaggaaatgtcgcaaagctcgtggtacttgcagccatatcaggcataggtgatggatacaagatgaatatgcattctggtttacccaggacagacatggtttacacctgctttcccagtgtaattcttaatagtatactctgtcactctcaaatgtgtcccaacatggatggtaaattatatggtcaccccagtgataaaatataatctcaatcccagcttcccttcaagaagaaaactttcccaaattttatacagcctaaatcacattttatatccaacacttttcctaatttcctacttgttctgaccctttccatcattattgcaaatgacatcctatcatcaacaatggaggtagtggctgatagtgattagaagccaggagtgtttaattttatttttttatagattgtgtgcataattgcccttctgtggacacttaccaccctgcgatttggagcccccaacaatcagtgtcaggtgtgtgtgactttgaaggtgtgccacactttgaagcaccaaggtcctgcttagattcatccttgtcttctagagtgagttctcgcccagatgaaaaaaaaaaaaatgccagtattaaataatccccagtgagcaaatatgaggaaactcggactttctcaagggccccaatcacaaagggagtcagaaaaacatcctaagacaaagaaacattccaaattaataagacaaaaaatcctcagactgtgtcagaaaatgtcacaataaaaaggggacaaaggggaatgcaaggtaaattggtgaagtgggtttgagacacctaatttcctaaagaagagcaggatagtatagaggttttaatcattataaagatatatccaaagggataaagaagaaaaggaattgcagcagcaaagccaactatttcttccccatgtgtacccatcttggatcatccacttcccacagttctgggacccctgtttgtatgggcactggaagccactcctaactggtcacacctggttggaccaaaggtggacgagtgaccccagacaaatcaagccaccaactaccgactgggttgagctgatcct

SEQ ID NO: 79971 - DNA, 1494 bp, Homo sapiens
ttttgaaagtttgagttgcttgatgaaagccaatttgggattctaattcaagtcagagtggttctagtcaccccatttttgtacattccattttgtatcttctcatgtgggtgggtacatctttataataatgttcaaggccactctacagagaagagttaacacagcaggcctgaaactgctcatccgtaaaaagtcctgctgtcaaagtggtgcttggctggtatctgggaagctggaaattgggaatgttcccactctttcctaactgatgaggttgactcacagtgcctcaactatttgtccaagaattgcggtttatgctgaacatctgcttactttctgggagactggaatttggcacatgtaggtatcttacatgatcagccctcattaaagaccttgaacattgagcctctaacaagcttccctggtattataatattattatattctatagttatataatatattacagtagacacttggcacatgttgtcacattcattgctggaggtattgtgcatgttctgtgtgacttcactggaagaggagcgttggaagcttgctcctgaattcctctggacttcacccctccaacttctcactttgctgattctgctctacctccttaaattgtaataaaccatagctctgagtcagactataggctaagtcctgtgattgagttctcctagggaatcattaaacctgggtgtggtcttggggacccccaacagttaccttcctgcatgttgaacaacaattggatgtctcagccaaccaccaatcatacatttggaggaaattaaactagtttcagtgagattctggatccaaaagccgtttgctagtgtgaaggtgttcccttctccacttctgctagacagtgtccagccaaaaggcacgcatgctgctccctgtgtgtgccttgtagtgatttcattttcctcagtgtgaagtccaagctcctcaccctgcctaggagtcctccagcacctgactctgtcttcttgtctgtccttcagcctcacaggcatctcccacttaatggcaagctgctgtggtcccctgagcacattgctatctccagcctatgtactttagcccctgcccttccctgattctgaaacatgcttcctccttccctgatctaagaattcattcagttcacagccacttcaaggtcatgtaagtktggtgttttagttagcccatgctgccatagcaaaataccgtagaccgggtggctgaaacaataggcatttatttctcccagttttggaggaaggaagtataagatcagggtgccagcatggtcgggcactagtgaggcctctcttcctggcttgcagatggctgtcttactgtaacatgcccacgtggctatccttgtttcaagacttgggggagagagagagatgtcccttcctcttcttataaagacactaatcctatcatgggggcccaccttcttgaccctatgtaaaccta

SEQ ID NO: 79972 - DNA, 764 bp, Homo sapiens
atataaaatatacatcaaaacataagttttaaatggcacatataaaaaatgagagaacagaaactgtaagcaatcttctcacactgaaatggaccacctgtgcatgatgcaaacacaatcttgtttggaagccactgatccatgtggagaggccccaccttccctgagcacctgagactagcattgctytgactcacagtttggaattatctctttaccggtatgtctccccaccgggagaacagggtctcattctcttttttttttttttttttttttttttttttgagagatggagtcttgctctgtcacccaggctggaatgcattggcatgatctcggctcactgcaagctccacctcccaggttcaagcaattgtcctgcctcagcctcctgagtagctgggattacggatacgcatcaccatgcctggctaatttttttgtattcatagtagaaatggggtttcaccatgttagtcagaccggttttgaactcctggcctcaagtgatccacctgccttggtctccccaagtactagggttacaggtctcattcatctctgtgtgcccagtgtttgggacagtacctggcacagagttgactctccatagacttttctgggaataaagacaaatgaagcatagatgttgttgttaacaatgattatgatcacaactccaagactgggggaaatatgagtctctccttggacaggtctttctggagtttgttggttgaaccacccaaggttctaggtct

SEQ ID NO: 79973 - DNA, 764 bp, Homo sapiens
atataaaatatacatcaaaacataagttttaaatggcacatataaaaaatgagagaacagaaactgtaagcaatcttctcacactgaaatggaccacctgtgcatgatgcaaacacaatcttgtttggaagccactgatccatgtggagaggccccaccttccctgagcacctgagactagcattgctttgactcacagtttggaattatctctttaccggtatgtctccccaccgggagaacagggtctcattctcttttttttttttttttwtttttttttttttgagagatggagtcttgctctgtcacccaggctggaatgcattggcatgatctcggctcactgcaagctccacctcccaggttcaagcaattgtcctgcctcagcctcctgagtagctgggattacggatacgcatcaccatgcctggctaatttttttgtattcatagtagaaatggggtttcaccatgttagtcagaccggttttgaactcctggcctcaagtgatccacctgccttggtctccccaagtactagggttacaggtctcattcatctctgtgtgcccagtgtttgggacagtacctggcacagagttgactctccatagacttttctgggaataaagacaaatgaagcatagatgttgttgttaacaatgattatgatcacaactccaagactgggggaaatatgagtctctccttggacaggtctttctggagtttgttggttgaaccacccaaggttctaggtct

SEQ ID NO: 79974 - DNA, 1513 bp, Homo sapiens
cgagagctttgtctttcccaagttcatcattcttagccttttcagcagtcttcatgcactgttgtttttagatcccttcccaacctcctgtgcttttcagaacccactctcatttgtcaatctcccttttaactgtggtccagcccagtggtgagccccagggcagtgtgggttacttygctttgagaaggcacatgtggcaaagtgatgtgggccaacatagctggcacatcacactcatgacaggcacagacttctccacgtggaccactgtcagtgctggctatgaccacagaagaaactgtggaccatgtgagggggaatggcttcacagtatttgagtaaaaagagaagagtgttgggctcctgacagaagcttggagatttagaggaagagggggaatcaaaagaggaagatggtaagggagtaaagtagtggagagagggaggagtaagacccaggaaagcttattgttccagagaccaaaggaggaaggagtttaaggaggcaaggaggcaagcagcagatggattcaaatctcacagaaagacaaggaaaaaccatgaggaaaaagaaaagcctactttgattaacaagaaaggctttttcagtgaattttagagtagtagcattcaaagggtagagaataaaacattgtggatatttcagaaataaatttccaaaaaagaagaaaacggagcaatgggtatttaagtactaaagaaggagcaaagattggtagtcaagctgatggaaaagtgtatacgtatgtgtttgttgtttttcattttgatgttagggcaatcttaaattaaaaagatatggttttgcacaagtcagttaatatctgtagaccttccaactgtataaggaaggcattaggctaaatgctgctggaaccttctcacatctctgatcacctacaatcctgtaagggaaggagtctatagaaagaaaagggtttgaggcacttgagagagagagtgtgtagttgtcacagaaggaaggtcacagagtcctttgtctagaatgatgggtcctaccaagatcttttgctttcaaaacacagttagatgatagttgataatgcttctgtatgtcctcttttgggtaatagggttgcagtccgtccagttccccaaactagaagcctggattctttcttggctccttctcattcttctctgatgtgtaattagccactgagttgtgccgactatatttactaaaatctttcttggttccagctcctcctttccatccaaactaccatccttgtacaggtcctgaaatcagttcccaggacacctacaacagctttctaatttgctcctgaattgcttccctcaaatccacccctacacaacacagccaccagagtagtctatctaggtagggcacaagtctaattctttttgttttgttgaaacagagtctcactctgttgcccaggctggagtgcagtggcgtgatctctgctcactgcaacctccgccttccgggttcaagcga

SEQ ID NO: 79975 - DNA, 1513 bp, Homo sapiens
cgagagctttgtctttcccaagttcatcattcttagccttttcagcagtcttcatgcactgttgtttttagatcccttcccaacctcctgtgcttttcagaacccactctcatttgtcaatctcccttttaactgtggtccagcccagtggtgagccccagggcagtgtgggttactttgctttgagaaggcacatgtggcaaagtgatgtgggccaacatagctggcacatcacactcatgacaggcacagacttctccacgtggaccactgtcagtgctggctatgaccacagaagaaactgtggaccatgtgagggggaatggcktcacagtatttgagtaaaaagagaagagtgttgggctcctgacagaagcttggagatttagaggaagagggggaatcaaaagaggaagatggtaagggagtaaagtagtggagagagggaggagtaagacccaggaaagcttattgttccagagaccaaaggaggaaggagtttaaggaggcaaggaggcaagcagcagatggattcaaatctcacagaaagacaaggaaaaaccatgaggaaaaagaaaagcctactttgattaacaagaaaggctttttcagtgaattttagagtagtagcattcaaagggtagagaataaaacattgtggatatttcagaaataaatttccaaaaaagaagaaaacggagcaatgggtatttaagtactaaagaaggagcaaagattggtagtcaagctgatggaaaagtgtatacgtatgtgtttgttgtttttcattttgatgttagggcaatcttaaattaaaaagatatggttttgcacaagtcagttaatatctgtagaccttccaactgtataaggaaggcattaggctaaatgctgctggaaccttctcacatctctgatcacctacaatcctgtaagggaaggagtctatagaaagaaaagggtttgaggcacttgagagagagagtgtgtagttgtcacagaaggaaggtcacagagtcctttgtctagaatgatgggtcctaccaagatcttttgctttcaaaacacagttagatgatagttgataatgcttctgtatgtcctcttttgggtaatagggttgcagtccgtccagttccccaaactagaagcctggattctttcttggctccttctcattcttctctgatgtgtaattagccactgagttgtgccgactatatttactaaaatctttcttggttccagctcctcctttccatccaaactaccatccttgtacaggtcctgaaatcagttcccaggacacctacaacagctttctaatttgctcctgaattgcttccctcaaatccacccctacacaacacagccaccagagtagtctatctaggtagggcacaagtctaattctttttgttttgttgaaacagagtctcactctgttgcccaggctggagtgcagtggcgtgatctctgctcactgcaacctccgccttccgggttcaagcga

SEQ ID NO: 79976 - DNA, 1513 bp, Homo sapiens
cgagagctttgtctttcccaagttcatcattcttagccttttcagcagtcttcatgcactgttgtttttagatcccttcccaacctcctgtgcttttcagaacccactctcatttgtcaatctcccttttaactgtggtccagcccagtggtgagccccagggcagtgtgggttactttgctttgagaaggcacatgtggcaaagtgatgtgggccaacatagctggcacatcacactcatgacaggcacagacttctccacgtggaccactgtcagtgctggctatgaccacagaagaaactgtggaccatgtgagggggaatggcttcacagtatttgagtaaaaagagaagagtgttgggctcctgacagaagcttggagatttagaggaagagggggaatcaaaagaggaagatrgtaagggagtaaagtagtggagagagggaggagtaagacccaggaaagcttattgttccagagaccaaaggaggaaggagtttaaggaggcaaggaggcaagcagcagatggattcaaatctcacagaaagacaaggaaaaaccatgaggaaaaagaaaagcctactttgattaacaagaaaggctttttcagtgaattttagagtagtagcattcaaagggtagagaataaaacattgtggatatttcagaaataaatttccaaaaaagaagaaaacggagcaatgggtatttaagtactaaagaaggagcaaagattggtagtcaagctgatggaaaagtgtatacgtatgtgtttgttgtttttcattttgatgttagggcaatcttaaattaaaaagatatggttttgcacaagtcagttaatatctgtagaccttccaactgtataaggaaggcattaggctaaatgctgctggaaccttctcacatctctgatcacctacaatcctgtaagggaaggagtctatagaaagaaaagggtttgaggcacttgagagagagagtgtgtagttgtcacagaaggaaggtcacagagtcctttgtctagaatgatgggtcctaccaagatcttttgctttcaaaacacagttagatgatagttgataatgcttctgtatgtcctcttttgggtaatagggttgcagtccgtccagttccccaaactagaagcctggattctttcttggctccttctcattcttctctgatgtgtaattagccactgagttgtgccgactatatttactaaaatctttcttggttccagctcctcctttccatccaaactaccatccttgtacaggtcctgaaatcagttcccaggacacctacaacagctttctaatttgctcctgaattgcttccctcaaatccacccctacacaacacagccaccagagtagtctatctaggtagggcacaagtctaattctttttgttttgttgaaacagagtctcactctgttgcccaggctggagtgcagtggcgtgatctctgctcactgcaacctccgccttccgggttcaagcga

SEQ ID NO: 79977 - DNA, 640 bp, Homo sapiens
catgtcatgttcataacccagtatcaacaattatcaacccagggccacccttgtttcatcgaaaccatcaccactgccactaccccctgatcatttttgaagcaaacacagacagcacatcatttcattcataattatgtatctcaaaaagaagtctttaaaaaataatcaaaataccatttttgaaatgctatcctcaatacttctatcagaatcacccgtggtgctttttaaaatgtggtgatttccaggccccactgagtcagatactgtaggagtggggctccatcaccaacattttctttttctttcggctgccagatctttttttttttttttatcatggtgagagatacacaacacaaaacttaccattttaaccatttgaaagtgtacagttcagtggcattaagcacactcacattgttgtgcacccatcaccacctcccatctctcaaattttctcatcaccccccaacataagctctgttcaccttcagcaataactccctactccctcccactagactctagtaacctctattctattttctgtctstctttcattcaccagcattttaaacaaataccccaggtaactttggcaggggagtgggcatatccaagtttgggaaccact

SEQ ID NO: 79978 - DNA, 799 bp, Homo sapiens
tgaaagatctttatctttctaagttgcaaaatgactgtgtgtgcctctgcatgaaaccttcaacaacactcctttatctatggattaaaacccacattctctactttggcatgtgtttcttttgccggggctgccataacaaagcaccagaaacagagtggcttaaagaacagaaatttatcatctcccagatctggagaccagaagtccaaaattaaggtgtccgcggcgttgattctttcttagagctgtgagagagccttggttccatggctttctcctggcaggtaacctctggcattctttggcttgtgaatggcattgtccctgtgatttcatattgttttccttctctgtgtctttgtgtccacacttctccttttcataaggacatcacttatattggagtagggcctactctaatgacctcctcttgatcatctgcaaagaacttatttccgaataaggtcacagtcacaagtactgggggttataacttccacatcttttgtgggaaggcaattcaacctataacagcatataaatgcctttgtgaccctggatccaactcttaaaccacatctcctgtcacctctaccacacacacacacacacacagagagagacagagagagacagagagacagagacagacacacacacacacasagagacagagagagacagagagacagagacagacacacacacacacacacactcagactcaccctaaggaacttgctcagcagccacagtaaattatgcaccatgacccacactcctgctcattcatgcc

SEQ ID NO: 79979 - DNA, 1197 bp, Homo sapiens
gcttctgtcacatccacttaaatcaaggaaggcttctggaagaggaggattctgagatgaactatattcaagtggaagaagaaggaagcaatttgagggatacaagagtagaggctgatccaagcttccttgctgagatcatgccccactaaacttccttttgtgtcccaatcatactagatatcaccatacacygctcatgctcaaaagcataatcaaaaacactattaaacactgtttctcccaggaagaagactacacttactatgaaaattgtagtgggacagaaacacacttaaggatggaataggcttggcactgttctccttgtcagcaagccttctgcctgatctatttaacttatgtgataaaagagataaaggtttaagtgaagggcttcagatgctgcttcagttcctaccaagaatattttcacagctccttctcatgaataagttcagtgaagcagagaatgcccctcttggaccaattccattttgtgctttttttgatgctgtcaaaaaggggaactagagcttaggcttttccttcaaatttagagcaagcatctacctcagagatggctgcaagtggcccaaagaaggtaagacccacattgtgcaaaggcagcaagaacggatatgtcgaccgttactcataaatctcctaaacgtggcagcaaggagggttaattatcccccccgcccccacttcctgccactctctgctttctccaatgtgttagcccattacacggatcgctgactttctagaaatattccctggctttgcggggatgttcttttcaataaatggcatccaatttgctaacggtccctggaatctcaatttcctcaaaacatttttcatctgagcccagttcataggaaggtttcgtccttcctcgtttttcggcataagggaataggcagagcctgcttttctttttctttttttttcttttctgtgtcattatttttcataaactgaaagcctttgctgaagagtctgaaatttgggaaaattccagctcatctgtcagatatttctagagttacgtaaaatgtaatgagatttgtatagtttagaacagggaagagaaaataagctaatgtgtcatatgttctatgagacaaagactacatgataatcagaaaaacagccccaaatttagttggcctgattcaaagctctcat

SEQ ID NO: 79980 - DNA, 801 bp, Homo sapiens
tcaccacaatgacccataaggtagatattattattagtctcattttatagataaggaaaatcaagagtcatataaccagtaagaagctgagatggaactcaaacccaggtttgtctgacaatgatgtacaaaatctttttaaatttaattttatttttccataagttattggggtacaggtggtatttggttacatgagtaagttctttagtggtgatttgtgagatcctggtgcatccatcaccctagcagtatacactgcaccatatttgttgtcttttatctcttgtccccctcccactcttccccccaagtgcccaaagtccactgtatcattcttatgcctttacatcctcatagcttagctcccacatatcagtgagatcatacgatgttcggtttccatttctgagttacttcacttagaataatagtctccaatctcatctaggtcattgcaaatgctgttaattcattcctttttgtggctgagtagtattcatatatatacacacacacatatatatatacacacatatatataatcaatagaaacatatatatatatatatatayacacacacacatactgactctctgtctctgtctctctatctatctatctatctatttatctatatgtttctttatccactcattgattgatgggcatttgggttggttctacaattatgcaattgtgcattgtgctgctataaacatgcgtgtgcaagtatctttttcgaataatgacttcttttcctctgcatagatacccaacactgggatttctggatcaaa

SEQ ID NO: 79981 - DNA, 576 bp, Homo sapiens
cctttctttcacaaaccattaagtttcccagtgtatggaagcttttggattatttagcttatcataataaaaacagtctatgcagtataaacagtagaaaaggcagaaacaatttgtatgtatttctcctttttagagtaataaaatgccgtctataggatctacaaatataggaatagacattttcagccaaaaaattctcaggcataattaattttgttttttgttcccattccccaaacaataggtttatagagtatgattcttctcattgccaaaaaacaacaagaaaacaaaagaaaaaaataaagttctccatgktgaaaactgtaaatgctaagaaggcaataaacttcatggaataagaacttaaaatttatagcaactatccatttatatgaattttcacttttgaacacaacttacccatctctttaaagcagagggttgaagtttctattgcgaaccccaaatgtctgagacaagcctccatcagtttaggaagtttatgttgcccaaggtaaagatgcacgcccatgagacaatctcagaaagccctgatgacatgtgcccaga

SEQ ID NO: 79982 - DNA, 576 bp, Homo sapiens
cctttctttcacaaaccattaagtttcccagtgtatggaagcttttggattatttagcttatcataataaaaacagtctatgcagtataaacagtagaaaaggcagaaacaatttgtatgtatttctcctttttagagtaataaaatgccgtctataggatctacaaatataggaatagacattttcagccaaaaaattctcaggcataattaattttgttttttgttcccattccccaaacaataggtttatagagtatgattcttctcattgccaaaaaacaacaagaaaacaaaagaaaaaaataaagttctccatggtgaaaactgtaaatgctaagaargcaataaacttcatggaataagaacttaaaatttatagcaactatccatttatatgaattttcacttttgaacacaacttacccatctctttaaagcagagggttgaagtttctattgcgaaccccaaatgtctgagacaagcctccatcagtttaggaagtttatgttgcccaaggtaaagatgcacgcccatgagacaatctcagaaagccctgatgacatgtgcccaga

SEQ ID NO: 79983 - DNA, 794 bp, Homo sapiens
ctccttccactccgtgacactgtgcccagataattgtaaatgaacagcaagtatttaatggcttgcctctagtgtgtgggaacctgtaatgcttgctgaagtctaatgaggccctgataagacagtaagcagaagagattggtgacttaactaggacaactcgcttgcttaacttttacccaaattttcaagctttctgcgtgacaggggttcagtgtatagctttttggcaaagtgacatacatcaaaatttaaattgagaaagactcaaccttttccttttaaatgagagagctgacaattttgcgagtcttaagtatttcatctgtcactggccacccagtgtcttgttaatgatttttcccctttagatgacaaatccaactgattaactgtcctaattgctactgtacacatccttccttagcaggagtctgagtgatttggaagatatttkttaactcaaaatttgcttaagactttaacatgcagacagaaatttttaaataaatatattcataacactcattatactttgtggctttgttaaaaggacaaagtaaacttatatgtgtcctgatttatctgagtagtaaaaatatgtgaaaccttaggaaaagtgtctataatatatgacaaatttaacataaacattttgaagaagagttgtagacgtaactgaaatgtttattactctaaagaaaaattacttttgactcatttttaaaattaatcctcttaaggggcttaaattctatgtatcacattcctaatatgtatcaatttatgcaaca

SEQ ID NO: 79984 - DNA, 526 bp, Homo sapiens
tctgagtattaaatatctgaattcgcctcccccatccattaaaatcttcttctaattggagaggttggaaagttaaaaactacatttattatgctgcctcacaaccatggttgtggttgcaagtcaatttctacttattacactcaataggatatttggaaggtaaatttgaggggaggtccccttcccttatctctaggctagaggttatccaagtgtggcccttggaccatctacaaaccatcacctgggaacatcttagaagtacaaattcttgaccccactcccaacctactaaatcagaaattgtccagcaattgctgggtgggtccaacaatctgtgtyttaacaaacaaataacaagatggaggacactggaggtgttcctgcacaacattccattctccatcttctggggtgatgagaagcagtcgcagcagtcacatcttcttgatctgactttctaatagaaaaggtaggtactcgttttcctcttgttttgagtgtaagaaacaactgtaccccc

SEQ ID NO: 79985 - DNA, 1183 bp, Homo sapiens
  misc_feature (1)...(1183): n = A,T,C or G
caccacatgtatgctgctgtcattcttgttttcaaaccaaattcaaccaatcttttagggtatttgatttgagcttaaaatctgtcctaggcattgtagaaaatacaaagtwaataaagcataatccctgcctgcaagtggcttatcatggaaacaaagtcagcgctgatactgtttatttattcaataaacattagaggccctacactgtgacagacaatagttaagaaaacagtgtgcacatgggggtgagataaaaagccagaaaacatgagtcctagatcccagtctgcataaattagccatgacctatgaaaagtcacttcactcttccaaaccttagtttctttaattgtaaaaaggaacactgggatgggttttttcaaaggtcttttccaagtcttaaattctatggttttataattttttaatttaaaaaatgaggagttcaaaatgattattatgcttaatccttgactttagtgaataaagatgtagataacagaattaaataaaaaattcaaaggaaaaggtcattaaaatatagaacaatgaattgttaataaagggtattaaaatgacctatttgttatgccttcatggtggaaaattagaaattactcagaaaatttactccctgttcataatcgaaatagataattcaggtcaaagattgatttggacaaatcacttatacattctgagacttattattctaaattacaaaaaaaaaaaaatgaagctcaatccttgccctttccatttcacagagtttttatgaagatcaaatatgtgagaactattttttaaagtaatattttatactttaattattataatcttgaattgtctaaattgcttgagtatactaagaaaaactgtaagaaaaaatagaataaaatctgtaagacatggccaagtctctacttcannnnnnnnnnnnnnnnnnnnnnnnnnnnnnnnnnnnnnnnnnnnnnnnnnnnnnnnnnnnnnnnnnnnnnnnnnnnnnnnnnnnnnnnnnnnnnnnnnnntgccaaactgggatttataacactatatagtgttaaaaatatttcataaccaatatagtatgggttctaaccaaacagaatggacacagctgaaaacaacacaaccagaccagccaccaattatcagccctgccttgctcacagaattctaa

SEQ ID NO: 79986 - DNA, 698 bp, Homo sapiens
aaatgaggcagaaaagcagagaacaagtaaaacaaacaaacaaacaaataacaaaaagatgactctcagtgcccacctaagtagtggtctgagacagaccagagtttgaaatctggttccaccccttaccctctgagtgaactttgtaaagagtctgaacctctcaaagcagtttccttatcaataaataatagtacctgcctcccaggattattgtatgaaatatttaaaactgtgtcacttagcacagcccctagccttaataagctatcaataagtaaacagtggagacaacacaaaagaattcagtagaaagatgaagtcacatgaaagatgaggggtaaaaattatctttttaagacattgctcatttgttgatggctctgtgaaacctttaccaaattctccatgaagaaataattgattcattcccaggactcccagagcattttttatataactccgtaatagcacttaataaactgaattatatttattttctttaattaaacttttcattttcagatcattatggattcacatacagttgtaagaatacaaagagatctcaagtacctttcacaagggaacagttcctatcaatggtaacatcttttatraaactacagtacactatcacaaccagaatattttcattgacacaatcaagatacagaacatttctatccccacaagga

SEQ ID NO: 79987 - DNA, 1505 bp, Homo sapiens
tgaatgagtaaatgagttagtaagtgaattaatgaatgaatgagtgaataaaagattcagcgagtgagtgaataaatgagtgggtgagtgaataaatgaatgagtgaatgaatgagagagtgaataaaagagtcagcaagtaagtaaatgaatgagtgagtgagtgaatgaattagtgactgaaagagtgaacaaatgagttagtgagtgaatgagtctgtgagcgagtgaatgaatgagtgaataaaagttagcaagtaagtgaatgaataaataaatgaattagtgagtgaatgaataaatgagttagtgagtgaaggaataagtgaataaatgagtgaatgaatgaatgagtgaataaatgttagtgagtgagtgaattaatgaataaattcatgaatgaatgcatgagtgagtgaataagtaaaggaataaatgagtggaagaatgcatgagtgagtgaacacatgaatgacagagtgagtaaaagactctgaggctcctggccagcccctcacatcaatcacatatgccggctggagatatcaggcaagagctagaaacttcacaattattacccgtataaaaatgtcctaccttacacttgtacaacagcaatttatgccttccccaagctctgtcacacacaccctttggtcctcatgacactcctgtgaagtgggtaggagtcagcagcagtcccaggatcccagccctggcagacagccccactcccactctgctgccctctcagctatgggccaagagaaacgcaccagaaccacacccatgaagaccatgtgctggtaaaactccccgctcgggtctcttcggcagaagctgctcacctccactgactgcattttaggctctcccatgtctttgcttacttggagagagacccctggtctatactccaaaggcagccagttgctatgtgttgtggaggaaccacctgcctggagcaggtaaccattcccagccctgtgctgcactgtatagtttcccaaggacttccacacacatctccatctcctccactcccagaaccaggccaacccagcccagctgtacaagcataaggctcrgtctggaaggccaattccaggaaggttctcagaacctgggatggagtcaggaaggatgttgtatccagatcataggtgaaggccagtgagtgttggcatgcacacaagtccatgatcccaaaactcatgcatttgtaaagaaatggacaaagaccaaatcagaagggagaacagaacaagatgcagctggaggggaaggcaggcctggaaagtaaaattagtcctagaaatcctatagagataaaaagcagattactggttgccatgggctggcggcaggaagaatggagagtgactgcttaaggggcatggggcttccgttttggtgctgaaaatgttttgaaactagacggtggtgatgatcgcacagcactgtgaatataataagtgccactgaattttactctttaataaggg

SEQ ID NO: 79988 - DNA, 656 bp, Homo sapiens
atgtggtgcattttttaaaaaagtctggcagttactttgagagtcaaacatatacctaaaatgtggcccagttatttcactcctagtttagctaaaacaaatgaaagcatgtgtctgtatatctgtgcaaagacttgtacaaaaatgttcatagccagtttcttggaaatagccaaaacctgtgaggttcactgtaggtaaattaaaaagctgtctttttacaagttcatgtacatacttgatattcgataatatttctttctcaactggttttcgacaaggtagaaagccactcttcagttttactcgatagcagatgttatgaaaacttaacacagctccttcagtaaatgccttcaggtcattggaagctgtcgcggggaagccattggtgtttccttgtgacactgggataaaaacttcgacattactggaagacatctggagagtttttatctttctgcagacagaaaagcaatagtaagttgatagtccagataaatgagattgcaaacactaggtgacaatacatttaaaacaagtccatttttaaatgtgyggcaatgagcagcttcatttccaatgaatggcccataccattgtgataagaacatcctaaaaacctaaatgggaagacaggcacaacttggaatgca

SEQ ID NO: 79989 - DNA, 848 bp, Homo sapiens
ttttcatatgtaacctcactgagggccgggatgtttatctgttgttttgttttgttcactcctgtaagtccagtgcctgccagataatagaagtctagtaaatatcgaattattattattattttttgagacagagtttcgctcttgttgcccagaatggagtgcaatggtgcgagctcagctcaccgcaacctctgcctcccaggttcaagcagttctcctgcctcagcctcccgagtggctggggttacaggcatgcgctaccatgcccaactaattttgtatttttagtagagacagggtttctccatgttggtcaggctggtctcgaactcccgacctcatgtgatccgcctgcctcggcctcccaaagtgctggcattacaggcatgaaccaccatgcccggccgaattaattttataggtgagaaacaggcttggagagsctaagcagtttctccagggttctgtggctaggaagtttaaggggagaaggagctgaaaccccacacattctgtgatggattggatagcattttatgggcagccttaggatttgaacatctccgttccctctgggaaactgctggccaaattgcagattagattaagaaaatttgggatgtaacacgcatgtaaattgcacttggtctaatttcatttatgatttgacgattttctagactgaagttttggctttctaatcacagattaaaaccaatttggacagaattcttttatttatttatttatttttatattttagagaaaggatcttgctctcacccagacgggagtatagtggcgtgatcttgactcactgcagcctggaactccctgggctcaag

SEQ ID NO: 79990 - DNA, 697 bp, Homo sapiens
tttctctttctcctggcgttctctctcacctgacggttgcatgtcatagattctgtgtggccgcagtagtcacagatagtattgccaatgagtctccagccctcttggtggaatctaggatcaggacatacccagtggtctctacgtttgcatagatgtctagaaacagcctttgacctctggtcgtctcccctgccctgcaccacaggcaccaatgctgcccctcttgccaatgccctgctattgtcctttcaccctcttaggcagcacttgtcaaagtttgtcttcctaatactccaaacayagcagcagtctccttgacagaggggttaggggccaaatgagtttggaaaatgctactccctttcttggagaatcaagcacctgtgagtgggggtgataatatttactaaccaatatagcagggacactgaccagtcagatccctctgtgtccttgggaaccggctaaccatcagtccctgggaggaggacactagaggctgctgctgaaagaaaaaaaaagcactgaattttatctaagccagtcctttatttggtctctgaatactccccttttaaaaaaatattatctattaggatgtttgaaaaatctgccatatagtaaaacaaatcagtttgtttcagctccacaaacatttgctgagttcctaacgtatgacagacacatgctccag

SEQ ID NO: 79991 - DNA, 1217 bp, Homo sapiens
tgcatacctggtgggaggaaaagagttgggaacttcagatggacctagtacccactgagatttccacgccgaaggacagcgatgggaaaaatgcccttaaatcataggaaagtatttttttaagctaccaattgtgccgagaaaagcattttagcaatttatacaatatcatccagtaccttaagccctgattgtgtatattcatatattttggatacgcaccccccaactcccaatactggctctgtctgagtaagaaacagaatcctctggaacttgaggaagtgaacatttcggtgacttccgcatcaggaaggctagagttacccagagcatcaggccgccacaagtgcctgcttttaggagaccgaagtccgcagaacctgcctgtgtcccagcttggaggcctggtcctggaactgagccggggccctcactggcctcctccagggatgatcaacagggcagtgtggtctccgaatgtctggaagctgatggagctcagaattccactgtcaagaaagagcagtagaggggtgtggctgggcctgtcaccctggggccctccaggtaggcccgttttcacgtggagcatgggagccacracccttcttaagacatgtatcactgtagagggaaggaacagaggccctgggcccttcctatcagaaggacatggtgaaggctgggaacgtgaggagaggcaatggccacggcccattttggctgtagcacatggcacgttggctgtgtggccttggcccacctgtgagtttaaagcaaggctttaaatgactttggagagggtcacaaatcctaaaagaagcattgaagtgaggtgtcatggattaattgacccctgtctatggaattacatgtaaaacattatcttgtcactgtagtttggttttatttgaaaacctgacaaaaaaaaagttccaggtgtggaatatgggggttatctgtacatcctggggcattaaaaaaaaaatcaatggtggggaactataaagaagtaacaaaagaagtgacatcttcagcaaataaactaggaaatttttttttcttccagtttagaatcagccttgaaacattgatggaataactctgtggcattattgcattatataccatttatctgtattaactttggaatgtactctgttcaatgtttaatgctgtggttgatatttcgaaagctgctttaaaaaaataca

SEQ ID NO: 79992 - DNA, 719 bp, Homo sapiens
tgaaagatgtcttcaaggagaaaaaaaaaaaggcgtttttctttgaaaaaataaaggtagaaaaacaaacaaactggcacagcaataagccacttaaataattcaacaagcattactactctgtattcaagaagagaaaaacacaacagcaagtcaagacaaacacaaatggtatatgtggcttttccaaaatgtctcagtgacttaaggctcaacaagcattggatcttggtgtcttgataacctggcaagtgctgtcagatgttcctccttgtgatgctgtgagataaaagtgaccactctttgaggtcagtcccaccttttccactaactggccacgtgtctgtgggcaagtggttttatcagtgttgaggctcagtttccttaagtaaaatgctagggttggacaasggatctttaaatgccttttgatctctggcaacccatgaccctttacaaccaattccaggtttgtttagtatgttccaggtttaacacaaaattagatgtgagtgttcattttcagcaaaatggcaaacaacaggttaatcatatgggtcccttcccactacaaggatgtgaaattcccaagaaaatatcacagagttaagtttgggggaaaaaaagggaaaaaaggaaggaaaagggggatagaggaagggagagaaacagaggccccagaaataaagataaaattgaagccagagcttttatgtaag

SEQ ID NO: 79993 - DNA, 1304 bp, Homo sapiens
tagcaagacagtttggttctggacagaacagacagagaaagaaaagaaaagcaagaaggttggaaagtgttttttaaacaggagaacaataaaggtttaaagtcagcaagcccggaggtagaggaccatccctctcgctcaggggtagccaccaggagagacttgcgggctctcagatctagcacattcactccaaggcaggtgtggggaagtggccaggcactaggcacacaggcctgccctctgccatctgcccagagagaagaaggaaactccatggaggagtcacagacctccctctagtttctatgcttccgagtcaccctttagcatttaacatttcaaacagcaytttggcaaacagagatatggaaattgcatgactggtatctaaaacagagactattatacggctgcgtttgtttcggtcacaacagccaagctactgccacttactctaaaaagttcccctcacattttccacttaggggagggaggaagagcattccattttcagattctttctcttcacaccggaactcctcacggcttctctctgcactgctgaactagtgccatggtgtcaagagaaaaagaggcccgagtggcttatgggatgacagtgcagtgagaaagggagatttcttgtcacctgcatcactcctgggtgtggatgcctgagtgaacattcggggaaagattccgcaacagcgcactgggtgggcttggaatcagaagtagtcctggggatttgggaacgcataccgagaactactgcataattcatggagcaatgggaaggggttgcaatggcctgaatatattacatcaattcagaacaatcccactggaatctagaacgaggaaaattccaacagaaatggaaaaaagagcccgtggcatttagatgctgccgatgagtgctccatgcccgctctgaggccctgcaactgtgctcccttcacatcatctcttttggtggcaaacacaccaagtgaagagaaaatctaaatgaatactttacggaggacaaaaggggttgggcgccactttgtactgataaaaccgttttcatgccataatgctgggattccatcaagaacctatttttgcttgcaggattcactattcgtaattcaaagcatttttttggttcttaaagaataatttctatttggtgtgtaatataaacagacaatacagacacagccggttaatgctttgtgacatagccccaatttcaactgagattcagagccctaagaaggcagggcactcacatataaacagaccgttccacggca

SEQ ID NO: 79994 - DNA, 1517 bp, Homo sapiens
ggtgatggtcaggtggttgttaactgtctgtttaaaataataattggttgcagctggtgccagggaaaggccgtctcccagtagatagaaacacctgaaacaggtggtcagctgcttaatctcaggagttgggcaactgggctcaagcatgctcactaagaggcaaaatggtgagtttaactgatacatgactttccagggacwttcggctggtaagggaagaatgcctcaagtgagcatgcatacaactccagtgaacacactgtgcacactcccctcccaagggctggcaggtcactgtgcacacggacagcccaagggaagaatcaggggagaagggacgcaaggcatgccaacatgtacaaccccaagtcaaaggtgaaatggcacacttgatcactcaagttgcccaggtggctctttcccaagtgtactttacttcctttcattcctgccctaaagctttttaataaaccttcactcctgctctaaaacttgcctcagtctctccctctgcctcgtgcccctcggtcaaattctttcctctgaggacgcaagaattgaggttgctacagacctgtacagattcgctgtcactaataattttagaaagaaaaaaagatgaacatggattaggagggtctacatgtgggaaaaaaattgcaactgagatattttagagagcccacctctagtaacaaaagaaaaaataggcccggcacggtggctcacacctgtaatcccagcactttgggaggccgaggcaggtggatcctgaggcctccccagaagcagatgctgccatgctccctgtacagcctgcagaactgtgagccaattaaacatcttttccttgtaaattacccagtctcaggtatttcttcatagcagtgagagaacagctaatacggtagccatctctggggggacatcgaggaggctctcattctcctagaagtctttccaattcatattatcctcagaccatagttcatctcttctgtaagccacaactctgggccaccaggaaacccagtacatgtagttgtctgcttgccaccgctcaattttttatttttatgcattatgtataactatgtatgtttcgtaacttcccaacataggctttcctaattatctttttgttccttttataaacaagctttattgaggtatgatttacatactgtataatttacccaaagtgcacacttcaatcgtttttagtaggtttactgagttgtgcaatcatcatgacagtcccattttagaacacttccacatccccaagagcccctcatgcccacttttagccaatccccattcccatctccaacaccaggcaatcactaatatgctttccatctccatagatttgcctcttctggacattttataaaaatgcagtcatacaatctgggttcttttttttctcattttactctgcatatgttctaggctcatccatgtttgcagcatggatcagtagttactccctcttaccattgaatggtagg

SEQ ID NO: 79995 - DNA, 1517 bp, Homo sapiens
ggtgatggtcaggtggttgttaactgtctgtttaaaataataattggttgcagctggtgccagggaaaggccgtctcccagtagatagaaacacctgaaacaggtggtcagctgcttaatctcaggagttgggcaactgggctcaagcatgctcactaagaggcaaaatggtgagtttaactgatacatgactttccagggacattcggctggtaagggaagaatgcctcaagtgagcatgcatacaactccagtgaacacactgtgcacactcccctcccaagggctggcaggtcactgtgcacacggacagcccaagggaagaatcaggggagaagggacgcaaggcatgccaacatgtacaaccccaagtcaaaggtgaaatggcacacttgatcactcaagttgcccaggtggctctttcccaagtgtactttacttcctttcattcctgccctaaagctttttaataaaccttcactcctgctctaaaacttgcctcagtctctccctctgcctcgtgcccctcggtcaaattctttcctctgaggacgcaagaattgaggttgctacagacctgtacagattcgcygtcactaataattttagaaagaaaaaaagatgaacatggattaggagggtctacatgtgggaaaaaaattgcaactgagatattttagagagcccacctctagtaacaaaagaaaaaataggcccggcacggtggctcacacctgtaatcccagcactttgggaggccgaggcaggtggatcctgaggcctccccagaagcagatgctgccatgctccctgtacagcctgcagaactgtgagccaattaaacatcttttccttgtaaattacccagtctcaggtatttcttcatagcagtgagagaacagctaatacggtagccatctctggggggacatcgaggaggctctcattctcctagaagtctttccaattcatattatcctcagaccatagttcatctcttctgtaagccacaactctgggccaccaggaaacccagtacatgtagttgtctgcttgccaccgctcaattttttatttttatgcattatgtataactatgtatgtttcgtaacttcccaacataggctttcctaattatctttttgttccttttataaacaagctttattgaggtatgatttacatactgtataatttacccaaagtgcacacttcaatcgtttttagtaggtttactgagttgtgcaatcatcatgacagtcccattttagaacacttccacatccccaagagcccctcatgcccacttttagccaatccccattcccatctccaacaccaggcaatcactaatatgctttccatctccatagatttgcctcttctggacattttataaaaatgcagtcatacaatctgggttcttttttttctcattttactctgcatatgttctaggctcatccatgtttgcagcatggatcagtagttactccctcttaccattgaatggtagg

SEQ ID NO: 79996 - DNA, 1375 bp, Homo sapiens
ctgggcacatagttcactttggtaacaaaacccccaactcaaccagtgtgggtgaaagagaaatccactctatacgctggctcatgcctgaatctcagcagttagagaggctgaggcaggaggatcacttgagcccaggagtttgaggcttgcccgggcaacataatgagacctcatctctacaaaaaaataaacttaaaaaaatttagccccgtgcagtggcatgcatctcaccctggggggctgaggtgggaggatcacttgagcctaaggaagatagagctggcagtgagctatgatcacgctacagcactcaatcctggacgacagagtgagacgctgtctcaaattaaaaaaaaaaaaaaaaaaaaggaaactcatcagagaacctgggagggagggtggggtgctgccagtttaggcrctgcccagtggcttcagcggctccctgtgggaacccactttcctgactgccctcccctggatgccaggcatgtgatgatctgagacagaatggcctggggcctggctgttgtgctggggtcactgtgggtctcacaccgttgctcctgacctctgcacgtgtggcccctgaggtccataagtgagcagtcccactcaagcagctcccactgcacccatccagggccagtggggtgagattcagagtctgggggatccctgggctctgcccatttgagatctttgggaatgaccaagtctaatgggaatgacaagtgtgtcaggagataggactgtgacacccaaacatcttggctgtgggtttatgtgggaaggcacaagaagctgggtaggacgttcatcaattagaataagggtttggagtcaggcacacccggctacagccttttataggttatgtgaccttggaaagatcacttaacctctctgagcctctatttcccaatctgggaagtggggataattatagacaccccccctcctccacacagggttattgttagatttagataggctgggggcttggtgggagttttgtaagctgttaagtgctttgcacaggtgggagtccctgactcccttggtcacccctgcagctgctggacatcgccgggaatcagctcacagagatccccgaggggctccccgagtcacttgagtacctgtacctgcagaacaacaagattagtgcggtgcccgccaatgccttcgactccacgcccaacctcaaggggatctttctcaggtaggagcccactcgcggccctgtacacacccccgtggggcccaccctggctccaacgggacagttgatgcacgtgggaacagcttggctccactgctgcctgtgtaaccacggctcagatctcaagggtggggacagtcctggcca

SEQ ID NO: 79997 - DNA, 1375 bp, Homo sapiens
ctgggcacatagttcactttggtaacaaaacccccaactcaaccagtgtgggtgaaagagaaatccactctatacgctggctcatgcctgaatctcagcagttagagaggctgaggcaggaggatcacttgagcccaggagtttgaggcttgcccgggcaacataatgagacctcatctctacaaaaaaataaacttaaaaaaatttagccccgtgcagtggcatgcatctcaccctggggggctgaggtgggaggatcacttgagcctaaggaagatagagctggcagtgagctatgatcacgctacagcactcaatcctggacgacagagtgagacgctgtctcaaattaaaaaaaaaaaaaaaaaaaaggaaactcatcagagaacctgggagggagggtggggtgctgccagtttaggcactgcccagtggcttcagcggctccctgtgggaacccactttcctgactgccctcccctggatgccaggcatgtgatgatctgagacagaatggcctggggcctggctgttgtgctggggtcactgtgggtctcacaccgttgctcctgacctctgcacgtgtggcccctgaggtccataagtgagcagtcccactcaagcagctcccactgcacccatccagggccagtggggtgagattcagagtctgggggatccctgggctctgcccatttgagatctttgggaatgaccaagtctaatgggaatgacaagtgtgtcaggagataggactgtgacacccaaacatcttggctgtgggtttatgtgggaaggcacaagaagctgggtaggacgttcatcaattagaataagggtttggagtcaggcrcacccggctacagccttttataggttatgtgaccttggaaagatcacttaacctctctgagcctctatttcccaatctgggaagtggggataattatagacaccccccctcctccacacagggttattgttagatttagataggctgggggcttggtgggagttttgtaagctgttaagtgctttgcacaggtgggagtccctgactcccttggtcacccctgcagctgctggacatcgccgggaatcagctcacagagatccccgaggggctccccgagtcacttgagtacctgtacctgcagaacaacaagattagtgcggtgcccgccaatgccttcgactccacgcccaacctcaaggggatctttctcaggtaggagcccactcgcggccctgtacacacccccgtggggcccaccctggctccaacgggacagttgatgcacgtgggaacagcttggctccactgctgcctgtgtaaccacggctcagatctcaagggtggggacagtcctggcca

SEQ ID NO: 79998 - DNA, 838 bp, Homo sapiens
gctgtctgggcttagattccagcctcctgtcaagtggtcctggcaagttcctgaaccctgtgcctcagcatctttgtcccaaaaagacctgggtcacagagctactaggaggattaaacgactacgggcttggacagcacctggcccattgtacccactcagtcaatggtgaccatgactattattattactatgtttgtcatgagagttcccagtggcagtgctgggactaaaacaggccggtgtggcccctgtgtcttcctctcccccgggcctctgcctggaaggccggttctactcgccagagcctctcaggagctccagacctgctgggcttgaggctgcggttcctgctggcaggagatggccagggggctgctggctctggctggcttggcccctggcatgggagctggcatgtttggggctttgtcctgccctctgaccccctatctgcgggagggtgttcctggcaatggctcctgggcttttcttcactggggtctgctcctgaatcctgcaggaggtgcatctgctgccaggggtgggtgtcatatgactgctgggtacagaggcctgcagggcattttacagatggaaaaactgagacccaagtgagggctagagggaagagtgaggccttcagtgccagaaagatgtggcttaagttcctgcgactcccttaatgtggagctcagacactygccatggggagagccaaactgccttcacagcactagatgctccataagggaccacttccttcctgccccctccaccaacgacatggtttgcacaactctaaattcctgaggtctctgcactgggctgaggtttg

SEQ ID NO: 79999 - DNA, 838 bp, Homo sapiens
gctgtctgggcttagattccagcctcctgtcaagtggtcctggcaagttcctgaaccctgtgcctcagcatctttgtcccaaaaagacctgggtcacagagctactaggaggattaaacgactacgggcttggacagcacctggcccattgtacccactcagtcaatggtgaccatgactattattattactatgtttgtcatgagagttcccagtggcagtgctgggactaaaacaggccggtgtggcccctgtgtcttcctctcccccgggcctctgcctggaaggccggttctactcgccagagcctctcaggagctccagacctgctgggcttgaggctgcggttcctgctggcaggagatggccagggggctgctggctctggctggcttggcccctggcatgggagctggcatgtttggggctttgtcctgccctctgaccccctatctgcgggagggtgttcctggcaatggctcctgggcttttcttcactggggtctgctcctgaatcctgcaggaggtgcatctgctgccaggggtgggtgtcatatgactgctgggtacagaggcctgcagggcattttacagatggaaaaactgagacccaagtgagggctagagggaagagtgaggccttcagtgccagaaagatgtggcttaagttcctgcgactcccttaatgtggagctcagacacttgccatggggagagccaaactgccttcacagcactagatgctccataagggaccacttccttcctgccccctccaccaacgacatggtttgcacaactctaaattcctgaggtctctgcactgggctgmggtttg

SEQ ID NO: 80000 - DNA, 1009 bp, Homo sapiens
gatatacacttatttggtaattatgagagttaaatggatgagaacatgtaaagcatctagaacagccctcagtacacagtgtcaataaacacaagctgtttttatttttaattaataatttttgttttttagagacagggtctyactctgtcaccaagactggtatacagtgctgccatcgtagctcactgcagcctccaattcctaggctcaagcgatcttcccactgcctcctgagtcgctgggaatacaggtgtgaagaagcttttttttttttcttttgagatggagtctcactctgttgcccaggctggagtgcagtggtgcgatctcggctcactgcaacctccacctcccgagttcaagcgattctcctgcctcagcctccctagcagctgggactacagtcacgcaccaccacacccggctaatttttgtatttttagtagagacggagtttcatcatgttggtcaggctggtctcaaactcttgaccttgtgatccgcccgcctcggcctcccaaagtgctgggattacaggcaagagccacggcaagccataggtttagcagttatatgccactcccctgccttatgttccgctctcccaataccatattgacaggtaaatctctagtgagtgaatatattattatcatctaaaactatttatgaataacaagctctgagactcctgcagttacatttccattcttgactaatgtgttggtttttttcccagaaaccacttattcccccaaattagtaacatcttcattgattttttaaaatttttaaacattttcatgacacttgttatttgaaatattactaactgatgactatttatattaaaaagttaaaatcatggcctggcaaaatgctcttttatcactatttagaatttcctattttgtgaatcccatgtcctcctctttctttttaatttcctcttttttgggagcatttttcccagtaacttccacagaaagtgttcatggaatatgca

SEQ ID NO: 80001 - DNA, 642 bp, Homo sapiens
tttgtttgtttgtttgttttttagagggaatctcgctctgtcgcccaggctggagtgcagtggcatgatctccgctcactgcaaggtccgcctcctgggttcacgccattctcctgcctcarcctcccaagtagctggtactacaggtgcccgccagcattacctcattctaagcccataaaaactatggactcagccgcacagttggctactagttctggagtcctctctccactgagagctttctttctgtcactcggtaaaattcttttctgccttactcactctctggtgtccacgcaccttattcctcttggttgaaggttacaaacccacaacccaacaagctgctggtggcagaagtaaaaatgctgtaccacgctcttgcttgctaaactgtgagagtcaaaaaagcctcttagtgccacacacttctgctcgccaagctgcgagtggtgggaataaaagggcttgtaacacactcccactaactgagctttaggagtgaagagctgtgacattttgggggagctcagacctctagaatccccaagcaagagctgtaacaccccttggggctccgcaattgctggcctttctgagtttttgggtgccacagcgttcccctcatctggacgtcag

SEQ ID NO: 80002 - DNA, 642 bp, Homo sapiens
tttgtttgtttgtttgttttttagagggaatctcgctctgtcgcccaggctggagtgcagtggcatgatctccgctcactgcaaggtccgcctcctgggttcacgccattctcctgcctcagcctcccragtagctggtactacaggtgcccgccagcattacctcattctaagcccataaaaactatggactcagccgcacagttggctactagttctggagtcctctctccactgagagctttctttctgtcactcggtaaaattcttttctgccttactcactctctggtgtccacgcaccttattcctcttggttgaaggttacaaacccacaacccaacaagctgctggtggcagaagtaaaaatgctgtaccacgctcttgcttgctaaactgtgagagtcaaaaaagcctcttagtgccacacacttctgctcgccaagctgcgagtggtgggaataaaagggcttgtaacacactcccactaactgagctttaggagtgaagagctgtgacattttgggggagctcagacctctagaatccccaagcaagagctgtaacaccccttggggctccgcaattgctggcctttctgagtttttgggtgccacagcgttcccctcatctggacgtcag

SEQ ID NO: 80003 - DNA, 642 bp, Homo sapiens
tttgtttgtttgtttgttttttagagggaatctcgctctgtcgcccaggctggagtgcagtggcatgatctccgctcactgcaaggtccgcctcctgggttcacgccattctcctgcctcagcctcccaagtagctggtactacaggtgcccgccagcattacctcattctaagcccataaaaactatggactcagccgcacagttggctactagttctggagtcctctctccactgagagctttctttctgtcactcggtaaaattcttttctgccttactcactctctggtgtccacgcaccttattcctcttggttgaaggttacaaacccacaacccaacaagctgctggtggcagaagtaaaaatgctgtaccacgctcttgcttgctaaactgtgagagtcaaaaaagcctcttagtgccacacacttctgctcgccaagctgcgagtggtgggaataaaagggcttgtaacacactcccactaactgagctttaggagtgaagagctgtgacattttkggggagctcagacctctagaatccccaagcaagagctgtaacaccccttggggctccgcaattgctggcctttctgagtttttgggtgccacagcgttcccctcatctggacgtcag

SEQ ID NO: 80004 - DNA, 716 bp, Homo sapiens
cgctaatataatttctattttcagaggattaagtcatttgaagctcatccattttagtactacttaaattagtataattgcattttagcttcccttttttctcaggyaaatgccttcccacttatattttaaatgtcatttgattttcacagttcctactagtatatttgcaaataaaggcaatttaaataaaaaaaattacgatcataagataaacccatttaatgagatggtttacacaaattatatacaatttaaatatagataagattttgtataaactgacatcttgctatatgtctcatatttatgttgtttcttgtttgtttatactcctcaacagctatttttttaagtttatatgaaaatataattttgaggtctacatgataggtaaaatgattttattactacgtatatcactgccacaatggaaacaaaacactgaatactacttagattagaaagattttatttcatttcattagatataatgacaattgtactttcatgcagcatcgaaagcagttttgattttgttttctcaggatttgctttgccctattgagtttggaaagttggtacatttaaaagttgtaaaattaactttccacattcaactaaaatgtaatatgataatattgtggttcttcttctagaaattagtaaaagaacaagttacagtactgagtacaagatctgataactaaacatag

SEQ ID NO: 80005 - DNA, 716 bp, Homo sapiens
cgctaatataatttctattttcagaggattaagtcatttgaagctcatccattttagtactacttaaattagtataattgcattttagcttcccttttttctcaggtaaatgccttcccacttatattttaaatgtcatttgattttcacagttcctactagtatatttgcaaataaaggcaatttaaataaaaaaaattacgatcrtaagataaacccatttaatgagatggtttacacaaattatatacaatttaaatatagataagattttgtataaactgacatcttgctatatgtctcatatttatgttgtttcttgtttgtttatactcctcaacagctatttttttaagtttatatgaaaatataattttgaggtctacatgataggtaaaatgattttattactacgtatatcactgccacaatggaaacaaaacactgaatactacttagattagaaagattttatttcatttcattagatataatgacaattgtactttcatgcagcatcgaaagcagttttgattttgttttctcaggatttgctttgccctattgagtttggaaagttggtacatttaaaagttgtaaaattaactttccacattcaactaaaatgtaatatgataatattgtggttcttcttctagaaattagtaaaagaacaagttacagtactgagtacaagatctgataactaaacatag

SEQ ID NO: 80006 - DNA, 716 bp, Homo sapiens
cgctaatataatttctattttcagaggattaagtcatttgaagctcatccattttagtactacttaaattagtataattgcattttagcttcccttttttctcaggtaaatgccttcccacttatattttaaatgtcatttgattttcacagttcctactagtatatttgcaaataaaggcaatttaaataaaaaaaattacgatcataagataaacccatttaatgagatggtttacacaaattatatacaatttaaatatagataagatkttgtataaactgacatcttgctatatgtctcatatttatgttgtttcttgtttgtttatactcctcaacagctatttttttaagtttatatgaaaatataattttgaggtctacatgataggtaaaatgattttattactacgtatatcactgccacaatggaaacaaaacactgaatactacttagattagaaagattttatttcatttcattagatataatgacaattgtactttcatgcagcatcgaaagcagttttgattttgttttctcaggatttgctttgccctattgagtttggaaagttggtacatttaaaagttgtaaaattaactttccacattcaactaaaatgtaatatgataatattgtggttcttcttctagaaattagtaaaagaacaagttacagtactgagtacaagatctgataactaaacatag

SEQ ID NO: 80007 - DNA, 870 bp, Homo sapiens
aatcacacggtaagaaaggaagcaagagagaaaaaccaaggagccagaatctttttaacaacccacttgcccctctggtatggcaatctactcatgacccaaacacctgctactaggcactaccttccaaaactgcmccactgaaaatcaaattttaacatgagttttggtggggacaaaccacatccaaagcacagcaaggagaaatgtactttcaattggctgtgaagcacacataatttataattatgtcctaacaagctgcattattctgccatccagaacagaacatatagttttcaacatataaaaaaattgcaaaaaatgaaattaaactacattttataaaagtaatatttaatattaagagatttaaatttaggatcatgtgctttctcttttatgttcctctaaatgtttgaaactttataaagcaaatgttcaaaataatttaagggttctgtgatgactggaaaccattttacaaagttctccaagtttatgttatgattttcttaaaataagttggaattctttaaggactatatatcctacaagctgtttactaacacatttcagtttctgaagctttcaggaaattgcaattaaaatataaaagtgctcacattattttttaaattgaactttgaaatatatttacttgtggggagaaactttttgtggagctaatatttttacttggatgaatttatcttttgaacaaaaatagaagaaaactgagagtccctacaatattttagcatccaaattaggaaaaacattcaaaaatatcataaatgtagataacttatttgatgatttaattcttgaaaatattatttgaagattgatactctaagagtaaaaaga

SEQ ID NO: 80008 - DNA, 666 bp, Homo sapiens
atggggagactggatgtggagaggtgcaaaattagcccgtcatgcaaggcttggtaacatttttcaatggtatagggaggagctttataggtattgggaggcagaaggaagcattgagggctggacatgcagccttggcaattgctagagagtctccttgtgtggagggagaactggtcctccctcacaattcattgcattgttctctgtgctgcattcactttctacttggagacaacagccaccacaccatgaccttaggggaggcttcctggccatttatgttcygacccaaaggacaaatggcccttcccttaattctgtgcagcacagctgagcctggaggaacagctaagtaaaacgttactaatagaaggaaatgatgatggagagtaacatgtgatcaggcttataggtagcacagcttaacgactcattctgctttaatatattacggtatttacagatagatttcttttattgacaaataaagaggttctggactagattttgttaaagaaagctacaggttacctcatagatgatcaacatcttaaacccttaatatggtcctcaaggcattgcctgatatggccccaatgcccctccttcagcctcagctccttttgccccgcttctccttgctgtttgagctctaggcacact

SEQ ID NO: 80009 - DNA, 666 bp, Homo sapiens
atggggagactggatgtggagaggtgcaaaattagcccgtcatgcaaggcttggtaacatttttcaatggtatagggaggagctttataggtattgggaggcagaaggaagcattgagggctggacatgcagccttggcaattgctagagagtctccttgtgtggagggagaactggtcctccctcacaattcattgcattgttctctgtgctgcattcactttctacttggagacaacagccaccacaccatgaccttaggggaggcttcctggccatttatgttctgacccaaaggacaaatggcccttcccttaattctstgcagcacagctgagcctggaggaacagctaagtaaaacgttactaatagaaggaaatgatgatggagagtaacatgtgatcaggcttataggtagcacagcttaacgactcattctgctttaatatattacggtatttacagatagatttcttttattgacaaataaagaggttctggactagattttgttaaagaaagctacaggttacctcatagatgatcaacatcttaaacccttaatatggtcctcaaggcattgcctgatatggccccaatgcccctccttcagcctcagctccttttgccccgcttctccttgctgtttgagctctaggcacact

SEQ ID NO: 80010 - DNA, 666 bp, Homo sapiens
atggggagactggatgtggagaggtgcaaaattagcccgtcatgcaaggcttggtaacatttttcaatggtatagggaggagctttataggtattgggaggcagaaggaagcattgagggctggacatgcagccttggcaattgctagagagtctccttgtgtggagggagaactggtcctccctcacaattcattgcattgttctctgtgctgcattcactttctacttggagacaacagccaccacaccatgaccttaggggaggcttcctggccatttatgttctgacccaaaggacaaatggcccttcccttaattctgtgcagcacagctgagcctggaggaacagctaagtaaaacgttactaatagaaggaaatgatgatggagagtaacatgtgatcaggcttataggtagcacagcttaacgactcattctgctttaatatattacggtatttacagatagatttcttttattgacaaataaagaggttctggactagattttgttaaagaaagctacaggttacctcatagatgatcaacatcttaaacccytaatatggtcctcaaggcattgcctgatatggccccaatgcccctccttcagcctcagctccttttgccccgcttctccttgctgtttgagctctaggcacact

SEQ ID NO: 80011 - DNA, 711 bp, Homo sapiens
atcctatggagaatggtgaatgatagatatatgaaccatggagctccctataaaatatagaaagctaatatatgatgtttaaattcagaggttagttcaccagacagtcagtgttaatgcatatttacttccagacccatagtagaatgatgattcaactgctgggaaattaattagtccagtggttttagaactgtgactgttcctatgggaaaatgaattagaaaactatcatagaaataaacgaccctttttcccttttcatatttatttcatgataatctgcatgactmtgctaagggatttgaatgcattataatcagttaatgcttataacaagtttatgagggcaacaccattaacatctccattttccaaatgaagaaattgaggatgagaaagttattgaagcaacttgcctaaggtcacacagatggaaagtggcagaaccaggttcaaagccagacactgctaaagctgttaattaatattatgctatctgtatttcactcatgatttaggtgcaaagaagaaggcaaaaaattaaccttacccttaaatccattagtcatatagaccaacatttgaaggtgattattgagccactgatacatttctaaggacctactgagacatagaaaaaaatgccccagcatagaacttggcaagacaatcttaagcacgactgcaacatactatatttttcctata

SEQ ID NO: 80012 - DNA, 711 bp, Homo sapiens
atcctatggagaatggtgaatgatagatatatgaaccatggagctccctataaaatatagaaagctaatatatgatgtttaaattcagaggttagttcaccagacagtcagtgttaatgcatatttacttccagacccatagtagaatgatgattcaactgctgggaaattaattagtccagtggttttagaactgtgactgttcctatgggaaaatgaattagaaaactatcatagaaataaacgaccctttttcccttttcatatttatttcatgataatctgcatgactatgctaagggatttgaatgcattataatcagttaatgcttataacaagtttatgagggcaacaccattaacatctccattttccaaatgaagaaattgaggatgagaaagttattgaagcaacttgcctaaggtcacacagatggaaagtggcagaaccaggttcaaagccagacactgctaaagctgttaattaatattatgctatctgtatttcactcatgatttaggtgcaaagaagaaggcaaaaaattaamcttacccttaaatccattagtcatatagaccaacatttgaaggtgattattgagccactgatacatttctaaggacctactgagacatagaaaaaaatgccccagcatagaacttggcaagacaatcttaagcacgactgcaacatactatatttttcctata

SEQ ID NO: 80013 - DNA, 635 bp, Homo sapiens
gctgtgattagaggaagcaacacactggtggaaaatctctatcgcaagcactgtcccaggacttacagggacctgattaaaggcccagaggggtcagtgactggggagctgggtccaggtaacaaatagagctaacactcgtttgctgctgctgcagtgtggaaatggacatttcctggagtgccacattttcacttgatctccactgtctcttggsggggtgggcagagggttgcctctcaaatgtcagttaggattagctttctctgtctgtaatagaaaaatcccaaatgatactggctataaaacatacacccatggtccatttgactgcttgacctccaacccaccatgtttgcatttcaggcagtaggatgaagaaaagaggaaaggtgcacttgctttattttgtgaagacttcctgcaagtaccgtataacactttctcttacattgcactgactgagatgtagctgcaagagaggctgggaagtttaaggaggaagaaaaaatgggtactgggataggcagctaacagttttgctacatgttctatttaatacagtaagattaattccaggacctgttagagcattgactgaggtaaaaagagacttgatttctagtcctgatttt

SEQ ID NO: 80014 - DNA, 642 bp, Homo sapiens
  misc_feature (1)...(642): n = A,T,C or G
tgcatacatctatgaataccctggtcaagtattttcatatgcaaggaacagaaaacccactccaagattctggctgtccctgccaaatgcttactcatcaactaacaatggttgccccacccagatccaattctgtgtgaacttctaattcaagcttctactactgcctaagcagagtctatgtttctcttagtttaaattctctcgagagaaaatctgattgaccactagccaatgaaatgtctgccgcccctctctgaagagagatcccctctctcaagagtccacctctgatccaatcagctctttccctgtggagcaagaactgttggcttgcctactcaacatccattccaccatcactatcacttttttcttattaatattgtaaatcaacccctccctcctatggcactatcctcrgctcaaggggtatattctgatttgcctaagtcatggtgtcccattccccttacaagtgagtggtttaggggatggagcacatgacccagtttcttttcattttttaagtctttatgttnnnnnnnnnnnnnnnnnnnnnnnnnnnnnnnnnnnnnnnnnnnnnnnnnnnnnnnnnnnnnnnnnnnnnnnnnnnnnnnnnnnnnnnnnnnnnnnnnnnnc

SEQ ID NO: 80015 - DNA, 1090 bp, Homo sapiens
atttttacctgatgaagaagttgagacagaccctgctcttgtctctctggccattaccacttcaacattgatttcttgacctgagggctttctccaaagctgtggaaggcagctctgtccctatgtgatcagggcaatttggaaatgcctgggaattaacaaactcccactctagcagccttcaccaagtgactggaaagatttgttatatagataccccagctcacttggccttcagatgggataactttgaggcctgtgttttcccagagttttctcatgggattatgctccagtcattataagtggtatctggcttgataccgcaccctttattgactgttttcccttctttgtctcgcttccccacctcctactggtgtttcctgcatctcttagataaactatttgcaacaaaatccttgtctcaggtttctattgagcatttccactaggttatttcccctaatacctgccctgaaagtgcctggcttaatgaggggggcacacgattcaaatcaagccagttggaatccttcacagggaaattttgtccagtctgaaatactgagaaaggaactctcttccttcatccttgtttcattttggttttgcatcattctatttcgagtagtgtccggcacaacgtagaaacttaatctttctggaatatttaatgaatccaattcctacaatttctttcctgccaacttgcattcatcatcagccattaattttaaaatgtatgaaataatgttgctatagcatatcatagtgtcactgcatactgtagtagttaagtgcatggactcaggagctagactgcttgagatataaactctgccacttgccagttgtttgactgtgctggttatatttctgttgtctgtcagttccattctcattcttttactctctctatattacagagtactggaattctaaatatcatttcccagattcacttgccaatttctttccggttcagttctgttaatgggagattcaaggccaagaggatggaaggcatttttkcttttcttctggctccggcctctgcaatgctgtgctctactaccctgactccagg

SEQ ID NO: 80016 - DNA, 526 bp, Homo sapiens
tgtaggraagatttctatgcaagggcatagaggtatatacaaaaggatgattattgaaacattattatgaaatcaacagaaatgcccatcaataaggaagtaattcagtagactatggaacagccatactatggaacagccatactatggaatattcaataatgtattgaaacattattataatgttttcattcttattaaaagaattatgtaagtcttatacatgctcacatgggagaaaagtctatacgtactcatctgaacatgtattctatatacataccagacatgtctacatgagtagacaaaatattaaaaactatatacagccaactattaacaatgatttcctctaggagatgagatttgacatctattaggggatatctctcctcctcagaaaagggaagtagaagctcttttagggagaggtggaaaatctggagggaacaagaggattgaatgtgacaaaacctgctgaagagaggcagggagggaactttcacctttatgtcgtaaacttcta

SEQ ID NO: 80017 - DNA, 1026 bp, Homo sapiens
tgcatgctaagcccccagcacagggactgtacgtgttaagctcgattgaggttggctgcggctatttttttggctgctgcagtatctgacccacagccaccttcaggacagcctcatctttctttaccaatgctacctacagaccccaatttatcagcattctccccgtgctagactcagacctgagtcctagagcttgggtgggtctgtcccaaggatagcaagacaggtccctttttaccccattttctttcttctttctctctctctctttctctctttctttctttctttcttttggagatggagtcttgctctgtcgcccaggtcggagtgcagtggtgcaatctcagctcactgcagcctctgccttcccgggttccagtgattctcctgcctcagcctcccagggggctgggattacaggcatgcrccactatgccgagctaatttttgtatttttagtagagacgggtttcaccatttggccaggctggtctcgaactcctgacctcagaggcaaggggaggtcagagaggaaggcagggaccagatccaagaagcctgttggctaggctggggacttctgtccttttcctggacagtgaagaaccacttactgccttaggcaaaggcatgtcatgatgaggtttgcatttcaaagatcgatggtggagctgctaggctgcaggtggtctggaggggccgcagaatatggggacactcgtaggagacctcaacaactgagcagacgaaatgatgatggtaacttggacgaggcagtggtgttggagatggagagaagagacagagtcgggcaaaacttgggaggcaaaaattggttggttgtattggagaaaggtggttcaaggctcccgggctcccagcctgtgtgtggaggtgacggtggcacatgatatcgctgtttatcttccccatttctgaccttgggttctgagagtgtcattcatccccataatcagggactttggtgccctcttaacagtgtttgtttggttccttgct

SEQ ID NO: 80018 - DNA, 1026 bp, Homo sapiens
tgcatgctaagcccccagcacagggactgtacgtgttaagctcgattgaggttggctgcggctatttttttggctgctgcagtatctgacccacagccaccttcaggacagcctcatctttctttaccaatgctacctacagaccccaatttatcagcattctccccgtgctagactcagacctgagtcctagagcttgggtgggtctgtcccaaggatagcaagacaggtccctttttaccccattttctttcttctttctctctctctctttctctctttctttctttctttcttttggagatggagtcttgctctgtcgcccaggtcggagtgcagtggtgcaatctcagctcactgcagcctctgccttcccgggttccagtgattctcctgcctcagcctcccagggggctgggattacaggcatgcaccactatgccgagctaatttttgtatttttagtagagacgggtttcaccatttggccaggctggtctcgaactcctgacctcagaggcaaggggaggtcagagaggaaggcagggaccagatccaagaagcctgttggctaggctggggacttctgtccttttcctggacagtgaagaaccacttactgccttaggcaaaggcatgtcatgatgrggtttgcatttcaaagatcgatggtggagctgctaggctgcaggtggtctggaggggccgcagaatatggggacactcgtaggagacctcaacaactgagcagacgaaatgatgatggtaacttggacgaggcagtggtgttggagatggagagaagagacagagtcgggcaaaacttgggaggcaaaaattggttggttgtattggagaaaggtggttcaaggctcccgggctcccagcctgtgtgtggaggtgacggtggcacatgatatcgctgtttatcttccccatttctgaccttgggttctgagagtgtcattcatccccataatcagggactttggtgccctcttaacagtgtttgtttggttccttgct

SEQ ID NO: 80019 - DNA, 758 bp, Homo sapiens
gcctgcctcagtctcccaaagtgctgggtttataggtgtgagccaccgtgcctggccagtctaggtccttaaccaccaaacaaaactcttctctgcttccaatcccaccccccaccccagtactccctcttccactggaggccagcatccttgctcttacatccctaatggacctggtcacatccctgcttaagccccacagtgagtggacttctagaaaaatatggcatgttgagcagacagatttatcgctgctcccttccaaaactccactatgatgacagtagaggaaataaacaaggcataaatccataaggggtgatgatgggtaatgaaggatgtcaacaagattctggaagctgggaagcagatggccaggcagtagctgacttggtagagtgataaaagctgagagccaaytgcctgcagggaggaaccacccagaaggagaagcccggaaaggctcaggaatggagtttccagggacccctcagggccttagtgccaggagggctgaagacagtagggctgaaagtctgtaagaaccgatcagaccctagagcccctccccaaccctgagtagccaagtgatggccacctgccacccagcagaggggccggggatcactccctggggagggtgaaccaggaggctctggcccaggaatggtagacatacatgaaggcccaaggcagaaggacctacagagaaaaggggacgagcaaaatctacacattgaagggtaagaaacacgcca

SEQ ID NO: 80020 - DNA, 950 bp, Homo sapiens
tgcatttgaggacaaaacttgcctaaaagagtgtcatgtagctcccccagttgagaattttagagctggttggcatcagtgcccccckgaccttcagctcatctttagctgccttggctgggattgtccttgccctgggaaccaacgttaatactcacttaaaacaagtgttggagggtgggcatggtggcccatgcctgtaatcccagtactttgggaggctgaggcgggtggatcacctgaggtcaggagttcgagaccagcctggccaacatggcgaaactctacctctactaaaaatacaaaaattagttgggcatggtggcttgcacctgtaattacagctacttgggaggctgaggcaggagaattgcttgaacccagcagccggaggttgcagtgagccaagatcatgcaattgtactccagcctgggggacaagaacgaaactctctctcaaaaaaacaaaaacataaacaaaacaaaacaaaaacaagccttggagttgtagcctccacgaactgtgatccttgggaaagttaggaaatctcccactgcgagtgaacctgggaagtagttcttccctatctctgtcattttcgtctccttgacctgggctcccttccttacgttttctggcctggattctccaagcagatgaggaaacaaacccagagatatgcagtgactcagattatacaactattaagtggcccacttgggcctgccctgggtcttgttactttcaaagcccatgctctatagtgcattattttgtccctccttgcctcccattttacaaaacacatgcctggaccaagattaaacttcttgttgccctttcttacttctggcttttccccacttctctgagggtttaccacacagtgcccctaccaccatgaggcccttcttgtcttcactgttgaattaacatatgttaagggaca

SEQ ID NO: 80021 - DNA, 955 bp, Homo sapiens
atgcatactttaaaggaaatttagagccctaggatagactagccttataatagaaaagaaaatgtaayaatgagctaagtattcaactcaagaagttagagggaaaataagaactatacaaaagtaggaggaagaaaataaatagaagcgcgtaagtcaatgaaacaggaaataaagtagagggatttctgactggttaggttatttgggctgacatgttgccaaaaagcaacttaaaatgctggataaaatagtttaaaaatataaagtatagaagtgctccccaagtggaaggaagtaaattttgctctgaagttatttgccaatctaggcacacttgatttcattatgacagcaatgcagggtaaagaacaaaatcaaagctctgggtccaccaaggtgaggagtctttcctatattagttgtgagcatccccaaaggcctacgattaggggaaaggtgaatcagaagtaaacctcccctacatctttctgccaggaaactccaagaaaagttggcttgttaactacactgagcaggtggggagaaaactctccttgagacattgtaatcatagctggcctttttttttttgtagatttatagcccatattacatgaagtattttttttaactttaagttataaatcttgtttaaagtcgtcctaaactgaaagtgtgtctaagtgtctggcagaagcaaattcaaatcctctctggaggattgtacttttatgctggtcttcatcctctaagaatcttcatcagtaatttttcagggacaatgacaagtacatagtgaaaaataaccaagcacataaggaacaaggcactgtgagaacaagctgaaacaacagatagcaatggaactgcagtaatatctgatcatcaaacaactatgattactatatttttgcattatttaaaatttttgttttacttttattatagtata

SEQ ID NO: 80022 - DNA, 1262 bp, Homo sapiens
  misc_feature (1)...(1262): n = A,T,C or G
aacttggaaatgaaactagtttactcttctttgcaaattgaaaggtgaaaaataaaagcgatgacagggttctttccatttgtctgatcatgatccaacaatcttagtgacaacaaatagaaattttattaaataaaagaagttgcaaatgaatgaaacattctttttaaaaataacagctttattgagatataattcacataccataaaattcactcttttaaagtgtacaattcagtggtatttagtatattcatttatagtatagatggttttgtgcaaccatcaccactaatttcagaacattttcatcatcctgaaaagaaactacatacctgtttacagtcactccccatccaccccactccagaccctggtaactactaacctactttctgtttctgtggatttaccacttttggacattttatatatatggagtaatatgatctgaggccttttgtgagtggcttcttttattaagcacagtgatttcaggcttgtccacgctgtagtatgtatcagtacttcattccattttatggctgaataatattccatagtatacatacaccacattttgttcattcatcagttgatggatatttgaattgttttcacttttgggctattgtacgtaatgcttttatgaacatttatgcagaggtttttgtttggatatatattttctattcttctgctgataaataggagtggaattgctgggtcatgtagtaacttggtggaactaagcatcttttaagttctctcagttattcacatgagccccatttacttagcacatcaaatggtcattgtattaatgcctagaagataagaggcaatctctaccattgcaggctttggcaggtgyggtggcctgtaatcccagaattttggaaggctgaggcaggtggatcgcttgaggccaggagtccgagaccagcctggccaacgtggtgaaaccccccatctctactaaaaatacaaattagctgggcttggtggtgtgtgcctgtagtcccagctactcaggaggctgatgcccaagaatctcttgaacctgggagacggaggttgcagtgaactgagattgcgtcactccactccagcctgggcaacagagcaagagattgtctccaaaaaaaaaaaaaaaaaaaannnnnnnnnnnnnnnnnnnnnnnnnnnnnnnnnnnnnnnnnnnnnnnnnnnnnnnnnnnnnnnnnnnnnnnnnnnnnnnnnnnnnnnnnnnnnnnnnnnnt

SEQ ID NO: 80023 - DNA, 1271 bp, Homo sapiens
caaatgaataaaaattgtttttaattaagagaaaagaaaacttgaggcaggcggatcacgaggtcaggagttcaagaccagtytagccaacatggtgaaaccccatctctactaaagatacaaaaattagctgggcatggtggcacgcgccaactacctgggaggctgaggcagcagaattgcttaatcaggacccgggaggtagaggttgcagtgagctgatatcacaccactgtactccagcctgggctgcagagcgagactctgtctcaaaaaaaaaaaaaaaaaaaaaaagaaaagaaaaaagaaaacttacaatgcaacgtgataaatgtgatagaggaagagatggctcagtgttgtcaagatgtaacagtgagagagatgaaaaatcattggatgagaatcaggggaggctttctggagtaggcaatagctgagcttgggtcttcagagacatgggcattaactaggcagaaaaaggagggacttcacccccagcaaaggagacaacacaaaggggtaggcacagggataggcaaaagccattttggaaacagcaagtttgccttggcttgagcagaggggaaggctgtatatgttggcaggggccagatcaggaaggatccttacctgctaccagccatgtggatgtttctctgaaaggcaaaggagaagttccttcagggtgtgtgtgtgtgtgtgtgtgtgtgagaaacagatagacagacagacataatcagatttgaattttatttatttatttatttatttttgagacaaagtctcactctgttgcccaggctgcagtgcagtggtgcaattatggctcactgcaacctccatctcccaagttcaagcaattctcctgcctcagcctcccgagtagctgggattacaggtgcctgccactatacccgcctaattttggtagttttagtagagaaggggtctcaccatgttggccaggctggtcttgaactcctgacctcaagtgatccgcccgctttggcctccaaaagtattgggattacagacgtgagcccctgcgcctggcccgatttgcattttagaaaaatctttcttgctgctgtgagggccatgggtcagaaagggagcaaaggtggaggtaggcagagcagttgagaggctatggaaggaaataaggtgaagtaaggcagcagagggatgttgggggacagatttggggcctggggctgtggaagaaggagtctgggatgagcacctggatggaggacagcccatcctct

SEQ ID NO: 80024 - DNA, 1271 bp, Homo sapiens
caaatgaataaaaattgtttttaattaagagaaaagaaaacttgaggcaggcggatcacgaggtcaggagttcaagaccagtctagccaacatggtgaaaccccmtctctactaaagatacaaaaattagctgggcatggtggcacgcgccaactacctgggaggctgaggcagcagaattgcttaatcaggacccgggaggtagaggttgcagtgagctgatatcacaccactgtactccagcctgggctgcagagcgagactctgtctcaaaaaaaaaaaaaaaaaaaaaaagaaaagaaaaaagaaaacttacaatgcaacgtgataaatgtgatagaggaagagatggctcagtgttgtcaagatgtaacagtgagagagatgaaaaatcattggatgagaatcaggggaggctttctggagtaggcaatagctgagcttgggtcttcagagacatgggcattaactaggcagaaaaaggagggacttcacccccagcaaaggagacaacacaaaggggtaggcacagggataggcaaaagccattttggaaacagcaagtttgccttggcttgagcagaggggaaggctgtatatgttggcaggggccagatcaggaaggatccttacctgctaccagccatgtggatgtttctctgaaaggcaaaggagaagttccttcagggtgtgtgtgtgtgtgtgtgtgtgtgagaaacagatagacagacagacataatcagatttgaattttatttatttatttatttatttttgagacaaagtctcactctgttgcccaggctgcagtgcagtggtgcaattatggctcactgcaacctccatctcccaagttcaagcaattctcctgcctcagcctcccgagtagctgggattacaggtgcctgccactatacccgcctaattttggtagttttagtagagaaggggtctcaccatgttggccaggctggtcttgaactcctgacctcaagtgatccgcccgctttggcctccaaaagtattgggattacagacgtgagcccctgcgcctggcccgatttgcattttagaaaaatctttcttgctgctgtgagggccatgggtcagaaagggagcaaaggtggaggtaggcagagcagttgagaggctatggaaggaaataaggtgaagtaaggcagcagagggatgttgggggacagatttggggcctggggctgtggaagaaggagtctgggatgagcacctggatggaggacagcccatcctct

SEQ ID NO: 80025 - DNA, 1271 bp, Homo sapiens
caaatgaataaaaattgtttttaattaagagaaaagaaaacttgaggcaggcggatcacgaggtcaggagttcaagaccagtctagccaacatggtgaaaccccatctctactaaagatacaaaaattagctgggcatggtggcacgcgccaactacctgggaggctgaggcagcagaattgcttaatcaggaccygggaggtagaggttgcagtgagctgatatcacaccactgtactccagcctgggctgcagagcgagactctgtctcaaaaaaaaaaaaaaaaaaaaaaagaaaagaaaaaagaaaacttacaatgcaacgtgataaatgtgatagaggaagagatggctcagtgttgtcaagatgtaacagtgagagagatgaaaaatcattggatgagaatcaggggaggctttctggagtaggcaatagctgagcttgggtcttcagagacatgggcattaactaggcagaaaaaggagggacttcacccccagcaaaggagacaacacaaaggggtaggcacagggataggcaaaagccattttggaaacagcaagtttgccttggcttgagcagaggggaaggctgtatatgttggcaggggccagatcaggaaggatccttacctgctaccagccatgtggatgtttctctgaaaggcaaaggagaagttccttcagggtgtgtgtgtgtgtgtgtgtgtgtgagaaacagatagacagacagacataatcagatttgaattttatttatttatttatttatttttgagacaaagtctcactctgttgcccaggctgcagtgcagtggtgcaattatggctcactgcaacctccatctcccaagttcaagcaattctcctgcctcagcctcccgagtagctgggattacaggtgcctgccactatacccgcctaattttggtagttttagtagagaaggggtctcaccatgttggccaggctggtcttgaactcctgacctcaagtgatccgcccgctttggcctccaaaagtattgggattacagacgtgagcccctgcgcctggcccgatttgcattttagaaaaatctttcttgctgctgtgagggccatgggtcagaaagggagcaaaggtggaggtaggcagagcagttgagaggctatggaaggaaataaggtgaagtaaggcagcagagggatgttgggggacagatttggggcctggggctgtggaagaaggagtctgggatgagcacctggatggaggacagcccatcctct

SEQ ID NO: 80026 - DNA, 1271 bp, Homo sapiens
caaatgaataaaaattgtttttaattaagagaaaagaaaacttgaggcaggcggatcacgaggtcaggagttcaagaccagtctagccaacatggtgaaaccccatctctactaaagatacaaaaattagctgggcatggtggcacgcgccaactacctgggaggctgaggcagcagaattgcttaatcaggacccgggaggtagaggttgcagtgagctgatatcacaccactgtactccagcytgggctgcagagcgagactctgtctcaaaaaaaaaaaaaaaaaaaaaaagaaaagaaaaaagaaaacttacaatgcaacgtgataaatgtgatagaggaagagatggctcagtgttgtcaagatgtaacagtgagagagatgaaaaatcattggatgagaatcaggggaggctttctggagtaggcaatagctgagcttgggtcttcagagacatgggcattaactaggcagaaaaaggagggacttcacccccagcaaaggagacaacacaaaggggtaggcacagggataggcaaaagccattttggaaacagcaagtttgccttggcttgagcagaggggaaggctgtatatgttggcaggggccagatcaggaaggatccttacctgctaccagccatgtggatgtttctctgaaaggcaaaggagaagttccttcagggtgtgtgtgtgtgtgtgtgtgtgtgagaaacagatagacagacagacataatcagatttgaattttatttatttatttatttatttttgagacaaagtctcactctgttgcccaggctgcagtgcagtggtgcaattatggctcactgcaacctccatctcccaagttcaagcaattctcctgcctcagcctcccgagtagctgggattacaggtgcctgccactatacccgcctaattttggtagttttagtagagaaggggtctcaccatgttggccaggctggtcttgaactcctgacctcaagtgatccgcccgctttggcctccaaaagtattgggattacagacgtgagcccctgcgcctggcccgatttgcattttagaaaaatctttcttgctgctgtgagggccatgggtcagaaagggagcaaaggtggaggtaggcagagcagttgagaggctatggaaggaaataaggtgaagtaaggcagcagagggatgttgggggacagatttggggcctggggctgtggaagaaggagtctgggatgagcacctggatggaggacagcccatcctct

SEQ ID NO: 80027 - DNA, 580 bp, Homo sapiens
aagttgctcagtagcctggcagggcacttctgagtcagaaagctccgaaggggagcagtggtttggaaattgctctagtcccatggttttatcgtatccatgggtatgagatacgggtatgggtagcagatattgggtgtagtattgcaggatataagaaaccggcagattctaaatggctaaaaatctgcttcactgggtgatagttaaaacaattggatgtgtgaaaatttgagtttggtactggtgggcttttgagtaaataaatggatctcaggctgctgtgaagaaataaataatctagtgaccaatatagacgtaccatatttatttggtgcatttatatgacagatgcctcygtgaggcaacacttttaccacactgcactattattacattttacctcgtttgtgcttcccataacatagattcctggagagaagaggcaagtttgtattattcttgatatggacttcatcagatccagaatagtgtttgatgaaaagtggaatgctaataaatgttggtttcatgaataattccatatattattgaacttgtccagaagcgatcatcctac

SEQ ID NO: 80028 - DNA, 580 bp, Homo sapiens
aagttgctcagtagcctggcagggcacttctgagtcagaaagctccgaaggggagcagtggtttggaaattgctctagtcccatggttttatcgtatccatgggtatgagatacgggtatgggtagcagatattgggtgtagtattgcaggatataagaaaccggcagattctaaatggctaaaaatctgcttcactgggtgatagttaaaacaattggatgtgtgaaaatttgagtttggtactggtgggcttttgagtaaataaatggatctcaggctgctgtgaagaaataaataatctagtgaccaatatagacgtaccatatttatttggtgcatttatatgacagatgcctctgtgaggcaacacttttaccacactgcactattattacattttacctcgtttgtgcttcccataacatagattcctggagagaagaggcaagtttgtattattcttgatatggacttcrtcagatccagaatagtgtttgatgaaaagtggaatgctaataaatgttggtttcatgaataattccatatattattgaacttgtccagaagcgatcatcctac

SEQ ID NO: 80029 - DNA, 580 bp, Homo sapiens
aagttgctcagtagcctggcagggcacttctgagtcagaaagctccgaaggggagcagtggtttggaaattgctctagtcccatggttttatcgtatccatgggtatgagatacgggtatgggtagcagatattgggtgtagtattgcaggatataagaaaccggcagattctaaatggctaaaaatctgcttcactgggtgatagttaaaacaattggatgtgtgaaaatttgagtttggtactggtgggcttttgagtaaataaatggatctcaggctgctgtgaagaaataaataatctagtgaccaatatagacgtaccatatttatttggtgcatttatatgacagatgcctctgtgaggcaacacttttaccacactgcactattattacattttacctcgtttgtgcttcccataacatagattcctggagagaagaggcaagtttgtattattcttgatatggacttcatcagatccagaatagtgtttgatgmaaagtggaatgctaataaatgttggtttcatgaataattccatatattattgaacttgtccagaagcgatcatcctac

SEQ ID NO: 80030 - DNA, 580 bp, Homo sapiens
aagttgctcagtagcctggcagggcacttctgagtcagaaagctccgaaggggagcagtggtttggaaattgctctagtcccatggttttatcgtatccatgggtatgagatacgggtatgggtagcagatattgggtgtagtattgcaggatataagaaaccggcagattctaaatggctaaaaatctgcttcactgggtgatagttaaaacaattggatgtgtgaaaatttgagtttggtactggtgggcttttgagtaaataaatggatctcaggctgctgtgaagaaataaataatctagtgaccaatatagacgtaccatatttatttggtgcatttatatgacagatgcctctgtgaggcaacacttttaccacactgcactattattacattttacctcgtttgtgcttcccataacatagattcctggagagaagaggcaagtttgtattattcttgatatggacttcatcagatccagaatagtgtttgatgaaaagtggaaygctaataaatgttggtttcatgaataattccatatattattgaacttgtccagaagcgatcatcctac

SEQ ID NO: 80031 - DNA, 781 bp, Homo sapiens
tttggcaagatacccttatatttgctttcacttgtgctaaggaaaactgtctttagccacctgagatggtagcccaatgccagctgttttgggctgtagagggtgtgctgagtagtgagcctgtagcagtgtgacctgtgccagtatccagataccatttgttgatttgctcgagtaaacactcaccatttagagtccagtgaggaaacaccacttgtactttgttacataacttaagtacagcacatttaatttaattggttttgtaatgattactataacctacttttattttaaaaaatggtaaagacatttccaaaattaattaatgcaacaaatttctgcttatacagttcttaaatgagaaatagtttttatgtgtaacatattttcayggtgaatttttataaattttatttgataaatgaaatagctattttcgaaatcaatatggagaatatttaaaaataaatactttggtaacttttaagacggtctagattaaaatattaatagaggacataaatatgaaaaatgtgcaatggctagttacaattaatgtctatttctggttaatgagggcaaatgcattttctttcaagtacttgaaacaacactacaattttcattagactatattttttagaagaaaatactgtaatactaaatgtgtaattttaagtgtttataaggcttttagtattacactattttcttaaaattagtgtagtagaaaaagcatttaattagcagaccatgtctacatttacatttgttattt

SEQ ID NO: 80032 - DNA, 651 bp, Homo sapiens
ttatcaaggttctaactctatttcacaagtcatcataggcgagggtattttttttatgcccttgagaagcaatgaaaatctttcataactatttacttatttttcttattgtcatccagtgggtatagaaatgttgccagactgctttctattacttcgctgctttaggattccagttgtctggacagatttgtccyttagggtagaaagagattatttctagagattccagcctggcttgaatgatgcatctagcaaaaccggtcactcatttttttttttttttctaggacagcagatttaccaggcaacctgctgaaattcaattcggtttcctgagtagacttatgcactcgaaagaggaggagccttgctgtcataagcagagtctgttccaatgtcaggcatatttccctctgtccaaaaactggcctgcaatttatttcaaccatcttttcttgaacattgactatgtgcctggcacagtgctagagggatacagagataaatgagccagtctttcaaggcaggtactatgtagtgattgtggcattttggtttaaaaattagtctaatggaaatgtattaaggctttctctttactctgttatatagttctcagtgagtcagtttgagaacttagattatatt

SEQ ID NO: 80033 - DNA, 895 bp, Homo sapiens
gggcctttggctgcacaccaggcgctctgggtactgatgagctcgcccccaactccatgccaggaatcagaacggttgcccgggagagtcggcagaaagaggaggaaccggatgcagtgatctacctggtttgtcctggtgtccagtaacttggagttcttctttcacacgtggctggcacagaggagacactcataaatacccgagttgaataaaatagtccattgacatggagtcgcatgaagcagcattcgtccatccaaaacgccgatgcttctttagagtggactgagttttcccccaatactaggttgtcccacgcgatggacaaaaatagcccatgtggcaacggaggctggccggggggacctaatgcccatgcctctggcattcccaccaaggtgactgtccagtagctcccaggacagcccatccgtgtagggcaaacgccatgagccactcctgtgtgcaggcacagggcaggcccaggcacagggaggcgggtgggcaggcacacaaacagccaaacgctgaccctggagggcggtggtcatctgctcatcacaggggaaagactggaggtgggagaggcaggtgccacccgcaggagttgggacgagctgtgcacacggctgggcacacgcaaagctgagccttcttcgtgagcaacacggtcacatttgggtgtaggaatcttggctggagttgcccaacgtggggagcagacagctctgcagccaggaccccagttggagaaggcagcgcttggaacaagccaggacagtggacagacgggccggtgccaaatagaagtcatgataacgcgctgacaagctgtgcagacgaacactgtgtgyagacggaggccatggagagtgacgatggggaagacgct

SEQ ID NO: 80034 - DNA, 1475 bp, Homo sapiens
ggcargcagatggtgatgtgcatccagagacagggcgttgacatgtggccaggaggctctggggtcatcgggccgccaccgtgcagccccccgggacttgatgcctccagagaacctgggggctgctgcccctcacctcacccccatttactttaaaatcagtttttgttttagagcagtcttagatttacaggaaaataggaagcacaagcttccatgtgctctacactcacttccctcgtgggtcccttgagtgctttcttacaacatgaggttaagcgtctgcagggtgagaagctggagactgtcctcgtgtcgctgggctgagagccgtgtgcggctgtgagtttttgatgaggaaaagcagtgtgggtcctggatttggacagcacaggcccctctgggagccgtgtgccttcacctcggagtgtgtgggcaaggtacagagctggagcccttgaccctgaccggccagccaggaaggccgtaggaggccagctccctggcgtgaggtgcgcagggcctctggcattgccctaggtgagggctccaggactcggacactggctctcagtggggcaggtgtggcccggcagggggcgctttgtgggtgcacagtggccccagggtggtgcagatggtgggcagacctaccccagggctgtttctgagacagaggtccctggaggagaaccaggtgctgggcctcaggtgtctgtcctgaactggagcagccttggaacaaggaaccacaggaagtccctgtggcatggggtgcagcccctcaggtctggcagggctagcccagggagtgcagggccccaggagccctgccacaggttcctcagctcgggagctcacggcctcctcactgcagggtcctttcaggagggccagggtggccttcacacatctgcttcttcctcagagacacaggtgtgggcacgtactggccagtatagataagcattgagcagcattgatgggtatcgatgatcctccaggagcagcggctggtgccatgctgctgtgggcagtattgagtattggccggtcttgacgagcagcagccggtactgggccaccgtgggtagcattgatgagtattgactggtatcaatgagtatcagccggtatcaatgagtattggcccgtatcaatgagtttggccagtattgatgagtattggctggcattgatgagtatcggttggcgttgatgagtatcggctggcattgatgagtatcggctggcgttgatgagtatcggctggcattgatgagtttggctgggcgtgggtggcgcggtgccttgccccctggccaggctggctcgtgggtgaaatgtgacatttaggcggttttctcctgtccttttagtttgtttttatgtggtatccgggtaccatggggagatctggcattcagggcaggaggctgcagcgcaggtcatgggggctcaggcgcaggtgatgg

SEQ ID NO: 80035 - DNA, 1475 bp, Homo sapiens
ggcaagcagatggtgatgtgcatccagagacagggcgttgacatgtggccaggaggctctggggtcatcgggccgccaccgtgcagccccccgggacttgatgcctccagagaacctgggggctgctgcccctcacctcacccccatttactttaaaatcagtttttgttttagagcagtcttagatttacaggaaaataggaagcacaagcttccatgtgctctacactcacttccctcgtgggtcccttgagtgctttcttacaacatgaggttaagcgtctgcagggtgagaagctggagactgtcctcgtgtcgctgggctgagagccgtgtgcggctgtgagtttttgatgaggaaaagcagtgtgggtcctggatttggacagcacaggcccctctgggagccgtgtgccttcacctcggagtgtgtgggcaaggtacagagctggagcccttgaccctgaccggccagccaggaaggccgtaggaggccagctccctggcgtgaggtgcgcagggcctctggcattgccctaggtgagggctccaggactcggacactggctctcagtggggcaggtgtggcccggcagggggcgctttgtgggtgcacagtggccccagggtggtgcagatggtgggcagacctaccccagggctgtttctgagacagaggtccctggaggagaaccaggtgctgggcctcaggtgtctgtcctgaactggagcagccttggaacaaggaaccacaggaagtccctgtggcatggggtgcagcccctcaggtctggcagggctagcccagggagtgcagggccccaggagccctgccacaggttcctcagctcgggagctcacggcctcctcactgcagggtcctttcaggagggccagggtggccttcacacatctgcttcytcctcagagacacaggtgtgggcacgtactggccagtatagataagcattgagcagcattgatgggtatcgatgatcctccaggagcagcggctggtgccatgctgctgtgggcagtattgagtattggccggtcttgacgagcagcagccggtactgggccaccgtgggtagcattgatgagtattgactggtatcaatgagtatcagccggtatcaatgagtattggcccgtatcaatgagtttggccagtattgatgagtattggctggcattgatgagtatcggttggcgttgatgagtatcggctggcattgatgagtatcggctggcgttgatgagtatcggctggcattgatgagtttggctgggcgtgggtggcgcggtgccttgccccctggccaggctggctcgtgggtgaaatgtgacatttaggcggttttctcctgtccttttagtttgtttttatgtggtatccgggtaccatggggagatctggcattcagggcaggaggctgcagcgcaggtcatgggggctcaggcgcaggtgatgg

SEQ ID NO: 80036 - DNA, 1475 bp, Homo sapiens
ggcaagcagatggtgatgtgcatccagagacagggcgttgacatgtggccaggaggctctggggtcatcgggccgccaccgtgcagccccccgggacttgatgcctccagagaacctgggggctgctgcccctcacctcacccccatttactttaaaatcagtttttgttttagagcagtcttagatttacaggaaaataggaagcacaagcttccatgtgctctacactcacttccctcgtgggtcccttgagtgctttcttacaacatgaggttaagcgtctgcagggtgagaagctggagactgtcctcgtgtcgctgggctgagagccgtgtgcggctgtgagtttttgatgaggaaaagcagtgtgggtcctggatttggacagcacaggcccctctgggagccgtgtgccttcacctcggagtgtgtgggcaaggtacagagctggagcccttgaccctgaccggccagccaggaaggccgtaggaggccagctccctggcgtgaggtgcgcagggcctctggcattgccctaggtgagggctccaggactcggacactggctctcagtggggcaggtgtggcccggcagggggcgctttgtgggtgcacagtggccccagggtggtgcagatggtgggcagacctaccccagggctgtttctgagacagaggtccctggaggagaaccaggtgctgggcctcaggtgtctgtcctgaactggagcagccttggaacaaggaaccacaggaagtccctgtggcatggggtgcagcccctcaggtctggcagggctagcccagggagtgcagggccccaggagccctgccacaggttcctcagctcgggagctcacggcctcctcactgcagggtcctttcaggagggccagggtggccttcacacatctgcttcttcctcagagacacaggtgtgggcacgtactggccagtatagataagcattgagcagcattgatgggtatcgatgatcctccaggagcagcggctggtgccatgctgctgtgggcagtattgagtattggccggtcttgacgagcagcagccggtactgggccaccgtgggtagcattgatgagtattgactggtatcaatgagtatcagccggtatcaatgagtattggcccgtatcaatgagtttggccagtattgatgagtattggctggcattgatgagtatcggttggcgttgatgagtatcggctggcattgatgagtatcggctggcgttgatgagtatcggctggcattgatgagtttggctgggcgtgggtggcgcggtgccttgccccctggccaggctggctcgtgggtgaaatgtgacatttaggcggttttctcctgtccttttagtttgtttttatgtggtatccgggtaccatggsgagatctggcattcagggcaggaggctgcagcgcaggtcatgggggctcaggcgcaggtgatgg

SEQ ID NO: 80037 - DNA, 689 bp, Homo sapiens
cccatttccatgatgtaattattttatattgcatgcctgtatcaaacatctcatgtgccctatacatttatatacctactatgttcccacaaaaattaaaaattaaaaaaattaaaataagatattttaaaatacatttttgtatgttttcgttcacttgctgctctccttcatgatctctggtaactaccaatatgctctctatcttcatgagattcacttttttagcttctttataattacattttrtagttgcttttattttaaaatcaattttggtaatatgtatcctttaataaaagttgtcatatatttcaaatatattggctaatagttgttcattatagctctcatgattcttttaatggttatttgtatttaaataattgtttcataattagtgttatttaattatactgtctctcagtcattttaaacaatattgacattattttttctatttctttttttaatttttattataagttcaggagcacatgtgcaggtttgttacacaggtaaaatgtttcatggggtttgttgtacagattatgtcatcaccaaggtattaagcctagtacccattagttattatttccaatcttctttgtattagttcattttcatactgttacagagaactgttcaagactgggtaattcataaaggaaagaggtttaattggcaaa

SEQ ID NO: 80038 - DNA, 2018 bp, Homo sapiens
atggaatggaatagaatggaatggaatcaaatggaatggaccagaatgcagtggactggaataaaacggactcaatagtaatggattgcaatgtaattgattcgatttcgaatggaatcgcatggaatgtaatcgaatggaatggaatggaaggcaatagagtgaatagaatggaatgcaatgaaatggaacgaagtggaatcgagtggaatggaatcgaatggagtgaaatggaatggaatggacgcgaaaggaatggactggaacaaaatgaaatcgaacggtaggaatcgtacagaacggaaakaaacggaacggaatggaatgcactcgaatggaaaggagtccaatggaagggaatcgaatggaatgaaatagaatggaatggaatcgaaaggaatagaatggaatggatcgttatggaaagacatcgaatggaatggaattgactcgaatggaatggactggaagggaatggactcgaatggaatggactggaatggaatggattgaacggaatggactggagaggaatggactcgaatggaaaggaaacgagtggaatggaatggaatggaatggcttgaaatggataagaaatgaaaagaatgtaatggaatcggatggaatggaattgaatgtattggagtcgagtagaacagaattgaatggaatggcatcaaatggaatggaaacgaaacgaatggaattgaatggactcaaatgttatggaatcaaagggaatggactcaaatagaatggactcaaaagaaatggtcttgaatggaacttattcgaatataatttaatcgaatggaatgcaatagcatggaatggaatcgaatggaatggaatcgaatggattggaacgaaatcgaatggaacggaatagaatagactcgaatgtaatggattgctatgtaattgattcgaatggaatggaatcgaatggaatgcaatccaaaggaatggaatgcaatgcaatggaatggaatcgaatgaaatgcagtggaagggaatggagtggaatcaagtggaatggaatggaatggaatggaattgaaaggaatggaatggaatcgaatggaatggactggaatggatggattcaaatggaatcgaatggaacaatatggaatgttaccgaatggaatggaatggaatggaatggaatggaatggaacggaatggaatggaatggaatggaatggaacggaatggaatggaacagaatggaatggaactgaaaggaatggaacggaatggaatggaatggaatggaatggaatggactcaaatggaatgaaaccgagttgaatggaatcaaatggaatggaattgaatggaaatgaaagtaatagaatggaatggagtggaatggaatgcagtggacacaaatggaatggactggaatggaatggacacgaatggaatggactggagtggaatggacacgaacggaatggaagcgaatggaatggaatggaatgaaatggaatggaatggaatgaaatggaatggaaaggaatagaatggaatggaatcagttggagtagaatggaatggaatggagattaatggaattgaaaggagactaatggaatagaatcaaatggaatggcatcgaatggaatggattcgaatggaatgtgctcgaatggaatggaatcgaatggattgatatcaaatggaatggaatggaagggaatggaatggaatggaattgaaccaaatgtaatggacttgaatggaatggaatcatatagaatggactcaaaagcaatggtctcgaattgaatttatagatatagaatggaatccaatggaatgcaactgtatggaatggaatagaatggaatggaatcaaatggaatggaccagaatgcagtggactggaataaaacggactcaatagtaatggatagcaatgtaattgattcaatttcgaatggaatcgcatggaatgtaatcgaatggaatggaatggaaggcaatagaggtgaatagaatggaatgca

SEQ ID NO: 80039 - DNA, 2018 bp, Homo sapiens
atggaatggaatagaatggaatggaatcaaatggaatggaccagaatgcagtggactggaataaaacggactcaatagtaatggattgcaatgtaattgattcgatttcgaatggaatcgcatggaatgtaatcgaatggaatggaatggaaggcaatagagtgaatagaatggaatgcaatgaaatggaacgaagtggaatcgagtggaatggaatcgaatggagtgaaatggaatggaatggacgcgaaaggaatggactggaacaaaatgaaatcgaacggtaggaatcgtacagaacggaaataaayggaacggaatggaatgcactcgaatggaaaggagtccaatggaagggaatcgaatggaatgaaatagaatggaatggaatcgaaaggaatagaatggaatggatcgttatggaaagacatcgaatggaatggaattgactcgaatggaatggactggaagggaatggactcgaatggaatggactggaatggaatggattgaacggaatggactggagaggaatggactcgaatggaaaggaaacgagtggaatggaatggaatggaatggcttgaaatggataagaaatgaaaagaatgtaatggaatcggatggaatggaattgaatgtattggagtcgagtagaacagaattgaatggaatggcatcaaatggaatggaaacgaaacgaatggaattgaatggactcaaatgttatggaatcaaagggaatggactcaaatagaatggactcaaaagaaatggtcttgaatggaacttattcgaatataatttaatcgaatggaatgcaatagcatggaatggaatcgaatggaatggaatcgaatggattggaacgaaatcgaatggaacggaatagaatagactcgaatgtaatggattgctatgtaattgattcgaatggaatggaatcgaatggaatgcaatccaaaggaatggaatgcaatgcaatggaatggaatcgaatgaaatgcagtggaagggaatggagtggaatcaagtggaatggaatggaatggaatggaattgaaaggaatggaatggaatcgaatggaatggactggaatggatggattcaaatggaatcgaatggaacaatatggaatgttaccgaatggaatggaatggaatggaatggaatggaatggaacggaatggaatggaatggaatggaatggaacggaatggaatggaacagaatggaatggaactgaaaggaatggaacggaatggaatggaatggaatggaatggaatggactcaaatggaatgaaaccgagttgaatggaatcaaatggaatggaattgaatggaaatgaaagtaatagaatggaatggagtggaatggaatgcagtggacacaaatggaatggactggaatggaatggacacgaatggaatggactggagtggaatggacacgaacggaatggaagcgaatggaatggaatggaatgaaatggaatggaatggaatgaaatggaatggaaaggaatagaatggaatggaatcagttggagtagaatggaatggaatggagattaatggaattgaaaggagactaatggaatagaatcaaatggaatggcatcgaatggaatggattcgaatggaatgtgctcgaatggaatggaatcgaatggattgatatcaaatggaatggaatggaagggaatggaatggaatggaattgaaccaaatgtaatggacttgaatggaatggaatcatatagaatggactcaaaagcaatggtctcgaattgaatttatagatatagaatggaatccaatggaatgcaactgtatggaatggaatagaatggaatggaatcaaatggaatggaccagaatgcagtggactggaataaaacggactcaatagtaatggatagcaatgtaattgattcaatttcgaatggaatcgcatggaatgtaatcgaatggaatggaatggaaggcaatagaggtgaatagaatggaatgca

SEQ ID NO: 80040 - DNA, 1137 bp, Homo sapiens
aactatgaactgctatataaaccttacctagactttcccttaactcttgggtagtgtggtttattagaagaagatgccttttaaagtcaaatattcttaaacttttatctttgcatcttaaccagtggtgtgctggcgtatgtttaacaaccaggcaggcacagggacttctttgcagcaattgctcattgacatgctgtaaataattctactgtggctgacttcaagctgccaacatgacattactgaatgaagagttgcctcctataagccagtgtgagctcattccagtgcaaccctgtaccttccacagcgtgaccttgcagaaataatctctctgagactcggtttcatggtccataaaagggatctgccaataagtgtcttctagggctggacctgttgggcagattaaatgtgaaaattcacagaaatgccaagcacagtgcctgccacacagctgtgccccataagcattgcttccttatttttaaagataattaagtttaaacatccaaaaaatttcttcaagtttgtgttggtgggggagaggttgggagagaaactaggtctcttaggcaaaacaatattaatcttacttttccactttcttttatattctctctcttacaatgattttatctaaacattttttttcttggttctcattttgtctgacttaagctagatggtcaatctccaaaagaacaaaataaatgagaagtaataactgtggccttgctgtcatgtttactttctaaatggaatgaatctttcagaacattttgcctaataaaatgacatagatggggacctgaagctgaactcacaagatccttaacatacagatttaaggattttaataaaaaatattaatctcttgatttattrcagaagttttaaaacaaccaactgaacacatatgcttagatatatgtacacacacatacattatagtctaatgtagataatgtttactgtgaacctgctgtggggcagacactgtgctcaacatgtatacatacatatatatctatgttagactacagtttttctccataaatttatatgtaatttagaacaaggtgactcgaaaataattagtttttgattgatttacttattcatttatttatt

SEQ ID NO: 80041 - DNA, 1137 bp, Homo sapiens
aactatgaactgctatataaaccttacctagactttcccttaactcttgggtagtgtggtttattagaagaagatgccttttaaagtcaaatattcttaaacttttatctttgcatcttaaccagtggtgtgctggcgtatgtttaacaaccaggcaggcacagggacttctttgcagcaattgctcattgacatgctgtaaataattctactgtggctgacttcaagctgccaacatgacattactgaatgaagagttgcctcctataagccagtgtgagctcattccagtgcaaccctgtaccttccacagcgtgaccttgcagaaataatctctctgagactcggtttcatggtccataaaagggatctgccaataagtgtcttctagggctggacctgttgggcagattaaatgtgaaaattcacagaaatgccaagcacagtgcctgccacacagctgtgccccataagcattgcttccttatttttaaagataattaagtttaaacatccaaaaaatttcttcaagtttgtgttggtgggggagaggttgggagagaaactaggtctcttaggcaaaacaatattaatcttacttttccactttcttttatattctctctcttacaatgattttatctaaacattttttttcttggttctcattttgtctgacttaagctagatggtcaatctccaaaagaacaaaataaatgagaagtaataactgtggccttgctgtcatgtttactttctaaatggaatgaatctttcagaacattttgcctaataaaatgacatagatggggacctgaagctgaactcacaagatccttaacatacagatttaaggattttaataaaaaatattaatctcttgatttattgcagaagttttaaaacaaccaactgaacacatatgcttagatatatgtacacacacatacattatagtctaatgtagataatgtttactgtgaacctgctgtggggcagacactgtgctcaacatgtatacatacatatatatctatgttagactacartttttctccataaatttatatgtaatttagaacaaggtgactcgaaaataattagtttttgattgatttacttattcatttatttatt

SEQ ID NO: 80042 - DNA, 769 bp, Homo sapiens
tctagaggawaatctattccttgattttctaacttctaggagtggcccacattccttgacttgaggctacatctcttggacttctggtgctgtcgtcacttcttaatctgcctctgcctcttctgcttccctctttcacttgtaaggaccctagtcatctcagtggatacatgtaaataatttaggatcatcccctctggatcatctcaggattcttaactttatcacatcttccaagtctccttttccatgtaaatgaacatatgtataggtttagggattaggatatggacatcttttcatgctccttcttctacctaccaaaagcactctcagtcaacattatctgaaacctggacagcagaggcctcagctggactggttgccaaaattagcaatcatttgatcaggaaaggctctggacattggtcccctttatccttggaagcctctttgtgttcaggtaaatattaatttacaatagatacttgtggctggtattgttcattgtgtgtgtataagctcctgagagtggagataagggatgctttcatgccctctcttcaggtatatttaactctaatcttagtacaggcatcatgtttagttttctgcatatacaacctatgcccagttcaaatttaatcctgccaaaattccctgtcacacatacaaaatataggaacatattgtgcattgtgcatatcatgtaattaatatataaaaatgtttatattcaatatgaatgatatatttatcattgaaattg

SEQ ID NO: 80043 - DNA, 769 bp, Homo sapiens
tctagaggaaaatctattccttgattttctaacttctaggagtggcccacattccttgacttgaggctacatctcttggacttctggtgctgtcgtcacttcttaatctgcctctgcctcttctgcttccctctttcacttgtaaggaccctagtcatctcagtggatacatgtaaataatttaggatcatcccctctggatcatctcaggattcttaactttatcacatcttccaagtctccttttccatgtaaatgaacatatgtataggtttagggattaggatatggacatcttttcatgctccttcttctacctaccaaaagcactctcagtcaacattatctgaaacctggacagcasaggcctcagctggactggttgccaaaattagcaatcatttgatcaggaaaggctctggacattggtcccctttatccttggaagcctctttgtgttcaggtaaatattaatttacaatagatacttgtggctggtattgttcattgtgtgtgtataagctcctgagagtggagataagggatgctttcatgccctctcttcaggtatatttaactctaatcttagtacaggcatcatgtttagttttctgcatatacaacctatgcccagttcaaatttaatcctgccaaaattccctgtcacacatacaaaatataggaacatattgtgcattgtgcatatcatgtaattaatatataaaaatgtttatattcaatatgaatgatatatttatcattgaaattg

SEQ ID NO: 80044 - DNA, 1263 bp, Homo sapiens
tgcatcacataagaggatatgccacaagcccatttaaaaatagcattacttttgttttcattgtcatttttccttgatgtaaaaggttagttgcagtttgtggcaagactgaagcaacctaggggccttggtagtgaaatttaatctcattttccacacctgtctctggattcttgctgctgataccacatgaaagattcaacatgcccatggggatactgcagtagaatagctaagggattcatgagtccatgctgaaaaaggttggaattctaggacctctcattcaataacactgtccttttcctcttttccaccaccttgtgttcctggggcccacagctcaggtggtagagtttgcctaaattaaggtacttttagtgtactggagaaaggaaagttccctctaagaaataagaactggataatctatagcaggattactagtagcaattcttgagagttgcatgaccattccgttgtaccagagggtatttcatttaggcaggccaaaatttccaaagtgtcaagcaatagcattttctcccattactaggtagaagggaacaattctgtacagcagaagagggtgttcttcctggaaaggtttaagttagaatatatgcactaaagcccacctctatattcaagctctgacattgtgttaagcacttaaatatctcctaagctagattctttaacagaaaatcagggaaatatacacaacaagataatgaaattaagtgctttgtaataatagaacactagacacgtgaggttattatcaaataggcattgttcatggggctggcgtgctttcaaatgttgagatatatcccttaacacagtgctttatactgaatgggaaaaggtgtataaattaatggcacacacagaactgggtttaaaatctgttatacttcctgggctaaagccatctacctcaaagttttccatgtaaatgaaatgcaataatataattayagaaattagtacgggaacatagaaagattgacagtttatatatctgttgaagagacacgtacaatgtgtattttttattttcaaatgttaaaaactctaataataaatataagtgaaaatttttaactgcaaaaatgaatctctggcataagcttttaatatatttttgcaaaataagcaatgctttaaaataagaaaaaaaatcaatagtttatttataatataatttatctagaataggtagtgtttctttaatgtttacagtgtatacacagttct

SEQ ID NO: 80045 - DNA, 1121 bp, Homo sapiens
gattcaacttctggtttgaagatctctttcataacagtaataacaacctaaggcagtttaacaatatggaatggttgccttttagaagttaacttatgggcatggaagttcaatcagtacattgaagtttttcctttatctctcctatggttaatggtttctgcagaaaaggaccaattgatttctttctaaaacgttgcttcagggtgtagagacctttataggtcatgtttyaatttacagaaaatttttatagtttaaatataaattacgttcaatgtgggctttgtaatacaatttaaggttaagtaaagtttccactttccttaggctgtttgcagtgcccagcaggccccatgatatcgagatggaagttatgttaaaggaggaggttggtcagggatgggcagaataaggaatatgcgcagctcaggctaatgatgcaatgattgaggtgtagaaagagggccaagcatgggataacgcctgtaatcccagtgccttgggaggccaaggcaagagaatctcttgaggtcagaccagcctggtcaacagagtgagacctaacctgtacaaaaaaaaaacacacaaaaaaacaaaaaaaattagttgggcatgatggtgtgcacctgtagtctcagccacttggaaggctgaggtcaggggatcccttgagcccaggagtttgaggctgcagtgagctataatcacataactgtactccagcctggatgacagggtgaggcgctgactcaaaaaaaaaaaaaaaaaaatgagtcagggaaaaaattggaaatcttaatcctcggtacccaggaatgtgaccttatttggaaatagggtctttctagatgtaatcaagtaacgatgagtcatcctggattgggggctgctggtgagggggcagatgcaatgactggtgtccttataaaagaagagaatgaaggccgtgcatggtggctcatgcctggagtctcagcacactttgggagggtgaggtggggggaatcacttgaagtcaggagttcgagaccagcctggccaataataacaataaaaaagccattttagattccaatccactgaaagaaaactgtcccttagttaatgtcgtgcttatt

SEQ ID NO: 80046 - DNA, 1121 bp, Homo sapiens
gattcaacttctggtttgaagatctctttcataacagtaataacaacctaaggcagtttaacaatatggaatggttgccttttagaagttaacttatgggcatggaagttcaatcagtacattgaagtttttcctttatctctcctatggttaatggtttctgcagaaaaggaccaattgatttctttctaaaacgttgcttcagggtgtagagacctttataggtcatgttttaatttacagaaaatttttatagtttaaatataaattacgttcaatgtgggctttgtaatacaatttaaggttaagtaaagtttccactttccttaggctgtttgcagtgcccagcaggccccatgatatcgagatggaagttatgttaaaggaggaggttggtcagggatgggcagaataaggaatatgsgcagctcaggctaatgatgcaatgattgaggtgtagaaagagggccaagcatgggataacgcctgtaatcccagtgccttgggaggccaaggcaagagaatctcttgaggtcagaccagcctggtcaacagagtgagacctaacctgtacaaaaaaaaaacacacaaaaaaacaaaaaaaattagttgggcatgatggtgtgcacctgtagtctcagccacttggaaggctgaggtcaggggatcccttgagcccaggagtttgaggctgcagtgagctataatcacataactgtactccagcctggatgacagggtgaggcgctgactcaaaaaaaaaaaaaaaaaaatgagtcagggaaaaaattggaaatcttaatcctcggtacccaggaatgtgaccttatttggaaatagggtctttctagatgtaatcaagtaacgatgagtcatcctggattgggggctgctggtgagggggcagatgcaatgactggtgtccttataaaagaagagaatgaaggccgtgcatggtggctcatgcctggagtctcagcacactttgggagggtgaggtggggggaatcacttgaagtcaggagttcgagaccagcctggccaataataacaataaaaaagccattttagattccaatccactgaaagaaaactgtcccttagttaatgtcgtgcttatt

SEQ ID NO: 80047 - DNA, 1121 bp, Homo sapiens
gattcaacttctggtttgaagatctctttcataacagtaataacaacctaaggcagtttaacaatatggaatggttgccttttagaagttaacttatgggcatggaagttcaatcagtacattgaagtttttcctttatctctcctatggttaatggtttctgcagaaaaggaccaattgatttctttctaaaacgttgcttcagggtgtagagacctttataggtcatgttttaatttacagaaaatttttatagtttaaatataaattacgttcaatgtgggctttgtaatacaatttaaggttaagtaaagtttccactttccttaggctgtttgcagtgcccagcaggccccatgatatcgagatggaagttatgttaaaggaggaggttggtcagggatgggcagaataaggaatatgcgcagctcaggctaatgatrcaatgattgaggtgtagaaagagggccaagcatgggataacgcctgtaatcccagtgccttgggaggccaaggcaagagaatctcttgaggtcagaccagcctggtcaacagagtgagacctaacctgtacaaaaaaaaaacacacaaaaaaacaaaaaaaattagttgggcatgatggtgtgcacctgtagtctcagccacttggaaggctgaggtcaggggatcccttgagcccaggagtttgaggctgcagtgagctataatcacataactgtactccagcctggatgacagggtgaggcgctgactcaaaaaaaaaaaaaaaaaaatgagtcagggaaaaaattggaaatcttaatcctcggtacccaggaatgtgaccttatttggaaatagggtctttctagatgtaatcaagtaacgatgagtcatcctggattgggggctgctggtgagggggcagatgcaatgactggtgtccttataaaagaagagaatgaaggccgtgcatggtggctcatgcctggagtctcagcacactttgggagggtgaggtggggggaatcacttgaagtcaggagttcgagaccagcctggccaataataacaataaaaaagccattttagattccaatccactgaaagaaaactgtcccttagttaatgtcgtgcttatt

SEQ ID NO: 80048 - DNA, 1121 bp, Homo sapiens
gattcaacttctggtttgaagatctctttcataacagtaataacaacctaaggcagtttaacaatatggaatggttgccttttagaagttaacttatgggcatggaagttcaatcagtacattgaagtttttcctttatctctcctatggttaatggtttctgcagaaaaggaccaattgatttctttctaaaacgttgcttcagggtgtagagacctttataggtcatgttttaatttacagaaaatttttatagtttaaatataaattacgttcaatgtgggctttgtaatacaatttaaggttaagtaaagtttccactttccttaggctgtttgcagtgcccagcaggccccatgatatcgagatggaagttatgttaaaggaggaggttggtcagggatgggcagaataaggaatatgcgcagctcaggctaatgatgcaatgattgaggtgtagaaagagggycaagcatgggataacgcctgtaatcccagtgccttgggaggccaaggcaagagaatctcttgaggtcagaccagcctggtcaacagagtgagacctaacctgtacaaaaaaaaaacacacaaaaaaacaaaaaaaattagttgggcatgatggtgtgcacctgtagtctcagccacttggaaggctgaggtcaggggatcccttgagcccaggagtttgaggctgcagtgagctataatcacataactgtactccagcctggatgacagggtgaggcgctgactcaaaaaaaaaaaaaaaaaaatgagtcagggaaaaaattggaaatcttaatcctcggtacccaggaatgtgaccttatttggaaatagggtctttctagatgtaatcaagtaacgatgagtcatcctggattgggggctgctggtgagggggcagatgcaatgactggtgtccttataaaagaagagaatgaaggccgtgcatggtggctcatgcctggagtctcagcacactttgggagggtgaggtggggggaatcacttgaagtcaggagttcgagaccagcctggccaataataacaataaaaaagccattttagattccaatccactgaaagaaaactgtcccttagttaatgtcgtgcttatt

SEQ ID NO: 80049 - DNA, 1121 bp, Homo sapiens
gattcaacttctggtttgaagatctctttcataacagtaataacaacctaaggcagtttaacaatatggaatggttgccttttagaagttaacttatgggcatggaagttcaatcagtacattgaagtttttcctttatctctcctatggttaatggtttctgcagaaaaggaccaattgatttctttctaaaacgttgcttcagggtgtagagacctttataggtcatgttttaatttacagaaaatttttatagtttaaatataaattacgttcaatgtgggctttgtaatacaatttaaggttaagtaaagtttccactttccttaggctgtttgcagtgcccagcaggccccatgatatcgagatggaagttatgttaaaggaggaggttggtcagggatgggcagaataaggaatatgcgcagctcaggctaatgatgcaatgattgaggtgtagaaagagggccargcatgggataacgcctgtaatcccagtgccttgggaggccaaggcaagagaatctcttgaggtcagaccagcctggtcaacagagtgagacctaacctgtacaaaaaaaaaacacacaaaaaaacaaaaaaaattagttgggcatgatggtgtgcacctgtagtctcagccacttggaaggctgaggtcaggggatcccttgagcccaggagtttgaggctgcagtgagctataatcacataactgtactccagcctggatgacagggtgaggcgctgactcaaaaaaaaaaaaaaaaaaatgagtcagggaaaaaattggaaatcttaatcctcggtacccaggaatgtgaccttatttggaaatagggtctttctagatgtaatcaagtaacgatgagtcatcctggattgggggctgctggtgagggggcagatgcaatgactggtgtccttataaaagaagagaatgaaggccgtgcatggtggctcatgcctggagtctcagcacactttgggagggtgaggtggggggaatcacttgaagtcaggagttcgagaccagcctggccaataataacaataaaaaagccattttagattccaatccactgaaagaaaactgtcccttagttaatgtcgtgcttatt

SEQ ID NO: 80050 - DNA, 554 bp, Homo sapiens
ctattgcctttgtaatgtgttaaattatgctcttgtagggacctccaggcactgagggagagtctggtctgcaaggtgaaccaggtgcaaaggtaaccttctaaaaaataaaggagaatctctaaactttcaccattgaaccccctacatttgctaccattgaatcccctayatttgctaacttgaaagcaggtggaagcccccagataaaaacaggaaatgttttggaactcctattccttatgacagcagtccccaacctatttggctggcaccagggacaagtttcatggaagacagtttttccacagatggaagcagagcaggggatggtttcaggatgaaactgtcctacctcggatcatcaagcattagattctcataaggactgagcaacccagatccctcgaatgcacagttgacaatagggttcgtgtttctatgagaatctaatgctgccactgatctgacaggaggtggagctcagacagtaatgctggctcaccagctgctcacctgctgttttgcagcccatttcctaacaggccttggac

SEQ ID NO: 80051 - DNA, 554 bp, Homo sapiens
ctattgcctttgtaatgtgttaaattatgctcttgtagggacctccaggcactgagggagagtctggtctgcaaggtgaaccaggtgcaaaggtaaccttctaaaaaataaaggagaatctctaaactttcaccattgaaccccctacatttgctaccattgaatcccctatatttgctaacttgaaagcaggtggaagcccccagataaaaacaggaaatgttttggaactcctattccttatgacagcagtccccracctatttggctggcaccagggacaagtttcatggaagacagtttttccacagatggaagcagagcaggggatggtttcaggatgaaactgtcctacctcggatcatcaagcattagattctcataaggactgagcaacccagatccctcgaatgcacagttgacaatagggttcgtgtttctatgagaatctaatgctgccactgatctgacaggaggtggagctcagacagtaatgctggctcaccagctgctcacctgctgttttgcagcccatttcctaacaggccttggac

SEQ ID NO: 80052 - DNA, 554 bp, Homo sapiens
ctattgcctttgtaatgtgttaaattatgctcttgtagggacctccaggcactgagggagagtctggtctgcaaggtgaaccaggtgcaaaggtaaccttctaaaaaataaaggagaatctctaaactttcaccattgaaccccctacatttgctaccattgaatcccctatatttgctaacttgaaagcaggtggaagcccccagataaaaacaggaaatgttttggaactcctattccttatgacagcagtccccaacctatttggctggcaccagggacaagtttcatggaagacagtttttccacagatggaagcagagcaggggatggtttcaggatgaaactgtcctacctcggatcatcaagcattagattctcataaggactgagcaacccagatccctcgaatgcacagttgacaatagggttcgtgtttctatgagaatctaatgctgccactgatctgacaggaggtggagctcagacagtaatgctggctcaccagctgctcacctgctgttttgyagcccatttcctaacaggccttggac

SEQ ID NO: 80053 - DNA, 554 bp, Homo sapiens
ctattgcctttgtaatgtgttaaattatgctcttgtagggacctccaggcactgagggagagtctggtctgcaaggtgaaccaggtgcaaaggtaaccttctaaaaaataaaggagaatctctaaactttcaccattgaaccccctacatttgctaccattgaatcccctatatttgctaacttgaaagcaggtggaagcccccagataaaaacaggaaatgttttggaactcctattccttatgacagcagtccccaacctatttggctggcaccagggacaagtttcatggaagacagtttttccacagatggaagcagagcaggggatggtttcaggatgaaactgtcctacctcggatcatcaagcattagattctcataaggactgagcaacccagatccctcgaatgcacagttgacaatagggttcgtgtttctatgagaatctaatgctgccactgatctgacaggaggtggagctcagacagtaatgctggctcaccagctgctcacctgctgttttgcrgcccatttcctaacaggccttggac

SEQ ID NO: 80054 - DNA, 536 bp, Homo sapiens
acgttataagcattaatgcaaccagagaccacctccatgcaccacctggaagaagcttgtgtatgaccagagctcttcagaccagactgaaaatatttcccaatagctgtgttttcccagctcaggggcaggtatcccaagagagtgatgaggaaccgcttaaatagttgcaaaaagcagggtctgaagaactccaattagcaatgagtgcttgtaattgcaaattgtagagaatataaataggacaaataagccaccagtgcttactgattattgtttttagttttttgttttgtttttagtttttattaatcaaagctttctaattgatgagatgttctataaaactgaaaaaaagctgaaaaaaaatttaaaacttcaagtaatggtttggctgtggtagtagcatctctatgactaatagcagctgcaggggcaagtgttgaaagagcagagagaggaaaaagggaagcagtkcagatgtaggataaaggtatcttaaataactattaaatgaaagtcaaacttctaaaatc

SEQ ID NO: 80055 - DNA, 518 bp, Homo sapiens
tcactgtagaagccttcataccaactgaataattcctacccatttttaaggcctaatatagaatctacctttgtgtccagaaaaaccttctctgatccacaaaatgtgagttagctaggcctatatttacagtcttcctttttaaaattatcaaatttattgtaagttgctgtttacttatctctttcttccactaaagtgtaagtgataagaagccagtggctatgttaatcttatttatctttttaaaccyagcagctcaacatatgtttattgaattacttaaccatctaattatttctttattactgagtctcaatatatgtaaatctcatatgtcttcattttaattatattctgtatggttatttttgcctttaacattttgtggctctattttttgctttataattttatataaacttctggtttgtattttcaacttattattttctatattttcttcattctttgaatgtccatagcattttgactgtatctctcttttaatatttatt

SEQ ID NO: 80056 - DNA, 518 bp, Homo sapiens
tcactgtagaagccttcataccaactgaataattcctacccatttttaaggcctaatatagaatctacctttgtgtccagaaaaaccttctctgatccacaaaatgtgagttagctaggcctatatttacagtcttcctttttaaaattatcaaatttattgtaagttgctgtttacttatctctttcttccactaaagtgtaagtgataagaagccagtggctatgttaatcttatttatctttttaaacctagcagctcaacatatgtttattgaattacttaaccatctaattatttctttattactgagtctcaatatatgtaaatctcatatgtcttcattttaattatattctgtatggttatttttgcctttaacattttgtggctcwattttttgctttataattttatataaacttctggtttgtattttcaacttattattttctatattttcttcattctttgaatgtccatagcattttgactgtatctctcttttaatatttatt

SEQ ID NO: 80057 - DNA, 1347 bp, Homo sapiens
tttaagtgttaaatgatataatgaatgtaaatttcttccttcagtgtctatacaaaattggtgataactgagatgattttaatgttgggttgggtctacacaataaaagtaaatgaaaatagaaaaaggttcccttaaaaataaatgaaaatataatgtgaagtggtgcaatattaggttaatattaataatagttaatataaatagttaatatattaataaagatttggaagttaattgaagtgacaggctgaggaaagggtctaatatttctcatctgtgttgggactattaaattatacttttcagagtcaggtgtggtggcttgtgcctctaatcccagctacttaggaggctgaggcaggaggactgcttgagcccagatgtttgagacaccccagctcagttcacgggacactccccgctcagttcaccgcgcccatcctgctcccagggccaagtgtttccaagtctagaatcacaaatagaagccaattcaatctttaaactagatttgttgtagttttgcctccgacactataacagcctggggcctggtccacaaggctgggcaatggtgcgctggatccagggcgcctgtggggcctgtgtggaggtgacgctgggtgtggagagttcagatgaccatctacctgattttgcatattcacgggccacaaaaaaggttgcagctatttctgacgctaagccagtcctgggttagtgaccccctgacacggagtgtgtgtcaggaaagaagatccccgaaggaagctcagctcctgcgaaggatgagctcagctttccatgtctgggstggggggcccacaggcgaccccacacccctccacaggaccttcctgaggggaggtccaggctccttgcatcctcactcccctgccctgatggtggaggaggctcaaagtgaagccccagccagatgtctatggaggcccctgccccacacccggcagctctggggggcccctgcctccaggaggaacaaggtggccaaatgagggagaccttggtgagtttgtctgatgagcacattcattcggcctggctgccttctccttttcagctgtttgtttcgcattccccagaactgcacgttcatcagcccttgccttgtgaaggatctctctaattgttacagcgtgaggcaaaaatgcattctgggatgtgcaggctgagaacaaacgtgtgcatctctgagcctgcgtgcccgccccagttccccacgtgcctgcctcagcttcccgcatgcccgccccagttccctgcgtgccggccccagttcctcccgtccccgccccacttccccacgtgcccgctccagttccc

SEQ ID NO: 80058 - DNA, 1347 bp, Homo sapiens
tttaagtgttaaatgatataatgaatgtaaatttcttccttcagtgtctatacaaaattggtgataactgagatgattttaatgttgggttgggtctacacaataaaagtaaatgaaaatagaaaaaggttcccttaaaaataaatgaaaatataatgtgaagtggtgcaatattaggttaatattaataatagttaatataaatagttaatatattaataaagatttggaagttaattgaagtgacaggctgaggaaagggtctaatatttctcatctgtgttgggactattaaattatacttttcagagtcaggtgtggtggcttgtgcctctaatcccagctacttaggaggctgaggcaggaggactgcttgagcccagatgtttgagacaccccagctcagttcacgggacactccccgctcagttcaccgcgcccatcctgctcccagggccaagtgtttccaagtctagaatcacaaatagaagccaattcaatctttaaactagatttgttgtagttttgcctccgacactataacagcctggggcctggtccacaaggctgggcaatggtgcgctggatccagggcgcctgtggggcctgtgtggaggtgacgctgggtgtggagagttcagatgaccatctacctgattttgcatattcacgggccacaaaaaaggttgcagctatttctgacgctaagccagtcctgggttagtgaccccctgacacggagtgtgtgtcaggaaagaagatccccgaaggaagctcagctcctgcgaaggatgagctcagctttccatgtctgggckggggggcccacaggcgaccccacacccctccacaggaccttcctgaggggaggtccaggctccttgcatcctcactcccctgccctgatggtggaggaggctcaaagtgaagccccagccagatgtctatggaggcccctgccccacacccggcagctctggggggcccctgcctccaggaggaacaaggtggccaaatgagggagaccttggtgagtttgtctgatgagcacattcattcggcctggctgccttctccttttcagctgtttgtttcgcattccccagaactgcacgttcatcagcccttgccttgtgaaggatctctctaattgttacagcgtgaggcaaaaatgcattctgggatgtgcaggctgagaacaaacgtgtgcatctctgagcctgcgtgcccgccccagttccccacgtgcctgcctcagcttcccgcatgcccgccccagttccctgcgtgccggccccagttcctcccgtccccgccccacttccccacgtgcccgctccagttccc

SEQ ID NO: 80059 - DNA, 1130 bp, Homo sapiens
tttatttaaccaactagaaaaaaacatgtttggccctaagttattcttagtaaactttgatttaactataaattcaaaattgtaattctaatagtggcataatataaatgtatattacagtaattttttaacattgaattttgatctatcaaagcaaaattctttactacattaaaattggtaattaaagtctaatttcaaaacattttaaagataattcctgaataatttatcagtgattatttaatgaacaaaataaaaagattgaaccacagttttgtattagtatatattttaatttttattacatatcatcctcaactttttcaatcttggaaaatatttgttcacagttgaagagggcaggaaatatctgtttatggtgaagtgaaaactaattgacatcactaaatcaataaatacactgaattccacactaaatattattccatactcaaaattctttgcaatctcgatttagcaggggtttgattgtctgtattgtgaccatttgagtctattgaatattcagtgggttccatttgtattgctatgggtacaactctagcttcagcttgttaaagttactgtattttatttagtcacatattcttaacttcattcatcatttaccttaatgcaccctaatatattgaatgtacaacaatacagacctagatatagacttttttcttatacaacataatgattaagaaaaagtgttataaatgaaaaacaaacataagtttacaggttatcaaattctgataaaaatttatttcctccaaaacagaggaaagttttataaatcataatttagattgtttgaatgtgtccgaatctatttatttcaaataaatgactactttgcttcctgaatattccaaaagtagttgtgaagcaaccttatactttgattaataatgtcaatcacctttaaagtacaggagggattcattttcttttccttcattrataaatatgagagtaaaattgtgtcataaatcttttagatgatatagttagtgataatatgcctggatataatttcaccttggtagttctgccacttatgctattacttaattaaaatatttgagaacatataacatatatttttatatgttaca

SEQ ID NO: 80060 - DNA, 701 bp, Homo sapiens
cagggagcaggggaacccagtgtgagttccttctctggaaaagtgcagttgcatggattccaggtcagtctctatactgggttcagaacccacaaggactgtggcgctctcctgtaggtaggacagtgggcatccatcttggtaatggtgactgctagagatctcccacctaccttttctctgcatgaggagtctctgttcatttgaaactagtkctggccaggtgtttttcttacctctctatgctacgatttcaaggttccatgcttcagagggttttcatgtcttccttgctcaattctagtgttttcttgtagagtatctactcaaagtgccattatttatttcttgttttggtcttttttgtggaggaggtgaacattgggcacctctagttagtcatcttgatgataaagcaggttatctgtaaagtatagataaggtatctgcacaattataagcctggccctataccccacaaaatggtacagaaggtaagtcacaaagaagcatttaataatggttaatatttacatgaaaaaaaaatcatgtgatgtattatcagtttagcacctgagaggtctaatataaagtctccacattcattcttatttgaggtattgcttctgatttcataatgtttcataattgctaatgcaggattatctgataaatacctcaataattcataagttatatgt

SEQ ID NO: 80061 - DNA, 701 bp, Homo sapiens
cagggagcaggggaacccagtgtgagttccttctctggaaaagtgcagttgcatggattccaggtcagtctctatactgggttcagaacccacaaggactgtggcgctctcctgtaggtaggacagtgggcatccatcttggtaatggtgactgctagagatctcccacctaccttttctctgcatgaggagtctctgttcatttgaaactagttctggccaggtgtttttcttacctctctatgctacgatttcaaggttccatgcttcagaggkttttcatgtcttccttgctcaattctagtgttttcttgtagagtatctactcaaagtgccattatttatttcttgttttggtcttttttgtggaggaggtgaacattgggcacctctagttagtcatcttgatgataaagcaggttatctgtaaagtatagataaggtatctgcacaattataagcctggccctataccccacaaaatggtacagaaggtaagtcacaaagaagcatttaataatggttaatatttacatgaaaaaaaaatcatgtgatgtattatcagtttagcacctgagaggtctaatataaagtctccacattcattcttatttgaggtattgcttctgatttcataatgtttcataattgctaatgcaggattatctgataaatacctcaataattcataagttatatgt

SEQ ID NO: 80062 - DNA, 701 bp, Homo sapiens
cagggagcaggggaacccagtgtgagttccttctctggaaaagtgcagttgcatggattccaggtcagtctctatactgggttcagaacccacaaggactgtggcgctctcctgtaggtaggacagtgggcatccatcttggtaatggtgactgctagagatctcccacctaccttttctctgcatgaggagtctctgttcatttgaaactagttctggccaggtgtttttcttacctctctatgctacgatttcaaggttccatgcttcagagggttttcatgtcttccttgctcaattytagtgttttcttgtagagtatctactcaaagtgccattatttatttcttgttttggtcttttttgtggaggaggtgaacattgggcacctctagttagtcatcttgatgataaagcaggttatctgtaaagtatagataaggtatctgcacaattataagcctggccctataccccacaaaatggtacagaaggtaagtcacaaagaagcatttaataatggttaatatttacatgaaaaaaaaatcatgtgatgtattatcagtttagcacctgagaggtctaatataaagtctccacattcattcttatttgaggtattgcttctgatttcataatgtttcataattgctaatgcaggattatctgataaatacctcaataattcataagttatatgt

SEQ ID NO: 80063 - DNA, 2679 bp, Homo sapiens
  misc_feature (1)...(2679): n = A,T,C or G
ttccagaaaaacattcccacagatggaagcctgttaactattcttactgtgctgcttcttcagtccaacatcaagtaggatgttaatttgccatttgggaaggttttattgatggtttattgtgagacaagtctaaaataatggttttattntgttttaggcttggcccttgaataagaggacccaaatgttggggctattaacagttctttatggnnnnnnnnnnnnnnnnnnnnnnnnnnnnnnnnnnnnnnnnnnnnnnnnnnnnnnnnnnnnnnnnnnnnnnnnnnnnnnnnnnnnnnnnnnnnnnnnnnnnatagactatgtcaaacccaatataatatgtttgttttaaagcacttgacaagcaaagatttctaagaattcaaaatcacaccaattgttgggcattttaatcaggactaaaaacatttcagactacatgttacaagaattgcttttcccacaattattttcaggagcacgtgaggaaactcttgtgaggcccaacaggtctgaagattccataaaatagttacctatttgggaactttccaggtagatagaacttcggtcagcatcttctgaaatacttttttcagggttggtgcataaggggtgtgaggatgcgcatatgtgaaagagggagaaagatatggaagtacacatatttccaagtttgcaagaaattaatatagcaagtgtgctgtgttgttttgctttgttccttgcatgtaaacatgctggcaatttattaaacaactattggtctttttaatctttttttttttcagtttgaacttcctcccaaaattacaagcattattttttaaaatgctgttaatctctgacctcattacacctcctctctgaaagattctgaatgaaatcataaagcagaaatcattgccctgatattttaaatgccatcttccatatactttcctgttaaaaaaagacactatttcattgagtatatacaggaatgccatgttaatcattaataaatgatcaattctgaggcttgtacctcattagtaaacaaatgatgttttttcatgcctctaatgagagactggacaaagaggaatatttctgcttcacctgtgtttctgatttgactccacttgtacagttttgtgcatttgtacaaactccattgtacagtttcttatggcctcattgccttgtgatgaaatgttagcatctagcagagaactttatgaaaggaatggtattttgaagaagaaatacatatgggtttttccccttatgaagtaaataatgacagtatctttccatcactcttattctgaagttatgcyttgtgaatccaacaataaaaaatctgtgacttattaaggaagaaaaatgcataattggcagtgtatcatatggtagtttctcaaccttggatccagtttaaaatatttgtcaagatccaagtcttttctatactagtagttacaaattatatttctttaaattgacattaaaaaataaacatacttatttaaaaaatacatttttttctatctgtatatatagaaaatcagcaatgccataaacctagcaggaaatgcaatgaagactatgctaccaaatttatcaaaactttaaaaccaaaagataaaccatgaaatgcaagtattatttattaagctaagtttcactgtaataattattttacatgcaaagtctaatttagttgctataataatccatcaaaataaatattagccttattttaaccaatggggtaactgcaatccagagaagtaaaataacttatcaaaggccatttagcttgtatgtggaagagccaggatacaaacttgggttcattggataagaagtcacagattcttatttcattatactcccaaaacactgcttgactgctttcctgtcaatgaaggatattgtcattattcactgatctgtcattaagatagcagaatgttccagattacttgccacgtcctcatgccactatcttgttccttgttcttgagacctttcccaggatagtcaacgatgggaactggtttttttttatctgaaatatgatttgattttctattcttttctgcttgagattttaaaagtatatgtatttcagacatggaattacattgttacttgattgatgtgagaatgttaattgaaggctagaaacaaaattgttctataagtgaaaatggatgggactgactgaagccagggagctgctttgggggaagaattctaggtaaaaggcagaatcctgtgaatagcagcagatggagaatttggaagcctcaggagggctgccttatgggaagcgttgctctagaatgttcccaacgctaggaatttaagttatgcctgataaaatctgagagggatttcagatttcaacctaaaccttattctgggaatctcctccatcagtgcagaatccttggagactgcaaatgtcaattaaatttctgaagatcctccaaactgataataaaataaggagaccgaaaaccaaaattttaatatctttatattatactttgatgtattttataggtatttcataaaccagtaaatgtattcaaatgttcagcaggaatcataacagaaaacaatctaaaagtagttctcctatactatggtgaaatcattataagtgtacatttcccttagaaa

SEQ ID NO: 80064 - DNA, 995 bp, Homo sapiens
ttctttatactgtactttcatgaagacagaaagaggtattgaaggagaaatccaccaaatagtacttccagacagacagaatgtccctgycaggggatagacaaaggcctaaggacacaggaccctatcatttatatttttacttctgcacttaaagtgagcagttttataaagatgttaaaagtccaaacaagcctttttactagcactttctgcaccccattatttcatcagtaatgttcagtgtgttctacttgttctgttaaggtgttgtctctttaatttctaggtattttagaataagactcatgcggaataagaatataattggtttagaaaatttaaaactataatcttttgcctgaagttgaatttaaatatggtattccaagtaaaacatcatggcccccaatgaaaaaaaaaataaaattgatgctgctgacatattgcaaatgtttgagatttcccacatgtggggaagggagatggataggaatgtgtgggaggaaaggtgaactataaaagattaataacataaggcaaccaacacctctgagatcctgtctttaattaacatttattaacatgaatataattagtaatggaatgtgtaatgaaaagagcataacatcagcaaagacaagaccaaatattcatctttgatttctctcatactatcattaagatcttcagaaaataatttttttgtgcatttttgttacctaatctttaaaataacaataaatctgtgcaagaattatactcaatagaaaagtagaaatgctgatatggtttggttgtgtcaccagccaaatcatcttgaattgtaatctccataatccccacatgtctagggaggtgacgggatcatgggggcagttcccccctgctgttctcatgataatgagttctcaggagatctgatggttttctaaggggctcttcccccttcactactcactcttctctttcctgctgccatgtgaaaaaggacc

SEQ ID NO: 80065 - DNA, 995 bp, Homo sapiens
ttctttatactgtactttcatgaagacagaaagaggtattgaaggagaaatccaccaaatagtacttccagacagacagaatgtccctgccaggggatagacaaaggcctaaggacacaggaccctatcatttatatttttacttctgcacttaaagtgagcagttttataaagatgttaaaagtccaaacaagcctttttactagcactttctgcaccccattatttcatcagtaatgttcagtgtgttctacttgttctgttaaggtgttgtctctttaatttctaggtattttagaataagactcatgcggaataagaatataattggtttagaaaatttaaaactataatcttttgcctgaagttgaatttaaatatggtattccaagtaaaacatcatggcccccaatgaaaaaaaaaataaaattgatgctgctgacatattgcaaatgtttgagatttcccacatgtggggaagggagatggataggaatgtgtgggaggaaaggtgaactataaaagattaataacataaggcaaccaacacctctgagatcctgtctttaattaacatttattaacatgaatataattagtaatggaatgtgtaatgaaaagagcataacatcagcaaagacaagaccaaatattcatctttgatttctctcatactatcattaagatcttcagaaaataatttttttgtgcatttttgttacctaatctttaaaataacaataaatctgtgcaagaattatactcaatagaaaagtagaaatgctgatatggtttggttgtgtcaccagccaaatcatcttgaattgtaatctccataatccccacatgtctagggaggtgacggkatcatgggggcagttcccccctgctgttctcatgataatgagttctcaggagatctgatggttttctaaggggctcttcccccttcactactcactcttctctttcctgctgccatgtgaaaaaggacc

SEQ ID NO: 80066 - DNA, 630 bp, Homo sapiens
ttcyattttttctttttttcttcatctcacttacctattgaagcaatgaatatcactgattgaatgggtagaggagaagaaagatgatgacaaaagaccagtaatacaaattcaactatttgtgtgtcatagaagccagaaaaagccaaatcgccagatctcaagaaggtcagcaaaaagtcactacctgatgaattaaagagagatttttagaagctcagaaagctatgggtgcctggagaattcaacattagcagaactcagctgaactctgacttttctaacttctaatttcttcattactataaaataaaggttaagatttcaacgtcattagtgtttaggagctacctagtagctctgtaccttgatgtgtactataagctgcttgtctgaaagaaaattacaaagaaactgcattctgttttctgaaaaaatgctgtcttagagatcataccactgctgaataatgaaaatcatttgatttttctttctttctgtcaaaaagatttaaatccaatgaaatacatatttttaaaatgtgtgtaccatatgaggatgacttatcattatactgtctttaaaaagcccaaatatgtgaaaatcagatatagttcagaggtgtaactt

SEQ ID NO: 80067 - DNA, 630 bp, Homo sapiens
ttccattttttctttttttcttcatctcacttacctattgaagcaatgaatatcactgattgaatgggtagaggagaagaaagatgatgacaaaagaccagtaatacaaattcaactatttgtgtgtcatagaagccagaaaaagccaaatcgccagatctcaagaaggtcagcaaaaagtcactacctgatgaattaaagagagatttttagaagctcagaragctatgggtgcctggagaattcaacattagcagaactcagctgaactctgacttttctaacttctaatttcttcattactataaaataaaggttaagatttcaacgtcattagtgtttaggagctacctagtagctctgtaccttgatgtgtactataagctgcttgtctgaaagaaaattacaaagaaactgcattctgttttctgaaaaaatgctgtcttagagatcataccactgctgaataatgaaaatcatttgatttttctttctttctgtcaaaaagatttaaatccaatgaaatacatatttttaaaatgtgtgtaccatatgaggatgacttatcattatactgtctttaaaaagcccaaatatgtgaaaatcagatatagttcagaggtgtaactt

SEQ ID NO: 80068 - DNA, 1155 bp, Homo sapiens
ttttttaactaatagaatgagatatattatttcaaatcacttaatattgtacttgttctatcatgaatgccaattaaagttagatttctccttcagcagcagttttgtctcaaaatgagaacgctacattaaaatagaaaataagagaccataawgtgctgagtgtgaagtagctactgaaagcaagaaagacagaagcagaaagtgaaagtgttcaagtggggatatgggctaaagtgttatttaaaaacactcttcccattgcaccttacaattccaccagccactcgcaacgtgagccatactagtgaatagagccggcttgctattctcttgcagtacttgcagaatgaagataaaggactgacttttgttacaaactcgacttaatagtgagtaataattgctaaccaaatggtctctatattttaatgcctagaaactcctaaggaaagtacaattaaaaacaaaatttgaatcctaaacattttctcgagttaatgatagaggttgtgttccattgataagaaggtatcattttgaatgttgttaaattttttatttaattttgatgtcctcaaagtgcatatgattggagtataagttaaaatggcacatttttaatagaaattgaaaaaaaattgtcaatttccttcatgtcaggtcatcacagtcttaagcagtattttatgagatcccagtgcatctggtctccggtttgcagttcaactttattgagcttaaaaatcaataaaggctatgattttttaaatatcatgataaaaaagaacaaactggattatcagggtgattttatttactagataactaatggataagtgtcacttcatttcttcactagcattctaaaaaatgaaattatattttttcatggaacttgaactacagcaatgaaagaacttgaaagtaatataatcaaggtagattatgcagcaccaaaatgaaacattgcaaacatcaaagcaactggatattctattcatttgctcctttttctaattaggaaaagagatgtttcttttcgcggatgtattttctaatcataggtatttctctataatttttatttatttcattataaacagtatgtcaattaatatttgataaaaatatttctaaaagagatatactatc

SEQ ID NO: 80069 - DNA, 784 bp, Homo sapiens
ggatccatgcacatcctgaggatcaggaaattttgttacacaccagtaaacaattctgagtacttytaacatgcctgtagatgtggaaacaactgggttgggtttggagatgctggctggaggactccttgtctctagctgagtctatggctgcttatggccatgtcagcatctgcacagcacaggacccttcagcagcccacttcagaatgctctttacacactctaaaaagccctaaaacttaggaccttttaactcttattttttcacagaagggtacactgtatttgtgtgaataataagtaatgtccttctattatttatgccagtactgtgctaagtgctttacatagattatctcatttaatccttatagtcaaattccataggtactattataattctcaaattaaagatgagaaaactgaggctcaaagaaattcattaacttgcccacagtcacacagctggtatatgctggagacaggatctgaatccagaacgtcccccgtgtctgttctcagaactacttcattccattgcctcccccttgcagccagtaaacccaggtgcacgttgaggtggctgaccatgcagaattccaggtcccttaccctgggcacttcgttctgggtggcgaatgtctctgtagttttttggaagagagtgggattttgatttccagcatgggtctttgctactcacatggccatggcataaagcagtgttctggcactgctggcttctcagtaaagagtgagcaagtaatcaacatgcacctgc

SEQ ID NO: 80070 - DNA, 557 bp, Homo sapiens
gttattggattttttctgtagacttgaatactaaatgggatagataccagacctctttttggtttatgacgtaaaagtatttgtacagtagtttctcttcacaaaagactgaattttaaaggattatagaaacaggaacatgtccatttccaaaatgagtgcaacagaatgaagatagtcacttaaaccatctatttaacacatcacctttatgtaatatgtagctagttttagtgttttaataagtcccaactaaagactgagtgttttcagtgaagatggaaatggagacccrggcacttgcttagagttatcgtgagtccgatgttcctgaacttcaagttgtacaattaagggcatactctaagaacttctggatgctttctggagtatacaaacagatcaactaatgacttaaatgagtgactcttgaagctgcaagaagaggaaagaaataaccacaagaaggggctatctcagcatctgttattcctgacaggaggaattaaatatgctctgctggtaattctaagcttttctgcaggggatctgcttgc

SEQ ID NO: 80071 - DNA, 557 bp, Homo sapiens
gttattggattttttctgtagacttgaatactaaatgggatagataccagacctctttttggtttatgacgtaaaagtatttgtacagtagtttctcttcacaaaagactgaattttaaaggattatagaaacaggaacatgtccatttccaaaatgagtgcaacagaatgaagatagtcacttaaaccatctatttaacacatcacctttatgtaatatgtagctagttttagtgttttaataagtcccaactaaagactgagtgttttcagtgaagatggaaatggagacccaggcacttgcttagagttatcgtgagtccgatgttcctgaacttcaagttgtacaattaagggcatactctaagaacttctggatgctttctggagtatacaracagatcaactaatgacttaaatgagtgactcttgaagctgcaagaagaggaaagaaataaccacaagaaggggctatctcagcatctgttattcctgacaggaggaattaaatatgctctgctggtaattctaagcttttctgcaggggatctgcttgc

SEQ ID NO: 80072 - DNA, 721 bp, Homo sapiens
  misc_feature (1)...(721): n = A,T,C or G
tgcattctttcttgtgctagactggagaatttgtgacaaaaaggaattatatcatattcatatcccatatwcttttgtatccaccaagtgatttaaaaagtacatggtaagggcttgacacatcataggaagcaatggagagaaggagcaccttctcgtatatgatgaggtgcagttactgcacacatccctaaatatggtttagatgagaatttaacatatgtcattgttaatctcttgagattcctttttagattaaatatccctgaagatatgggatatcctttaaattctgaaaagatctgtttccatttttgtaaagtattgtgtgtgttgggtggagagctcttttccggtatagaatgatttttaacttttacttttattacgacatcagatcccaatatttgaccaattactagaagcaagaaatatttgtgtttatcttttttttctttgtgtatatcactatcatagtcaatgtatcactgaattttgtctcgcttacagaatcatgaaggtgagcctcaggaactcactttaggataatatcagacaaagcataacttgccaaagtgtcacttatgtaataaataaacaaatacaaactgagtnnnnnnnnnnnnnnnnnnnnnnnnnnnnnnnnnnnnnnnnnnnnnnnnnnnnnnnnnnnnnnnnnnnnnnnnnnnnnnnnnnnnnnnnnnnnnnnnnnnntaataat

SEQ ID NO: 80073 - DNA, 482 bp, Homo sapiens
  misc_feature (1)...(482): n = A,T,C or G
aannnnnnnnnnnnnnnnnnnnnnnnnnnnnnnnnnnnnnnnnnnnnnnnnnnnnnnnnnnnnnnnnnnnnnnnnnnnnnnnnnnnnnnnnnnnnnnnnnnncatttatgaatagttaaaagttatttttttctgacagtgttctgaggttgtggatgctgaatggtgcaaatgtgaaggaattttgatttgaggaactcccagtgataggattgttctccaaaatagaagagtctgcagtctccgtattatgtgttatgccccaaggtaattctgtactgtgcccaaaataacacaygtgcatacatacactcattagggctttccctttatttctgaaattcacaatgagatttaagccaaatagacgaagtgcactttttaaaatcccgaaagcccataagagaagtgacgtttaatccctggaagtttaaatgaatttatgtttcagagaaagtttgttaagaagcaggctgaaaaaa

SEQ ID NO: 80074 - DNA, 1145 bp, Homo sapiens
attctcttcattttggatttaattaattgaaagatgttctccaaactctaaccttaactaagtaccatttagcccagctacacgattgacattctcacttgaatttctaaagcacctatcaattttagttctacctaagagaggtcttaaatcccaccccctgccaattattctttcctgagtcttcctcgtgttagtagacgtcatcaatccatcaacaaaaactcttggctccatttaaaaaatatatttcacatctgtttacttcttttcatttctaccatttttcaccttggtctaagccactgttatctctagctttgattattatgaaatcttgttctacttgagctcctctataatttataaaaaactcagagtagtgctatgaaaatatgaaatgggttgtttaaatctccatatcaaaatctccagtttcctcctactgcatttagaacaaaattcactctttttcatggtccattaggttctacatgattgaccctattcttatctatgacttctcccagctttaccccatctctctatgctcttgccacattgcccttctagagtaggttaagatatttcctttcttgaggcctttgctcctgttgatccctcatgctggaattctcttcctccaggcctttgcatagctggttcctctagtcactaagccttagctcagatgtcacctcctcactgacattcacttataagtagcccttcctcactggcctccccaacactttctattacaacactctgtcttatttcatagcatgcaccactaatcttatttattcagttatttgattatcgctgcctccttatcccaatgccatcccttgagaggggatctagtctgcatggtttagtcctctatgccttcagtagtgtctggcatacagtcagctctcatttaatatttgttaaatgagcaaacaaagtctctcttgtataagtcaatataattctagctatgaggaattcctgttctgtgctagtcttgaggatgtgaaaatatgaggggaaattaacatttttcagcaagcactgctagagatccaggagtttccccttcacaatggaaaatttaaaccatgaaggaaaataaatgaaggttaaatactaraagatat

SEQ ID NO: 80075 - DNA, 1617 bp, Homo sapiens
tcctcaggccacccatacaccagagtagttgtgcacctcatactacagtcaagacagtgccctccttcttggggttcccaggcttccagcataccagagtagtaaaacctcttctcccagcaccatggatgaggcagcatcttgtcctctggcggcttcaagcccctggcacactagagtagctgtaccccttagtgccacagctgatgaggtgtaccatattccaagggtctggaggatatgctgacccatgtagccacactctgtggggctgatcagacatagtgccttgcatcccagggaatcagagtcttggttgtgctgtgccaccagatcctccaggctgaatagccacagtatcctgcttatttacaattgggctagccccttgcagtctgagctgctgagatgccttacttccgtggagaaggtagtcattggtgtgctgcttccctcccaccagggatcaagccacagtagtgccttgacattcctgggtccttgctgctactgcacctggccacatagaccctgggccactgccatatcctaccaccccaagatccatagttaccattgtgcaatatgtcatcacctggagcactggctgctatgccctggtttgggttctaaatagcagctgagaacctcctcctcaaagcctgagcatccagaacatcataccttcttcctcagagctgggtcaaggctttgccctgccttccagggtcagaaccacacctacatcttagacccctggggtctaactgcttgggtttgctcagtgcaatagaccacagcttagtgggagaattacatccatttctgtcttggaaagtgaacctgtaccttaagtcctaggtgctacaatagtttcacaagaccctgagcccaggaacccaactctatagctgctcagagcacctatgacctgaatccttttgccaatgcagctgtttgtgggttgtgtcagacatgacaacaagaaaaattccctcagttaagatactttgctatagggaaggcaagaacaggaggatccctaaatcccttgctttgataacctacacagccaataccactgccacaaattcctgcagcctagacaactgagacactcataattcattgacattgattataactgaagaagctacattgagactataccattgtgcccacacagaaccagagccactgtaccctgaccaattsgcaccttcaggcccacaggcccatctgcaggtggaagtcttcctctatgaaagccactttataaaatttggaagaagtgccaacactgtgagatacccatgcaaaacacaaaaaacatgaaaaagtaaggaaacatgacatcattgaaggtacacgatagctcttcagtaactgaccacaaagaaatggaaatttataaattgccctcccaccccaacaatttaatgtaattcttaagggaattcagtgagatacaagaaaatacagacagataatttgatgaaaccaggaaaataatttgctatctgaatgagttattcaatgaagagatagaaaccataaaagagaaccaaacagaaatcttggagatgaagaattcaatcaatgaaatgaaaaatatcg

SEQ ID NO: 80076 - DNA, 1617 bp, Homo sapiens
tcctcaggccacccatacaccagagtagttgtgcacctcatactacagtcaagacagtgccctccttcttggggttcccaggcttccagcataccagagtagtaaaacctcttctcccagcaccatggatgaggcagcatcttgtcctctggcggcttcaagcccctggcacactagagtagctgtaccccttagtgccacagctgatgaggtgtaccatattccaagggtctggaggatatgctgacccatgtagccacactctgtggggctgatcagacatagtgccttgcatcccagggaatcagagtcttggttgtgctgtgccaccagatcctccaggctgaatagccacagtatcctgcttatttacaattgggctagccccttgcagtctgagctgctgagatgccttacttccgtggagaaggtagtcattggtgtgctgcttccctcccaccagggatcaagccacagtagtgccttgacattcctgggtccttgctgctactgcacctggccacatagaccctgggccactgccatatcctaccaccccaagatccatagttaccattgtgcaatatgtcatcacctggagcactggctgctatgccctggtttgggttctaaatagcagctgagaacctcctcctcaaagcctgagcatccagaacatcataccttcttcctcagagctgggtcaaggctttgccctgccttccagggtcagaaccacacctacatcttagacccctggggtctaactgcttgggtttgctcagtgcaatagaccacagcttagtgggagaattacatccatttctgtcttggaaagtgaacctgtaccttaagtcctaggtgctacaatagtttcacaagaccctgagcccaggaacccaactctatagctgctcagagcacctatgacctgaatccttttgccaatgcagctgtttgtgggttgtgtcagacatgacaacaagaaaaattccctcagttaagatactttgctatagggaaggcaagaacaggaggatccctaaatcccttgctttgataacctacacagccaataccactgccacaaattcctgcagcctagacaactgagacactcataattcattgacattgattataactgaagaagctacattgagactataccattgtgcccacacagaaccagagccactgtaccctgaccaattggcaccttcaggcccacaggcccatctgcagrtggaagtcttcctctatgaaagccactttataaaatttggaagaagtgccaacactgtgagatacccatgcaaaacacaaaaaacatgaaaaagtaaggaaacatgacatcattgaaggtacacgatagctcttcagtaactgaccacaaagaaatggaaatttataaattgccctcccaccccaacaatttaatgtaattcttaagggaattcagtgagatacaagaaaatacagacagataatttgatgaaaccaggaaaataatttgctatctgaatgagttattcaatgaagagatagaaaccataaaagagaaccaaacagaaatcttggagatgaagaattcaatcaatgaaatgaaaaatatcg

SEQ ID NO: 80077 - DNA, 1162 bp, Homo sapiens
attactttcttatcactgtaaagtcaaacaaccgcaaatcaaaacactgtaagggagggactatctttattgcatgatcatttacatatggaatctaaaacaaatttgaaatatacagagatagagaacaaaatatttgttaccagaggcagggtgaagaatggagaaaaatggggagattaaggtcaaagaataccaagtaacagatatctatatgtatcccataacatcatgctatataccttaaataaacacaataaaaaagtaataacagctattatttattgattattacttgtgctaggcacaagtagggwgcttgtcgccatcctatgtaaattaagtattatttgcctattgtaaaatggggaaagtaagtctcaggaaagttaaataacatacatgaaattatgaggttgataaattgtattaattaaggttttccagagaaatgaaaccaataggatacatttatatgtctatatccatctctatattgagagaaataatgagacagagacacactcagattgctttaagaaattggcttctgtgattatgggggctggcaagtctaaaatccataggcagattgacagcctggaaatttagtaaagagttgatgttgaggccttgagtctaattcttcagggttgtaggctggaaactcaggcaaagtttctatgttcaatcttgaggagattttttttttttctgggaaatttcagtctttgcttttaaggccttcaactgattggataggatccatccacattataaagagtaatctgctttactccaggtctactgacttaaatgcaaatcacatctaaaaatattttccccagcaacatctagactagtgtttgactaaacaacagggtatcctagcccagcaaaattgactcataaatttaatgatcacgcaattggtaattctaaatccagtcagaagtctacattctgtgtccacagtgtcatgtctagatgttggtccagtctcccatggactgtgccttgttatttgttttctctttgctaagccacatcccctgagggctctgtttatgctcattgcaaaatctttgactttttaacttactgggcatattgtcttcctacttttgttctcttctgttattttatttacttgactctgaca

SEQ ID NO: 80078 - DNA, 2102 bp, Homo sapiens
ttttttctttaatctaggcaaacaatgatgttggcttggacttattggtaacagtaaagttagaaatattggaaatatttgggatatattttagaggtagaactgacagaattcatggatatgtcagatatgaaatttgagagaaagtggatccacagtgataaatagattttgacttcaacaacttggaacaaattgtattgaaatacactgagatggaggaaattaaacaaagattagatgtagggaatggagagagaaacctatggtttttttgaccttgtcgagttcagtgtaccttggatattcttgtggagttttaaaatcagcacctggttacaagtatctggagtttggaggttgcaatcagatatggattcactgacatgattaaaggcttggaactgggtaaggtcctagggaaaacctgtggatagagaaagagttcaaacatagggccccaggacagtccagcgtttagaatttaaagagagcaaggggcctgagcaagtagaagaagagcagctttattgggcaaatggtaaaggtcttatatttatcaacttttagaatgtcttctagaaattttcgattcaagtattctgcctccttcccttacattttctagtgagatattggattttttattgaactataagatcttaccatacatcagtgacataccmtctgtgttatatttaaatttgtattttgtttgtttcgtttatatttttatatttgtcttttatttgttttatttatatttttatatttctcccattttttgtagcaaacatatggatcttttaatgttctatatagcttattaacttactttttgctttacgtgttcttttccatccaaaacctaacattgaccaatatatttctattttagaaattccttttttaaaaaactttagctctttaattaatccaaaacatattttggtgactgagcagccatttgttgaaactatagagtaagtcttggatagctaatctggggcctgccaaggtttccccagtaagaggatttccagtgtttggtattatgagtcctgcccttaaggaaggcactgggagcagtgttcagcagaggacactactgcccaagccaacagtttctttctggtgcagtttataaagccctaggattttgttttgttttgttttgtggctaagcaatgatttgtctctgttacacacattttgccatgttagcgtcccaattattctatttgattctattacttataattaatcccagaaatcttactgagtcatgctcttcaaacagggtcacacccttatgtccctctttccttttttcttccaaatatttccaagcctaagtgcaatttctctggtttctgtttaaggagtttagctttggcgtatgaataagatattacagtctgaagtagcaaggctgttcaaatttcttctgaagttacactgcagtactcctcacctcaccccacccaatctatgttccagttgataattttaataagagccatcacccattttattagcagcaggccaagaggtgttgtggagaagaaatctagcatccctaattccaaatgcatggatcctttggtttctttatcagcataccaattttagaagtatcagagaaattaactgcttcagttctactgggaatatgtgctagccattggttttgtccagcaaatatttccagttcttctgggcacaaagtaggattgcaattctttgctccccagaagctgagtgtaaccattcaatttgcactgatcggtgaaatgttgagtggacgttatatgtgttacttctagatgaaatcttaagattcaattcacgcttctccaactctgactcagcaacctgccagttctaggtaacctggatgccaaagacaggctaatgtgaaagagtgaagagatgtgttccttgaataacaaagaaacctttgttgtattgagtcacttagcttaagagattgttcattattagagtgcaatggaaccccgcccgattcatacagaattggtacctaaaagtgggttactatgaaaacaaccttatttgaaaacttattttgaagaggaaag

SEQ ID NO: 80079 - DNA, 2102 bp, Homo sapiens
ttttttctttaatctaggcaaacaatgatgttggcttggacttattggtaacagtaaagttagaaatattggaaatatttgggatatattttagaggtagaactgacagaattcatggatatgtcagatatgaaatttgagagaaagtggatccacagtgataaatagattttgacttcaacaacttggaacaaattgtattgaaatacactgagatggaggaaattaaacaaagattagatgtagggaatggagagagaaacctatggtttttttgaccttgtcgagttcagtgtaccttggatattcttgtggagttttaaaatcagcacctggttacaagtatctggagtttggaggttgcaatcagatatggattcactgacatgattaaaggcttggaactgggtaaggtcctagggaaaacctgtggatagagaaagagttcaaacatagggccccaggacagtccagcgtttagaatttaaagagagcaaggggcctgagcaagtagaagaagagcagctttattgggcaaatggtaaaggtcttatatttatcaacttttagaatgtcttctagaaattttcgattcaagtattctgcctccttcccttacattttctagtgagatattggattttttattgaactataagatcttaccatacatcagtgacataccctctgtgttatatttaaatttgtattttgtttgtttcgtttatatttttatatttgtcttttatttgttttatttatatttttatatttctcccattttttgtagcaaacatatggatcttttaatgttctatatagcttattaacttactttttgctttacgtgttcttttccatccaaaacctaacattgaccaatatatttctattttagaaattccttttttaaaaaactttagctctttaattaatccaaaacatattttggtgactgagcagccatttgttgaaactatagagtaagtcttggatagctaatctggggcctgccaaggtttccccagtaagaggatttccagtgtttggtattatgagtcctgcccttaaggaaggcactgggagcagtgttcagcagaggacactactgcccaagccaacagtttctttctggtgcagtttataaagccctaggattttgttttgttttgttttgtggctaagcaatgatttgtctctgttasacacattttgccatgttagcgtcccaattattctatttgattctattacttataattaatcccagaaatcttactgagtcatgctcttcaaacagggtcacacccttatgtccctctttccttttttcttccaaatatttccaagcctaagtgcaatttctctggtttctgtttaaggagtttagctttggcgtatgaataagatattacagtctgaagtagcaaggctgttcaaatttcttctgaagttacactgcagtactcctcacctcaccccacccaatctatgttccagttgataattttaataagagccatcacccattttattagcagcaggccaagaggtgttgtggagaagaaatctagcatccctaattccaaatgcatggatcctttggtttctttatcagcataccaattttagaagtatcagagaaattaactgcttcagttctactgggaatatgtgctagccattggttttgtccagcaaatatttccagttcttctgggcacaaagtaggattgcaattctttgctccccagaagctgagtgtaaccattcaatttgcactgatcggtgaaatgttgagtggacgttatatgtgttacttctagatgaaatcttaagattcaattcacgcttctccaactctgactcagcaacctgccagttctaggtaacctggatgccaaagacaggctaatgtgaaagagtgaagagatgtgttccttgaataacaaagaaacctttgttgtattgagtcacttagcttaagagattgttcattattagagtgcaatggaaccccgcccgattcatacagaattggtacctaaaagtgggttactatgaaaacaaccttatttgaaaacttattttgaagaggaaag

SEQ ID NO: 80080 - DNA, 2102 bp, Homo sapiens
ttttttctttaatctaggcaaacaatgatgttggcttggacttattggtaacagtaaagttagaaatattggaaatatttgggatatattttagaggtagaactgacagaattcatggatatgtcagatatgaaatttgagagaaagtggatccacagtgataaatagattttgacttcaacaacttggaacaaattgtattgaaatacactgagatggaggaaattaaacaaagattagatgtagggaatggagagagaaacctatggtttttttgaccttgtcgagttcagtgtaccttggatattcttgtggagttttaaaatcagcacctggttacaagtatctggagtttggaggttgcaatcagatatggattcactgacatgattaaaggcttggaactgggtaaggtcctagggaaaacctgtggatagagaaagagttcaaacatagggccccaggacagtccagcgtttagaatttaaagagagcaaggggcctgagcaagtagaagaagagcagctttattgggcaaatggtaaaggtcttatatttatcaacttttagaatgtcttctagaaattttcgattcaagtattctgcctccttcccttacattttctagtgagatattggattttttattgaactataagatcttaccatacatcagtgacataccctctgtgttatatttaaatttgtattttgtttgtttcgtttatatttttatatttgtcttttatttgttttatttatatttttatatttctcccattttttgtagcaaacatatggatcttttaatgttctatatagcttattaacttactttttgctttacgtgttcttttccatccaaaacctaacattgaccaatatatttctattttagaaattccttttttaaaaaactttagctctttaattaatccaaaacatattttggtgactgagcagccatttgttgaaactatagagtaagtcttggatagctaatctggggcctgccaaggtttccccagtaagaggatttccagtgtttggtattatgagtcctgcccttaaggaaggcactgggagcagtgttcagcagaggacactactgcccaagccaacagtttctttctggtgcagtttataaagccctaggattttgttttgttttgttttgtggctaagcaatgatttgtctctgttacacacattttgccatgttagcgtcccaattattctatttgattctattacttataattaatcccagaaatcttactgagtcatgctcttcaaacagggtcacacccttatgtccctctttccttttttcttccaaatatttccaagcctaagtgcaatttctctggtttctgtttaaggagtttagctttggcgtatgaataagatattayagtctgaagtagcaaggctgttcaaatttcttctgaagttacactgcagtactcctcacctcaccccacccaatctatgttccagttgataattttaataagagccatcacccattttattagcagcaggccaagaggtgttgtggagaagaaatctagcatccctaattccaaatgcatggatcctttggtttctttatcagcataccaattttagaagtatcagagaaattaactgcttcagttctactgggaatatgtgctagccattggttttgtccagcaaatatttccagttcttctgggcacaaagtaggattgcaattctttgctccccagaagctgagtgtaaccattcaatttgcactgatcggtgaaatgttgagtggacgttatatgtgttacttctagatgaaatcttaagattcaattcacgcttctccaactctgactcagcaacctgccagttctaggtaacctggatgccaaagacaggctaatgtgaaagagtgaagagatgtgttccttgaataacaaagaaacctttgttgtattgagtcacttagcttaagagattgttcattattagagtgcaatggaaccccgcccgattcatacagaattggtacctaaaagtgggttactatgaaaacaaccttatttgaaaacttattttgaagaggaaag

SEQ ID NO: 80081 - DNA, 589 bp, Homo sapiens
aatttgcaatcctagatgtcatacatggaaaacatcttatgaagaattagcttcatcttcaaataaggagtaaagttcttgtcacattctctacagatttcagaagctaactgcactctcagatggtttgtttgggccatatttaataattcaagcagattatcttcattagcacagtcttttcttctctccttctctctyctttccttctcttttaccaattctcaatgttttctcttgtttctcttattagtacctagttatgtggaaaaggctacaaattccacagtaattggctctcatttatattactccaaattgtgtttctccatagcacacaaaaattgggaatttgatgcaactgaactaaaagaaacacaaaaacgcacttaataagtgttagtctagactagcttcctagagcactccctatttttccccatgctccaaccatctggtgtttatgtgacattcacagatttggggccatttaccattatcttctatgtaataaaagtgagttacattaaacatgctaaagcaaattaaaaggatcagaatcagaaagcacccttgagtaaacactgga

SEQ ID NO: 80082 - DNA, 802 bp, Homo sapiens
caggaagagggttgtttcctggaactgaattgctcaccatcttcatcttgaattttctagtctcagaactgtgagaaataaatgtctgccctggaaaccacccagtctataataatttgctatagcagcctgaacaggctactacagcattttacattgagttacatttacagcaaaacttaatgctagtcccaggcacggtggctcatgcctgtaatcccagcaatttggaaggccaaggcgggcggatcacctgaagtcaggagttcaagaccagcctggccaacatggtgaaaccccatctctactaaaaacacaaaaattagctgagcatggtgatgggggcctataatcccagttactcaggtggctgaggcaggagaatcacttgaacctgggaggtgsaggttgcagtgagccaagatcacaccactgcattccaggctgggcgacagggtgagactgtctaaaaacaaacaaaccaaaaaacccttaatactagcaactcaatgtttatgaataatagtaataacattaataataggtggaatttgaggaattatttcttctctcttgctaataaatttcctgggggaaagtcaattaagatgggtgctgaaatcttatccttccaaataaatatcagtgctatgtttgatgaaaacacgagccatcctcacctcagctatctctaagcaagatgaatcaaaacattttgcatacttatttttggaaaggcttaccatatattacaaaaggaaaaaataaaccccctacttatttctcccactttaaaaatgca

SEQ ID NO: 80083 - DNA, 558 bp, Homo sapiens
cccacagagaacccattgcctccctttactgcctggagaattgggactgggggattggagatgggggagaatgaaaattgtagtgatcattttctctgagggatttttcccccacacactcagttcttacttattaaacggcttttgtatgtcttaggaataaaaagccattcttcctgggtgtcttcttcctgctagcaatggagctctacctggtctcgtcagcaatcacgtcattaaatctgactggcaacttgcagaggatggtggggccgagagacaacaggtcaagttttcgagggtatgtccyctgaaactcaggcaggagttcaggtagtaagaatttgaaagctatcaaaaacagaagtgggcattctccttcttgctgaatgagctactcattcaggaaagccagtgttgagtcagagatttaataaagacatgcaacaagtagctgaaactttaggaagataacaaagccacttcctgaagaaaccaagcattggcaacaaactgagcaggtggagggaaactgtccagatctcataaagatgctgg

SEQ ID NO: 80084 - DNA, 558 bp, Homo sapiens
cccacagagaacccattgcctccctttactgcctggagaattgggactgggggattggagatgggggagaatgaaaattgtagtgatcattttctctgagggatttttcccccacacactcagttcttacttattaaacggcttttgtatgtcttaggaataaaaagccattcttcctgggtgtcttcttcctgctagcaatggagctctacctggtctcgtcagcaatcacgtcattaaatctgactggcaacttgcagaggatggtggggccgagagacaacaggtcaagttttcgagggtatgtcctctgaaactcaggcaggagttcaggtagtaagaatttgaaagctatcaaaaacagaagtgggcattctccttcttgctgaatgagctactcattcaggaaagccagtgttgagtcagagatttaataaagacatgcaacaagtagctgaaamtttaggaagataacaaagccacttcctgaagaaaccaagcattggcaacaaactgagcaggtggagggaaactgtccagatctcataaagatgctgg

SEQ ID NO: 80085 - DNA, 558 bp, Homo sapiens
cccacagagaacccattgcctccctttactgcctggagaattgggactgggggattggagatgggggagaatgaaaattgtagtgatcattttctctgagggatttttcccccacacactcagttcttacttattaaacggcttttgtatgtcttaggaataaaaagccattcttcctgggtgtcttcttcctgctagcaatggagctctacctggtctcgtcagcaatcacgtcattaaatctgactggcaacttgcagaggatggtggggccgagagacaacaggtcaagttttcgagggtatgtcctctgaaactcaggcaggagttcaggtagtaagaatttgaaagctatcaaaaacagaagtgggcattctccttcttgctgaatgagctactcattcaggaaagccagtgttgagtcagagatttaataaagacatgcaacaagtagctgaaactttaggaagataacaaagccacttcctgaagamaccaagcattggcaacaaactgagcaggtggagggaaactgtccagatctcataaagatgctgg

SEQ ID NO: 80086 - DNA, 1293 bp, Homo sapiens
ctggatttagcaaaagcaataaagctgctgccattgataagtgctgatggtccaaataatcaattagcagattaatttttagaagacagacraaacagaacataatttcacttactgggcctgtctactttgccatgagcaagtgtctgttttttagcttgcagctgtaaaatccatacgtgacttttccatatgtaattgtgatagtagttgtcaaggtacatttttgcttatccagatgtttatatttaactagctctgctttatagttatctcattgaactcttaggcccagcccaaatgaaatgagatgttaaagtattgaatttttatgtatgtctcacatatttgagatacactgggtcaaattgttgatttattttttttaatgattttcaagttctcagtttagaagcacgattggctgatagtttctatgactcaagatgaaatgtattcactgcttaactgaatgcaacagttgtgttttgtttacaaaatcttatctaaaatgaatgctttctgccacacatcaagtcagctactgtaggcaactcttttagtccagctagcaaatgggcagaatgcccacacaattaagaggaaaattaactgaaaaaaaaaaaacaacagagtgagcatcactttccagtaaattggatgtccttgtgttgatgtccataaagtagtttattcctttcctttctttattggtttatttcctctttcttccctttcttagtttcttttttaatatttcatttttattttgtttcagtattttatatttgagccccatttttgtagaatagatttaacccttcttagaagccaagaagttagccttttaaggcatcatggatgctggcagaaggcataaggctcctgggttcagaagcaaaactctacttgtgcacagcactgcaagcagcatgagtatcaacatgtgcatggattcttcttgtcctcaagtcccacaggggcaatgtgacatagactcaggtggacactgctcatgcagtggctttgcatcacagttgaggaacactgggcttgggaacccattttacaccgtgaacagtaggcaagcctgctctttgtcccaatgggaaacattacctcatccctcaaggtggcttgaagcaaacataatgtgagaagtagcctgggtaaaaagtggttgtggttccacagtcttggtgcacacacggcagcacatgtaggaatgaagagacccatgaaggtctgtatctcataacatctttatgtgtgaaaattacaaatgttttgaca

SEQ ID NO: 80087 - DNA, 1234 bp, Homo sapiens
cctcatagtgatgttagaaaaaagcaagtgttaaaatcagattggattcagatctttacactatcactcactaattgtaagtacttgggggaatcagatcagacctctgatccttagtttcggccggtgtgtaatggtgattgcagtgtctgtctcatttactcaaccctttcccaagttgttggaggactaaatgaggtaatgctaataatgtatctagaagaatgccagacaaataagcytttattattattattcctgtttacagataaataaattgaggctcagggaggttaagtgatttgtccaatagacataacttgtaacttgaggacccaggacttgtttacaagtaatattttaaaacttgtcaagaatccatacagcagatcaactgagtacagggctgaattatgacttgttgggccatgggcatttttgccttcatgggccccttccaccatagggggaaaaaaaaaacttctaaaaatgcaggtgggattgatttgaatatatacattactattatattcactttgtcgtcatattttaaaggaaattaaaataagaatatttttgcaggtctctacatgcgtcataggccctgggcactatgcccactgtgtctaatggttaaaccaatcttaagttacgaaaaaaaaaaaaaaaaacactaaactgcttcatatggagacaaacctaacatgaataagggatccttctatccctatgtttggtcttgcaattcagagtgttccagtgaggtctccctgccccgctcacagtgacttcctaagtatactatagttagctcctaaactgagttagattaaacggggacacttgccaaatccgattgcctcactctctgtgagtgatggatgagattatacgaatttaaaagtctgggataaagaagttaatattttaaaacatgtaaaacacaacagttcttccacatcagataatgaaatctaagattaatcacaaacaaatgtgtactaggaaatgtagtaattcatcacgtcttctccagaagtcgtatctatgttaaatgttccaaaacagtgtcaaagtctgtgtctggagttggtgtaatccggaaagaaaaggagcccagagtcatgcattttaagtgtgtagttttcatagaataatcattgggagaaagaggaatgctacattaaaacttttgtagcattttcttcatggtatttgggttccattttgaggg

SEQ ID NO: 80088 - DNA, 687 bp, Homo sapiens
caataaaacctatcaagaatcggatggagggatttattactgttatttattacaagttttaacatggtcattttgagtttgctttttaagagactatccactaagtgagttagtgtgctctgaaagagtgtacttaaattttgcttcaaatggattctggttattatcagtttcaaactaaggaagcagaactgtttatgtaaagttaacttagatttattaaacttttaaagagtttgcttgggaagaagctgtgcctacctttcccaaagacttacacatgttcaaacaatgttaacttgttcaagaaacatccacagctacatgttaggaattatagtaagtattgtaaagtcagaaaggaaagaaagaataaaaggaagaaatgaagaaaggacagaggaaggaaggaaggaaggaaggaaaggaaggaagggaaggaagaaagggaatggaaggaagatgaaaggacaagcagtgtagcaaattagttaaataactagggttatggagtcagatggcctcagtttgaatgccatctcttctaataacaagaaacaaaactttcaggaaattacttaacttgcctctccttcagtttcctcatctgtaacacggggataataatagtctaaccttctaggactgttrtgagaatcaaatggatttatgtatgtaaattgctta

SEQ ID NO: 80089 - DNA, 562 bp, Homo sapiens
gggaaaacctcattaaagttctgtgaatattcttgcacaaattgttttgtggacacatgcactacttttggcacatcccaaatataatatactcaaagccatctgtattaacttctctccttcatcttacatcttcaattcattttcctgttcaccaggatgacaaaattttttttwaaaaaatattcaatccctagaatttttttgactcttctctcctcttcactttctgtgcaaaatgactcttcaaaaactattgttctctttctcttatagttcatattggcatatgacagactactcaaaaattagcgatgtaaaacaaccaccattttatttttcttataattatgtgggttaggaattacaattggttcagctaggtagttttcacttagggcctccaatatatttgcaatcaaacatcagctcatccctgttatctgaaggactaactagccttgacatccaagacagctcactcatatagctggcagctggtaatggctgatatagtttggatgtttatcacttccaaaactcatgttaaagtataatcctc

SEQ ID NO: 80090 - DNA, 533 bp, Homo sapiens
aagaaaaatgaaaatgaaagtcacgtatacccaacagaaatgaacatctgtgttcaccaaaatgtgtgctctgaaatgttcataattgcaccattttaaactggaaacaacccaaattctatcaacagaaaatggataaacgacacracgactatcacgaccataatgatgagcaaaagaactcacatgcacaatgtatgggttttacccatctaagtatcaaaagtatgatttcactcatctaaacatcaaaacagggacaatgacttgatggacctcagaggagcatttatcctcagaggatgctatgactgtgagggacatgagcagtggctctggggtattggtaattttctggtttttattctggtcgctcactatatggtatattcagtttgtgaaaattcattgatttgcacccttatgacaatggatactttcatttaaatatattatgcttcaatagaaagttaaaagtaaatgcaaatattaaatctttaattgttttgttttcataaaagcatggagttgca

SEQ ID NO: 80091 - DNA, 1460 bp, Homo sapiens
agcctctggactcagctgccaatctgcaagaaatccagagggcagaggaactgcactatgagtatgcaattaacagaatgaaactgtggaatattccaaatgccctggatttctcaaaaagtaaattgcggccagcggcagtggctcacacctgtaatcccaacactttcggaggccgaggtgggcagatcacttgaggtcaggagttcgaaacaagcctggctaacatggtgaaaccgcgtctctactaaaaacacacacgtaaaaattagctgggcgtggtggcgggcacctgtaatcccagctacttgggaggctgagtcaggagaatcacttgaatccgggaggtggaggttgcagtgagccaagatggtgccattgtagtccagcctgggtgacaagagagagactccgtctcaaaaacaacaacaacaacaacaaaagtaaattgtaggaaaaaaaagagatggaggagaaatttgtggattaaaatgggataaaatgttagcttttaaaaaaacgagcaagattaaacatagtctctaggaatggacattggggtgatctgtataaaaggagagtagttacttttaggggaagcgaggggatcatgagagacacaggccacatgtccttacctgggtgttggtaagaaaagtacgttgtaactcattagggtttgcatttgtttggtagggccttctgtatttgtgtttgttttacaataaaatattttaaagtaaataaaattatttctaaaaatatttagctcccctattgttctttgaaaataagactgctgactatttacctaaatgtgtccttttttggtgttctttacatatacagaatgtgcctttccagtttgttttcaaaagcaatttttaaaatgataccgtggttagtaagaaagcatcctgagctgcacattaattttgttgtttagtaaatggtaattgacctaaaattctttcaggcattaaatgccacttaattcagcaatatttggaatctttttctgtattaatgtttattattaatcgcatttaaagcatgcaaatataaatcattctggctgtacaggaaggaggtagttacaaagaaaaacaaaggactttgagcagttacttctatgataatttgtgctttgagctctggaatggctgaaggtgttccatatcccctaccattagatttctagagaattccctgaatttttgttttgtttgttttgtttttttgagacagagtcttcctccgtcgcccaggctggactgcagtggcacattcttggcttactgcaacctctgcctcctgggctcaagcgattctcctgcctcagcctcccaagtagctgggattacagctgtgtgtcactatgcctggctaagttttgtatttttagtagagacagtgtttcaccatgttggcygggttgttctcgaactcctgacctcaag

SEQ ID NO: 80092 - DNA, 1102 bp, Homo sapiens
ggtgccagaagatttgatgctaggcaagcgcccattcttcatagatgtcgccttctgtgtgttctcacatggcagaagggcaaagaggctccctctattataacagcactaagtccattcctgaggatggaaccctcgtgacctaatcatcttacaaagaccccacctcttaataccatcacctcggaatttaggctacaacatatgaattttggggagaacacaaacattcagacaatagcatatacatataatagaatcactgtggagctcttataaaccatgttttggtataaatgtaataatagaatgagttcatgatataatataagtgaaaaagtaagatatataattataggtacagtatgattacactcttttatataatgtatacaatgtataatatgtgaaatatatatgtatgcataataaatacatgtacataaaatatttcctggtatgtacatgtgtatatatatttttccatgtatataatttatacacattaacaaaaaatgagaaaatatgacaaatatttaacaatagctatttctccagtggcaggattacagataatttttattttcatacatttctgtctgacttttccaaatgtgctattatgagcataaattttataattaaatacaagtcaataagcattttaawgtgcctataacagcccatcagcaagtgaagagatgagataaaaatgtgtctgcacttggtacacatattgactttcttttacttccatttccagatgatattgacaaagatattgaaaaaatttgattaatatgcctcagcttagatttgctatgcgagagcaaagtcttattgttttaaaggaattatttgctgatcagctataggctgacttgacctcatattcctaccatgatagtcccacagtgtagggatggggtggtatgactcccaagacttggagtatgttattttctcagggcaatgaagatttggaaaaatgatggcaaagacagaattactatctcatcaaagacatccctcagcagtatctgtgggctgtgcagtgttctcagttcgataaaggattagaacacaatgcttctttggagag

SEQ ID NO: 80093 - DNA, 2472 bp, Homo sapiens
aggatggctcgtgttttcatcaaacatagcactgatatttatttggaaggataagatttcagcacccatcttaattgactttcccccaggaaatttattagcaagagagaagaaataattcctcaaattccacctattattaatgttattactattattcataaacattgagttgctagtattaagggttttttggtttgtttgtttttagacagtctcaccctgtcgcccagcctggaatgcagtggtgtgatcttggctcactgcaacctscacctcccaggttcaagtgattctcctgcctcagccacctgagtaactgggattataggcccccatcaccatgctcagctaatttttgtgtttttagtagagatggggtttcaccatgttggccaggctggtcttgaactcctgacttcaggtgatccgcccgccttggccttccaaattgctgggattacaggcatgagccaccgtgcctgggactagcattaagttttgctgtaaatgtaactcaatgtaaaatgctgtagtagcctgttcaggctgctatagcaaattattatagactgggtggtttccagggcagacatttatttctcacagttctgagactagaaaattcaagatgaagatggtgagcaattcagttccaggaaacaaccctcttcctgagttctaggctgccaccttcttcccatgtcttcacctggcagagggagaactctgggatctcctcctcttcatatgaagccactaagcctatcatgagagtcactctttcctaactcatttcaatctaattgtctcccaaatgcatcatctccaaataccatcacattggggattaaagcttcagcatgtgaagtttgcagggaacacaatttagctcatagcaaatggtaaaatatttgtatataaagagtttttcatttgtttttaaccacgtaagctgtatttcatgactccgaaatgaaatgctgtaatagtttggatttgtagctagattttgtttgtattcaaaaaaatcttgacagaacacactcttcctttgcttattaaaatatgagtactaatgtaaaattggaacaatatgtcatctgatttactatactctaggtcaagtggtgaaacaactattcagacaacctgccaggttctgttaggttacacccagagtttcatggtttaagacaaatgcaggctgaagttttgactcgcaggcatgtggtctggctcaaggatatactacacatgtatctggaaacacacatacagatgcacacacacagcaaagccaagaaacacagatatgtcttcagagaatgaaagcaaaaaccagaaactgagtatcttctcctaaaaatttcccccacctcttagagaagcaactcggcatttcctttgtggtttgcatttcaaggaatttttaaaaactcagcagtaaatttatttctgaatctcattattctatttaccttaagaaatggctgtactaatggacatattcgcaagaccagaaatttggtaggcaagcatagaggacttagagaaaaagcatctaaatagatatgggaagagaaaagtaatacactggtcaactacagagaaggttgcaaagcatccctcatttttgacttttgccttccattcctcaggtgacatcatgtttcactccagtttcccataactcccaaaagtcattacagaccctcttgcacagatgtgccccttgctctaaattagactctgtttttcctccaaccctcttcgcatcctccactactcaaaattctggttccttccaggatagggatagaatctaattaaactaatgcttacatgtaatttcctagtagcctttcgtcccttctttccctagctcttcacagtatagtgttaggaatagaaataaacatggccttgagctcacaatagaaaaaaaatatattgttattcaacttagtatgcaggagagtaacaaatatttgtattacaggaaaaactaagattttgactgtgacttccccattgatttctagaacatagtagtctcatctttctggaaggataggtgctcccttttttcttatctatttgctttcttccattcggaggctctctctcagttgcaaggaatgactttcttaaatataagagatcagtctttagatacaactgttgaaattctctcctacaatattttctaagtattctcctttacaatatttcctaaatatgagtcatgttgaatagaggtacgaattaagtgttaagaggatatacaaaagagagtaattaagtataatttttggatcaactgggaaggaatttacagaaaagcagacattagagttagaccttaggataggaaggtttgggggaaaatgttgaaatgacttgtacttaaaatggaaaataaaacaatctcaaattattgtagggtataatgcatgtctaattatagaa

SEQ ID NO: 80094 - DNA, 2472 bp, Homo sapiens
aggatggctcgtgttttcatcaaacatagcactgatatttatttggaaggataagatttcagcacccatcttaattgactttcccccaggaaatttattagcaagagagaagaaataattcctcaaattccacctattattaatgttattactattattcataaacattgagttgctagtattaagggttttttggtttgtttgtttttagacagtctcaccctgtcgcccagcctggaatgcagtggtgtgatcttggctcactgcaacctgcacctcccaggttcaagtgattctcctgcctcagccacctgagtaactgggattataggcccccatcaccatgctcagctaatttttgtgtttttagtagagatggggtttcaccatgttggccaggctggtcttgaactcctgacttcaggtgatccgcccgccttggccttccaaattgctgggattacaggcatgagccaccgtgcctgggactagcattaagttttgctgtaaatgtaactcaatgtaaaatgctgtagtagcctgttcaggctgctatagcaaattattatagactgggtggtttccagggcagacatttatttctcacagttctgagactagaaaattcaagatgaagatggtgagcaattcagttccaggwaacaaccctcttcctgagttctaggctgccaccttcttcccatgtcttcacctggcagagggagaactctgggatctcctcctcttcatatgaagccactaagcctatcatgagagtcactctttcctaactcatttcaatctaattgtctcccaaatgcatcatctccaaataccatcacattggggattaaagcttcagcatgtgaagtttgcagggaacacaatttagctcatagcaaatggtaaaatatttgtatataaagagtttttcatttgtttttaaccacgtaagctgtatttcatgactccgaaatgaaatgctgtaatagtttggatttgtagctagattttgtttgtattcaaaaaaatcttgacagaacacactcttcctttgcttattaaaatatgagtactaatgtaaaattggaacaatatgtcatctgatttactatactctaggtcaagtggtgaaacaactattcagacaacctgccaggttctgttaggttacacccagagtttcatggtttaagacaaatgcaggctgaagttttgactcgcaggcatgtggtctggctcaaggatatactacacatgtatctggaaacacacatacagatgcacacacacagcaaagccaagaaacacagatatgtcttcagagaatgaaagcaaaaaccagaaactgagtatcttctcctaaaaatttcccccacctcttagagaagcaactcggcatttcctttgtggtttgcatttcaaggaatttttaaaaactcagcagtaaatttatttctgaatctcattattctatttaccttaagaaatggctgtactaatggacatattcgcaagaccagaaatttggtaggcaagcatagaggacttagagaaaaagcatctaaatagatatgggaagagaaaagtaatacactggtcaactacagagaaggttgcaaagcatccctcatttttgacttttgccttccattcctcaggtgacatcatgtttcactccagtttcccataactcccaaaagtcattacagaccctcttgcacagatgtgccccttgctctaaattagactctgtttttcctccaaccctcttcgcatcctccactactcaaaattctggttccttccaggatagggatagaatctaattaaactaatgcttacatgtaatttcctagtagcctttcgtcccttctttccctagctcttcacagtatagtgttaggaatagaaataaacatggccttgagctcacaatagaaaaaaaatatattgttattcaacttagtatgcaggagagtaacaaatatttgtattacaggaaaaactaagattttgactgtgacttccccattgatttctagaacatagtagtctcatctttctggaaggataggtgctcccttttttcttatctatttgctttcttccattcggaggctctctctcagttgcaaggaatgactttcttaaatataagagatcagtctttagatacaactgttgaaattctctcctacaatattttctaagtattctcctttacaatatttcctaaatatgagtcatgttgaatagaggtacgaattaagtgttaagaggatatacaaaagagagtaattaagtataatttttggatcaactgggaaggaatttacagaaaagcagacattagagttagaccttaggataggaaggtttgggggaaaatgttgaaatgacttgtacttaaaatggaaaataaaacaatctcaaattattgtagggtataatgcatgtctaattatagaa

SEQ ID NO: 80095 - DNA, 2472 bp, Homo sapiens
aggatggctcgtgttttcatcaaacatagcactgatatttatttggaaggataagatttcagcacccatcttaattgactttcccccaggaaatttattagcaagagagaagaaataattcctcaaattccacctattattaatgttattactattattcataaacattgagttgctagtattaagggttttttggtttgtttgtttttagacagtctcaccctgtcgcccagcctggaatgcagtggtgtgatcttggctcactgcaacctgcacctcccaggttcaagtgattctcctgcctcagccacctgagtaactgggattataggcccccatcaccatgctcagctaatttttgtgtttttagtagagatggggtttcaccatgttggccaggctggtcttgaactcctgacttcaggtgatccgcccgccttggccttccaaattgctgggattacaggcatgagccaccgtgcctgggactagcattaagttttgctgtaaatgtaactcaatgtaaaatgctgtagtagcctgttcaggctgctatagcaaattattatagactgggtggtttccagggcagacatttatttctcacagttctgagactagaaaattcaagatgaagatggtgagcaattcagttccaggaracaaccctcttcctgagttctaggctgccaccttcttcccatgtcttcacctggcagagggagaactctgggatctcctcctcttcatatgaagccactaagcctatcatgagagtcactctttcctaactcatttcaatctaattgtctcccaaatgcatcatctccaaataccatcacattggggattaaagcttcagcatgtgaagtttgcagggaacacaatttagctcatagcaaatggtaaaatatttgtatataaagagtttttcatttgtttttaaccacgtaagctgtatttcatgactccgaaatgaaatgctgtaatagtttggatttgtagctagattttgtttgtattcaaaaaaatcttgacagaacacactcttcctttgcttattaaaatatgagtactaatgtaaaattggaacaatatgtcatctgatttactatactctaggtcaagtggtgaaacaactattcagacaacctgccaggttctgttaggttacacccagagtttcatggtttaagacaaatgcaggctgaagttttgactcgcaggcatgtggtctggctcaaggatatactacacatgtatctggaaacacacatacagatgcacacacacagcaaagccaagaaacacagatatgtcttcagagaatgaaagcaaaaaccagaaactgagtatcttctcctaaaaatttcccccacctcttagagaagcaactcggcatttcctttgtggtttgcatttcaaggaatttttaaaaactcagcagtaaatttatttctgaatctcattattctatttaccttaagaaatggctgtactaatggacatattcgcaagaccagaaatttggtaggcaagcatagaggacttagagaaaaagcatctaaatagatatgggaagagaaaagtaatacactggtcaactacagagaaggttgcaaagcatccctcatttttgacttttgccttccattcctcaggtgacatcatgtttcactccagtttcccataactcccaaaagtcattacagaccctcttgcacagatgtgccccttgctctaaattagactctgtttttcctccaaccctcttcgcatcctccactactcaaaattctggttccttccaggatagggatagaatctaattaaactaatgcttacatgtaatttcctagtagcctttcgtcccttctttccctagctcttcacagtatagtgttaggaatagaaataaacatggccttgagctcacaatagaaaaaaaatatattgttattcaacttagtatgcaggagagtaacaaatatttgtattacaggaaaaactaagattttgactgtgacttccccattgatttctagaacatagtagtctcatctttctggaaggataggtgctcccttttttcttatctatttgctttcttccattcggaggctctctctcagttgcaaggaatgactttcttaaatataagagatcagtctttagatacaactgttgaaattctctcctacaatattttctaagtattctcctttacaatatttcctaaatatgagtcatgttgaatagaggtacgaattaagtgttaagaggatatacaaaagagagtaattaagtataatttttggatcaactgggaaggaatttacagaaaagcagacattagagttagaccttaggataggaaggtttgggggaaaatgttgaaatgacttgtacttaaaatggaaaataaaacaatctcaaattattgtagggtataatgcatgtctaattatagaa

SEQ ID NO: 80096 - DNA, 2472 bp, Homo sapiens
aggatggctcgtgttttcatcaaacatagcactgatatttatttggaaggataagatttcagcacccatcttaattgactttcccccaggaaatttattagcaagagagaagaaataattcctcaaattccacctattattaatgttattactattattcataaacattgagttgctagtattaagggttttttggtttgtttgtttttagacagtctcaccctgtcgcccagcctggaatgcagtggtgtgatcttggctcactgcaacctgcacctcccaggttcaagtgattctcctgcctcagccacctgagtaactgggattataggcccccatcaccatgctcagctaatttttgtgtttttagtagagatggggtttcaccatgttggccaggctggtcttgaactcctgacttcaggtgatccgcccgccttggccttccaaattgctgggattacaggcatgagccaccgtgcctgggactagcattaagttttgctgtaaatgtaactcaatgtaaaatgctgtagtagcctgttcaggctgctatagcaaattattatagactgggtggtttccagggcagacatttatttctcacagttctgagactagaaaattcaagatgaagatggtgagcaattcagttccaggaaacaaccctcttcctgagttcyaggctgccaccttcttcccatgtcttcacctggcagagggagaactctgggatctcctcctcttcatatgaagccactaagcctatcatgagagtcactctttcctaactcatttcaatctaattgtctcccaaatgcatcatctccaaataccatcacattggggattaaagcttcagcatgtgaagtttgcagggaacacaatttagctcatagcaaatggtaaaatatttgtatataaagagtttttcatttgtttttaaccacgtaagctgtatttcatgactccgaaatgaaatgctgtaatagtttggatttgtagctagattttgtttgtattcaaaaaaatcttgacagaacacactcttcctttgcttattaaaatatgagtactaatgtaaaattggaacaatatgtcatctgatttactatactctaggtcaagtggtgaaacaactattcagacaacctgccaggttctgttaggttacacccagagtttcatggtttaagacaaatgcaggctgaagttttgactcgcaggcatgtggtctggctcaaggatatactacacatgtatctggaaacacacatacagatgcacacacacagcaaagccaagaaacacagatatgtcttcagagaatgaaagcaaaaaccagaaactgagtatcttctcctaaaaatttcccccacctcttagagaagcaactcggcatttcctttgtggtttgcatttcaaggaatttttaaaaactcagcagtaaatttatttctgaatctcattattctatttaccttaagaaatggctgtactaatggacatattcgcaagaccagaaatttggtaggcaagcatagaggacttagagaaaaagcatctaaatagatatgggaagagaaaagtaatacactggtcaactacagagaaggttgcaaagcatccctcatttttgacttttgccttccattcctcaggtgacatcatgtttcactccagtttcccataactcccaaaagtcattacagaccctcttgcacagatgtgccccttgctctaaattagactctgtttttcctccaaccctcttcgcatcctccactactcaaaattctggttccttccaggatagggatagaatctaattaaactaatgcttacatgtaatttcctagtagcctttcgtcccttctttccctagctcttcacagtatagtgttaggaatagaaataaacatggccttgagctcacaatagaaaaaaaatatattgttattcaacttagtatgcaggagagtaacaaatatttgtattacaggaaaaactaagattttgactgtgacttccccattgatttctagaacatagtagtctcatctttctggaaggataggtgctcccttttttcttatctatttgctttcttccattcggaggctctctctcagttgcaaggaatgactttcttaaatataagagatcagtctttagatacaactgttgaaattctctcctacaatattttctaagtattctcctttacaatatttcctaaatatgagtcatgttgaatagaggtacgaattaagtgttaagaggatatacaaaagagagtaattaagtataatttttggatcaactgggaaggaatttacagaaaagcagacattagagttagaccttaggataggaaggtttgggggaaaatgttgaaatgacttgtacttaaaatggaaaataaaacaatctcaaattattgtagggtataatgcatgtctaattatagaa

SEQ ID NO: 80097 - DNA, 2472 bp, Homo sapiens
aggatggctcgtgttttcatcaaacatagcactgatatttatttggaaggataagatttcagcacccatcttaattgactttcccccaggaaatttattagcaagagagaagaaataattcctcaaattccacctattattaatgttattactattattcataaacattgagttgctagtattaagggttttttggtttgtttgtttttagacagtctcaccctgtcgcccagcctggaatgcagtggtgtgatcttggctcactgcaacctgcacctcccaggttcaagtgattctcctgcctcagccacctgagtaactgggattataggcccccatcaccatgctcagctaatttttgtgtttttagtagagatggggtttcaccatgttggccaggctggtcttgaactcctgacttcaggtgatccgcccgccttggccttccaaattgctgggattacaggcatgagccaccgtgcctgggactagcattaagttttgctgtaaatgtaactcaatgtaaaatgctgtagtagcctgttcaggctgctatagcaaattattatagactgggtggtttccagggcagacatttatttctcacagttctgagactagaaaattcaagatgaagatggtgagcaattcagttccaggaaacaaccctcttcctgagttctaggctgccaccttcttcccatgtcttcacctggcagagggagaactctgggatctcctcctcttcatatgaagccackaagcctatcatgagagtcactctttcctaactcatttcaatctaattgtctcccaaatgcatcatctccaaataccatcacattggggattaaagcttcagcatgtgaagtttgcagggaacacaatttagctcatagcaaatggtaaaatatttgtatataaagagtttttcatttgtttttaaccacgtaagctgtatttcatgactccgaaatgaaatgctgtaatagtttggatttgtagctagattttgtttgtattcaaaaaaatcttgacagaacacactcttcctttgcttattaaaatatgagtactaatgtaaaattggaacaatatgtcatctgatttactatactctaggtcaagtggtgaaacaactattcagacaacctgccaggttctgttaggttacacccagagtttcatggtttaagacaaatgcaggctgaagttttgactcgcaggcatgtggtctggctcaaggatatactacacatgtatctggaaacacacatacagatgcacacacacagcaaagccaagaaacacagatatgtcttcagagaatgaaagcaaaaaccagaaactgagtatcttctcctaaaaatttcccccacctcttagagaagcaactcggcatttcctttgtggtttgcatttcaaggaatttttaaaaactcagcagtaaatttatttctgaatctcattattctatttaccttaagaaatggctgtactaatggacatattcgcaagaccagaaatttggtaggcaagcatagaggacttagagaaaaagcatctaaatagatatgggaagagaaaagtaatacactggtcaactacagagaaggttgcaaagcatccctcatttttgacttttgccttccattcctcaggtgacatcatgtttcactccagtttcccataactcccaaaagtcattacagaccctcttgcacagatgtgccccttgctctaaattagactctgtttttcctccaaccctcttcgcatcctccactactcaaaattctggttccttccaggatagggatagaatctaattaaactaatgcttacatgtaatttcctagtagcctttcgtcccttctttccctagctcttcacagtatagtgttaggaatagaaataaacatggccttgagctcacaatagaaaaaaaatatattgttattcaacttagtatgcaggagagtaacaaatatttgtattacaggaaaaactaagattttgactgtgacttccccattgatttctagaacatagtagtctcatctttctggaaggataggtgctcccttttttcttatctatttgctttcttccattcggaggctctctctcagttgcaaggaatgactttcttaaatataagagatcagtctttagatacaactgttgaaattctctcctacaatattttctaagtattctcctttacaatatttcctaaatatgagtcatgttgaatagaggtacgaattaagtgttaagaggatatacaaaagagagtaattaagtataatttttggatcaactgggaaggaatttacagaaaagcagacattagagttagaccttaggataggaaggtttgggggaaaatgttgaaatgacttgtacttaaaatggaaaataaaacaatctcaaattattgtagggtataatgcatgtctaattatagaa

SEQ ID NO: 80098 - DNA, 464 bp, Homo sapiens
catggctgctcctcggccttgagatctccttctggggaagagcccaggctgatgtcacccagtgagcttgggagtggcttcagcgtgggggtggaagggagtgagataggatttgccaggaagcattccagggactttgctgaaaggctgcttttctttttttctctttctctctttctcctttcctccctttcatcctgccctttctctctcccttctctctttttttaacttttattttaagttcaggggtacaagcgtgggtttgttacataggtaaactcgtgtcatrgggttttgttgtacagatcatttcatcacccaggtattgagccttgtacccattcgctatttttccttctctttctatttttccctccctccttccctccctccctccctcctttccctccctcctttccctgcctcccttccttccttccttccttcattccttccttcct

SEQ ID NO: 80099 - DNA, 1329 bp, Homo sapiens
ccatgcaggcagaaacattgtctttttcatcattttaaggcttaaaatccaaagcagtttctgacacatagtaggcactggatatatttgtagaatgaataaataattgatgagtgtttgggaaatgtgctgagtcctagattatcttctagtgtgccaatagccttaaatagaatatcaagtacatgttgccggctgacattcaccaacagtaaaattcaagattttagtagtctagcagctgccagcttgcacagtcttcagtcagatactttctacattaagatcatttacaaatttctaaggcaagaaatagcatgtggacttgaaagaaggtaaagatatagtttacccattatgctttatattagtactttaatccacttttaaaacatctaaaatgtactaatttatttccctttttgtttctttaagtttcctatttttaaaacacttgtggtcaattctatcaatactactaagtatccgttactgggttgaaaggaattttccatagaaaaatgcctggaaattgccaaaattatacagtcaaaaattatagagttggaccacaagaccttttatacttgagtggaataccaaaaagaaaatattgatgcaaagctttaagattttactccgggttacttcttaaggcactagctcaaataacactcaaaagttttcaagatgcatgtaaactctacgtaagctccaatcatctatgtgctgactacaggatgctgtggttagtcaggttgaacttccatcagccaccttcatgttcagagtaaacaagtaacaattctgggacttgcaaagaaaccatgggaaaccctgaatgggactttaactttgaattaaaggaaaccacaggccaccacactgccacccatgaacatgtttacattttgtctgagtgcgggtgagtgcaaatggagtctcagtgacttacagagcactgttttaactatgatgtggttaaaacagtctaataatataactcctccagcaggctgctgagtagtatatgctggggcctcagcaatacagacagaggtggggaagaagattggagaggttaggatcagagcatccagctgacattaaactacagggtctgaaggtccacggcaaacttgggtttgtgcaggatgggtattactgwctgttgggtgtgtgtgaggagggaaggaacatttatacaagcaggaggcatcattcaaaatgacataccatccacagaagatttacctaagatcagctttatgatcatcttccttgaggattagaatgtgaaagaaaggatcagcctgggtatggtttata

SEQ ID NO: 80100 - DNA, 661 bp, Homo sapiens
gctctccacattttttagacaaaaaaaatgctccattcctatgaccaaagagcctaataaaatggatgccaccagggaaaggagggccttggaggagagggctcctagcggaagccacgggcaagccctgagttcaggtcactcgtggtggttgccttgggaacagagtctttccgagaggactctatcaatttagcagtttcgcccgaggccaccctgcagggcaattactcgatacaaagctgccctctttagaaaggcttaaaatctttccgctaaaaataattttgatcaagtcatttaacctgtgtggatcacagcctcaccatagtaaaccaatgaaattttattgtcaaggactttttctagctgtacccttcaatgaaattaataatgaaccaagtcatactggaaggactcattccttaggaakagtaatttaactacaaaaaacaaaaagaaccataagctcaatagctataagaggaaaatatttgctgagactctgtataatttcttagtacattctactaaacaccctgactttatgcccaggcaacgcaccatgaaagctgcatttcagcaacccttgcctttaagacctttttggtttgtttgcttgtttgaacagagttcaatcctaaattgattttttttaaga

SEQ ID NO: 80101 - DNA, 661 bp, Homo sapiens
gctctccacattttttagacaaaaaaaatgctccattcctatgaccaaagagcctaataaaatggatgccaccagggaaaggagggccttggaggagagggctcctagcggaagccacgggcaagccctgagttcaggtcactcgtggtggttgccttgggaacagagtctttccgagaggactctatcaatttagcagtttcgcccgaggccaccctgcagggcaattactcgatacaaagctgccctctttagaaaggcttaaaatctttccgctaaaaataattttgatcaagtcatttaacctgtgtggatcacagcctcaccatagtaaaccaatgaaattttattgtcaaggactttttctagctgtacccttcaatgaaattaataatgaaccaagtcatactggaaggactcattccttaggaatagtaatttaacyacaaaaaacaaaaagaaccataagctcaatagctataagaggaaaatatttgctgagactctgtataatttcttagtacattctactaaacaccctgactttatgcccaggcaacgcaccatgaaagctgcatttcagcaacccttgcctttaagacctttttggtttgtttgcttgtttgaacagagttcaatcctaaattgattttttttaaga

SEQ ID NO: 80102 - DNA, 885 bp, Homo sapiens
gggtcttttgctacccacaacttataacactcatgctcgtcaccatttcattgtttattctctttctgctgatgggaatgtcagttatttatacagacacttatcactgatgacattcacaaatacrcactaaatacctactataagctaggcaccaaaagctttgagatggataagatgaaacaaacagaatcattttcctcaaagagtccacataccagtgaataaaaaggtaaacaatagtgcacacctatagtcctagctattcaggaggctgaggcaggaggatcacttgtgcccagtatgttaaggctacagtgagccatgatcgcaccactgcactccagcctgggtgacagagtaagaccctgtctctaaaaaaaaataataataataataaaatatttttaaaagacaagtaaatagaggaaagtgatcagtgatccaacagaaggtccaatatgtcaatatgcagatctctggaagcattctccctcagttcatgcaaatccaaccattcaagctcaagtcccacttctgctatatagcttcttttaaaaatctcagttcacattgatttagctttccactgaattcctgaacaattggaatctaccaaatttactcctttattaaatgtgctgtttatatatccagttttctaaatgtgtgttttacctactttatcacatttctaagttccacatggggggaaaaaaaaaggcttagatcccattccaagatagccgaataggaacagctccagtctgcagctcccagcgtgactgatgcagaagacgggtgatttcttcatttccaactaaggtacctggttcatctcactggggctggttggacagtgggtgcagcccacagagggtgagt

SEQ ID NO: 80103 - DNA, 601 bp, Homo sapiens
gttcttatacctgactgcataaaaataacctgatataaaaatgctgatttcgagggctctcacaccagaaatgatgatttcatagggcaagggtagggctcagtaattggtgttttttcttttaaacaactcctggtgattctggtgaaggtgattctagaccttactaaacttatatcctacttctcaaggccctcttttttccaggagaatttcctatgattattccaattgggatcctccaatgtgctctttgggatattattgtgtgctataaaacaggctttgtgaccaagaaagtttgggaacacattctaagaaatactcagtctgtaattatcttctagttttctgtttgctgtcagcatcaatcaatataagtcgatatgtcttccgattctgtgtctatactgaataatacagcattttcttattttattgactgtttcatgaggtctcctctccccaactggatttataagatccttgagacagttatgtattttttaaaccctttttgtcacatagggcctacctgatcactgttagtgcytgggaaaggcaatgacacctctatactattttaactaactgatatcac

SEQ ID NO: 80104 - DNA, 1494 bp, Homo sapiens
tattgtcacactggctttggacagggaagaaggggaaagggctgatagcctactgagattttgccaggccttttgyacaagttgccagtacttcacctatagaggatcatgtgtccaatcaaccatttctttatttcaatcctgttcatccaagcaaataaaaattcctcaacgaatctcatgtgagaaaaccatgggttatcagaattgattaaagttatgtcttacttttatattccactggtcatttcatcagtagtcatatgtgcttcattaacaatctgtattaatgtagaggttttttccttttgggtactaaaatgccatcctaggatataatcctatgctttcaattttatgtctactctggctgtgatgtttctgaaaacagtgcctaacaactgggtcagtttgtccactgacatctgggaaaatgctagacttactttggtccatgagtggaagaaaagtcacatagaagcatatggtctcttcacattttcccagcttctggcaacttccaaaacagctgcaaagagtggtttgtgccagcacttcagagatcgctttagcctttttgttcagagaggacatatttctctctgtggattaacaattatacattctaccacaatgtgcataaaataataatattttaaatctaaagagtagactacactagaggtacagcttttataacaaagggaacaatttcatttgtattgaatatcattgaaactgttcaatgatattactctaagacatatatactttcttgacagtaaaaagcaacaaaatattaaggaatgagttgaatgttttcagataaaatgtaaggaaataggaaaatatataaaaatctctcttaaggtaaattatcagaaagaattttttagattctcttttatattgtcttctacttcctaccaaagaagtttttccctcctaagctttttttttcaatctcttacaaacatctcaagtacttttacctgaacacttgttatgcatttgaaaaaaggaggcactcatgaatgaaaccaacaagacaaatatttctcatttaacaggagatactgataatgcgtacctagagatatactctcaaaaatttcatgaaccaactcactacactcctctatgacacttctggggaagaaaccttcatctttatgctcatgcactccgattttgttttgcattgtttttatttatttgtttttcattacattaactgtttggcagaggaatagaagtcatcaggtatggggaatttccttcacttgtacattccaaaatgtattttcctaaatcaatatataatagataatgttctaagaaaatgcattggccatttgccatgaattcttttcaagattatctgggtacaaagacaggcctaatgataacaaggaaatgcgggcagagatgacacaatctaccatccccttgcagattggctttttctaagtcagaaggggaaactggctgtat

SEQ ID NO: 80105 - DNA, 1494 bp, Homo sapiens
tattgtcacactggctttggacagggaagaaggggaaagggctgatagcctactgagattttgccaggccttttgtacaagttgccagtacttcacctatagaggatcatgtgtccaatcaaccatttctttatttcaatcctgttcatccaagcaaataaaaattcctcaacgaatctcatgtgagaaaaccatgggttatcagaattgattaaagttatgtcttacttttatattccactggtcatttcatcagtagtcrtatgtgcttcattaacaatctgtattaatgtagaggttttttccttttgggtactaaaatgccatcctaggatataatcctatgctttcaattttatgtctactctggctgtgatgtttctgaaaacagtgcctaacaactgggtcagtttgtccactgacatctgggaaaatgctagacttactttggtccatgagtggaagaaaagtcacatagaagcatatggtctcttcacattttcccagcttctggcaacttccaaaacagctgcaaagagtggtttgtgccagcacttcagagatcgctttagcctttttgttcagagaggacatatttctctctgtggattaacaattatacattctaccacaatgtgcataaaataataatattttaaatctaaagagtagactacactagaggtacagcttttataacaaagggaacaatttcatttgtattgaatatcattgaaactgttcaatgatattactctaagacatatatactttcttgacagtaaaaagcaacaaaatattaaggaatgagttgaatgttttcagataaaatgtaaggaaataggaaaatatataaaaatctctcttaaggtaaattatcagaaagaattttttagattctcttttatattgtcttctacttcctaccaaagaagtttttccctcctaagctttttttttcaatctcttacaaacatctcaagtacttttacctgaacacttgttatgcatttgaaaaaaggaggcactcatgaatgaaaccaacaagacaaatatttctcatttaacaggagatactgataatgcgtacctagagatatactctcaaaaatttcatgaaccaactcactacactcctctatgacacttctggggaagaaaccttcatctttatgctcatgcactccgattttgttttgcattgtttttatttatttgtttttcattacattaactgtttggcagaggaatagaagtcatcaggtatggggaatttccttcacttgtacattccaaaatgtattttcctaaatcaatatataatagataatgttctaagaaaatgcattggccatttgccatgaattcttttcaagattatctgggtacaaagacaggcctaatgataacaaggaaatgcgggcagagatgacacaatctaccatccccttgcagattggctttttctaagtcagaaggggaaactggctgtat

SEQ ID NO: 80106 - DNA, 662 bp, Homo sapiens
ggtgtttagaagaacatcagattgcaggggaaagtaagacaaagaaaaataaatgattttgatttttcagtgcatcttggcatgtagcatgtgatatacttagtatcttggtggtgggatttttcggcatctgaacttgtttaccttagtgactcrtctcccccgcaatgtttttggaccaatgcagtttataaattaattaaataaataaatatgaatcgatcagaagaggagctattgtgttttgagtggatgtgtatcaacatctaactcttataaagacgtgccagacagcaacagccagtgcttgggccccatgaagtgtctcgactccatattgtaatgtttcaggctagccataaaaaggaaactgcttacaaagtctaattgagaggacgccaagaaggcccccagaccccaagtgaattcctcatcagtctgtcacctttgctgaaacatcactgttggtttatagcggttcccccttgctaactgattcccatgaaaactttgctattattgaacactgacaccttaagataaattagtttattggataacttacagaagaatagttagctgcaagtagctttcaaagagagatagagagtctgagtgtagttccagagaccagcacgagggcacggaggcctgaggtattg

SEQ ID NO: 80107 - DNA, 986 bp, Homo sapiens
ttgatgcatttgcttccattagccaggagaataaaataatactgtttttggcataaataaaatctttaagtttaagctaatgtgagtttaattctcctacttttaaatttttcaatatttttctgactaacattctagaaaaaaaattttttaaatacacagaaacaggctgggcacaatggcacacacctgtaatcccatcactttggagacagagctgggaggattgcttaagtctaggagttagagaccagcctgggaaacaaagtgagaccctgttgctaaaaacaaaaaacaaaacaaaaacacaccacacacaaagcaaaacttataggggcattcattttttcttttgcctcaggcttcaatatggcttggtatagcactgattgcagaatagttacatcaaaatttttgagactgttatgctgagccagaaagtaccccatgatttcttttccttttctgtaccttatgttatttttctggagttaaaaatatgtatcttttttactcgtttgtttagttttctgtgcacctaatgctgtatttttttctaacgttgcaatttctctctcaaatatttggaaatagtttttccagtgttcacacacataaaaaaaaaatcgctggggagtgaaggggtctgaagatctcctcccagactccccgcctcaacttaaactagttgctccctaagcctgtgcttagttttgttatgtcaagattatcctttgccactcccttgtattggatgtcctgtttgctgaaccatgaattattcctmatttcttggcttactcatcattttgatgaattgtgtcctctactagcttcctgagaaggtgtgcatcttttttcagtttttgcatatctaaaaatatatttatgcgaatgatagtttggctgaagtacataaaaataattcccatgcagtttttaaaatgttgtttttactatcttcttatatccagtatttgtattaa

SEQ ID NO: 80108 - DNA, 427 bp, Homo sapiens
  misc_feature (1)...(427): n = A,T,C or G
attagaactttattccaaagaagggtaattttattttgtcttttaagtaatttgacccatttatatctgtatgctatatattttactgtaggttgcctgttagtctgttgagattaatcttttgtccctaaaagcaagttatggattaagttcctatgaaggtgtttcttatacttcaatagtaaagttatctcgccctttcttcaccttgaattttttgtaagttcttgggggaatgttaacaaaaaatcaactaaggagttagaaaatgcrgactggtcatctctgtattatttaacattttacgtaaattgtagttagtccnnnnnnnnnnnnnnnnnnnnnnnnnnnnnnnnnnnnnnnnnnnnnnnnnnnnnnnnnnnnnnnnnnnnnnnnnnnnnnnnnnnnnnnnnnnnnnnnnnnntaa

SEQ ID NO: 80109 - DNA, 745 bp, Homo sapiens
tggtattggtgatcaatgatcctatacattgctgtaaagtaagtcaaatttgttatcacagactagtttaatatattgatttgcttttttaccagttcagctagtccacagaatgtttcagaaagggcaactaaaataagtcctattttatattcaacgtaaatatcttggaatggtgtcttttgataattgggcaaattttagttctttcatccttcctatttttagagtttagaaatttctcagcccttcacatgcctttattaattggtgaaaattattttattcagacagatggcttatttaaggaaagcggttacttttatatcccttgggaaacagccatctgttctgattggggtctggggcttccagatgttgccatttccccataacctgtagagtcttcgttacccattatttcaaggatgatatagtaatccctagggaataacagcrgatttacatactggattgagaccaaagtttttaatcatatctctcctgttccttacctattctcatgttttggttcaaagagtaaagcccccattattgaactagaatgggggaaaaaacaattaaaatggaaaagaatatttggttagacaattctccaaagaagataggaaaattgcttgtagacgcatgaaaaaaatgctcaacatcactaaatatgagggaaatacaaatcaaaaacacaatgagataccaccacacaacttcaggatgataattatatgta

SEQ ID NO: 80110 - DNA, 1961 bp, Homo sapiens
tgcatactcataaggtgtctgaaactgggataggttgccctggatcatctccctgggtagcgtagctataactaaaatcatagttcagatcctctaacaaaaaagctgacatgagccaaggttgttaatagtccaaagatcttttgcatcaaatttttggtctctataatcccaaattttgacaacaaataaagggtgtagtggagatcatgaagaataggtgttttaggttaattgatatatctttaggtattcattcaactacactgattttcgaacatatatttaccttctaagtattcttcaataatagattacaacatctaaatgtatgttgccaatagccatacattgtaaccactagccgcatggggctaactgagcacttgaaatgtgtctacatagtccaaatttagacatgttgtatattggtaaaagatacttgatttcaaaaactttctacaaaataagaatgtaaaatttctcattaatattttcaatacataatgatgttgaaataaaaatattttgaatctattagattaaataaaatgtattattaaaattaatttcacttttttttactcttattgatgcagctactagataattttaaattacatatttggctcacatcagtattcctgttgtacaggctaaattaaatcaaagacatatttgaggtttttctttttaaaaggaacatgtattaacacaggagataattgctcagaactaagcctgtggtttgcattcctgttcctaggctttattcagaatctacattctctttgccttgtctcctgagcagaagcttctgctgtgccacaaaccatctcagtcataccacattctcgtcccagtctgtatccttagtaatcagcaccagggcaggccaggaatatggcaaagccttgtaataacttgtctcatctccacctccatcttacctatcatggtggtcttgtatgttcatgactgtacgtcagccctgatttaagaactgctgtgatgayttagctagagaaatcattttgtgctagtcttctaatactttatttagatccaaataccacatttaatgatacttattagacttgtacatgttatatgatacaactttctctgagtaagattctacctgacttactggttttagttcagctgttccaatgaatttagagacaagccttttgcaatttaatattcttcttgcttaacacctttggcatcacttgaaaaactaaagggatgcattcttccactgacatgtgacttctccaaaaatgtccaatggttatgggaagagagattctaggactgatagaaacttattttaaacctaaaggaaaccctattcctgtccattgtaataacacaggactgtatattcttgccttttttcctttcctctctaatagtaacatcaactttccttttgtgtgtgtggatgtgtgtggatgcccacaatatgttgggcaccttatcaggctggatcagtgagaatgaagagtctccagaagcttgtttcagtttacacttaactagcagagtatactatcatgggtagatacgggatatcctctgcccatttactctttactactgaacaccctgttcttcaaataaaacttccaagataaataattctcttaaggagatgctagtgagcaaaacatactggagaattaaagacaagaacctaatactcttggtttacttctttaagcattaacttagtcactgacataatctcatggtgctaactttcagaatcttattaccactgtttacagaggccttctgttattttacatgggcatggagctgacgaatggaggtagaatacattttacatagttgctgctaatatttatctaaagaaatgaacatctcttttatgatacagtagtgtgcatttctattcttgtttcttattccccaaattgtcctaagattgc

SEQ ID NO: 80111 - DNA, 637 bp, Homo sapiens
aatttcaagtttaccattactgtttttcaacgttattcaaaatgtccatattttgtttcattatttaactagatatcataatatkttaagtccaaatatatttttaaaaaaaattactttaaaaacatataaatccatcgtttgtaaacaaaaagaagatatccacattaaaggaacaataagtaacagattcatgcagtgtactcagtctgtcactgaaaaatgctgtttcttcaaaagcaaagatttcagttttcattattatccttagtatttcaacatatactttctgtagacatgtgttactttcatgaataaattacatgttagaaatcaagcttagaaagtattctttaaccaatcttaagatgtaaggtttggttttattgatatgaattggttgtcaggaacataaaagataaatttattgattttgctttcttcatttatagggagttaatcaaattctcctcctttccatcaaatatcacccacacctttccactgtgtctaagggctgacagctaaatgcttacttcgagttatgtggttacttgagaaaaccaggtcattattggagaagagcaaagtgatgcctagagggacggatggggaaggagggtaggaattgctgaaa

SEQ ID NO: 80112 - DNA, 637 bp, Homo sapiens
aatttcaagtttaccattactgtttttcaacgttattcaaaatgtccatattttgtttcattatttaactagatatcataatattttaagtccaaatatatttttaaawaaaattactttaaaaacatataaatccatcgtttgtaaacaaaaagaagatatccacattaaaggaacaataagtaacagattcatgcagtgtactcagtctgtcactgaaaaatgctgtttcttcaaaagcaaagatttcagttttcattattatccttagtatttcaacatatactttctgtagacatgtgttactttcatgaataaattacatgttagaaatcaagcttagaaagtattctttaaccaatcttaagatgtaaggtttggttttattgatatgaattggttgtcaggaacataaaagataaatttattgattttgctttcttcatttatagggagttaatcaaattctcctcctttccatcaaatatcacccacacctttccactgtgtctaagggctgacagctaaatgcttacttcgagttatgtggttacttgagaaaaccaggtcattattggagaagagcaaagtgatgcctagagggacggatggggaaggagggtaggaattgctgaaa

SEQ ID NO: 80113 - DNA, 1132 bp, Homo sapiens
gagaggtcatttattttttctttttttttttaattttatttttccataagttattggggtacaggtggtatttggttacatgagtaagttctttagtggagatttgtgagaacctggcacacccatcacctgagcagtgtacactgcaccatatttgttgtcttttatcctttgtcccctcccactcttccccccaagtccccgaagtcctttgtgtcattcttatgcctttgcatgaggtcatttaaacctcttctttttcttttctttgggatctgtcatgtttacattcaatccatggggctggccatttccccttaggggtgagtcggattttccctttggggtcaccatccgcaaggtacccagatttggggtaaattccctgggatctcacaggagtagtctttgttgggagagtgaacaagtgacccatggctagggttggcaggagaagagagggcttggatcttaggagcctcattaatcatctgaaggctttttttttttttgagtcctaacaactcagacagaacaaggaggaaggaagagragagctccctacccccctgagaagcagctggagaagcttaatactttcaaaaccacccagaggcattctgagaaaacccagcagcaatggagatgggacagcacagggaaagtaaatgaggatcctctgggccaaacctccagactagaggacttgctggaggcagaaatgttaatgttccctgccatccggggagccagtcaagtcaaagggccagcaggaactgtgtgtgtgtgtgtgtgtgtgtacgtgagcacgcacctgtgtgtggtgtgtgtagttaacgcagggctcccactgaagaataacttgcccaactgacccaaggtaggaggcacatgcctcctctctcttgcaccatggagatctcttcaagactgagcttgtcagcaaccttgtctgaaatgcaaacctatgctggctatcaacacatggccaggccacagcacactgtcatggggatgagaggaaagagacccaggccttcccttgctgaccccatgtacagcccacctcccataactcttcttcattaaggcaggccatgcggccatgtgggatttgcccctgagccttgca

SEQ ID NO: 80114 - DNA, 1132 bp, Homo sapiens
gagaggtcatttattttttctttttttttttaattttatttttccataagttattggggtacaggtggtatttggttacatgagtaagttctttagtggagatttgtgagaacctggcacacccatcacctgagcagtgtacactgcaccatatttgttgtcttttatcctttgtcccctcccactcttccccccaagtccccgaagtcctttgtgtcattcttatgcctttgcatgaggtcatttaaacctcttctttttcttttctttgggatctgtcatgtttacattcaatccatggggctggccatttccccttaggggtgagtcggattttccctttggggtcaccatccgcaaggtacccagatttggggtaaattccctgggatctcacaggagtagtctttgttgggagagtgaacaagtgacccatggctagggttggcaggagaagagagggcttggatcttaggagcctcattaatcatctgaaggctttttttttttttgagtcctaacaactcagacagaacaaggaggaaggaagagaagagctccctacccscctgagaagcagctggagaagcttaatactttcaaaaccacccagaggcattctgagaaaacccagcagcaatggagatgggacagcacagggaaagtaaatgaggatcctctgggccaaacctccagactagaggacttgctggaggcagaaatgttaatgttccctgccatccggggagccagtcaagtcaaagggccagcaggaactgtgtgtgtgtgtgtgtgtgtgtacgtgagcacgcacctgtgtgtggtgtgtgtagttaacgcagggctcccactgaagaataacttgcccaactgacccaaggtaggaggcacatgcctcctctctcttgcaccatggagatctcttcaagactgagcttgtcagcaaccttgtctgaaatgcaaacctatgctggctatcaacacatggccaggccacagcacactgtcatggggatgagaggaaagagacccaggccttcccttgctgaccccatgtacagcccacctcccataactcttcttcattaaggcaggccatgcggccatgtgggatttgcccctgagccttgca

SEQ ID NO: 80115 - DNA, 1287 bp, Homo sapiens
cagctctgtgaccgcatcagaccccacagaaacaaggcagtttctctcctggctcagcccatgtgaaaggcaccctgctagccaaatgccaatatcatgaatttgcttagagtgagaatctgctgtcgctttttaccacttgatggaaaagcagagaaattttattcctccttccctgctgagctcaagagtaaggttcatgctgtccaacagaaatataatacaagccacaaatgcttgccatcttcagacatatgcaatttaagatatgttagtagccacatttaaaacaagaattgtaataataaattttatttaacccaatatatccccattctatcatttcaacatgtaatcaatataaaaattattaataaaaaattaaattatctttttatagtaaatcttcaaagcctactgtgcattttgtatttacagcacatctcaatttgaactggtcccatttcaagggctcaattgccacatgtgaccagtggctacaatatgggactatgcaggtttagaggctcaaaaacaaagtgagtggcataaagagaacctctgagtgagaaatttccatggaaatcacatgctgtttcacatttttgggaatttccttctgtctgatgagtgctgctgaagaacacttcctctgggatgaggctcacctgtatctgtaccaggaaagcttccttctttacctgctccctctactccagagcattgctatacccactctctgtgcacacagatcctctggtgctgattcaatagatctagagtctcccctcctcattcctctccaatcatgcccttctaataagctccctagtgactctgctcctgctggtccttgaaccccactttgaatagtgaggtgctggatactgatgctctccagagctgtgcacatttgatccaatggaggcagtagatgtcatggtgggaagaatgtgaacttgtactcacaccaccagggcataagcttcagtccaccatgtgctagctgtgagctgggcaagctactcaacctctctaggcctcagcctccttttctattaaaatggaggtaatagtagggctaccacattgggtggtgctagcacataagaaatggtcagcaaatctcagacattttagctttacgacattcaattcagcctaaattcagacattgaggaaaggaaggaattacattttcttgatttaaacagaaatgtgtctagcttaatcacttcctgaaggaagccttccctaamtgtctagtttgaagtagatgtacagcca

SEQ ID NO: 80116 - DNA, 1063 bp, Homo sapiens
aatatagaaaaggatttgggaggatgaacaagttagtaatgatgatactactggggaaatgacatcatgcccagaattggggcataggtgtggtgagaagtagggccttacctaatgtttcagtattttaaaaaagaatttgtttatatatttcttttcttttttgcttgtggcaaaaaacataaagttaaatttactgtcttaactgttttcaaatgtacagttcagtagtgttaattattttcatattgttactcaagaaatgtctagaattctttcatgttgcaaaactgaaaccctgtacttattaaacactaatttcccctcaaccttcccccagcccttggaaaccactttctattttctgtttctatgattttcactaatttaagtacttcatataagtggaatcttaaagtatttgtayttctgtgactcgcttatttcatttaccataatctcctcaaggttcatccatattagagcatgtgacgtgactttcttcttttttaaggctgaataatattccattgtatgtacataccacatattccttatcttttaaaagaaatactacatattacttatttgaatggaatatgtgaaaggatggaatatttttccatcttttcactttcggtgtgttgttcttatatctaaactgagtctcttgtagacagcatatagttgaatcctgtgttttatccattcagtcaatctttgtattttaataggagagtttaaccaatttacctttaaagtaattactgacaggaaatcacttactattgccacttcattaattgttttcagtatgtggtagctctttcatctcttttctcctatcttgctgtcttcttttgtgtttcattgatatttttcttgtagtgatatgttttgattcccttactgtttccttttgtgtatattatatacatattttcttatcagttaacattgcaattacatcaaatatcttaaatgtataagaatctattttaaactgataacaatttaacttcaactgcatagaaaaactctactttgtattacttcatccaca

SEQ ID NO: 80117 - DNA, 1112 bp, Homo sapiens
catttgttgaagaacttgaagtgatgcgtggatgacagctttttactttacaaccattataggcagcagaggaaggtttgagggaaggttagtggagcagcttctaaactggcaggggctgggtgggtacaggctggaccatgggtataacagggagaggcaggtagagaggactgctgtttgcaagcatgaggggagacattccaaaacacgttctcctccttctattcctgtcatctctggtgaaccagaggagtctgaaaatatttttacacatagttgtgattggtaagagcaagtaggggagagtcaattttacttagaactctatttttctgcttgttctggtgtcatcaggaaaatttgttttatgttcatcactgaatttatgaatcagttaggagctttattttctatttctatgtgatacctatctttctgaatgtgttggtctggaggtttctgctttctaataacaatagtctttcaacagttgtctgtcttcatattcccaaaccacactttcagagccaatattaattgagttaataggtatttgttcttaaaaagagccttcagagggagcacagagctccatgaggaaataygtgacatctctgtgggagtccctgcagtcattagtggcccaacctggatgatatggaaacaacagttggctcatgaataatgcagatatttaataaaacaacaagaacaacaataaaaaccagcttgtttccagaggactttctagtaacctcttcagggagccactctgacctatctcataggtactgagacttcagctcgccccttctgagtcagccagaactcgaatttagtcattcattcatcatttgccaccacagtgctgaggaacaagagatatttggattagcaagacacagccctctttcaaggataattacccagtgcgcaaaaaaagcacctgaatgtttgattccaatatcatgtgttaagaattttgataaagccatatacaaggaacagtaggaaagcagaaagtggctcctctaatacccttcatgccaaatgtaaaggagccaaggtctcagaaggctgagagaaaaggtttttgggctaaagagagc

SEQ ID NO: 80118 - DNA, 1109 bp, Homo sapiens
gttgaggaatattgtaagaggttacacaaggaacaaatagaaaatgacaactgagtttgatgtatgactgcttaacctggagaaaccaggtcctgcaaagaagaactcttttatgaaacacacacacacaccacagccagttagaaggaaatattgatattattaaatacactagggtgccaatctgctcatgtaatactaagcatctgaataacattctgagcataaaagatttagaaagaaaaggaatcatggctctggaatgaacagtcaataatatgacaactataaaaggactatttggaattcagagatcaaaaaggagctgtagtctttgcagctccatcaggaattaggcccaaaccacttcccctttttatgacagtattcaactgcgcactttagatcttcccaacagaaagcctaatgagccctgtggaggccacgctacctgccaagaaaataatccatcctccaaaagccccagtgacaatatttctcaatgctcaaaaaaaaaacctgctgaaatgttgtcactcaaaagactttctacggtcctctctggcaatcctatagaatgtaatgagtgaaaagccaaagtacacaaaagaatcataatttccaaatttagaaaagaaaaaagtgccataagtcagaaaattaactactaactgtcaaagatgaccttcaagaagcatcaaacaattctgtcgtggcttctcaaattagcctagcagtaatgctcaataactaagaagaggtcacagtgctttcattcactgtcctgctaatgtgcaacctgttcttaaaattcttattgccgcttcattttggacatatattttaagataaaataatccaatccctaggtcactgagtgaggaaatttgggaatgggaatgttacaaagaagagagctttcttttttccatatttttcttctyttttttaacctcttattggccattttgtttcttttttaaaatcaaacatcaatattgtttttaacctttatatatgaaaaaaagacagactgccctctagggtattcagaaatcagtatttatgactctgataaggctatctctctagattgctattatagaaat

SEQ ID NO: 80119 - DNA, 626 bp, Homo sapiens
gtgacaacggataatattttttgacagatactgggttaagcatcttacatgtgattattccttctcagtattatgaaactggaacaattattgtatttattcacataaggaaagtaagccttggagaagtgaaatagctcatacaatttcacaaaacaatcagtgtgattcacacctaagtcagtgctctcaaccatgcccctaagttcccttccccagtctaagaaatcaagaatttattttggaagcatcagtcactttatgtttctctgaaacattagatctacagtgatgggaagcagtggagctttctcagcgaagtcccttggaagatagaaagagtgccagccacactatgtagaggcagaaagaagcactgcgtgctgccagcgacagccagcctccctcacctttagaaaccctgttgaacctcagggaaggggaactatcagtgtccacaaatttggtgatctacctggtaagtctttgagaactgctaacaatcagtctgtttgggtggacttttatcctgtgttcatgtgaagtcgcttcacttcctagaatatctgcaaaattagggaatatgagctggctgttkcactattttctaactctaaagttaattg

SEQ ID NO: 80120 - DNA, 626 bp, Homo sapiens
gtgacaacggataatattttttgacagatactgggttaagcatcttacatgtgattattccttctcagtattatgaaactggaacaattattgtatttattcacataaggaaagtaagccttggagaagtgaaatagctcatacaatttcacaaaacaatcagtgtgattcacacctaagtcagtgctctcaaccatgcccctaagttcccttccccagtctaagaaatcaagaatttattttggaagcatcagtcactttatgtttctctgaaacattagatctacagtgatgggaagcagtggagctttctcagcgaagtcccttggaagatagaaagagtgccagccacactatgtagaggcagaaagaagcactgcgtgctgccagcgacagccagcctccctcacctttagaaaccctgttgaacctcagggaaggggaactatcagtgtccacaaatttggtgatctacctggtaagtctttgagaactgctaacaatcagtctgtttgggtggacttttatcctgtgttcatgtgaagtcgcttcacttcctagaatatctgcaaaattagggaatatgagctggctgtttmactattttctaactctaaagttaattg

SEQ ID NO: 80121 - DNA, 845 bp, Homo sapiens
gcatagatatctagtaatgtgggggcacaagctaagtttttcatcttttaaatggaaacaggagatcccaaatagcaaaaatcacaaatatgataaggtgggattatacatcgcctaaggaatactagttggagaactaattaagactataagctgaaatatgaaaattaaccaagtaattatctacttgtagccttcagaagtaggttacagattacttgttagcaacattgcccaaaaccaaggaagcaaacacaattctgccacaagcaattgagactcccacttttatttctgtttctcgcttttaagtattttaggatttctgtggagcatcaactaattaaaaagaaaatcactaaaactgagataagatgcaagaattctcctggcaaatgctgtagtcttcaattttgattaaatgtgaattccctaaagcagttataaaacaaagtgttgttcttttgagtttcattcagatggggtttttctgcttaaatggttcattttctttagctttcagytgcaactaatcctgaaagggcacagtccacagggacatgtggtttgcctataatgtggttttgcctttcaatggcagaatgctgacctccgtgcactcagcatctctttaaaatgaaaaatggggaattaatgatccctccttcattggggctattgcaaatttaaacttgctcaccaattagtaagtctcgctaaaatcctcaaaagccaaaagaaactccctaaacctcatcagagtctctcaaaaatatactaggaagtaattaaattgtgtttttagttctctttggagaactacatgtctcccagacattgtgggc

SEQ ID NO: 80122 - DNA, 558 bp, Homo sapiens
ctttgatttgcatttctctaatgatcagtgatgttgagctttttttcatatgtttgttggtcgcctggtcgcataaatgtcttctttttttttttagacagtctcactctgttgcccaggctggagtgcagtggtgcgatctcagctcacagcaacctctgcctcccgggttcaagcgactctcctgcctcagcctcctgagtagctgaggttacaggtgcctgccaccacgcccgactaatttttttgtatttttagtagaggcggggtctcaccatattggccaagctggtctcgaactcctgacctcaaatgatccacccgcgtcagcctcccaaagtgctgggattacagcagtgarccactgcgcccagccaatgtctttttttgagcagtgtctgtttatgtcctttgctgtgggtggtatttgaataggagaaaaaaacaaaggccaaacatgtgaaaataaaaaatcatgagatgtatttgggagactgcaaagagattagcctgcaagaagtgaagatttatatagtgaattagtggagactgagcctg

SEQ ID NO: 80123 - DNA, 832 bp, Homo sapiens
agtgggagttgaacaatgagaacacatggacacagggaggggaacatcacacaccggggcctgttggtgagtggggggctaggggagggatagcattaggagaaatacctaacatagatgaygggtttatgggtgcagcaaaccaccatggtacgtgtatacctatgtaacaaacctgcacgttctgcacatgtatcccagaacttaatgtataatataaaaaaattatggatttgtatgaatataaatttactagtatctgatttgaacatgaaattcctttggttttcatataattttattagactagctactgaaatctgttaaaaacatgtttccagaatatcactgttaattggataatactgagaaagattttcctaaactgtattttggtacatttcctcattactataatcttttatctaccccagctatatctaagagaataatgtttgcctcaagtcagtctgctgatacacagtcctttaaataaatattagaaaatattaaacttcaggtaggaattaaatggaaggatgtgaagggagaaggagtcaggtacctcagagaaactgtatgaaatagtcattgctagctgtatcttacagataagcaaactgaggcctagtgagattagaaaataggcagcatcatacagtggcagagccagacctaaagctctagtcttttgacttctaatttaatgcttgttctcgttcctagccactcacggtggtatgatgtgggtcatatatgtaggtaagatcttacatacatatatgtatgtacatattcatatgtacatatacatacatatttgtatgtacat

SEQ ID NO: 80124 - DNA, 832 bp, Homo sapiens
agtgggagttgaacaatgagaacacatggacacagggaggggaacatcacacaccggggcctgttggtgagtggggggctaggggagggatagcattaggagaaatacctaacatagatgatgggtttatgggtgcagcaaaccaccatggtacgtgtatacctatgtaacaaacctgcacgttctgcacatgtatcccagaacttaatgtataatataaaaaaattatggatttgtatgaatataaatttactagtatctgatttgaacatgaaattcctttggttttcatataattttattagactagctactgaaatctgttaaaaacatgtttccagaatatcactgttaattggataatactgagaaagattttcctaaactgtattttggtacatttcctcattactataatcttttatctaccccagctatatctaagagaataatgtttgcctcaagtcagtctgctgatacacagtcctttaaataaatattagaaaatattaaacttcaggtaggaattaaatggaaggatgtgaagggagaaggagtcaggtacctcagagaaacygtatgaaatagtcattgctagctgtatcttacagataagcaaactgaggcctagtgagattagaaaataggcagcatcatacagtggcagagccagacctaaagctctagtcttttgacttctaatttaatgcttgttctcgttcctagccactcacggtggtatgatgtgggtcatatatgtaggtaagatcttacatacatatatgtatgtacatattcatatgtacatatacatacatatttgtatgtacat

SEQ ID NO: 80125 - DNA, 832 bp, Homo sapiens
agtgggagttgaacaatgagaacacatggacacagggaggggaacatcacacaccggggcctgttggtgagtggggggctaggggagggatagcattaggagaaatacctaacatagatgatgggtttatgggtgcagcaaaccaccatggtacgtgtatacctatgtaacaaacctgcacgttctgcacatgtatcccagaacttaatgtataatataaaaaaattatggatttgtatgaatataaatttactagtatctgatttgaacatgaaattcctttggttttcatataattttattagactagctactgaaatctgttaaaaacatgtttccagaatatcactgttaattggataatactgagaaagattttcctaaactgtattttggtacatttcctcattactataatcttttatctaccccagctatatctaagagaataatgtttgcctcaagtcagtctgctgatacacagtcctttaaataaatattagaaaatattaaacttcaggtaggaattaaatggaaggatgtgaagggagaaggagtcaggtacctcagagaaactgtatgaaatagtcattgctagctgtatcttacagataagcaaactgaggcctrgtgagattagaaaataggcagcatcatacagtggcagagccagacctaaagctctagtcttttgacttctaatttaatgcttgttctcgttcctagccactcacggtggtatgatgtgggtcatatatgtaggtaagatcttacatacatatatgtatgtacatattcatatgtacatatacatacatatttgtatgtacat

SEQ ID NO: 80126 - DNA, 230 bp, Homo sapiens
acgtgtgtcagatatcaatatataacagcattgctgagagatgtagttattacattaaacccaaagcaagaaaataagcaggatgtggaactggtcctcttccagraaggaaaatacaatcagctttatgattggctaaaaatagtttaccagtgaaacttgccattgatttttccagattgtgagtattactttgagcagagaaattaaagcagccctgagttctcaca

SEQ ID NO: 80127 - DNA, 660 bp, Homo sapiens
caagcccagctaatttttgttcgtattttttagtagagatggggtttcaccatgttggccagactggttttagaactcctgacctcaagtgatccacccactttggcctcccaaagtgctggcattacaggcttgagcgactgagcccggccaaaagacagtatttttgtgtctgagtatagtaggagyatttctaacacttagtcatactatgcataaatactgtggtatttaagaaagcttgtaatatagtggatgagacctgagttgaaaaagacataagagaaagcactatgatacataaaggaggaatgtagactttctctccagaagcactaaatggcaccacagtgagaatactcactttgcatctgaatctcagactgctctgcaatgaatgtggcatctagacacaggatgcagctggaacttttaaattcaaacagtaaagtgtaagcacggatagcatttgctgggctgtttgcttcaacaatagatcctataagagtgctgtgtgcattaaccacaggggttggaggcggagccttaccttgtccgggtcggtggtggtgatgacccacacacagtgtgcattatcttcatactgaaccggataattaggggaggtaatgacgccgctgggcccacgcagattggatc

SEQ ID NO: 80128 - DNA, 660 bp, Homo sapiens
caagcccagctaatttttgttcgtattttttagtagagatggggtttcaccatgttggccagactggttttagaactcctgacctcaagtgatccacccactttggcctcccaaagtgctggcattacaggcttgagcgactgagcccggccaaaagacagtatttttgtgtctgagtatagtaggagcatttctaacacttagtcatactatgcataaatactgtggtatttaagaaagcttgtaatatagtggatgagacctgagttgaaaaagacataagagaaagcactatgatacataaaggaggaatgtagactttctctccagaagcactaaatggcaccacagtgagaatactcactttgcwtctgaatctcagactgctctgcaatgaatgtggcatctagacacaggatgcagctggaacttttaaattcaaacagtaaagtgtaagcacggatagcatttgctgggctgtttgcttcaacaatagatcctataagagtgctgtgtgcattaaccacaggggttggaggcggagccttaccttgtccgggtcggtggtggtgatgacccacacacagtgtgcattatcttcatactgaaccggataattaggggaggtaatgacgccgctgggcccacgcagattggatc

SEQ ID NO: 80129 - DNA, 660 bp, Homo sapiens
caagcccagctaatttttgttcgtattttttagtagagatggggtttcaccatgttggccagactggttttagaactcctgacctcaagtgatccacccactttggcctcccaaagtgctggcattacaggcttgagcgactgagcccggccaaaagacagtatttttgtgtctgagtatagtaggagcatttctaacacttagtcatactatgcataaatactgtggtatttaagaaagcttgtaatatagtggatgagacctgagttgaaaaagacataagagaaagcactatgatacataaaggaggaatgtagactttctctccagaagcactaaatggcaccacagtgagaatactcactttgcatctgaatctcagactgctctgcaatgaatgtggcatctagacacaggatgcagctggaacttttaaattcaaacartaaagtgtaagcacggatagcatttgctgggctgtttgcttcaacaatagatcctataagagtgctgtgtgcattaaccacaggggttggaggcggagccttaccttgtccgggtcggtggtggtgatgacccacacacagtgtgcattatcttcatactgaaccggataattaggggaggtaatgacgccgctgggcccacgcagattggatc

SEQ ID NO: 80130 - DNA, 2543 bp, Homo sapiens
atttatgttatatccaatgtagacattttaagttatgttttatttgagttctgtgagaaaaggtgtgttcatcatatatgatgtttaatgatttactgtctataaattcttggtaacataaagttagagaaataaatgttaaaacaatgacgtcagcaactatttaataaattagtgttgggagtcaacagggcagactctaacactaaaagtatcagttagtaggacactcactgaggaaacatatctctcaggtgcgagagcacccacttttcaaagtgttattaaagtgtaatttatacttctgaaatgatcattataattttgaagccccttgcttcattttgttgtctgccattctcagagaacttccttcttaaaacaggatcactaaccaggaacataatctctgaaggggaaccaatagacacagatgtctttgcacctgaaacaggaaagcaaatggagactgccaaaaacaaaacaagggcagcaaaacttggcaaggacattggtgtggtcatctttttaactgaagtcattcctgtgcctaaatagtactgatggatgaatcattagggtgacagttatttaattattttttaaatgtaaaggaattctttcaggagaattagcattacatttaggtagtaaatccagaatcatcatctttatgcaattttttaaaaaagaagccagacatcccacttgttctaaccaatactcatcttcaacgcccatcacaatctaaggttttatcatgacatgttaatgagatatatgtaggcacttttggtgtttttctcattaaaaaataatctcctataacatggacatatcccaggggtagtctttaattttgattcaataagtcattgaggattaagtggggatgggggggtgtcagggctgaaggtccaagaaggcgaacggggctttacctatgagatggaagaatgcctccaaccaacactgttgatttaagatgcattatcaaatggttaaagcccagccctagaaatgattgcattttctaaaattattgccaaagtagttctgcctttgctatagctctttgaattttttaaaataaatcccttttctctagcaggaatgttaaagaaaatgtttgctcaattttattctggtaataaaagcaacaataacaaaatctgaagagaaaaaaacaattactttcttatgtaaataatgctgattgaatgatgagttaacctatggttagagaatcagtaatttctaagtgtacaatgtgtaacttgaggctactatgttgaaatttgttaacatacaaagaggcagtgatctggggggttttgcttcgtcagtctactctgcataaagtcaggttatctttggaccaggggggaattcacgttttaaagataaattaagaatgtcaagtcacttgttgacctgttagtgcctaaggcagagaaatcccagtttacttcaagataaatcctttgagagcgctttatttaatcaaatgctattctcagagagtttttctcgaacagtaaaatttcttccctccgtctgacgacttcaatcttccattattccacctgagctggactggctaaaatcaccagtgatcttcagtgttgcaaaaccgatggatccttccctgtcttctaccgatttggcttcttagcgtcatttcaaactgtttgcaaacctttctattttggaacattttcctatctggaatcccctaagctattcccgrcctatctgcctgctcctcagcctctgtgttgttttatctgcctattcttgacctcaaaatgttcacaacgctccaggctcagccacgggctggcttctttgctactccagtcactgactacctcacgtgttgctttcttactgtgtgacagtctctgtgcagactcagaatgagaacaataaaccagacagaaaatccgctgctaccatgggcctacatgatagttggaagggtgctgagtcgacgaaggatacagtttgtgatcgtgttacgtgctgtccacatagcaacataaagcaggtagatagagaaggggaaggagtcctgccggtttagccagggtgcacagggagggccattttgcagatgacatctgagctgatacctgtgtgctgagcaggctgtgacaggaagacctggctgaagagtattttgggtggaaggagcggcacgagcaaagaagcatgattgcgttttcaagggttcaacatggtgctgagtcccattctaggtcacatcaatgattcccatgcttttcagtctcatctcttggaagaaagtgaataccatgtttctctaagagatctcggctctctaatccagacacacatgcatataaccaacagaccaactgaggtttcctcttggttgcctgtggggatctgagatcagcaatggaactcttgaccttccaaatcgtgatgtgttcttctattgctttagccaccatggtgagtgctaccaccgttggctcagtggcttcagagaggcaactccatttccctcaattctt

SEQ ID NO: 80131 - DNA, 686 bp, Homo sapiens
gcgctacccgcgccgctcccggaccgcgagcccaaacggccccgggcccaagaccccaggaggcaacagagaggcccggagcaaggcaggcgcccctcctcttgacaggggacgggagctgtcagtcacctggacatcccatgcctgagccaatgagctgccttctcctcccgcctcccgcgccgcgccggtggcggcggccggggctgctcctcctcccccatccccttcacagagcctcggccccgcactcactgttgaggccggccggcgggggcagagactgctcattttcctcgcagttgttgttgttgttgtgcaggggcggcggcggctcgactaggtgggacgacatygtcggacagctggcaggactgcggcagcagcaggaccgtctccggcactcaggcagcaacacaacaagccgagtccgccgcccccttttctgcgcctgcgccgtccctcccctgcccctgacgtcagggcccgcccaggccacgtgatgacaacacaacaagcgaccggacggggcaggggcgctcccctgcgggccccggacgtggagacgctcgagtcaggctgacgcgcgcgccgggaacgaactcttgcgtgtgacttgggatgaccggatgggatgagtgatgccagtggcagtgggagagaggatgaggagaaacggaatgagg

SEQ ID NO: 80132 - DNA, 527 bp, Homo sapiens
tgggattaatgcccttatgaaagaaacccctgagagctagctagccccttcccacatataaggacacagarggtgccatctataagcctgaaagtaggccctcaccagatggcacatcggccagtgcttgatcttggacttcccagcatccagaactgtgagaaataaatttctattgcatataagctggccagcttatggtattttgttatagcatcccaatgaactaagacatctcctttacccttaaaagtgtctaggtttagacaaaaaaatatatatggtcaccttattaatatgttctattagctttctctgctcacctagtgtctcttagccataggagcctctgtcagcctagcactgtggaaggtgggagaacactctaaattcaggagacctagctatgccagcccctatcactgcccccatcagctgagacctcagagacatcaccaaccttggttgctttctcaggttggtgatgtctctgtctgaggcctcagctggttggggcaaggataaag

SEQ ID NO: 80133 - DNA, 1091 bp, Homo sapiens
taagtcaacccagcaattttagatacacattgacttccaaattgtgcgatataaaggtagtatttaaaaggcataagagtatttttgttaaaaaaaaagtaatgtaatgttcttaaattttatctatacactattaatgcaaaccaagggattggtaatttattatacagaatgaaattcttactttttccaccccctctttctaaactgtcagcacccaggcaggtttcactcttagaaggtgaaataattgctttcttttgtgagtggaagagcaattggtagtgggaatgacaacagtgtcattggtcggtttttacttcataaggccgtttccttattgccacctatcttctgtttcttatgtattataagaaacacaatagaacacatacagccaaaggttcaaaaatgtaactctcagtataaaaatcagcaaggggaaattcacaaatagtatatataaatgggtgtaacaaataattactatccattaaaagactaaattattagtagccttggcattctctaaatacctcagctcttgtgttgtgaggcactttatggagtcactctttgatttcataattccacttgaggactatgtctcaaataagtgatctgaaagaaattaatcaaagtgcaaagagggttataactgtattacctatataatttttaatacagctgaaggtatttgaaatactcaatagttaagaaatacattgtaccaaagctgtcaaatgaaaacagcaacaaaaacaaaaaagacaaagaaatacaaaastaacctctagtcacaggttggaaaactacggcccacaacctgtttttgtaaataattctttaatggaacttagccatgcccatgagttgaatagacggcacagactggaaacatttactatctggccctttacagaaaatgtttgccaaactctgctttatattaactggatactggcattaaaataacacaaagtcatatcaaactaatgccaaagcacatacagatgttacaaccaaaatgtgccaaacattgtgctaagtgggcatttattctctcttaatctttataacatcactgtaat

SEQ ID NO: 80134 - DNA, 1646 bp, Homo sapiens
tgcatataaagcacttatagacagctcagtctcttgagcacttattttttaaatttctcagacatttataatcaaagttgtttttcctttaacaaacaaaaattcttaaagattaaaagaattctgcatagcaagaatttaacaaagctttattccaatcaacctgagcagtatacaaattatgacattttggcattttaaggaatattaacaaaactcccaagaaattaggtcgagaattagacatggtggacaagtgaccaaaaaggcctacgtgtttactgaacacttaagaacacacattatgtctttaggatctagcctattctataatgtgtagtacagtcttaattaaataaatcaccaaaatgaaccgatcactttacacactgccaggaacaatcagattcaagtggagaaagaagacttaaggtctacaatccgaagactccagtatctgtgaacccaaactgttatttttaaagacttgtatatcttagatattatagattttacttagctttgtttagagtccactaattacayatctagatgtaaattccaaatgtgtacaaccttctcagcaactctccatatagaaatctgtatggttttaatctactggttaaaagaaaatgctaatttctcaggcaactcatcagatcctctttaaggcagggcctatagaccttgcttaataattcatggattcctagaatacattttcctactttcaagtccaaaatgataaagatgcgctgttaaaaacattgcaaatacaaaataaaatacttctggaatgatatataagaaacctgtgatggcatctctggtgagaggacgaagaaactgggagaaagaagagagaagcatacatttgctgtattcctcttgatttaccattctatatatgtattaattttttctgtcacccaagctggtgtgtagtggcacgatcatggcttactgcaacctcgaactcctgggctcaagcaatcctcctgccttggcctcttgagtagctgggactacaggcatgcatcatctaataaagcccaacctttattagatttttttaacctagttactaaaacataaaaatctttacctatatttggtttgtaaaacagacgtacaaactagatttgattaatacagtgggaaaagttagatgtaaatgtagtctgtgtatgactcagaagtacagtgctgtaaaatgtttttcttttgtaaatgcagtttattggctctagaaaactttttttttttttttttttcagacagagtctcgctctgtcacccaggctgcagtacagtggcgcgatctttgctcactgcaacatttgcctcctgggttcaagtatttctcgtgcctcagccttctgagcagctgggattacaggcaagcgccaccaagcccagctaatttttgtacttttagtagagacggtgtttcaccatgttggccaggctggtctcgaacacctgacctcaagcaatccacccaccttggcctcccaaagtgctgggattacagatgtgagtcaccacgtccagtctagaaactcatttttttttttgagatggagtcttgctctgtcacccaggctggaaggcagtgacacgatctcggctcactgcaacct

SEQ ID NO: 80135 - DNA, 701 bp, Homo sapiens
agtgtgaccctatctgtataaaataattggaaaaaaattagtcaggcatggtgccacgtgcctgtagtcccagttacttgggaggttgaggtggggggatcaattgagtccaggagattgaggctgcagtgagctgtgattgtgtcactgcattccagcctgggtgacagagaaagaccctgtctcaataaataaataaataaataaataaataaatagataaaatggaaaaactatgagaaaattatcaaaaacaaatctaaatatgcagggtctaaaaagagataagttaaaaccaaagtgatgagaaaacttaaaaataaaagaattagcataaataaattagataaaatcaaataaaaacaaactagaagttggtacactgctagacagaaaatcagatttcaagatgaagtgggactgagagacttgttatattgctgagaggtataatgctccacagatatattaaataccatatccataaatttccaggaacatgataatgcagcattgaattgtataaagacaaattgctataacagtcagaagaaaaattaatagaaaaatagaataaaaggaagttttacacacctctttcagtctttgatgaacaagttaaaggtgartgaggttttataaaaaaataatttgagaactaaagataacaagcaccttcaaaaagtattgttagtgttatg

SEQ ID NO: 80136 - DNA, 1864 bp, Homo sapiens
tttttttatttctgttccagctagcctggcacccactcaaatatcttgaacaaatagagatttatcgtaaataggcatatggggtctcatggaggcccaagaactagatcataatatagtgggccttgtcaacccaaaataatcaaaaaggtcagaatctagtttaaagagagttcgttcaagtgcaaagtttaaggacagctgcctgggaagcacaaattccaaaaaatggaagtcaatgttttgaagtatataagtttgggatcatttatataaacaaagtttagggaagcttaagagagttttaacgtctttctatataaggctttctatataaggcttatagtaatgcatggttatagtaatctgattagctgaggtggtctttttcttttgggaaatgtgtatttaacattccacactgaaggtgtaacaattacactgaagacgtaacaatcatgagctaaatggtctgagttaggtacaggacaaaaaaggaggcaattaatctgtaacatagatcagtyattagaaaggggaaaggtctggcctctcctagtcatttacagaacaagaacaatgaggaagagagttaatctataatctaataagcagaagttgcaaacacgctacacgtgattcagtctccagggcttaacttccttttgacataataaatttagagggtcttgaaattttattttcttttattgccatatggaccctggagcaggaagatgactgaggatccaaggcagctttggaagccttagtagaggagtttacaggtcttttcttattttcaacaggaagaattagcctcttatttttaatttgtggtttttctcacaatgatgtaatgacctctctggcttcctctaaattatgactttcctgatataactacagcactaatcaaaaaaaaccccgtttccaagaatctgatgacttattttagtcaattgtgccaggtggatgaccactttctggattggcttctctggggcaggtgcccatctgtaatcttatcagttatgacaagaggaggaaagaagtacaagaaagaaaaaatgaccttagaagtagctatggttagagcaaccctgtaaaagtgggaacatgaaaaacacctcctgtatatctaccacatctttccttttagcctgcaaatgcctgagggagcagctcctggaactcccactgtttcacagagtgctgacctctacatagatactcaacagatactgtttggtagaatgatattcttagcaggtgggagttttgttaggtattcctcccattgaaagcagctctggggtatgtgtgaattgctgaaaatggttttataaaaggaaaacatttcaatcagaggatctaacctgaatgtttccatacgaatgatgattatgttctctttataaagcaatcctcaattattgtaaactttctttttatctcatttggaggtagagaaaagatattttagtgtcagaaataaagatttgacatatagaacaactacattttgatgaaatcctttcatttctggaagaactagactgattattttacatacagaggttttgtttggtcaagtacagaaatagttcaaatatttctatgggaaacaagaaaaagaaaaggtcttatgacttttctttggagaatgccaaattgacaggttgcccccactccctcccaccttccatctaatctatctttgaacttagccaaagtagaaaagaacattgtaaaaaccttcagggtttagttcatagctgaggcaatgagctcagagctctgctctttggtggttccatctgaactgtcacctcaggaacgaacaacttacaaaacatgcttt

SEQ ID NO: 80137 - DNA, 719 bp, Homo sapiens
ggctggtctcgaactcctgacctcaggtgatccacctgccttggcctcccaaagtgctgggagtacaggtgtgagccactgcgccaggctggcagatgccaaattcttatcataagtgactacaagaaggtgtcagttaagacggccattttgagctgcgaaagcttggtcttttatagccacggagtcctctggtgggaactgagagtgaaataatgcctttgtttgggtccctatctggttggatgcagtccttatttattcgtttattaaacaaaacatgttatccttgttggcaaagtgctctatgaaatataaaatggagtctttttctaagataagttagttacgtcaagggtgctctatacttacagcatggtgactacagtttataatatattgtattcttgtaaatgctaagawgagtaaatgttctccccacaaaaaatgataaccatgtgaggaaatgtacttgttaattaactagatttaaccattctacgatgtaatacttcaaaatatcatgttgcatatgatgcaagaagaaaatttgcaaattagtgagcaaaatgttcggggctaaatattttcttttttgactaaattcctcaagttttcattgttgttcctgggttcagaaaatcatagtgaacaattgccacagctcccctaggacttacatagaaagtctaggtaagagaaatctcaagaagtttttg

SEQ ID NO: 80138 - DNA, 720 bp, Homo sapiens
atatacatacatatatatatatgtatatatatatattccctgatattccagtaagcattcgataaatatgtgttgagtagatgaactgttgggccctagtggaatgtaactagaatgagaagtaagctcagaaatttcatgtacagtccctatcccatggggtcttggtacataggaaaacctgatagaattggctgacctgtaaatcagtgatgctcaaattcaggtatagttagaattgtaaaggcacacagcccagctccaacatcaatcaagcagaatctctgggcaactgcctctctgtgacagttttccaaatgactctgctgctccatgaaattttaggacttattgctattgttgaatcaggygactaatttcagggatctaaaaaggccttatgatccatcatcttttccttcatctgcccacaatcccccagcattggccaacatggcaaactcccatctgagtaccttggaacttaatcagtgtggggcagagaacctggaacggataggctgtccgggaacagtgacaggacggctgaggtgagagaaaggagacaggccagctgtttcctgacgcccttgctcagtacaagcactgaacctgagatctcggtaggtttgtatggatctgcagagatcgccctaggttgggttgctatgggagcaggtctttaactggaggagttctgagaacgttttaccctctctg

SEQ ID NO: 80139 - DNA, 644 bp, Homo sapiens
tcctgggacagaagaaggcatccgtggaaaagcctgagaaatttgaataaagtctggagcttggttaacagtaatttaccaatgttaatctcttaattttgacaaatatagcacaattatgtaagatattaatacatgagacaatggggtgaagggtagacaggaacttcttgtacttgtagcttatctataaaacccaagttaggtcatgcctgtaatcccagcactttgggaggccaaagtgggaggatcacctgtggtcaggagtttgagaccagcctggccaacatggtgaaaccccacctctactaaaaatacaaaaattatccactcatggtggtgggcacctgtaatcccagctacgcgggaggctgaggcaagaggatcgcttgaacccagaaggcggagattgcagtgagccartatcacaccattgcactacatcctgggtgacagagcgagactccatctcaaaaacaaacaaaaaaacaaagttaatccaaaataaaaacttcattaaaaataaaaaccaaacattattttactctcttcttttacagggttacagtgtaatttgtcaagactgtgaagccgcaacgtgatcttatttttgtaagatataaaaatatactgttaataattgc

SEQ ID NO: 80140 - DNA, 782 bp, Homo sapiens
acatacttttcacctgaaggcttactaacgttgatctagatgacaccaaatagcagccagaatcagagttactcctcggttaagcctgtggtagtctatagtcattcttcaggaycttgccaatttcttcaggggctaggctaacaaattaaatgaaaatataacgggaactgccttccctgcatcctttagttctttaatagtggcacgcatctcttacactatgaaactgatttttatttatcatcttggctgagttgtgggcagcttcagaggtttccatttggccgtccccactataatagttatgctttaccgacccgggcctaatgttggggatagtccaactatgcacttggctgcttgggaaatcatccacagaccaaatgaaccactgtgagtcagatttcagacagaactccattcattaccttgtcccattgtaacaggcactatgatgatatttcaggtttctgggtatcagtgttaactcacatcccatattcaacagaccttgaaatgtctggttatttcctttccccagcatatggtcacatgagtaaatgcccataggtacctttggggaagagctggaggaattgtcatggcatacatttgccatggcattgtaagattcttcctcctggggacccatcacttcagccagtgggttccagatctgcaaattgacttgagtttgagaactaaacaagaagttgtggctttttactgggggcaatcacccatagcttcctgctcctttattattgctcttcgtgggt

SEQ ID NO: 80141 - DNA, 782 bp, Homo sapiens
acatacttttcacctgaaggcttactaacgttgatctagatgacaccaaatagcagccagaatcagagttactcctcggttaagcctgtggtagtctatagtcattcttcaggatcttgccaatttcttcaggggctaggctaacaaattaaatgaaaatrtaacgggaactgccttccctgcatcctttagttctttaatagtggcacgcatctcttacactatgaaactgatttttatttatcatcttggctgagttgtgggcagcttcagaggtttccatttggccgtccccactataatagttatgctttaccgacccgggcctaatgttggggatagtccaactatgcacttggctgcttgggaaatcatccacagaccaaatgaaccactgtgagtcagatttcagacagaactccattcattaccttgtcccattgtaacaggcactatgatgatatttcaggtttctgggtatcagtgttaactcacatcccatattcaacagaccttgaaatgtctggttatttcctttccccagcatatggtcacatgagtaaatgcccataggtacctttggggaagagctggaggaattgtcatggcatacatttgccatggcattgtaagattcttcctcctggggacccatcacttcagccagtgggttccagatctgcaaattgacttgagtttgagaactaaacaagaagttgtggctttttactgggggcaatcacccatagcttcctgctcctttattattgctcttcgtgggt

SEQ ID NO: 80142 - DNA, 985 bp, Homo sapiens
gcatacatgtgccatgctggtgtgctgcacccattaactcgtcatttagcattaggtatatctccttactaaacttaacctgacctccttttgaccttcatgtggttctcaggtttaagaccatctgtgctaatgaggaatgaaagtattttctgactaaccttcacctgactttctttcgcccttcacctggtttcctcagatctttctttcccttagtttgtattgcctatagcagtaagttaagttccatttgactaggtattgagtaccgaagtgtgtgaggctctccatccctgaaataatccttgaccacaaggaatcaaggttgatgtacaacttaccatgtaccaacttacctgtgcacacattaacattgtaaagaaaaggacaagggcagaaaaacatttagacatttttaaaaagaaatttacccttacaagttatttattttttaaaagacatttttaaaaagtattttaccttcgtaacgracatttatgaaagtaaaaaatagtcaaacattccatatttattatccaaagaaacagttttatttatttatttatgtatttatttcaagacagagttttgctcttgttacccaagctggagtacaatggcgcggtctcggctcactgcaacctccacctcctgggttcaagcgattcttctgtctcagcttcccaggtagctgggcttataggtgccagccaccaagcctggctaatttttgtatttttagtagagatggggtttcaccgtgttggccaggctggtctcaaactcctgacctcaggcaatccacccatctcagcctcccaaagtgctgggattacaggcgtgagccacagcacctggccctatttttaataacatatgataactaaaaaataaaacagtagtaaaagggttaaagtccctttaaatgtgattccccaaagataatcattttaacagtataaagtcttccttatagaatgca

SEQ ID NO: 80143 - DNA, 985 bp, Homo sapiens
gcatacatgtgccatgctggtgtgctgcacccattaactcgtcatttagcattaggtatatctccttactaaacttaacctgacctccttttgaccttcatgtggttctcaggtttaagaccatctgtgctaatgaggaatgaaagtattttctgactaaccttcacctgactttctttcgcccttcacctggtttcctcagatctttctttcccttagtttgtattgcctatagcagtaagttaagttccatttgactaggtattgagtaccgaagtgtgtgaggctctccatccctgaaataatccttgaccacaaggaatcaaggttgatgtacaacttaccatgtaccaacttacctgtgcacacattaacattgtaaagaaaaggacaagggcagaaaaacatttagacatttttaaaaagaaatttacccttacaagttatttattttttaaaagacatttttaaaaagtattttaccttcgtaacggacatttatgaaagtaaaaaatagtcaaacattccatatttattatccaaagaaacagttttatttatttatttatgtatttatttcaagacagagttttgctcttgttacccaagctggagtrcaatggcgcggtctcggctcactgcaacctccacctcctgggttcaagcgattcttctgtctcagcttcccaggtagctgggcttataggtgccagccaccaagcctggctaatttttgtatttttagtagagatggggtttcaccgtgttggccaggctggtctcaaactcctgacctcaggcaatccacccatctcagcctcccaaagtgctgggattacaggcgtgagccacagcacctggccctatttttaataacatatgataactaaaaaataaaacagtagtaaaagggttaaagtccctttaaatgtgattccccaaagataatcattttaacagtataaagtcttccttatagaatgca

SEQ ID NO: 80144 - DNA, 1178 bp, Homo sapiens
cctttatatttgttcaatttggagaacattattctcagaatgcctgtaacacatccatgtgtagatgttgaatgggcatttgaatgtacgagacaggggttccaggagaggtctggacagcaggtacacattcaggagaaaatagatcatgataacgagaccacagaaacacaaccagttacawaagagaggggaataaaggaagagcagtgaccaggaaactaacaaagggtttcaaaaggaaagggctgatagtgtcaaattctaataggttcagataaagactgagaatttaccatgactttggcagacatttctttcacctgatataatttgcccctaacaactctgccatttcctgagattcagccaaaacgtcactgtctccttgacatattttctatatctataatttttgttttactcctctgcctccaaaaaagggataattgttctaaatcactagcttgttttttatgttctccctttaaaaaataatcatattgctcctacatcatagcaaacacctagtatattttaagtatttattatataaaattttagacaaaaggaaaagtgaaggaggaacatagggaaggaggaaggaaggaatgaaggcaggcaggcaggcaggcaggcaggcaggaaggcaggaaggaaggaaggaaggaaggaaggaaggaaggaaggaaggaaggaaggaaggaaggaaggaaggaaagtttctagcctgaaatgtttttctaagtcccattacttttttttctaggatattgctgggtgactaatacataaaattaattttgagtaagccattaatgcccaataatggttcactgtgttctatttttcttcccaagtttatgtggcttttagcaggagaatttctgaaaataaggatttttttgaacataaaaaactaaatctgtgatcgtgtagcatttatttatttattacttatttatttatttatttaatcacagaaacatgttctcactatgttggccgggctggtctcggacttctaggctcaagtgatcctcctaccccggcctcccaaagtgctggaattacaggtatgagccactgcacctggtctatgcagcatcttaatagactagaaagacttttgccttcacatcttataacctttatgaagatattcactgaccttttta

SEQ ID NO: 80145 - DNA, 1178 bp, Homo sapiens
cctttatatttgttcaatttggagaacattattctcagaatgcctgtaacacatccatgtgtagatgttgaatgggcatttgaatgtacgagacaggggttccaggagaggtctggacagcaggtacacattcaggagaaaatagatcatgataacgagaccacagaaacacaaccagttacataagagaggggaataaaggaagagcagtgaccaggaaactaacaaaggstttcaaaaggaaagggctgatagtgtcaaattctaataggttcagataaagactgagaatttaccatgactttggcagacatttctttcacctgatataatttgcccctaacaactctgccatttcctgagattcagccaaaacgtcactgtctccttgacatattttctatatctataatttttgttttactcctctgcctccaaaaaagggataattgttctaaatcactagcttgttttttatgttctccctttaaaaaataatcatattgctcctacatcatagcaaacacctagtatattttaagtatttattatataaaattttagacaaaaggaaaagtgaaggaggaacatagggaaggaggaaggaaggaatgaaggcaggcaggcaggcaggcaggcaggcaggaaggcaggaaggaaggaaggaaggaaggaaggaaggaaggaaggaaggaaggaaggaaggaaggaaggaaggaaagtttctagcctgaaatgtttttctaagtcccattacttttttttctaggatattgctgggtgactaatacataaaattaattttgagtaagccattaatgcccaataatggttcactgtgttctatttttcttcccaagtttatgtggcttttagcaggagaatttctgaaaataaggatttttttgaacataaaaaactaaatctgtgatcgtgtagcatttatttatttattacttatttatttatttatttaatcacagaaacatgttctcactatgttggccgggctggtctcggacttctaggctcaagtgatcctcctaccccggcctcccaaagtgctggaattacaggtatgagccactgcacctggtctatgcagcatcttaatagactagaaagacttttgccttcacatcttataacctttatgaagatattcactgaccttttta

SEQ ID NO: 80146 - DNA, 1178 bp, Homo sapiens
cctttatatttgttcaatttggagaacattattctcagaatgcctgtaacacatccatgtgtagatgttgaatgggcatttgaatgtacgagacaggggttccaggagaggtctggacagcaggtacacattcaggagaaaatagatcatgataacgagaccacagaaacacaaccagttacataagagaggggaataaaggaagagcagtgaccaggaaactaacaaagggtttcaaaaggaaagggctgatagtgtcaaattctaataggttcagataaagactgagaatttaccatgactttggcagacatttctttcacctgatataatttgcccctaacaactctgccatttcctgagattcagccaaaacgtcactgtctccttgacatattttctatatctataatttttgttttactyctctgcctccaaaaaagggataattgttctaaatcactagcttgttttttatgttctccctttaaaaaataatcatattgctcctacatcatagcaaacacctagtatattttaagtatttattatataaaattttagacaaaaggaaaagtgaaggaggaacatagggaaggaggaaggaaggaatgaaggcaggcaggcaggcaggcaggcaggcaggaaggcaggaaggaaggaaggaaggaaggaaggaaggaaggaaggaaggaaggaaggaaggaaggaaggaaggaaagtttctagcctgaaatgtttttctaagtcccattacttttttttctaggatattgctgggtgactaatacataaaattaattttgagtaagccattaatgcccaataatggttcactgtgttctatttttcttcccaagtttatgtggcttttagcaggagaatttctgaaaataaggatttttttgaacataaaaaactaaatctgtgatcgtgtagcatttatttatttattacttatttatttatttatttaatcacagaaacatgttctcactatgttggccgggctggtctcggacttctaggctcaagtgatcctcctaccccggcctcccaaagtgctggaattacaggtatgagccactgcacctggtctatgcagcatcttaatagactagaaagacttttgccttcacatcttataacctttatgaagatattcactgaccttttta

SEQ ID NO: 80147 - DNA, 938 bp, Homo sapiens
caacattataggaggtaagcacataagttttgcttatagttggatgtttstttcaaaatgggagttattttgaatcattgacatcctctcctaggaagatattagttgcagtgatggttgggaatcgtagttgccagtcagagctctattatctcacctcaagtttgttttatttaacttattgatgagggagccagcagggtgaaaaagcaggttgaaagaaaaaagtatctgagaaatacgctttccatagtctgtgggagaaacaaacaaaactactgaaatacatagcaggttaatgtctacaggacagtaaaacaaacaaacatacacagtgaaccaaccatgactctttggtaaaatcataacatctaataagttttacagaacataaattttctgagccctatgctattgtgttccattcttctgaagctatagatgaatcttcggtatgggcttacaagaaaatggcctagtacgcaatggaaaggacttatcattatccttctgcttttccccctgtgttttggatatataccatttactatgattaatgtttaatttgtttttgtgatttatgatgtctacattttttggtaacatttgagaaccactgttgtcacaattttttatttccagaggtttaagacctatcaaagagcatttggctaaagttttcttaagacatagcttgatgatctttcattttagatacaatgaatgttaggaaacaaatgtcccagttatggacagttaggctatttccagtgtctcatcattttaactgattctcaatagacagtatcattgctttttaattttgcataactacgcattcataggctaagtcgtaaaagtggaattattgctccagttgttaaactttgttaaaaaattgccaaatgttttcaaattgccaaatttatcaaaaatat

SEQ ID NO: 80148 - DNA, 938 bp, Homo sapiens
caacattataggaggtaagcacataagttttgcttatagttggatgtttctttcaaaatgggagttattttgaatcattgacatcctctcctaggaagatattagttgcagtgatggttgggaatcrtagttgccagtcagagctctattatctcacctcaagtttgttttatttaacttattgatgagggagccagcagggtgaaaaagcaggttgaaagaaaaaagtatctgagaaatacgctttccatagtctgtgggagaaacaaacaaaactactgaaatacatagcaggttaatgtctacaggacagtaaaacaaacaaacatacacagtgaaccaaccatgactctttggtaaaatcataacatctaataagttttacagaacataaattttctgagccctatgctattgtgttccattcttctgaagctatagatgaatcttcggtatgggcttacaagaaaatggcctagtacgcaatggaaaggacttatcattatccttctgcttttccccctgtgttttggatatataccatttactatgattaatgtttaatttgtttttgtgatttatgatgtctacattttttggtaacatttgagaaccactgttgtcacaattttttatttccagaggtttaagacctatcaaagagcatttggctaaagttttcttaagacatagcttgatgatctttcattttagatacaatgaatgttaggaaacaaatgtcccagttatggacagttaggctatttccagtgtctcatcattttaactgattctcaatagacagtatcattgctttttaattttgcataactacgcattcataggctaagtcgtaaaagtggaattattgctccagttgttaaactttgttaaaaaattgccaaatgttttcaaattgccaaatttatcaaaaatat

SEQ ID NO: 80149 - DNA, 938 bp, Homo sapiens
caacattataggaggtaagcacataagttttgcttatagttggatgtttctttcaaaatgggagttattttgaatcattgacatcctctcctaggaagatattagttgcagtgatggttgggaatcgtagttgccagtcagagctctattatctcacctcaagtttgttttatttaacttattgatgagggagccagcagggtgaaaaagcaggttgaaagaaaaaagtatctgagaaatacgctttccatagtctgtgggagaaacaaacaaaactactgaaatacatagcaggttaatgtctacargacagtaaaacaaacaaacatacacagtgaaccaaccatgactctttggtaaaatcataacatctaataagttttacagaacataaattttctgagccctatgctattgtgttccattcttctgaagctatagatgaatcttcggtatgggcttacaagaaaatggcctagtacgcaatggaaaggacttatcattatccttctgcttttccccctgtgttttggatatataccatttactatgattaatgtttaatttgtttttgtgatttatgatgtctacattttttggtaacatttgagaaccactgttgtcacaattttttatttccagaggtttaagacctatcaaagagcatttggctaaagttttcttaagacatagcttgatgatctttcattttagatacaatgaatgttaggaaacaaatgtcccagttatggacagttaggctatttccagtgtctcatcattttaactgattctcaatagacagtatcattgctttttaattttgcataactacgcattcataggctaagtcgtaaaagtggaattattgctccagttgttaaactttgttaaaaaattgccaaatgttttcaaattgccaaatttatcaaaaatat

SEQ ID NO: 80150 - DNA, 938 bp, Homo sapiens
caacattataggaggtaagcacataagttttgcttatagttggatgtttctttcaaaatgggagttattttgaatcattgacatcctctcctaggaagatattagttgcagtgatggttgggaatcgtagttgccagtcagagctctattatctcacctcaagtttgttttatttaacttattgatgagggagccagcagggtgaaaaagcaggttgaaagaaaaaagtatctgagaaatacgctttccatagtctgtgggagaaacaaacaaaactactgaaatacatagcaggttaatgtctacaggacagtaaaacaaacaaacatacacagtgaaccaaccatgactctttgrtaaaatcataacatctaataagttttacagaacataaattttctgagccctatgctattgtgttccattcttctgaagctatagatgaatcttcggtatgggcttacaagaaaatggcctagtacgcaatggaaaggacttatcattatccttctgcttttccccctgtgttttggatatataccatttactatgattaatgtttaatttgtttttgtgatttatgatgtctacattttttggtaacatttgagaaccactgttgtcacaattttttatttccagaggtttaagacctatcaaagagcatttggctaaagttttcttaagacatagcttgatgatctttcattttagatacaatgaatgttaggaaacaaatgtcccagttatggacagttaggctatttccagtgtctcatcattttaactgattctcaatagacagtatcattgctttttaattttgcataactacgcattcataggctaagtcgtaaaagtggaattattgctccagttgttaaactttgttaaaaaattgccaaatgttttcaaattgccaaatttatcaaaaatat

SEQ ID NO: 80151 - DNA, 938 bp, Homo sapiens
caacattataggaggtaagcacataagttttgcttatagttggatgtttctttcaaaatgggagttattttgaatcattgacatcctctcctaggaagatattagttgcagtgatggttgggaatcgtagttgccagtcagagctctattatctcacctcaagtttgttttatttaacttattgatgagggagccagcagggtgaaaaagcaggttgaaagaaaaaagtatctgagaaatacgctttccatagtctgtgggagaaacaaacaaaactactgaaatacatagcaggttaatgtctacaggacagtaaaacaaacaaacatacacagtgaaccaaccatgactctttggtaaaatcataacatctaataagttttacagaacataaattttctgagccctatgctattgtgttccwttcttctgaagctatagatgaatcttcggtatgggcttacaagaaaatggcctagtacgcaatggaaaggacttatcattatccttctgcttttccccctgtgttttggatatataccatttactatgattaatgtttaatttgtttttgtgatttatgatgtctacattttttggtaacatttgagaaccactgttgtcacaattttttatttccagaggtttaagacctatcaaagagcatttggctaaagttttcttaagacatagcttgatgatctttcattttagatacaatgaatgttaggaaacaaatgtcccagttatggacagttaggctatttccagtgtctcatcattttaactgattctcaatagacagtatcattgctttttaattttgcataactacgcattcataggctaagtcgtaaaagtggaattattgctccagttgttaaactttgttaaaaaattgccaaatgttttcaaattgccaaatttatcaaaaatat

SEQ ID NO: 80152 - DNA, 938 bp, Homo sapiens
caacattataggaggtaagcacataagttttgcttatagttggatgtttctttcaaaatgggagttattttgaatcattgacatcctctcctaggaagatattagttgcagtgatggttgggaatcgtagttgccagtcagagctctattatctcacctcaagtttgttttatttaacttattgatgagggagccagcagggtgaaaaagcaggttgaaagaaaaaagtatctgagaaatacgctttccatagtctgtgggagaaacaaacaaaactactgaaatacatagcaggttaatgtctacaggacagtaaaacaaacaaacatacacagtgaaccaaccatgactctttggtaaaatcataacatctaataagttttacagaacataaattttctgagccctatgctattgtgttccattcttctgaagctatagatgaatcttcggtatgggcttacaagaaaatggcctagtacgcaatggaaaggacttatcattatccttctgcttttccccctgtgttttggatatataccatttactatgattaatgtttaatttgtttttgtgatttatgatgtctacattttttggtaacatttgagaaccactgttgtcacaattttttatttccagaggtttaagacctatcaaagagcatttggctaaagttttcttaagacatagcttgatgatctttcattttagatacaatgaatgttaggaaacaaatgtcccagttatggacagttaggctatttccagtgtctcatcattttaactgattctcaatagacagtatcattgctttttaattttgcataactacgcattcataggctaagtcgtaaaagtggaattattgctccagttgttaaactttgttaaaaaawtgccaaatgttttcaaattgccaaatttatcaaaaatat

SEQ ID NO: 80153 - DNA, 753 bp, Homo sapiens
tggttgccaggatgagggaaggggtaggggcaggaggaaagtggatgtggctataaggggcagccttgtgatggtgggagtgttctgtgtctccactgtatcaatgttgatacccggagatgctgagttggacttcatcataattaaacttttgctctgggaaggatcgtattaagaggatgaagagacaagttacattgtggcattgaactatactttccccatggagggaaactgcgtatagggcacaagaggtctctttgtattattttttacaagtatgtatgaatctacaaccayctaaaaataaaaagtgtaatttgtaaaaagtataaaaagtgtaatttacaaaatacaaaaagtaatttgtaaaaagtatttctatttcctcagaaccttacatggagattccacatagaaacaggaaagggatagaactgtttttagggggcaaggggaggagccctgcctgctttctcccccacccgcccacctcatggctcttagaacatctctgcaggactcctaggtcaccccccagaccagatgagctctcagcctctcctgtcatgaccttctgtagttctgagtctggtactggcagaaaaggacagaactttggggcctggggagttcaaagaaggcctccctgtgaggcaaccttggaggatgggatggtgttggaatggggggtgttgattttccccatctcctggaagcctttccctggcaggagctggggacagttgagga

SEQ ID NO: 80154 - DNA, 908 bp, Homo sapiens
tcctctcagcgttgttaggagggagtgctcaggaagtagctggcccagtgctgctgttgccgccatcatgataatgatggctctggcaattacagggcccgtgtgttgcctaagctttgtagcgatgcccccagttctccaaagagcactgagatctccaataagtaattgttaaatccagtcatatggcgtgttacagcaaaaacacaaatctgagttccagtgagggctttgccactaactagcggggcgaccctagaaggacaaagcaacctctctggaccttggttttctcatccgtcatgctgtgactcatgtaatccttacaactgcccctcaggtggggactggcacatctggaaacagagacacagagaggtgagatcacccagcccatgcaactgtgagtggcacagtgccaggctctgtgcaggctgccataccccagacagacctggcaaggagtgtcctgcgggggacacccatcatccgaatcagccctgcgcgcaccatgggtgctccgttagtataggtcactgtgatccttgtctctgagtgttcatcagccaataccatgatgtcccttggttgactccctcatgagggaagaaaacctcccctcccttatacttttcctttttaagcttccccatcattctgcaaactggggtgggtgtgtgtggcgacttttgttcctgggtcctatatgccatcgctcgactaagcagcccctgagctgcagagaaattgytggtgcctgtgcctccgagcctcaccgcaacccttgcgttgtcccaggtgactgggccagggcaggcagagctcactcagggcatgtgtaggtgggcaggagtggaggtgcctacgctggtaataagcagtcatcacttttcctgaaggcaagaaat

SEQ ID NO: 80155 - DNA, 1514 bp, Homo sapiens
atacgaagtgtgatccctggtttcctctgttacttgctgcatccaagccaggggagcaggagatgctcagctctggtgcctttgattttatgtcattgctgccttcctgcctgctcagttcacccacccccgtttccctccgtatggaggcaacagcatttcaggatgtaccttggggtgtcagggtagctgcaagtaagggtttttatgatcctcatggtctcattgatacagacaggagacagggaaatactggatagaagagggtgggttgctggcaaaggctccaccctcaagcctgaatacctgtggccctaagtgagaacaggcattcctgtttttgtgcccaaaaagctgccttttggcccaccatgccttctatcctatacccttataaacgccaaaccccaggctccagaagcaggtgagaagatgaggagacaagccgataaacagcaaaatgatgcaacagagaaagagagaagaggaggagtctctgaatgccaagaggagcttggctgtggatggtcagagaggagtttagctgctgggtggccaaactctaggagaagatcccactctatcccccttccagctccccatccatcctactgagagccacctccaccactcaataaagcgcccgcattctccactcttcaagtccctgtgtgacccaattcttccaggatgctggacaagagctcaggatacagaaagttgtcacactgtccctctgcccttgcagaaaggcagagggggcacagagctggttaacacttaagccgtctgcaaggcagagctaaaagagcattgtaacactggggttgcaggcacccaccccagatgctactgtggggccagagcccaaagctctcaccccagctcctgcaccttccygtctgtgtggtccccctcccgtaaggggggtttgagctcacggcggtggaacagagggcagcacccctgtgaggggattgcatgccctgtgaggggaaccagggaactctcctgtcttgttatcactgatcattgataagcatttcagagtgggataacatcattcatagaggttcccaaaaagaaaaaaaaagagatacatttctcacaaacggatccataaccaggacattttgatttcttctagtttttgatgattatgaaaaaaagctgctataaacatttgcatgccagtttttgtgtggtcatacatttttaattctgttggggaaaaccaacaggagcactattgctggatcatatgataaggttatgtttagctttgcaggaaagtacaaaattgtcttctaaagaggctgtatgactttgcattcccaccaacaatgaatgagagttcctgttgctccacatcctcaccagcaattgatattgtcgatgttttggaacttagtcatcctagtgggtgtacagtggtgtgtcgttgttaccttttaaaattatcatttagcagaagagcgattggtttagaacaattttagctatattctaagcta

SEQ ID NO: 80156 - DNA, 1800 bp, Homo sapiens
gtggtgtgtgacattaatcccagctactcaggaggctgaggcaggagaattgcttgaagctgggaggtggaggttgcagtgagccgagatcgtgccattgcactccggcctgggtggcagagcaagactccgtctcaaacaaacaaacaaacaaacaaaaattagtctagaattgatatcaggagtctaggcagaggcacgtatattactggcccacaatgaggcatccaccattgggggcaaaagtatctttaacagaaggtgggcagacttaggtattgcatcaaaggtagtatttgggactagccatgctaacagatatgaggtgttatcttactgtagtttggatttgcatttttctgataatgaacgatgttgatgatattttcatatacttcttgttttctttggataactgtctgttcaagtcctttgcccactttttaattgggttgtttttttttgctattgatttgtaaaaatgtcttacatatttttgaaattaaccccttactatagacccacccttataacccttttgacaccaaaatcacaggcaataaaaacaataatagacaagtgggactatatcaaactgaaaagctcctgcacagcaaaggaaaccatcaacagaaaggcaacctacaaaaagggagaaagcatttgcaaaccatgtgtttgaactatttgttaaaacagttagtttccattagctcttactgaaacatttaatttttatatagttctacagaaacatgcatcacatactaggaatttagacaccgatttctttaaaatataactggtatttttcaatactattgtttatttagtaagtgccctttttgtatcaataggggcaaataatgttaaaaattgctgagttttataaaaagactttgaacttacagaggctattttgccaaatgtttgccaataagaataaaagtactttgtaagaaaatgcacattattttctgaagaaagacattctgttttgtgattttgagcactcaaggtcacagaatctatgaaggattgtagtttcttaaatatcaagccttatgaaaatcgctcttggcttcgtagaaattatgaaatgatgggtttatagaaattttgcattgatgagaaataaaaagtgtaagttctcagaattctctgataatggcattttaaaaatacaaccaaggagaaagatcttttgaagattgaagccatgatttggggtttagaagtatatgactaacccctacatagactagtaaatccacacttcctctctaaggggctctgaacactttccagcatctggcttagataaaagagaactgaagataagtctaaatttcagaggggcagagggattgatgaccacatggggaaagataacaagtgtaagagtcatttttctgacattcatttagttgacttacattaacatatcaaattaaaataacgttgaaaataatgaaaagctaattttggagagggcaattttgaataaagacttttggactagaartgaacagatctagctttatgccaggaccagcctttgtgaaaccttgaactaataccttagtttctctttttagtttttgcaagctccttgcaattttcttttttcatctaaagtttaacttttattttaagttcagaggtacatgtgtagataagatgcataggcaaacttgtatcttgggggtttgttgtacagattatttcgccacccaggtattaagcctagtatccattagttatttttcctgatcttcttcctcttcccactctccaccc

SEQ ID NO: 80157 - DNA, 1324 bp, Homo sapiens
tcccatcagaatattttgtcttctgttccgatgaatatgttctctagacctgctgcatagatcaggacttctttttacttgatacaaaatttgttttaaatatacrcatttaaaatgggagaaattttcaaaatgcagaaacgaatgcaaaaattcttgattttcttgattttcttcatgtcaccagcaagtacggactccactgtatacagtgagctttgtgcaaccagagctggctttaggtaacagacaaacctttcaaaaacagaatatagtctatttagaaataatattttattgtactagtggagcttgctattaaaaatcagactaagcaggcagggcacggtggctcatgcctataatcccagcactttggacgtcgaggcagcagatcacttgaggtcaggagtttgagaccagactggccaacatggcaaaaccccatctctattaaaaatacaaaattagccaggcatggtggccacgcctgcagtcccagctactcaggaggctgagacatgagactcccttgaacctgggaggtagaaactgtttttttcttttccattttatatattttttaattatcctaagcaaactcaaggcccaactcaaatgctacatcttccttgatctccccaagtggaaataatcagtgtgcatattgtttatattttattagagacattatataaaataaatacggaaacaggagagcttagggtgaggagtgcgagctttggggccagacagcctggctttgaatctcagttcctatgcctactagctctgtgactttcggcaaaatagtgaccgtactgtactgcactgtgtctgttttctcatctgcgaaatcgggactggaaaagtttccatgctattgggttgaagggaaggatttcatacatgaaaggtggttattgccatgactggcgcatactaagcaaagctacatgttcaccattgttggcgtcatccacgctgcctgactttaagaactcctcaaccagcctgggagtggagacaggcacctggcctgagggatctgagtcctagctttacacagcatcagatgtgggactttggccaaggtatgtcagttcttggaggccaactttcctcatcttcactgtggagttaaatgagatgcaggagaatcgccacccgcacagtctttggactcgggtggcctgtgttcaaatcccagctttgtcacttccatgttttgtgactttgcaagttactgaaactctctgcagctcatttttcttatctgaaaaacaaggttccaagtagtatctaccacagagagttcttatgc

SEQ ID NO: 80158 - DNA, 931 bp, Homo sapiens
gatacttttgtaaaataaaataaagaagcttttacttttttttttttttttgagatggagtctcgctctgtcacccagctgaactgcagcactggtgtgatctcggckcactgcaacctctacctcctgggttcaagcgattctcctgcctcagcctcccgagtagctgggactacagttgcatgccaccacgcccggctaatctttggtatttttagtagagatggggtttcaccatgttagccaggatggtctcgatctcctgacctcatgatccacccaccttggcctcccaaagtgctgggattacaggcgtgagccatcacacccggcgagaagctttttcaaagtcacacaaacacaggccattatcacactcgatacacataatactatggctacggcaatggtttgcagatatcgctttgagtagcactgctttagtgacgtagtgcactgtttaatttttgatggggttatgagactgtgaattaacttagcttgctcttgctagtcttttttcttgacaacaggatcctattcattgtctgttatcttttgttaaacagcataactagattggttttggttctgcctgacttagttcttttcttcattcatgtaagtaagacttctaactcttactatgaatttcattcctgtttttagatctctgtgtcttgcctagaactggaaagaatctgttacccttgtccacatgggcatttaatgactcgagtcattgcccgagtcattgccctaacttccaagtagctccctatataaatgtatttctggttctcttccagccttatatatagcatgatgttgtaatgcttcccgtaactcaagggttcttaagagttttctagtcctctagagcattaatcaatttcctttagaagtttcatgaacctaatagattatatgc

SEQ ID NO: 80159 - DNA, 671 bp, Homo sapiens
aggttgcctatttagagtttatcttgtcctcattcaaacaaggaatcttggcgttttcattagcccatgcagtaatactgaagatgaatgagtgtacaatttctgttaagctttttgaaatattgcaaatagctcatgtacccccatttctgcaatgaaaaccttacctgagacgattgctgcagggccatttgttcatgtagttcaattttcacttaagctttgaaagtttacacgttaggaccgtgtaggtacagaacccagggcctatgactttattggctcaggatatttgttaattgacattaaagtattaagtatcaaaattgaaataattgcttaagtatttagaaaatgaacagtatattagctagtcaactacaactcaacagttttgcagttgtatttaygttgtatttatttggggaggttttttctttttaatatctttgacacatgatatgaaatggggccttcaaaagtcaccttgtttagagcctgcttttttgtctaaagagctccaagaaaggagattgagtggtataatttaagatctaaaagcagatgaccctgttcttcctggaaagtagactggagatgcaggtcccttgggcaagacatatctgctatctcctattctattgtgtggataagccatcatttatataata

SEQ ID NO: 80160 - DNA, 671 bp, Homo sapiens
aggttgcctatttagagtttatcttgtcctcattcaaacaaggaatcttggcgttttcattagcccatgcagtaatactgaagatgaatgagtgtacaatttctgttaagctttttgaaatattgcaaatagctcatgtacccccatttctgcaatgaaaaccttacctgagacgattgctgcagggccatttgttcatgtagttcaattttcacttaagctttgaaagtttacacgttaggaccgtgtaggtacagaacccagggcctatgactttattggctcaggatatttgttaattgacattaaagtattaagtatcaaaattgaaataattgcttaagtatttagaaaatgaacagtatattagctagtcaactacaactcaacagttttgcagttgtatttacgttgtatttatttggggaggttttttctttttaatatctttgacacatgatatgaaatggggccttcaaaagtcaccttgtttagagcctgcttttttgtctaaagagctccaagaaaggagattgagtggtataatttaagatctaaaagcagatgaccctgttcttcctggaaagtagactggagatgcaggtcccttgggcaagacatatctgctatctcctattctattgtgtggataagccrtcatttatataata

SEQ ID NO: 80161 - DNA, 747 bp, Homo sapiens
caatgaactgagcaacatcacctctggaacatagttttaagttttaaattacatttaaaataaatgatcaattccacaagcaatcaaagatcatagtgtccttaggaaaaggctgaaatattatggttaaagtcacccttgaccaccatattgaatccaaacccatcacttctatccaacataacccttgttactggtttataaatgtctttccatttttcatcttacatactcatatatctggcccctaaaatatcttttaaattagtttgtatttttttgagacaaagtcttgctctgtcgtccgggctggaatgcagtggtatgatcttggctcactgcaactgcctcccagattcaagcaatcctcctgcctcagcctcccgagtagctgggattactggtacctgccaccacgcctggttaatttttgtatttttagtagagacggggtttcaccatgctggtcaggctggtctcaaacccctgaactcaggtgatcctctcgcctcggcctcccaaagtgctgggattacaggcatgagccactgcaccyggtttagtttgcatttttaaagtaacctaaacagtatcatattggacaatattctaaagattatttatttcccctcaggacatgtctagaagatttgtctatttcaccacatatggatccatctcagtcttttaactgtgagatgatgctctcagcatgaatattctgtagttcatttggccattcttcta

SEQ ID NO: 80162 - DNA, 747 bp, Homo sapiens
caatgaactgagcaacatcacctctggaacatagttttaagttttaaattacatttaaaataaatgatcaattccacaagcaatcaaagatcatagtgtccttaggaaaaggctgaaatattatggttaaagtcacccttgaccaccatattgaatccaaacccatcacttctatccaacataacccttgttactggtttataaatgtctttccatttttcatcttacatactcatatatctggcccctaaaatatcttttaaattagtttgtatttttttgagacaaagtcttgctctgtcgtccgggctggaatgcagtggtatgatcttggctcactgcaactgcctcccagattcaagcaatcctcctgcctcagcctcccgagtagctgggattactggtacctgccaccacgcctggttaatttttgtatttttagtagagacggggtttcaccatgctggtcaggctggtctcaaacccctgaactcaggtgatcctctcgcctcggcctcccaaagtgctgggattacaggcatgagccactgcacccggtytagtttgcatttttaaagtaacctaaacagtatcatattggacaatattctaaagattatttatttcccctcaggacatgtctagaagatttgtctatttcaccacatatggatccatctcagtcttttaactgtgagatgatgctctcagcatgaatattctgtagttcatttggccattcttcta

SEQ ID NO: 80163 - DNA, 1009 bp, Homo sapiens
tgcattcaaatttactggatacacttttgctttggaatttttttacaactactaataaagttttgcaaacctatgcagacaagaagaaaaagtaccacttttgtattaggagccacaagcgctttgagaggaatgggcgagacctgtgccctttccggtatggcagccaccggcggcattcagctgttgaaatgtagctcaaatgaaataaattaaaaatccagttcctcagttgcacaggcacatctcaagtgcccaacagccacaggtggcgagtggtgcccattttagttagtgcaggtcagggaaggcttcctggaggaaatgagggagctgggcctggaagggcaggggaaggatttggggaggccaagaggaaagggaggtactcggggcagaggacgagggtgggggtgggacgagcacgggctgcccccaaggaagtcagggtgccagcctggaaggggaggcccaggatcatccattcacccaaggtcaggagtgacgttcatttcagtttatattcctatttttctatatataggaatataataatatttattacatttctgtatttctatatttctccattccctcttcctcccaggctggaggaaccagctggggggtgtggggatacacaggtgtgagccctggtcctttccaccaggcgctctccccaagggctgctccagaggcaggggtgtgcagggaaaaggggcagggctctgaaggtcggcaaccccggcctgggtccccagtgactccatcagtgaccctggggtggtgccagtttcctccagggcgtctttctcttcatggcacgaaggaaagcagccaacagaagtgctggctttggggaagcatcgggtgccaggccccccagatgctttgcccgctggggtycccccccctcctcctcttcaagacacgagtttctgtggggctgagaggcctggatcggagtcccaagcttactcctaagcgtcggggtgctctcgggcaatgc

SEQ ID NO: 80164 - DNA, 913 bp, Homo sapiens
ttcacaatgtgtcttctctcctgagacctgccccagatgcactctgacactggtacagacggcatcaggccagcatgacccttctccagggccgcttcctgcccctccagaattttgtttctagaatctagaaataatggaggcctgaaaacatgttcaggaccaagagctccaaagctgccagcaggtctccagcccgcctctgagccgcctgtgactcccaggcttcccatctgcccagcagggaatgtcaacacaggagggaggagcrcagaggggtgggcggcacattcatggggatccggtaccagggtgccttgaaaaacgtcagtggatgcctgatggacagagcctgatggacctgtccactggcttcctctaggccagatcagaaggagagcagtgaacagggaagcagctgcccagggtcaagggtcagggcccggctggcgcactcacccgtttgaccttggaggcattacaaacccttttgcgcctaatctgcctcctcgctaaaatggaaccaaactacatttccgctagacatcccctgggttgtttgagccctaaatgagagtgcatgggaaccttggcagaaccctaagatggggacctgctggcagctttggagctctttgtcccgtacaagtccccaggtttccattatttacaaacaaaattctgggggagcaggaacagacccgggaggagggccctgctgtcccagtcccgcctgtaccagctgcagtgtgtgtctgggcgagtcttgggggaaaacacattttccagcgtatctcttcctactggatattgaggaaaccaggggttggcagggtgcagctgctggcctaatctgacctagttttgtcaataaagttttattgaaacagccacatccctttttttatgtgtt

SEQ ID NO: 80165 - DNA, 913 bp, Homo sapiens
ttcacaatgtgtcttctctcctgagacctgccccagatgcactctgacactggtacagacggcatcaggccagcatgacccttctccagggccgcttcctgcccctccagaattttgtttctagaatctagaaataatggaggcctgaaaacatgttcaggaccaagagctccaaagctgccagcaggtctccagcccgcctctgagccgcctgtgactcccaggcttcccatctgcccagcagggaatgtcaacacaggagggaggagcacagaggggtgggcggcacattcatggggatccggtaccagggtgccttgaaaaacgtcagtggatgcctgatggacagagcctgatggacctgtccactggcttcctctaggccagatcagaaggagagcagtgaacagggaagcagctgcccagggtcaagggtcagggcccggctggcgcactcacccgtttgaccttggaggcattacaaacccttttgcgcctaatctgcctcctcgctaaaatggaaccaaactacatttccgctagacatcccctgggttgtttgagccctaaatgagagtgcatgggaaccttggcagaacccyaagatggggacctgctggcagctttggagctctttgtcccgtacaagtccccaggtttccattatttacaaacaaaattctgggggagcaggaacagacccgggaggagggccctgctgtcccagtcccgcctgtaccagctgcagtgtgtgtctgggcgagtcttgggggaaaacacattttccagcgtatctcttcctactggatattgaggaaaccaggggttggcagggtgcagctgctggcctaatctgacctagttttgtcaataaagttttattgaaacagccacatccctttttttatgtgtt

SEQ ID NO: 80166 - DNA, 849 bp, Homo sapiens
ctggtgattagactttgatggagataaggggcgagtctgcactcttcataatctgtaagagataccaggcatgggaaagctcagtgaccaatactagaaagatagtacccccaaagaattcttatttttttaacttttattttaagttcagtcatatatgtttgttatataggtatataggagtttgttatatgggtaaacttgtgtcataggggtttgttgtacagattatttaatcacttaggtattagtctagtacctattggttctttttcctgatcctctccctcatctcaccctccaccctttgacaggccccagtgtgtgttgttcccctctatgtgcccatgtgttctcatcatttagctcccacttataattgagaacatgcagtatttggttttctgttcttgggttagtttgctaaggataatgacctctagctccatccatgtgcctgcaaaggacatcatcttgttcttatttatggctgcatagtattccatggtatatatgtatcacattttctttatgtagtctatcattgatgggcaattaggttgattccatatctttgctattgtgaataatgctgcaatgatcatatgcatgcatgtgtctttataatagaatgattataaggaattctaactcgatacttatttcagttagaagatttatgttatacattattcattgacccaaaggtgtattcaattgtattaaaacaccacattggacatgcaattccatgctttgacatgctaayatacaaaaaataatttcatttcacattagggctgtgggaggcagagttgtggtgtcatactgtgtaagaaaggtgcttta

SEQ ID NO: 80167 - DNA, 2159 bp, Homo sapiens
tgcatccgtcagcccctcagatgtgcccctcttctgaaatggtgtttagcagagatgctggaacatgtttgactcacccaggatgttgtgtagaatcagccggatgacacatgcttttttggtgagtgttttgttcccttctgaaaatagacactggcttttaaaaagccccaaagtccttcttcttggctccaaccccatcccccacagttcccacctgcctccttaagcagtcactctcagcctttaaaaacagaaaccgcgctgggagccgtggcccatgctgtagtcccagcacttcgggaggcagaggcaggagatggcttgaggccaggagtttgggcccagcctggggaacatagtaagaccccaactctgcaaaaaaaattattaaaatttagctgggtatagtggtgcgtgcctgtagtcccagctacttgggaggctaaggcaggaggatcactgtagcccaggagttccaggctgaaatgagctatgactgtgccactatgctccagcctgggggacagaaaccccaggctgaaacccccaactctaaaaaagcaatccagaaaccaagagcataatgatcaactcctggttgcagtagatccttgggaggctgaggtgggtggatcacttgaggtcaggagtttgaaaccagcctggccaacatggtaaaaccccactcaactaaaaatacaaaaattagccaggcttgctgacgggcgcctgtaatcccagttactccggaggctgaggcaggagaatcgcttgaacctgggaggcagaggttgcagtgagcatagatcatgccactgaactccagcctgggcaacagagtgagactccatctcacaaaacaaaaaaagaagtagatcctaattttttcaagattaagtgtttcaaataccttcctgaatgctagagattacggaagcataattgaaaaaatgagaaggtatatactagtttttaaaagtaaacaagttttggggggataatgtttcaaaagttatcatatctttcatttgtccacttccagcactgtgtgattgagaaaaagtcgtcatcccttgtatgttgtccccatagttgacatttctgggcattggtcttcctatacctggtagattgcaccccaccccaccccaccatgcctgcacttctcaacatttgactccagagagagtagaaatgatatgcaccctcagttgcagggaagaacaattttatgcaacaactgagatgaagctgcgtgcttggaccggatgcatgaaacattgcaggtgctaataagtagtttgaaaatctcacatttaggactcccttcaggccctagataagaagccagccttactacagggaccaacaaagttggaccaggggactatctacagaaccatgcgtagaccatctggatccagtatccaagggaaaccagaaggtggttaaaaccatcctcaaagcatcggccagagatgagcaaagacaaggaggtgagcttgtttggcaccaattatgtgactaatgacaggaaagtgggcacaagagctaaagcagaatgtgtcaagaggtgagggaatattgatgtttgaattgtgcccccccaaaaaaactgttktattgagatcccaactcccaccaaatttgaaaatgaactgttttattgagatcccaactcccaccaaatttgaaaatgaaccccctgagctgaagggattaggtgaaggtttgtttattcctaagtgaccagtgagatctacagtcgagttgataccataaagcaaggaatgaaggaagcacagatgaggccatatcaggatgttaagaaaatttaaatcatgatgtctgggcttcatgaaaaatgctaccaaacctggagtgtgctcagaaggaaatactgcttggatggtattatggggcaatgccaagaaaattgactctaagttttctgtactcctttattcacttctctgccttgcaaaaaaaaaaaaaaaaaaaaaaaaaccaagggcttgtcctttttgccctatccctaaggagtggggaccaaaaggagggttatcctgttttctttacaaaaaaatgcttaacctggatctctgttactgatgacaacctcccagtccctataaatatataaccttattttgagg

SEQ ID NO: 80168 - DNA, 539 bp, Homo sapiens
acaggcacctgccaccatgatgggctaatttttgtatttttagtagagacggggttaagccatgttggccagacaggtctcaaactcctgacctcaggcaacccggtcacctcagcctcccaaagtgttgggataacagacgtgagccaccaagcccaacgtttgtttattgcttaaaccatcattcttcctacctactttcatcaactaatttttgtatttttaatagggacggggttttaccatgttggccgggatggtctcgatctcctgaccttgtgaatcgcccgcctcggcctcccaaagtgctgggattacaggcgtgagccaccgcaccgggcttctaaggctttttcttctgtccccaggaggactccagtagaaaaacgtgccaaaatgcagggagtctgctagaactggacatttgtatcacctgccccagccgtgtgtttgctgaactgaggaatccacgtggtcactcaagtgcagtcctcaggacaaaragaagtatagtgaggagttgttggagggtttgtcat

SEQ ID NO: 80169 - DNA, 583 bp, Homo sapiens
ctggggaggaactgctcagttaggacccagacggaaccatggaagccccagcgcagcttctcttcctcctgctactctggctcccaggtgaggggaatatgaggtgkttttgcacatcagtgaaaactcctgccacctctgctcagcaagaaatataattaaaattcaaaatagatcaacaattttggctctactcaaagacagtgggtttgattttgattacatgagtgcatttctgttttatttccaatttcagataccaccggagaaattgtgttgacacagtctccagccaccctgtctttgtctccaggggaaagagccaccctctcctgcagggccagtcagagtgttagcagctacttagcctggtaccagcagaaacctggccaggctcccaggctcctcatctatgatgcatccaacagggccactggcatcccagccaggttcagtggcagtgggcctgggacagacttcactctcaccatcagcagcctagagcctgaagattttgcagtttattactgtcagcagcgtagcaactggcatcccacagtgattccacatgaaacaaaaaccc

SEQ ID NO: 80170 - DNA, 583 bp, Homo sapiens
ctggggaggaactgctcagttaggacccagacggaaccatggaagccccagcgcagcttctcttcctcctgctactctggctcccaggtgaggggaatatgaggtggytttgcacatcagtgaaaactcctgccacctctgctcagcaagaaatataattaaaattcaaaatagatcaacaattttggctctactcaaagacagtgggtttgattttgattacatgagtgcatttctgttttatttccaatttcagataccaccggagaaattgtgttgacacagtctccagccaccctgtctttgtctccaggggaaagagccaccctctcctgcagggccagtcagagtgttagcagctacttagcctggtaccagcagaaacctggccaggctcccaggctcctcatctatgatgcatccaacagggccactggcatcccagccaggttcagtggcagtgggcctgggacagacttcactctcaccatcagcagcctagagcctgaagattttgcagtttattactgtcagcagcgtagcaactggcatcccacagtgattccacatgaaacaaaaaccc

SEQ ID NO: 80171 - DNA, 583 bp, Homo sapiens
ctggggaggaactgctcagttaggacccagacggaaccatggaagccccagcgcagcttctcttcctcctgctactctggctcccaggtgaggggaatatgaggtggttttgcacatcagtgaaaactcctgccacctctgctcagcaagaaatataattaaaattcaaaatagatcaacaattttggctctactcaaagacagtgggtttgattttgattacatgagtgcatttctgttttatttccaatttcagataccaccggagaaattgtgttgacacagtctccagccaccctgtctttgtctccaggggaaagagccaccctctcctgcagggccagtcagrgtgttagcagctacttagcctggtaccagcagaaacctggccaggctcccaggctcctcatctatgatgcatccaacagggccactggcatcccagccaggttcagtggcagtgggcctgggacagacttcactctcaccatcagcagcctagagcctgaagattttgcagtttattactgtcagcagcgtagcaactggcatcccacagtgattccacatgaaacaaaaaccc

SEQ ID NO: 80172 - DNA, 587 bp, Homo sapiens
cgggagttcgagaccagcctgagcaacatcgtgagacctcatctctacaaaaaatacaaaaattagccgggcctggtggcacacacttatagtcccgactgtcgggaggctgaggtatgagggtcaccagaacccgggtagccaaggctgtagtgagccttgatagcgccactgcattccagcctgggtgacagagtgagaccctgtctcagaaacaagaaaacaacaacaacaaaacaacaacaaatagaggtttccaaggcacaaaactaaataaacacattttctcaaaraagaaaataagaaaaaactcacttgaatccaaggcacgaagtgcacagaagcctcatttaaaatgcttaacctctcttcggattaaaactgccatcacaataggtggggcacagaacagccttgtaaaggacaggctctagagacagactccgtgtgcttgaatcctgcctccactacttattagctgtatcgtcttgggcaggtgccttaatgtctctagcatcagtttccttagctgtgaaatgagaattattataattcctacatacaaggctaaaattagctgatataga

SEQ ID NO: 80173 - DNA, 587 bp, Homo sapiens
cgggagttcgagaccagcctgagcaacatcgtgagacctcatctctacaaaaaatacaaaaattagccgggcctggtggcacacacttatagtcccgactgtcgggaggctgaggtatgagggtcaccagaacccgggtagccaaggctgtagtgagccttgatagcgccactgcattccagcctgggtgacagagtgagaccctgtctcagaaacaagaaaacaacaacaacaaaacaacaacaaatagaggtttccaaggcacaaaactaaataaacacattttctcaaaaragaaaataagaaaaaactcacttgaatccaaggcacgaagtgcacagaagcctcatttaaaatgcttaacctctcttcggattaaaactgccatcacaataggtggggcacagaacagccttgtaaaggacaggctctagagacagactccgtgtgcttgaatcctgcctccactacttattagctgtatcgtcttgggcaggtgccttaatgtctctagcatcagtttccttagctgtgaaatgagaattattataattcctacatacaaggctaaaattagctgatataga

SEQ ID NO: 80174 - DNA, 2615 bp, Homo sapiens
tcctgtgggtgtcagcactgggtgttaccacgtcagcgttcccctgccttagatggattgtttctctttgacgttgggatggtttcctaacccacgtctgcagtgaatcagcccctgatagaggaatgattcagtggactcctgtagtcgggtacccaggttgaaggagacacattcaaagacactggtatcactcaggatgtctgaggctgcaactcacaggagatccagctgatagtgacttcaaacataaccatgtgtgtttatctcatgcagcaggaagtctagggatttatggctccagggttacacagcttctctggaattctggttctagaaaggcagtatgtcacaacagtgaggagtacagcctctgccatgggtctccctgagttcaaatcccagctttggtgcttcttgtctgtgaaacttcccacaaattactgaacttcgctgagcctcggctccctcctctgtcaattggagagaacagtagttgtccttccagagttgctgttagaattaaattagttaatatctataaactgcttaaggagagactggcatgtattaagcactatgagtgttagttcttgtcatctttatttatttttatcatcccctcattgtcacaagatcgttcccaaagcagcaggctttcacaccacacgacagtatgcaggacaggaaggaaagtgctggaggggacaaggcaagggataagaatgacacaggcctctcttgggcatctctctcctttagcagggagaaaactccttcccagacctcatgcctttctcagagcctacaggtcaggactgggccacacagtgatgtctgaggcaatacctggcaaaggagagtgaaatcatcatggtttggagcctctgtgctatctcccgtggtagctcctaataaccacataaagcaatttagatttaaattaaaattaaataaaatttaaaatttaggccgggcgtggtggctcacgcctgtaatcctggcacttttggaggctgaggtgggtggatcccctgaggtcaggcgtttgaaaccagcctagccaacttggtgaaactccrtctctactaaaaatacaaaaatcagccaggtgtggtggtgcatgccagtaatcgcagctactcaggaggctgaggcaggagaatcgcctgaacccagaagacagaggttgcagtgagccaagatagcgccactgtactccagcctgggtgacagagcgaggctccagctcgaaacaaaataaaaattaaattaaattaaattaaattaaattcagttgcccagtcacttgagccacatttcaggtgctcagtaaccacgtggggccagtggtctccataatggacagtgcagccctagaccgtttccatcatccaggaaggtctgtcagacagtgctggaatcagagcccactcccgcagctggatgagggtaaaccttccctgagcacattttctcatggtgtctgaacaaaatcagggctgtgttcacaaggaaggaggaggagtggctgctgggttggtaatcaacaatgaaggagacacaggagggaagaccagcatagacgctggtgagatcagaactgtgggtgtgagtgtggccattgggtgagaagctcagcagggtttaaggagcctcattagatttcatgttgaccatcctggcctctctgtccgcgaggcaccctgacacacacagtctagctgttttattgtggtggaaattggaattataagaatttgttggctgggcgcggtggctcacacctgtcatcccagccctttggaaggctgaggcaggcggatcacaaggtcaggagttcaagaccatcctggctaacatggtgaaaccccgtctctactaaaaatacaaaaaaaattagctgggcgtggtggtgggcgcctgtagtcccagctacttgggaggcggagacaggagaatcactggaacccaggaggcagaggttgcagtgagccaagatggtgccactgcactccagcctgacaacagagactccatctcaaaataataataataataataatttgttagatgccctcacccctcttaaacaaagtagttaagtagtttctgctactaaagtgcaaaaatgagcctccaccctgcctacatcctggaccccaacccagcctgagaataagactctgtaaatctccctgttgatgttgcctatttttactattgacatacaaaatgagagagtaaaaaccattttccactatacatactcaccgtgaagcacaatatacaacacaccaaagcccctggggtagtacacagatctgactgcaaaatgcagcctcacgcacttccctaggggccccggggagcagtaaaggtcttagagcccctcctagtatttgagaaggtgttggttggctgtggcaaacatgcatttggagcaataataataacaaccaatgtgcagttatgcttaactatatgtcaggcatttgctcaaggtcaggaagtggtggagttgaatttgcacccagaaattctagtgccaaagtccaggttctgctgtgctctcttctcaggactcgaggtgagcatgctctttggggatccac

SEQ ID NO: 80175 - DNA, 2615 bp, Homo sapiens
tcctgtgggtgtcagcactgggtgttaccacgtcagcgttcccctgccttagatggattgtttctctttgacgttgggatggtttcctaacccacgtctgcagtgaatcagcccctgatagaggaatgattcagtggactcctgtagtcgggtacccaggttgaaggagacacattcaaagacactggtatcactcaggatgtctgaggctgcaactcacaggagatccagctgatagtgacttcaaacataaccatgtgtgtttatctcatgcagcaggaagtctagggatttatggctccagggttacacagcttctctggaattctggttctagaaaggcagtatgtcacaacagtgaggagtacagcctctgccatgggtctccctgagttcaaatcccagctttggtgcttcttgtctgtgaaacttcccacaaattactgaacttcgctgagcctcggctccctcctctgtcaattggagagaacagtagttgtccttccagagttgctgttagaattaaattagttaatatctataaactgcttaaggagagactggcatgtattaagcactatgagtgttagttcttgtcatctttatttatttttatcatcccctcattgtcacaagatcgttcccaaagcagcaggctttcacaccacacgacagtatgcaggacaggaaggaaagtgctggaggggacaaggcaagggataagaatgacacaggcctctcttgggcatctctctcctttagcagggagaaaactccttcccagacctcatgcctttctcagagcctacaggtcaggactgggccacacagtgatgtctgaggcaatacctggcaaaggagagtgaaatcatcatggtttggagcctctgtgctatctcccgtggtagctcctaataaccacataaagcaatttagatttaaattaaaattaaataaaatttaaaatttaggccgggcgtggtggctcacgcctgtaatcctggcacttttggaggctgaggtgggtggatcccctgaggtcaggcgtttgaaaccagcctagccaacttggtgaaactccatctctactaaaaatacaaaaatcagccaggtstggtggtgcatgccagtaatcgcagctactcaggaggctgaggcaggagaatcgcctgaacccagaagacagaggttgcagtgagccaagatagcgccactgtactccagcctgggtgacagagcgaggctccagctcgaaacaaaataaaaattaaattaaattaaattaaattaaattcagttgcccagtcacttgagccacatttcaggtgctcagtaaccacgtggggccagtggtctccataatggacagtgcagccctagaccgtttccatcatccaggaaggtctgtcagacagtgctggaatcagagcccactcccgcagctggatgagggtaaaccttccctgagcacattttctcatggtgtctgaacaaaatcagggctgtgttcacaaggaaggaggaggagtggctgctgggttggtaatcaacaatgaaggagacacaggagggaagaccagcatagacgctggtgagatcagaactgtgggtgtgagtgtggccattgggtgagaagctcagcagggtttaaggagcctcattagatttcatgttgaccatcctggcctctctgtccgcgaggcaccctgacacacacagtctagctgttttattgtggtggaaattggaattataagaatttgttggctgggcgcggtggctcacacctgtcatcccagccctttggaaggctgaggcaggcggatcacaaggtcaggagttcaagaccatcctggctaacatggtgaaaccccgtctctactaaaaatacaaaaaaaattagctgggcgtggtggtgggcgcctgtagtcccagctacttgggaggcggagacaggagaatcactggaacccaggaggcagaggttgcagtgagccaagatggtgccactgcactccagcctgacaacagagactccatctcaaaataataataataataataatttgttagatgccctcacccctcttaaacaaagtagttaagtagtttctgctactaaagtgcaaaaatgagcctccaccctgcctacatcctggaccccaacccagcctgagaataagactctgtaaatctccctgttgatgttgcctatttttactattgacatacaaaatgagagagtaaaaaccattttccactatacatactcaccgtgaagcacaatatacaacacaccaaagcccctggggtagtacacagatctgactgcaaaatgcagcctcacgcacttccctaggggccccggggagcagtaaaggtcttagagcccctcctagtatttgagaaggtgttggttggctgtggcaaacatgcatttggagcaataataataacaaccaatgtgcagttatgcttaactatatgtcaggcatttgctcaaggtcaggaagtggtggagttgaatttgcacccagaaattctagtgccaaagtccaggttctgctgtgctctcttctcaggactcgaggtgagcatgctctttggggatccac

SEQ ID NO: 80176 - DNA, 636 bp, Homo sapiens
ccagctacttggaaggcaggaggattgattgagcctgggaggttgaggctgcagtgagccaagattgtaccattgcactccatcctaggcaacagagtgagactctgtctccaaaaaaaaaaaaaaaaaaaaaaaaagggctgagggatagctagagggctggctagacaaataggcatgtgataggagaagtattgtaagatgctaattggagaatataggtttagggtgaacatgcttttactgcaacattatttttatgcatgtttgaaactttcataatatgttacgcaaaatataggaaatatgtaatatttacaatcaaaagcaaaaatgatggaatacatagtggatctagtattccactatgtagacgaatgaattagtacattttaaaattagatttagaaaccctttttgaaaaaaaaacaagcaggaaaraacaaagaactagaaaatatataattatgaggtatatgggatggtcacaggaagaatcccagaaaaatagaaaaataaaagttgaggaaagggtatctttgaaaaaaaataaaggagaaataaaggagatgaaaaaagcacatgctgggtttctttctcccttcccttattgatgaaagctgagtttcagtgggt

SEQ ID NO: 80177 - DNA, 1148 bp, Homo sapiens
ttatctgtttatttttactagcaattcattacacatttgcggggaaagaaagtaaaatcctaaatgagaaaatttcgtatttgattttttaaaattcttttgtgttctttctgcactttttcaaactttttctcttcctattgtaaaataacctggagctgaaaatctgagtgcccatgcttgaaagtcatgttgattttatatcccttactgaatattgttacttgtcctggtgtttcccgttttctgatatgtttgttaaaactatttggctgaaatagctaacatagcttattactactgttatttcctttctacatactacagtttgttgtttatagtttctttttctttacttatgtattttaattttgaaagtttaatttttggcttacttttctttttttaaaatgttgctttattcggtaatttgttgcttgtgttcttacaaagtctatgcctcttctcactttcatgtgatatatattttatttcaaagatacaatttttgtaagacacttttaaatacatgtcaaaacaatcaaatgtaaactaaaagtaaatgtagaaatttaatttatatgttatatgtgatagttggatgtctttaatatttttggtattcattctatttcttttgtaaatataatttaccttaattgttttggtccttgtattgcaaatacaaaatatttgccataaagtaattatgaaaaaaattgactctatgaagtttggctaacactcataattcattttgcatgaagtactcaatgaattcagatgcaatcagtaattattatgggaacagtgactcaaaagtaattcttgatttgaaaattatcttaattttaaagttttcttttattttagctctagaaatacagcaattatgcacagagacatgaagtgaatgcaaaagttagttaaaaaaaggaaatgtatttctgtgtttatttgcttgtgcttaaaaccaccactcaccttaaagtggtatsttaaagtgaaagcatttacaaaaactaaaattttattttttcacatttaaaatagaaaaatatgatactttttttagcttttcaagaattaattttaaaacagtaatagaagcataaatgtttcatttttcttttaaatcatatgattta

SEQ ID NO: 80178 - DNA, 995 bp, Homo sapiens
tgcatgctgcttggaagcagggaggtatgcagaagcttccagatctccagactcttctctcactgcgtcttggggcctgagagcttagctctgcaaagaacaacccaggaagggtcaggatggacagggcactgcagtctctgcaccaagtggtgtgccctacatggccctgagacttcagaagactcgggtcttaggctcactgcagactgtgtaacgtgaataacaaaaaaaaaatttctactgcacatgagtaagctgcagaagactttgtgccttgaagcttccttccagatgaaaaagcgggtctctcatgaaaagaacgcttgccttcaagaaaagctctttaaaatcttttgacatggcaaaagaatctgtaacttgccacttgtacatcacttccaaaaatgtttcttccttcttaatttattttaaaaattttgtttcaggacccaccgtgtgacaggcacattttccaccatttgggaaacatcattgaatagaatgagaattcctactgccatgacactaacactgcagtgacatccgtagckccaaaactcttgatcttcttcatcatgtgctttcattcatcagacgtgtattcgttcagccaaacagacatgagcatctactttatgccaagctcagtggtgagggctacagcttcaaaaacagaatatggactatgctctcgaggaattgtctaaggagagaggcacacacagctagggttctaacatcagagctttatctaggagcaccaccagaggtgtggggagctcgtgtctgtgaggcttcctggaggaggtgttacctcagttgagtcttgcaggatgagtacaaggtccaagcagagagggtgtaatttgaaatagcttgatacagaggaggaactaaaggcagtgaagggtgctggggtataaagtttgaggcaggaggtagcaagaactgaaacttgacattgaacagttaggcagagcctgcatcatgca

SEQ ID NO: 80179 - DNA, 995 bp, Homo sapiens
tgcatgctgcttggaagcagggaggtatgcagaagcttccagatctccagactcttctctcactgcgtcttggggcctgagagcttagctctgcaaagaacaacccaggaagggtcaggatggacagggcactgcagtctctgcaccaagtggtgtgccctacatggccctgagacttcagaagactcgggtcttaggctcactgcagactgtgtaacgtgaataacaaaaaaaaaatttctactgcacatgagtaagctgcagaagactttgtgccttgaagcttccttccagatgaaaaagcgggtctctcatgaaaagaacgcttgccttcaagaaaagctctttaaaatcttttgacatggcaaaagaatctgtaacttgccacttgtacatcacttccaaaaatgtttcttccttcttaatttattttaaaaattttgtttcaggacccaccgtgtgacaggcacattttccaccatttgggaaacatcattgaatagaatgagaattcctactgccatgacactaacactgcagtgacatccgtagcgccaaaactcttgatcttcttcatcatgtgctttcattcatcagacgtgtattcgttcagccaaacagacatgagcatctactttrtgccaagctcagtggtgagggctacagcttcaaaaacagaatatggactatgctctcgaggaattgtctaaggagagaggcacacacagctagggttctaacatcagagctttatctaggagcaccaccagaggtgtggggagctcgtgtctgtgaggcttcctggaggaggtgttacctcagttgagtcttgcaggatgagtacaaggtccaagcagagagggtgtaatttgaaatagcttgatacagaggaggaactaaaggcagtgaagggtgctggggtataaagtttgaggcaggaggtagcaagaactgaaacttgacattgaacagttaggcagagcctgcatcatgca

SEQ ID NO: 80180 - DNA, 1403 bp, Homo sapiens
ccaatgctactattcattctcagattgatgggccctgaaatctttagagaatataaaaatatccttgttatccttgcatgaaataatttaaacatgtctcatattcttagcaaaaaggactgtaactgcacactgtgttcatcagaggacctattatttgttagagattccatgaatatcagtagagtgttaattaggagtaccagagtattataccactagcaggctttattatgtctttacctgtgtaaacctcaaatttaggtaattctcttttaaatatacctaaagtactatgtatagtataaacagaacaagaagttattcamccatagaactatagcaaagctgctaagtcaggtctagatggtcttttgcttggtctcaatccaaattattaagcaacaggataggaaacaataaaagagacattaaataaccattatttgtcagctactatgccaggtgctttacaaatattttcgtaacagctgttaattgtttccctctacagattatttctctctccttttagaaaggatgttttccttaccctcaagggtttaattatagatgaaaactcatcactttgctaataaatatatttattacagctggatgtgaacatgttgataagtgatgctcacaatttccatatcttttttttttttttttttgcacaagaaaaccactctccctgtatttctcttccattctttccaagtgctgaaactagatcatggtgttgtaagagcaatgaccacataagtgacaacaagagaggatgacaaaaaaaaaaaaaaaaaaagggaaagaagctggatccctgaatggttctatagaagagactacagattctctcaatcccttacttatttcttcacagctgagaaaaaaataaatcctaacctagtttaaatcactttatcttcagacttcttcttttcagtgatatatatgctaaaaacactgaggaatcttagccaccattaacacacacacacacacacacacacacacacacacacctctgaactatgtggtgctggcttaaaacttcagaggcagatagtttggcaggctgaaaagttggtgaccctcattatgcaattgcaaaacatttggttaaattattgtgtgataaacttgaaggcagaccacatgctcaccaagcctatagcaacaggcgaaatgggtgagaatccaataatttgaggtctctcagaggtttggaaaagctactcaattataaatagcaggagatattattcttattcagagattttctctgaggcctctccttaagcatttcagccagatcttgtgatttagacccatggcaaaaattcattaaagagaggtgttttgggtgacttattgctttgcgtgacttcattaaagcc

SEQ ID NO: 80181 - DNA, 1902 bp, Homo sapiens
caaccagcttgagaaagggggaggaggtggaaaactagaaactttggtaagcctgtcttagccctgcttctggtgtgagaaagtccaacttatctttaaaatggatgctgaggcaccataaaattataagaatttactacaatataatttttacttatattactgttctctgtcttttactaacttacagtggttatgtttttctatatgccttctttcactaacttattttggtatatttttctatacccttcttttgtgtctactttttgctatcaccaaaacctgattatttccacaagccttcaaataatcttttttttttaaaaaaaataactgtttagaattatttaagacttcctagaatataacacagctgtttcacattttcttcctgtctatcccttgctattgtattagcaacataaaaacacattcttctaacaattcttaatctttgaccataaagttattgtctctgcagaccccttcgatctcgccatattagaaagcgatattatatatcaaacttcaacaaaagacctttaactcatgtataatgtctgcctctctcaagctattattcattctacattttctcagactaagtatctactctagaatcaattgtcatattttataacaccaaatatatgttattcgatgaagtaaaatcaagatatgcattaagtcattgctatgtgcactgctcatgaaacagagataagagagttagggatataaagagagttaacatagcaatattgggaatatcgttattttaaggatattagccttggataaaattggatgtaaggtagggaggggctgatgatagtagaaattgaaataacagattatattcaacagactataaaagcaggaggaaatgatatttgtctactttgttcattgctctttttgtrctttgcattcattcctttatcctcagtgtttagcagagtgtctggcacataatgggcatggaataaatattttttaattaacttgtttcccttaaagggtataggtcaaagaggatcagagtgttatatggcccttggaaaaaaacagattttaatgatcagagatgcaaaattagaaaatcctaggttcctaaaaagctaataattatgcaccctctcttaccaaactctcatcccactatggaagaaaaacaataaatgataataccccactccttttgttttttttctgttatcatgtattctgaatggcgagaaagtcagaaatacaatttgggtacatattacaactgattttgaatgcagattgtagactctttacccatttataaagcaatggaaaaatagtaatgtttattttaagcaaagtaagatcatgatttgaattatactttggcaagaaaattatggtaggaatctgcaggctcatttgaagggggaaaatagaggggacaagatcattagagaagcatgtcaaaatatgattcttcctacctcaagggtaggaagaatcccaagaatcccaagttccagacttaaatatagactcaaatactgccacattctaaatcaagtcactgaaccatctattcaggatatgctaagagagtatgaaagtggttctactagcaatagtctgtcatcttccattagacaatgtaagaaaaccagagcatttactaagaatttaatgaaagtgaagagtgaggctttcttacttcatataagagctattagcatattatattatatgtcaatcatttctatcaactccagtccagtgaaaaggtattcaactaaacaaatttggaaatcttttaaataaagctttacagatagagttgaagttatgtttttaatttcctccacaatctcacttttttcctttccttttcaaatttaagtactattgcat

SEQ ID NO: 80182 - DNA, 1902 bp, Homo sapiens
caaccagcttgagaaagggggaggaggtggaaaactagaaactttggtaagcctgtcttagccctgcttctggtgtgagaaagtccaacttatctttaaaatggatgctgaggcaccataaaattataagaatttactacaatataatttttacttatattactgttctctgtcttttactaacttacagtggttatgtttttctatatgccttctttcactaacttattttggtatatttttctatacccttcttttgtgtctactttttgctatcaccaaaacctgattatttccacaagccttcaaataatcttttttttttaaaaaaaataactgtttagaattatttaagacttcctagaatataacacagctgtttcacattttcttcctgtctatcccttgctattgtattagcaacataaaaacacattcttctaacaattcttaatctttgaccataaagttattgtctctgcagaccccttcgatctcgccatattagaaagcgatattatatatcaaacttcaacaaaagacctttaactcatgtataatgtctgcctctctcaagctattattcattctacattttctcagactaagtatctactctagaatcaattgtcatattttataacaccaaatatatgttattcgatgaagtaaaatcaagatatgcattaagtcattgctatgtgcactgctcatgaaacagagataagagagttagggatataaagagagttaacatagcaatattgggaatatcgttattttaaggatattagccttggataaaattggatgtaaggtagggaggggctgatgatagtagaaattgaaataacagattatattcaacagactataaaagcaggaggaaatgatatttgtctactttgttcattgctctttttgtactttgcattcattcctttatcctcagtgtttagcagagtgwctggcacataatgggcatggaataaatattttttaattaacttgtttcccttaaagggtataggtcaaagaggatcagagtgttatatggcccttggaaaaaaacagattttaatgatcagagatgcaaaattagaaaatcctaggttcctaaaaagctaataattatgcaccctctcttaccaaactctcatcccactatggaagaaaaacaataaatgataataccccactccttttgttttttttctgttatcatgtattctgaatggcgagaaagtcagaaatacaatttgggtacatattacaactgattttgaatgcagattgtagactctttacccatttataaagcaatggaaaaatagtaatgtttattttaagcaaagtaagatcatgatttgaattatactttggcaagaaaattatggtaggaatctgcaggctcatttgaagggggaaaatagaggggacaagatcattagagaagcatgtcaaaatatgattcttcctacctcaagggtaggaagaatcccaagaatcccaagttccagacttaaatatagactcaaatactgccacattctaaatcaagtcactgaaccatctattcaggatatgctaagagagtatgaaagtggttctactagcaatagtctgtcatcttccattagacaatgtaagaaaaccagagcatttactaagaatttaatgaaagtgaagagtgaggctttcttacttcatataagagctattagcatattatattatatgtcaatcatttctatcaactccagtccagtgaaaaggtattcaactaaacaaatttggaaatcttttaaataaagctttacagatagagttgaagttatgtttttaatttcctccacaatctcacttttttcctttccttttcaaatttaagtactattgcat

SEQ ID NO: 80183 - DNA, 1902 bp, Homo sapiens
caaccagcttgagaaagggggaggaggtggaaaactagaaactttggtaagcctgtcttagccctgcttctggtgtgagaaagtccaacttatctttaaaatggatgctgaggcaccataaaattataagaatttactacaatataatttttacttatattactgttctctgtcttttactaacttacagtggttatgtttttctatatgccttctttcactaacttattttggtatatttttctatacccttcttttgtgtctactttttgctatcaccaaaacctgattatttccacaagccttcaaataatcttttttttttaaaaaaaataactgtttagaattatttaagacttcctagaatataacacagctgtttcacattttcttcctgtctatcccttgctattgtattagcaacataaaaacacattcttctaacaattcttaatctttgaccataaagttattgtctctgcagaccccttcgatctcgccatattagaaagcgatattatatatcaaacttcaacaaaagacctttaactcatgtataatgtctgcctctctcaagctattattcattctacattttctcagactaagtatctactctagaatcaattgtcatattttataacaccaaatatatgttattcgatgaagtaaaatcaagatatgcattaagtcattgctatgtgcactgctcatgaaacagagataagagagttagggatataaagagagttaacatagcaatattgggaatatcgttattttaaggatattagccttggataaaattggatgtaaggtagggaggggctgatgatagtagaaattgaaataacagattatattcaacagactataaaagcaggaggaaatgatatttgtctactttgttcattgctctttttgtactttgcattcattcctttatcctcagtgtttagcagagtgtctggcacataatgggcatggaataaatattttttaattaacttgtttcccttaaagggtataggtcaaagaggatcagagtgttatatggcccttggaaaaaaacagatttkaatgatcagagatgcaaaattagaaaatcctaggttcctaaaaagctaataattatgcaccctctcttaccaaactctcatcccactatggaagaaaaacaataaatgataataccccactccttttgttttttttctgttatcatgtattctgaatggcgagaaagtcagaaatacaatttgggtacatattacaactgattttgaatgcagattgtagactctttacccatttataaagcaatggaaaaatagtaatgtttattttaagcaaagtaagatcatgatttgaattatactttggcaagaaaattatggtaggaatctgcaggctcatttgaagggggaaaatagaggggacaagatcattagagaagcatgtcaaaatatgattcttcctacctcaagggtaggaagaatcccaagaatcccaagttccagacttaaatatagactcaaatactgccacattctaaatcaagtcactgaaccatctattcaggatatgctaagagagtatgaaagtggttctactagcaatagtctgtcatcttccattagacaatgtaagaaaaccagagcatttactaagaatttaatgaaagtgaagagtgaggctttcttacttcatataagagctattagcatattatattatatgtcaatcatttctatcaactccagtccagtgaaaaggtattcaactaaacaaatttggaaatcttttaaataaagctttacagatagagttgaagttatgtttttaatttcctccacaatctcacttttttcctttccttttcaaatttaagtactattgcat

SEQ ID NO: 80184 - DNA, 2043 bp, Homo sapiens
tggggatcttcttaaaattcagattctgactcagtggtctggggtagaggctgaggttctgcatttttgtataggctcctaggtgatacccacgctgctggcccacggaccacaagtggagcaaggcaggagcaggcaggccctactcacccggctccagggagctccctcggggccacctggccacactcttccctctcccggcctcctctgccatgtgctggcttctcaatgggccacacctctcctgcttgccaccaaccagcacagactgtggagcttcctggcagagtgaagggccagaatacagcagacccaactgttgtgcctaagaaacaaatctttttttttttttttttgagagagtctcactctgtcgcccgggctggagtgcagtggcgccatcttggctmactgcaagctccgcctcccgggttcacgccattctcctgcctcagcctcccgagtagctgggactacaggcgcctgccaccacgcccagctaattttttgtgtttttagtagagacggggtttcaccgtgttagccaggatggtctcaatctcctgaccttgtgatccgcccacctcggcctcccaaagtgctgggattacaggggtgagccacctcacccagccgaaacaaatcttttaaaatctgatatgaaagggaaacctccttgcccaagtgtggcaaggacaggaccagatcccaggagcctaggtggggatgagcccgacccaccacggcctccgtagccagagctgtagacagggttgcttgcagtgggccgcaccgtggcccgctgaaagcacacagtggacacgagctgagtccagagctttctctgagctgggacttagccctccagtggggaaccatggtcagcggctgcaacccctgggcaagatggggcctggcctcctgccctctgcagggtcataggagtgtctgggagctcagggtcagggccagatggctgttcctggggcctggggctccagctcaggatgtttgggaacaggaactcttggcttggagaagcccattacaccacaggaggcctgagatggtcggtctgcggggagcagctcagactgggggtggcagagcagcgtgtggctgtgtgtggccaggtcaggggagagtggccaatgctgggccctctctaaggagcccgagggccacaaggaccgtggaagaggtcttgagtgagggagtcgggaccttgtggctaggggtcttgcttgaggatgctctctgcagccacaaggagatgcccaggcaggaccaggtcaggaagaggctggggcagaggcccaggcaggaggtgggtgggctgggtggggatgggagtagccagggtgaaggtgaggacagggaaggggcccccctgcctcctggcttccctgagggcggggctggccaatcccagcggcaaatgtgtgcagggaggagtggggtccaggttggagctttgggagcccttggaggcagcaaggcagactcacctctgggacccagcacccagcttgggcgtgcaggtgggggctcagaagtgaacatcgtggggctttgagcaagactctctgggatccagtctcagcttccatactttgaagtcaaggagtggacctgtgctgtctgtttgctctggggtctgggcagtcctgttgtttgggtagaggcctcagagggccctagggacagactgacccaggtctgagcctcttgggagcgtgcggatggccggcctcagacaggcctggttatgggtttgacttacaaggggcacacgcgcactctggtgcttcctggcattcagaagagaagagggagttcagacatcaggccttccttctccctgggaaggatggcaggtgcctggagccaggcctgtcttgagagccagggctctgggtcttcctcctccagtgccctgttccaggccttcagtgcataaagcactcccctcctggggtctcttcagggctccccgggatgcaaatgggacagggaataggatcccaggtttgaggaaac

SEQ ID NO: 80185 - DNA, 619 bp, Homo sapiens
tgagcaccttccttcacacacctgtgccagctgctcttctggcctgtgcaccatgacatgtgcccgtaacttgtcaacagcttccgttttccttaagctaggttgagaggggctcctgtcatttgcaagcaaaagaataataaataacatagaagggaagtgtttgaagactcagcctattgataattaaatagtgggagctacctctctctttttttttttttttttttttttsagacagagtcttgctctgttccccaggctggagtgcagtgacacgatctcagctcactgcaacctccacctcccgggttcaagcgagtctcatggctcagcctcccaagcagctgggactacgggtgcgtgccactaggcctggctaaatttttttgtatttctagtagagatgggtttttaccatgttggccacgctggtctcgaactgctggcctcaagtctccgcctgcgtcagcctcccaaagtgctgggattacaggtgtgagccactgctcctggccaggagctacctctttatgaaaaaacaacaacaacaacaaaaatccgctctagtctgacctgtttggaaccagacagatttgagtgtgaattcaagcttgga

SEQ ID NO: 80186 - DNA, 1483 bp, Homo sapiens
gaaaaattcattatcctgaaactttcctttcaactagatagctccatgttcagatactttggtgtctcccttcagagtaaaatccatttatcaaagctggacttcaaggacattcataaactggcctcaactgcctttcacaggtttgtattcctccaactcattggccaaatatgcttttcaaatcagactatatattcaatgtcccccttgcctgatggcttcattctgactcctgaacttttacccacattaataatgtttaagatttgttatacawataatacatgagtgcattcatttattcaccattatcattttccactaaatacacattaattcactgcatgctttgcccaaggtcctaggcattatctttttcttttatttaatatcttccttctcacactagtgcagtagccagtgggtaccgatctcagttgccaccagtagagtccacaccaccattatattttgcctcctttggctataagcttcctgttttttcacaacaaccaactattttcttggcacgggcagactgttctcatcctggacaaatgactctgtagaagagcagaggaaatagcagtgattcacagagtaaccaggctgagccctgaggcacagcaactttctaataataatattgccaatatttatttatccttgcaatatctgtacatgagttttgaaagagaggtccaattcagtgatattcacattaattttgacttataaaattatcacccatcccatctaatcttcatttttactgagcatattagtggtacatatcagtgattctaaatcaagagaatatgccaaaatcacttaggaaaattttccaaatacacgtttcctggctaccctactcatgcatagtaaggagcatttgatacataatggggtagtatgtcatggaatataaacttctaaaaagtgattctatgcatttttacatcattcccctgaataagaaacatacagagataaagatacagtctatgttttgagaggattgaccaaaaaaattattctcaaattgtgtcaagtacactgtaagatcatggtaaatatttgttaaattaacaaaataaatgaataatgtagagatttttcactgctacttgagtagaatatatggacaatatttatatactactttatggaatacacaatgctgtcatgtatatgactaaaatttcacggattttcaggtctagagttcagttatcttcccctgtcctgctgggtgaccctggggcaagccactaacataggtcatgttttgtcttccatatgccagccaagtacaagcatcatcaaatctcagctgttgccacatcatgtggcttaatgtaaagctgccattaaatacactcaatcaaaagtctgcttgggcttgcatgaccttagttacatacacatacacatacacacacacatatacatagtagaactacttaagttctactcttcc

SEQ ID NO: 80187 - DNA, 1483 bp, Homo sapiens
gaaaaattcattatcctgaaactttcctttcaactagatagctccatgttcagatactttggtgtctcccttcagagtaaaatccatttatcaaagctggacttcaaggacattcataaactggcctcaactgcctttcacaggtttgtattcctccaactcattggccaaatatgcttttcaaatcagactatatattcaatgtcccccttgcctgatggcttcattctgactcctgaacttttacccacattaataatgtttaagatttgttatacatataatacatgagtgcattcatttattcaccattatcattttccactaaatacacattaattcactgcatgctttgcccaaggtcctaggcattatctttttcttttatttaatatcttccttctcacactagtgcagtagccagtgggtaccgatctcagttgccaccagtagagtccacaccaccattatattttgcctcctttggctataagcttcctgttttttcacaacaaccaactattttcttggcacgggcagactgttctcatcctggacaaatgactctgtagaagagcagaggaaatagcagtgattcacagagtaaccaggctgagccctgaggcacagcaactttctaataataatattgccaatatttatttatccttgcaatatctgtacatgagttttgaaagagaggtccaattcagtgatattcacattaattttgacttataaaattatcacccatcccatctaatcttcatttttactgagcatattagtggtacatatcagtgattctaaatcaagagaatatgccaaaatcacttaggaaaattttccaaatacacgtttcctggctaccctactcatgcatagtaaggagcatttgatacataatggggtagtatgtcatggaatataaacttctaaaaagtgattctatgcatttttacatcattcccctgaataagaaacatacagagataaagatacagtctatgttttgagaggattgaccaaaaaaattattctcaaattgtgtcaagtacactgtaagatcatggtaaatatttgttaaattaacaaaataaatgaataatgtagagatttttcactgctacttgagtagaatatatgracaatatttatatactactttatggaatacacaatgctgtcatgtatatgactaaaatttcacggattttcaggtctagagttcagttatcttcccctgtcctgctgggtgaccctggggcaagccactaacataggtcatgttttgtcttccatatgccagccaagtacaagcatcatcaaatctcagctgttgccacatcatgtggcttaatgtaaagctgccattaaatacactcaatcaaaagtctgcttgggcttgcatgaccttagttacatacacatacacatacacacacacatatacatagtagaactacttaagttctactcttcc

SEQ ID NO: 80188 - DNA, 1483 bp, Homo sapiens
gaaaaattcattatcctgaaactttcctttcaactagatagctccatgttcagatactttggtgtctcccttcagagtaaaatccatttatcaaagctggacttcaaggacattcataaactggcctcaactgcctttcacaggtttgtattcctccaactcattggccaaatatgcttttcaaatcagactatatattcaatgtcccccttgcctgatggcttcattctgactcctgaacttttacccacattaataatgtttaagatttgttatacatataatacatgagtgcattcatttattcaccattatcattttccactaaatacacattaattcactgcatgctttgcccaaggtcctaggcattatctttttcttttatttaatatcttccttctcacactagtgcagtagccagtgggtaccgatctcagttgccaccagtagagtccacaccaccattatattttgcctcctttggctataagcttcctgttttttcacaacaaccaactattttcttggcacgggcagactgttctcatcctggacaaatgactctgtagaagagcagaggaaatagcagtgattcacagagtaaccaggctgagccctgaggcacagcaactttctaataataatattgccaatatttatttatccttgcaatatctgtacatgagttttgaaagagaggtccaattcagtgatattcacattaattttgacttataaaattatcacccatcccatctaatcttcatttttactgagcatattagtggtacatatcagtgattctaaatcaagagaatatgccaaaatcacttaggaaaattttccaaatacacgtttcctggctaccctactcatgcatagtaaggagcatttgatacataatggggtagtatgtcatggaatataaacttctaaaaagtgattctatgcatttttacatcattcccctgaataagaaacatacagagataaagatacagtctatgttttgagaggattgaccaaaaaaattattctcaaattgtgtcaagtacactgtaagatcatggtaaatatttgttaaattaacaaaataaatgaataatgtagagatttttcactgctacttgagtagaatatatggacaatatttatatactactttatggaatacacaatgctgtcatgtatatgactaaaatttcacggattttcaggtctagagttcagttatcttcccctgtcctgctgggtgaccctggggcaagccactaacataggtcatgttttgtcttccatatgccagccaagtacaagcatcatcaaatctcagytgttgccacatcatgtggcttaatgtaaagctgccattaaatacactcaatcaaaagtctgcttgggcttgcatgaccttagttacatacacatacacatacacacacacatatacatagtagaactacttaagttctactcttcc

SEQ ID NO: 80189 - DNA, 1368 bp, Homo sapiens
cctcatatccctactcataccctttctgctgtctcattcttaatcaagaaaaaagcacattacaacacagataaaaattcctctataatgctgggattatccaagccaatctaaatcattctaggctagtgtaagttccacatggtaaaggtggtggtgagggagttattataataaaatacataagaaactctatgtcttacccatatgtgtatccatggccacaggaagaatcaatactgcaactctgatcaacagtttcattcctgcattagtaaggaaattaaaatcttactgtaagggtcctcttattacaggaagttcacttctattaggaatatttcataaaccagtttgtagccaaggtcaagaaccaggaagcatggaattaagtagaccacaatcagtaaaacaggacttggttaccaagctttgggacaggatcagacaggctagaaacctgctgggcattgtgcttcctggttgtgagaatacaggtcaatcatagggactcagagctgagtccagagcagtatgaatgcacagtagaggcaggggccaagctggaagacaagagcatgaaaataatattttatccatgatgtttttatgagaccacagatcagattccaattaattattggtgaggattagcatcaaagttaattcttctcatagattgaaaaaaatcacagaattggcatgacagactatctatacatgtacaactttcactgtttataaaacataaggataggccgggtgcagtggctcacgcctgtaatcccagcactttgggaggccgaggcgggcagatcacaagggcaggaaatcgagaccatcctggctaacacagtgaaaccccgtctctactaaaaatacaaaaaattagccgggcgtggtggcaggggcctatagtcctagctactcgggaggctgaggcaggagaatggcgtgaacccgggaggcggagcttgtggtgagccgagatcacaccactgcactccagcctgggtgacagagcaagacttgctctcaaaaaaaaawaataataataataataataataaataaaaaaacataaggataaagctgcagtgctttatgattgttactaaagtaacttcccttggaaaaagaagaccacatttcagagtctcatcagtaaagttgtaacaagttaatacttctgaaggtattaaaatgagcattccgtttaataatattattgtcagaacacctaagataaagtgtagtaaaggaaattcattcatcattcatccatgcctctgacaattatcagatctggattcgagaagtaaacttgaaggtcatcagccaataagagaaagttgaagctgtggatcc

SEQ ID NO: 80190 - DNA, 1021 bp, Homo sapiens
tcagaactctgccaaaatcatcattttcagttcacatgagcttcattgaactcgggacaaatcatctgaattgaggtggatgtggtgtgggacagttcccacacccaggtttcgttttgagtgttaaatgcgttcaaatatgaaaattcagggtgaaacttagagcaaaactgccaggttttggactactcatttcagaacaaattagcatatttaattttgggggcaaacccgttaaccagttttgctagttttttagcaaaatttacaacaacattttttttttcttgccaaattctttcattttggatcttggtctgacatattttcatctttggtccatacttggactgctttttagttttattgttatttctaataatgtagtaagtgcttgtaaatccatcatccaaacaaaaagttaagattttgaccacaatttgtatctcattacctggttctccaccacaccaccaccactgtgccattcttctgactccccttacgtgaaytggtcatccttgaatgtttttgaaattctttgcttttttgttgactcttttacttttgtgtcacttttttagttgttactaaaagagaatataatgttttatacataatatcttgggacatactttttcaatgtgataacatcattaatgatatagtgcagacaatgatctgtttccttgttcctcagtctcaccttgaaacttttttccaaattaacatctaataattgcacaatcccttgctattcatagccagaggacttcttattaaatgtagattacaattcaatttttttgacccatctataggttaatcaaaacttggatggaatgttgatttctttaaacatgtccaaatcatgaaaacattttttcacactatgtttcattttcttcaaaattggtaacctattggttattaaatacatcaactgaattgtgcactgaattttcctacctttcatctcttgctttctcacttatttttgtgtctgccaagaggatcccct

SEQ ID NO: 80191 - DNA, 1021 bp, Homo sapiens
tcagaactctgccaaaatcatcattttcagttcacatgagcttcattgaactcgggacaaatcatctgaattgaggtggatgtggtgtgggacagttcccacacccaggtttcgttttgagtgttaaatgcgttcaaatatgaaaattcagggtgaaacttagagcaaaactgccaggttttggactactcatttcagaacaaattagcatatttaattttgggggcaaacccgttaaccagttttgctagttttttagcaaaatttacaacaacattttttttttcttgccaaattctttcattttggatcttggtctgacatattttcatctttggtccatacttggactgctttttagttttattgttatttctaataatgtagtaagtgcttgtaaatccatcatccaaacaaaaagttaagattttgaccacaatttgtatctcattacctggttctccaccacaccaccaccactgtgccattcttctgactccccttacgtgaattggtcatccttgaatgtttttgaaattctttgcttttttgttgactcttttacttttgtgtcacttttttagttgttactaaaagagaatataatgttttatacataatatcttgggacatactttttcaatgtgataacatcattaatgatatagtgcagacaatgatctgtttccttgttcctcagtctcaccttgaaacttttttccaaattaacatctaataattgcacaatcccttgctattcatagccagaggacttcttattaaatgtagattacaattcaatttttttgacccatctataggttaatcaaaacttggatggaatgttgatttctttaaacatgtccaaatcatgaaaacattttttcacactatgtttcattttcttcaaaattggtaacctattggttattaaatacatcarctgaattgtgcactgaattttcctacctttcatctcttgctttctcacttatttttgtgtctgccaagaggatcccct

SEQ ID NO: 80192 - DNA, 1284 bp, Homo sapiens
ttgtgaatgtgtgcgatgaacatatgggtgcatgtgtctttgtggcagaatgatttatttttctttgggcatatacccagtagtgggattgctgggttgaatggtagttcaactcttagtcctttgagaaatctctgaactgctatctacagtggttgaacaaatttcatccccaccagcagtgtataagcattcgcctctctccacagccctgccaatgtctgttattttttgacttttaagaaaagccattctaactggygtgagatggtatctcattgtgggttttgatttgcattcctctggtgaggactacaccaggaagtctgttgaccagttcttaccataattatcaatcttgcttcagtctatgacatttgaaagctgatgatgcatttttgactaaagttctaaggataaaccaattcaaatataataaatttaaaaatgattttgtctcaaaattaaatcactcagagggataacaacataaaataaatgttagtgataacatgtgatcgtagggcctaaattgaaaaagggaaagaattggaagatggttttgcatgtatgccagactttcatttcaacataactgttgctgtaatatcctcccactacctttttcataccaagtgctataatcccacgcagtccacatgatgctctgtgctattaagtgaagtgacagaaaaataggtgacagaacagcagggttatatcacccaatgccttggaattcatatctagaaaacaagtagtacaaatcacataatggaggagtcactatcactgattagtgataaatggtggtcttcacagtatggttttattattagcaacttgttttttcatcaaaagtctacacaaaatgaacagtgccacaaattatacattttggctctcttagacattctatggattataacatacttgttttattttgtagggttttggtataagttttaaaaggtattaatatgagtgtgtgttgaggggttggggaatggtagcgataaaattaaaaatattgtatagttacagactgattgccatgtgtgtgaagaatgtttgaaacagttcagattagtactgggattgtgatcgactttgagttgcttcgggtctagtagaaatccggttatttccaagcctgtgaaatgtgaagttcaagaaaattgaatccgtgtatagcaaaaccattttttctcacaattttttaaccaatgaacattgtgtgggaaattgattccatatgttttcaagtcatttatgcaacttgaa

SEQ ID NO: 80193 - DNA, 1026 bp, Homo sapiens
tctcaaaatatttttctaccagatgaaaaattcaattttggctaagaattatactggttcagattactatgaaaattatgtattgctcaaaaacggaatcatccaaatacatttgaaaattaaaaatcttaatttcccaaagacatttattcattgtctcttataaatctaaaaaagccaaatacttattaagagaaccatatatttaagatacttgttctaaaactaagttatttttcaaagatttataagtaaaatgtccttaagtaagaaaataagtaaaggaattgttttctaatatttttgttcatcctcattttaagaaaataattatttcatattttcaataatgctattaaattctaagtaaaacctcagctttcaattgaaccagcattgagcatatgatataattatttatttgtgtatatcacttaaaaataactactttgtaaaattagttatctgtatcacataactttggagtaagagagatttgaggaaccttacaatgtcaaagttcttttgacttagggttgatatgcctaaactatwctgaacatgtatctatcttacttccaaacactttaggaatgttgatttttacaacactactttgtgacctactcagtgtttgacaattttcagcttatgaagtttgttgtttatgtctaattgtcagtttaaagctattctgttccataaaaaggaactggaccagatgtaccatataaatccccatctgttaaaacaacaacttcctcccaactaaaaaacatttttagtatatatatatatatggactatctttatttttcaagtccctatagttccaaggactatattttatccacaaaaatagctcagaaatattgaatgcttatactagttcctaatattgacttttaaaaatcccaattaaatagcctagtttatattttgttcagttatgccttcacctattatgagaaaattcctgtaaagtattatgactcatcctatgtttaaatatatttccacatttat

SEQ ID NO: 80194 - DNA, 542 bp, Homo sapiens
ttctctcttggtagtatacaagaaatttatggagatggtttatagatggagatcttttcttttctctttctctgtctctctctctcccctttctccttccttccctccctcccttcctgccttccttcctttcttctctctctctctttctttttttctctctccccctccctcctttccttccttccaccctccctccctcctttccttccttccttccttccatgcttccttccttccttctttcttcctttcctttccttcttttttcttttctattgtgtcacctaggcttcagtacagtggcacaatcatggcttactccagccttgaactcctgggctgaagcaatactcctgtcccagtcccccaagtagttgggactacaaacacgcactaccacacctggctacattttaaattttttgtatagatgggatcccactatgttgcccaggctcgtcttgaaccagtgggctcaagtgatctacccaggctcccaaactgttgggactacaggcatgagccaygacacccaacca

SEQ ID NO: 80195 - DNA, 541 bp, Homo sapiens
cagtttgaattgtcagaacaattctaaatttgtctttaaaaagtgtgggtgaatggtctttctggatcagagaaatggatcaagggggagcagcaagacagggaaaggtagagagggagaagaaaagagagaaggagattaaaaaagagagaaacacgcaattgcctcagaactgacttcagaagaaatgttgaaaggaattttatgccgtgagagacaaattatccttttggactcatctacaaaatcctcagtaaatttacatttttcattaargacatatgaaaaaattaaaaaagttatatacatggaggctgctaaaatctggtttacataggcaatgataaatgaaaacaatattactgggaattgaatggtataaaacgtgtaaggactatgagacatttacagagtgctctcttggtgggaagtaggtgttgtgctaggcacattaaaaacttggtcccttgttacaaagattatgtacaaatgaaaaggtgaaataattttgaaatgaactgtttcctgtaaggcaaggata

SEQ ID NO: 80196 - DNA, 859 bp, Homo sapiens
tactgtcacctcagtatcacttacgcacaggccaccctggccccgggcctttgctgttccctctccacagtgatgtcttccttgacaccttgggtctaccttatggctgactgatcttcaaagccagttcaagtcctgccccttctakaaagccttgcctaagactagcgttctgggaatttcctttgttctcaaattctgaaagctctcaacattctcaccatgcaaggtgacgtgggatggtcttccctgtctttctccaagcaatggagggcttccctctacgatgaacagcagctcctgaaggtgggtcccatcccctacttcttccatagcttgcccagagcagtctgcaccagctgggctcacagaccgtatcaccgaccgaccaccagggcagctcgtccacatgatagcccttccattctcaagcacatttccacccctgttaatccattccacaagcatttctagaacacctgctcagtcagagcctcaggccactagatttttttaagcctcagaactcacagtttaataggggagacactggaataaatgtttaagtgcagtggggcggggtggggagtctaggggcctgaggggagcttccctccaagtcagaatggaggcactggaaagactccctggaggagcgagtgctggcccaaccatggagaacaacagtgagcacacagggtaggcactacaggctcggcacaagaacaatggcctccggctgatgcccccccacccatgtctcccctaactaacctcatggcacctgctgagatgatacaaataattttaatattaatctaagaataaaatggccaaataggtcgtatggcacaaaaat

SEQ ID NO: 80197 - DNA, 490 bp, Homo sapiens
tgaggcgacatacatcctcaatttacgaagatgatgggattaagagattaaagacaggcataggaaattataagagtgttgattgggggagtgataaatgtccatgaaatctccacaatttatgttcagagattgtagtaaagacaggtgtaagaaattataaaagtattaatttgggtaactaataaatgtccatgaaatcttcacaatttatgttcttctgtcacagcttcagcaggtccctccgttcagggttcctgacttcccacaacacttgcccagataggataggactgagtttctgtattattcccctcactctgcagcatacgtgtgtttaaaattcctgcctttgagttatgtgcttaagctaaatgttgcattttttcrcaaaacaatcacagaaagactgtaaactggtgctggacaaagtgtgatctgcagactggtgttagtccacaaagtattttttaccagcccacaatcagat

SEQ ID NO: 80198 - DNA, 891 bp, Homo sapiens
tcaataaaattgttttgtgtaaaacattgaatgtttacaagagattagattataaaaacttgattggatactgaaaaaaatgtactgattagttaattcctacagaggcctgggcttaagcttgatgtaattacagcatggtagctgttcttatagcatagctctcctgcctgtgcagccgactcataaatctatgcatctccctgctggccctggccttctggcttcctgaagacatgtccccatggccatyccataaataccactatctcagccattcagaagaaggcatgtcacctccctggagccctacccctgtgcttccttcctactctgttttataatctcaacaaataggaacattattttcatgttactcacgttgaaactgtggaacattttcagctgtgctcttttcctttggagatctcttttctctcccacctgcttattctgcctccagaatgcctactccttcaatccccaccattctaaggtgctatcagccttgcaccaggccactgctgtcatgtcttatttggagtatttcagtaagcacctcactactatccttgacttcagtttctttctctccagtctaatatgtgtgaagcacggttctgactatatcccttgcaagctgaaaaagcctttgctggtttccttttcttacaaaataaagtccagcctccttaacaagggattcaaggtcctctgtaatctcctcttatctgtctttcgtccctagtctcccttcgccctacgctttcaacatgcatactgtattataggcatagctgtgttttacattttcctgcttttgtgtctttgcctggagttttctttggcctggaattttctcccatccaatttctgctcttcagaggatcc

SEQ ID NO: 80199 - DNA, 999 bp, Homo sapiens
ccaggcttcaaactaaacaatctcagcaggtcagactgtggtggtggtaactcaaatctcttccctaaacatctcagtgggttttcttttttttgttttcttttttttttttttgagacagagtctcgctctgttgcccaggctggagtgcagtagtgcgatctcggctcactgcaacctccgcctcctgggttcaagtgattctcctgcctcagcctcccgagtagctggggctacagctgcatgccaccaaggctggctaagtttttgtacttttagtagagacagggtttcactgtgttagccaggatggtctcaatctcctgacctcgtgatccacccacctcggcctcccaaagtactgggattacaggtgtgagccaccacgcctggctggattttcaatcctacatcaattagctgctttttttttttttttttttttttgagatggagtcttgtcctgtcacacaggctacagtgcaatggcacgatcttggctcactgcaacctccacctcccaggttcaagcgattctcctgcctcagcctccagactagctggaattacaggcacacacaaccatgcccggctaattttttttttgtatctttagtagacatggggtttcaccatgttggccaggctggtctcaaactcctgacctcgtgatccacccaccttggcctyccaaactgctgggattacaggcgtgagccaccatgcccggcctaatcagctgcttttagtgatttgccccgcggacaattccttcaggtttatattgatttcatctcctactgattcatcaaattaacaggacttgaaggcacatgacctgtcaagaatctttcactattctcttttataatattccaggtcctgttcagttgtttcattaattgcactgttaggagtgaaaattctaaaggcttctggaagtgccaagaaccagtgcttttacctttataaatgaagctaccctaaacaagagatgca

SEQ ID NO: 80200 - DNA, 3165 bp, Homo sapiens
caattaattaaatcatagcactgcattccaaaccagaatatttaacatcatcagcataccttatcatgaaggtcatttatctcttcagtacatcctgggtagaaagcacagagttttattaaatgtagttcattatcaggaatcatcagaagaagatcagctgccaaattcctgttaacgtaacaaaaggggacacttcattgaggagaagatttaaaaataacattcataactatctcaaagaagggcaattcatataatataccactcttgctttttaatttacacaaacagtattaatagcctacttaattatgaaactactgtaaatgcagattacccaaaccaaaggtcatgaacaacaaatgtatttataaattcctaaatattaaaaactaaactttacatamatgagtcttaacatacttataattaattttatcattacagaacaattctctaatctaagtagttttgaatatgttctttggagtgaattataaagcaaacattgtgaaagttaactctcgtcaacttttgttatgcttgtcaaaattgataaattgtatcagccagatcagtgaaaccagtagaatattgagttaagttcataattttgggtatcccacatatttcttacatgataagtggaaattaaagatagttttcttatttccctttttttttcttttgaggcatagtctcattccctctgtcgcccaggctggagtgcagtggtgcaatctcagctcactgcaacctttgcctcctgggttcaagcaatttttgtgcctcagcctcctgagtagctgggattacaggcacgtgccaccatgcccgggcaatttttgtatttttagtagagacagggtttcaccatgttggccaggctgatctcaaactcctggcttcaagtgatccacccaccttggcctcccgaagtgttgggattacaggcatgagccaccgagaccggcctatttacttattaaagatccaatcagtggactaaagcaactgagggttttaaaaatataaaatggtacgtacttagaagatttatattaaaatattttctgtaaaatcctcttcaaatcactaggtgaggagtaaatggatgcatacatcataactgagaaaacacttaactttcaataattcaagatattgttttttttgttgttgttttttttttttttttttttgagacggagtctcgctgtcgcccaggctggagtgcagtggcgcaatctcggctcactgcaggctccgccccctggggttcacgccattctcctgcctcagcctcccgagtagctgggactacaggcgcccgccacctcgcccggctaattttttgtatttttagtagagacggggtttcaccgtgttagccaggatggtctcgatctcctgacctcgtgatccgcccgcctcggactcccaaagtgctgggattacaggcgtgagccaccgcgcccggccaagatattgtttttaaaaaattgatatatagccatacagaagaggtgacattagaataggagatatttcacataagaatttataaagctgtgtgctggggcctctgggagtaaaaccctacacttcatcttctttgtgaaaacgtcagtaaaatctacattagtcatttaagtaaatcaattcttttttaaaacttaagaggtgcttaattaagaatataatgaatatagaataggaataaagacaattggcaagctctggtgtgaaatccaaagttttactaaaagtaaaaaatacacacacgtcacaaactatcaggacagtaacattttcaattaggcttactttaatgtttttagaataagaaaaactttagtgaagttttttacataaaatattttgataactcatcattttactaataaatagttttctagataatgtcaaaagagaattgataaaagattacaataatttttcatattattttcctctagccattaaaaattacacataatatctttccaaactgccacattttctattacattgggcaggttccaagttagagtagtttagctgttcatgctaaaatgcatgaatgatgtcatgtgtttcctcttatcaaaatttcatagttttaaataacgtccatgaaaatatagaaattatcatttgtttttactgtgtataaaatagctgtgctaaaattctattcaaacttcattgaactatagacaaaatttgactttcttaatgtagaattacatcttcatacagtgaaattttagcaaggccagctaatttccttcaatgttaatcaaattcactcttttttgagagttcagtacacaaatggggaaaaatgtacatataaaaatgatatagaccaattgaatgatctaaaatataaaatttcactatcagaagagatatttcattctgcttagctgagttagctattatttggtattgcaggaaatcacagttcatttattgtacaacttttaagtataaaatcatgagtgattataggaacttttctcattactttgtagtcaggtttcatgtgctataaattacacgtgaattggcataccataaaataatgtgaaaatagttgataaatatttcttaatacagagatagtattcaaataataaaataaaggagtatatacattttaaaggaatatgttcttaaataaaagtagataatacctgtatccaacacatggaaagctaaaggaaaatattaaatatgaataccatgattatacgatgaataccacaaagaaacagacttttacagtaaatgtaaaaaaagcgctgtttatagcttaaaaattatgcacatctttataaatgatgtagctatcttttaaaaaatctgtgcagctctactaatagccaggaggattacagctttctcctgaaagtaaagctaatcagcaccacatttaaactgtttcctagtttctgttacacatatctatggatatattaaaaaagaattgttgggatgggggcgttacaaggaagaagtttgttttttcttaaaagtaattaagacatatagttaattgaaaaatgtttaatcatattatgtaacatacaatgttttgagtttgaactgctcagtaggaagcagatgtagataaagacctttatgatgacccac

SEQ ID NO: 80201 - DNA, 3165 bp, Homo sapiens
caattaattaaatcatagcactgcattccaaaccagaatatttaacatcatcagcataccttatcatgaaggtcatttatctcttcagtacatcctgggtagaaagcacagagttttattaaatgtagttcattatcaggaatcatcagaagaagatcagctgccaaattcctgttaacgtaacaaaaggggacacttcattgaggagaagatttaaaaataacattcataactatctcaaagaagggcaattcatataatataccactcttgctttttaatttacacaaacagtattaatagcctacttaattatgaaactactgtaaatgcagattacccaaaccaaaggtcatgaacaacaaatgtatttataaattcctaaatattaaaaactaaactttacataaatgagtcttaacatacttataattaattttatcattacagaacaattctctaatctaagtagttttgaatatgttctttggagtgaattataaagcaaacattgtgaaagttaactctcgtcaacttttgttatgcttgtcaaaattgataaattgtatcagccagatcagtgaaaccagtagaatattgagttaagttcataattttgggtatcccacatatttcttacatgataagtggaaattaaagatagttttcttatttccctttttttttcttttgaggcatagtctcattccctctgtcgcccaggctggagtgcagtggtgcaatctcagctcactgcaacctttgcctcctgggttcaagcaatttttgtgcctcagcctcctgagtagctgggattacaggcacgtgccaccatgyccgggcaatttttgtatttttagtagagacagggtttcaccatgttggccaggctgatctcaaactcctggcttcaagtgatccacccaccttggcctcccgaagtgttgggattacaggcatgagccaccgagaccggcctatttacttattaaagatccaatcagtggactaaagcaactgagggttttaaaaatataaaatggtacgtacttagaagatttatattaaaatattttctgtaaaatcctcttcaaatcactaggtgaggagtaaatggatgcatacatcataactgagaaaacacttaactttcaataattcaagatattgttttttttgttgttgttttttttttttttttttttgagacggagtctcgctgtcgcccaggctggagtgcagtggcgcaatctcggctcactgcaggctccgccccctggggttcacgccattctcctgcctcagcctcccgagtagctgggactacaggcgcccgccacctcgcccggctaattttttgtatttttagtagagacggggtttcaccgtgttagccaggatggtctcgatctcctgacctcgtgatccgcccgcctcggactcccaaagtgctgggattacaggcgtgagccaccgcgcccggccaagatattgtttttaaaaaattgatatatagccatacagaagaggtgacattagaataggagatatttcacataagaatttataaagctgtgtgctggggcctctgggagtaaaaccctacacttcatcttctttgtgaaaacgtcagtaaaatctacattagtcatttaagtaaatcaattcttttttaaaacttaagaggtgcttaattaagaatataatgaatatagaataggaataaagacaattggcaagctctggtgtgaaatccaaagttttactaaaagtaaaaaatacacacacgtcacaaactatcaggacagtaacattttcaattaggcttactttaatgtttttagaataagaaaaactttagtgaagttttttacataaaatattttgataactcatcattttactaataaatagttttctagataatgtcaaaagagaattgataaaagattacaataatttttcatattattttcctctagccattaaaaattacacataatatctttccaaactgccacattttctattacattgggcaggttccaagttagagtagtttagctgttcatgctaaaatgcatgaatgatgtcatgtgtttcctcttatcaaaatttcatagttttaaataacgtccatgaaaatatagaaattatcatttgtttttactgtgtataaaatagctgtgctaaaattctattcaaacttcattgaactatagacaaaatttgactttcttaatgtagaattacatcttcatacagtgaaattttagcaaggccagctaatttccttcaatgttaatcaaattcactcttttttgagagttcagtacacaaatggggaaaaatgtacatataaaaatgatatagaccaattgaatgatctaaaatataaaatttcactatcagaagagatatttcattctgcttagctgagttagctattatttggtattgcaggaaatcacagttcatttattgtacaacttttaagtataaaatcatgagtgattataggaacttttctcattactttgtagtcaggtttcatgtgctataaattacacgtgaattggcataccataaaataatgtgaaaatagttgataaatatttcttaatacagagatagtattcaaataataaaataaaggagtatatacattttaaaggaatatgttcttaaataaaagtagataatacctgtatccaacacatggaaagctaaaggaaaatattaaatatgaataccatgattatacgatgaataccacaaagaaacagacttttacagtaaatgtaaaaaaagcgctgtttatagcttaaaaattatgcacatctttataaatgatgtagctatcttttaaaaaatctgtgcagctctactaatagccaggaggattacagctttctcctgaaagtaaagctaatcagcaccacatttaaactgtttcctagtttctgttacacatatctatggatatattaaaaaagaattgttgggatgggggcgttacaaggaagaagtttgttttttcttaaaagtaattaagacatatagttaattgaaaaatgtttaatcatattatgtaacatacaatgttttgagtttgaactgctcagtaggaagcagatgtagataaagacctttatgatgacccac

SEQ ID NO: 80202 - DNA, 527 bp, Homo sapiens
agaacctcaaagccaaatcttcataacatattacagatcaccaaaatctgtaacaccaatatagacatgaagaatttttaaatgaaggcaagaaaacataatcctttcaaagatttygagttggctagccagcagtcagacctgggaagctaatcccacactgccacacactagagggaccagatgtcagaagcacctgagaaggccaagactccctttcacgtcgggctctggggacagcctctcgtgattcttggctgaactgtcagtggattagagacacacactgaaaaatgtcctaagactgctcttcttcaaagaaccacacggccctttctgaggaattaccctttagaatttgttgacccctttttagtgtttattttcctcccatcaagtgatgaacaaaacaaaacagtcacatggttatcacagaactggaaggccctaaggaagtgtctcactctacagatgagaaaaggaggctcaggtaggttgtgattcacctcaagtgccagcctaggatc

SEQ ID NO: 80203 - DNA, 527 bp, Homo sapiens
agaacctcaaagccaaatcttcataacatattacagatcaccaaaatctgtaacaccaatatagacatgaagaatttttaaatgaaggcaagaaaacataatcctttcaaagatttcgagttggctagccagcagtcagacctgggaagctaatcccacactgccacacactagagggaccagatgtcagaagcacctgagaaggccaagactccctttcacrtcgggctctggggacagcctctcgtgattcttggctgaactgtcagtggattagagacacacactgaaaaatgtcctaagactgctcttcttcaaagaaccacacggccctttctgaggaattaccctttagaatttgttgacccctttttagtgtttattttcctcccatcaagtgatgaacaaaacaaaacagtcacatggttatcacagaactggaaggccctaaggaagtgtctcactctacagatgagaaaaggaggctcaggtaggttgtgattcacctcaagtgccagcctaggatc

SEQ ID NO: 80204 - DNA, 527 bp, Homo sapiens
agaacctcaaagccaaatcttcataacatattacagatcaccaaaatctgtaacaccaatatagacatgaagaatttttaaatgaaggcaagaaaacataatcctttcaaagatttcgagttggctagccagcagtcagacctgggaagctaatcccacactgccacacactagagggaccagatgtcagaagcacctgagaaggccaagactccctttcacgtcgggctctggggacagcctctcrtgattcttggctgaactgtcagtggattagagacacacactgaaaaatgtcctaagactgctcttcttcaaagaaccacacggccctttctgaggaattaccctttagaatttgttgacccctttttagtgtttattttcctcccatcaagtgatgaacaaaacaaaacagtcacatggttatcacagaactggaaggccctaaggaagtgtctcactctacagatgagaaaaggaggctcaggtaggttgtgattcacctcaagtgccagcctaggatc

SEQ ID NO: 80205 - DNA, 532 bp, Homo sapiens
cttattatgtacctttgtcataaaatgttctttctttattccttttttattataaaactctaccattttttaaaagcttagttaatatctaatcttctcaagaaattgctaaacatacggtaatatttttaaacagaactcatatggggctaattttgtacatatttataccacttagctgttagttaattagcaagataatcataattatcctcccagaatatmttaaaaactcattgaggaaagaatttatgtatttagctttcctaacccaagaatacctcctttattagttaaggatatgggagctgataaaagagatataccctgaaatttcagaggcttacatacaagcttatatctcacttacaaatatctcaagcagggattgtgatcattaggcatctcttctccaaatcacaacccaggagtccagtcactttccatttgtgactctgccatcttcaaccccactttccaagatcactgtgtcagataaaatcaagctggaaggggctttaccagaaatcac

SEQ ID NO: 80206 - DNA, 532 bp, Homo sapiens
cttattatgtacctttgtcataaaatgttctttctttattccttttttattataaaactctaccattttttaaaagcttagttaatatctaatcttctcaagaaattgctaaacatacggtaatatttttaaacagaactcatatggggctaattttgtacatatttataccacttagctgttagttaattagcaagataatcataattatcctcccagaatatcttaaaaactcattgaggaaagaatttatgtatttagctttcctaacccaagaatacctcctttattwgttaaggatatgggagctgataaaagagatataccctgaaatttcagaggcttacatacaagcttatatctcacttacaaatatctcaagcagggattgtgatcattaggcatctcttctccaaatcacaacccaggagtccagtcactttccatttgtgactctgccatcttcaaccccactttccaagatcactgtgtcagataaaatcaagctggaaggggctttaccagaaatcac

SEQ ID NO: 80207 - DNA, 532 bp, Homo sapiens
cttattatgtacctttgtcataaaatgttctttctttattccttttttattataaaactctaccattttttaaaagcttagttaatatctaatcttctcaagaaattgctaaacatacggtaatatttttaaacagaactcatatggggctaattttgtacatatttataccacttagctgttagttaattagcaagataatcataattatcctcccagaatatcttaaaaactcattgaggaaagaatttatgtatttagctttcctaacccaagaatacctcctttattagttaaggatatgggagctgataaaagagatataccctgaaatttcagaggcttacatacaagcttatatstcacttacaaatatctcaagcagggattgtgatcattaggcatctcttctccaaatcacaacccaggagtccagtcactttccatttgtgactctgccatcttcaaccccactttccaagatcactgtgtcagataaaatcaagctggaaggggctttaccagaaatcac

SEQ ID NO: 80208 - DNA, 585 bp, Homo sapiens
gaaaggcggaggaggagtaatagctgtactactgcctttcccaaagtcggttcacgcttgatgctctcactgaagcaggtcaaagaaggtgaaactccttccttttcaatagactgcatttttaaagttagaattccacattgtacttaaataatatagaaaatgtaattttcagcctttaaaccacaattccagaccacaaacaaattttgaagagcgaatttaaatttcttatgaactatttttatgatattagtataaagttaatgtggtgatawaaccttttgcaatcatcttcttggagatcagggcttattttccttgataatttatttaagtttgagaatattagaaacaacatcaccaaaaataaaagtgggttacttaaagatttttttcttgcaaatgactcttatgtcaagtcacttgatttgcaacaaataataattaaattttcattcgaataattttttggaagagctttcctataagtgtaaaatttgtactcaatgttttcctttattcaaaatgtcagaactttaatttctggtgatgttaaaatacagcaataatatggcaaaacat

SEQ ID NO: 80209 - DNA, 494 bp, Homo sapiens
taaaatgatttaaatcgaaaaataatgatgtcaaaatcaggaaaaacacattcagtgaaatttgayggatgaatacaataattcaacaaatttattcctggtcctattctaaacacttggatgacgttagtgggcaagtggttttacattaaaaggaacagatcctctcaatctaatctaagttgtcccagagactatgaggtataagaaaagcttccaactaattttagaggtcagtatatccttgaaagcaaaccccacacccaaaacgaaagaaaagacagaatagaaagaaaagtaaaatcttgaacatagtttaaaatatgctaattatacattaatattttgaccaaattttatgataagttctttttgttaattaccagggaagaaatacaattattatttctcttaaaatctaaaacaaatgttttatttaaaatttgaaataaattttccttgcccattttacccttttcactacaaattccaaa

SEQ ID NO: 80210 - DNA, 649 bp, Homo sapiens
tcctgagcatgatctaaagggtgccaagttgcccccttccctataccatacagtgtcctcattctgggtaaggatatagtcaaagtagagttgttatagaaccttctaaagcatgggaactrgggccttatatgttagttatgagtttgaacaatttcctgccaatttacaagaactattgaagacttttatatggtagctgttttatacacagttttactttttcacatagctataaattatgaaagacaaagatagggattcttctcctttcaaggaaatgcaatattgtgtattgtcaaacctcttcaaaaggcttcatttattaaagtgttgcatgatagatataattagaattggcaagctaccaaaaatctgttcatgaccatttgtcatgtgtaattttctatgccttttaagtattccacataatgcttccaagctttggatttaatcctcctgctgagaaaccacaacaatgagaataatagatttacttctaaagcaatttgaatatttctgtactaaacttcatactactactcctgaaactctctgttcactttgacataaagagacaggagaaggaagtagaatctaggcaccccgacttaaaacagtaccatccatttgttccccatcaatatgc

SEQ ID NO: 80211 - DNA, 649 bp, Homo sapiens
tcctgagcatgatctaaagggtgccaagttgcccccttccctataccatacagtgtcctcattctgggtaaggatatagtcaaagtagagttgttatagaaccttctaaagcatgggaactagggccttatatgttagttatgagtttgaacaatttcctgccaatttacaagaactattgaagacttttatatggtagctgttttatacacagttttactttttcacatagctataaattatgaaagacaaagatagggattcttytcctttcaaggaaatgcaatattgtgtattgtcaaacctcttcaaaaggcttcatttattaaagtgttgcatgatagatataattagaattggcaagctaccaaaaatctgttcatgaccatttgtcatgtgtaattttctatgccttttaagtattccacataatgcttccaagctttggatttaatcctcctgctgagaaaccacaacaatgagaataatagatttacttctaaagcaatttgaatatttctgtactaaacttcatactactactcctgaaactctctgttcactttgacataaagagacaggagaaggaagtagaatctaggcaccccgacttaaaacagtaccatccatttgttccccatcaatatgc

SEQ ID NO: 80212 - DNA, 1001 bp, Homo sapiens
ataataaaggtcacaaatatttttttctcctacaaataatattttttwaaaaaatttagactacaagggacactgttcttaaaattgctttatcaatatcttgcccctaagatgaagaatataagctgaactctacagacaggaatttccagagatcagcttgtttttgaccttcatttcttctgttcattccaagtttcactgaactgcaattttgaaccaagccctggactagatgaaacattttcagcagaagagctgatgattcaggacagccagaaatctgttattttttttcctctgctaatcaaccacaaatattgatgaggcttggttttctcatgtctacaacagctaatactattaatccctaattcactgggctgagtattatgaggaaccaatgatataatgtgtgaggacctggtttacaaacatgaatttaccctgaatattttgccagaatccccaaatagaccgcatcttacaatttctggtttgtacatttcagtaggtgaaggtggttctagtttccagaattatgtaaaacattgtatgaaaaaaaatgccattttatgtgtatatttttcaaattacagttggtggagttcttcattcccaagaaaaatttaggaaaaaaaaaaagacaagtaaattcctcctccttccaatcccaccactctgagttaattactgttatcctgttgagtaatttttatttaggtctcccgactgagtgtcaccctgaggaaaaggacccttgtaggtggataaactccactctccaacttcaagcccctggcagaggctagtgggagcacagattgaagtcagaggaagatcaagaatcttcaaaatggcagatgtttgtatcatttttaaactttttttctagtccacgtttaccggtcaagaagcttgcaatggcattagagtctcaaggttcatttctagatgctgcttactcctgctgtacttccactgtcatattacggggatca

SEQ ID NO: 80213 - DNA, 1001 bp, Homo sapiens
ataataaaggtcacaaatatttttttctcctacaaataatattttttaaaaaaatttagactacaagggacactgttcttaaaattgctttatmaatatcttgcccctaagatgaagaatataagctgaactctacagacaggaatttccagagatcagcttgtttttgaccttcatttcttctgttcattccaagtttcactgaactgcaattttgaaccaagccctggactagatgaaacattttcagcagaagagctgatgattcaggacagccagaaatctgttattttttttcctctgctaatcaaccacaaatattgatgaggcttggttttctcatgtctacaacagctaatactattaatccctaattcactgggctgagtattatgaggaaccaatgatataatgtgtgaggacctggtttacaaacatgaatttaccctgaatattttgccagaatccccaaatagaccgcatcttacaatttctggtttgtacatttcagtaggtgaaggtggttctagtttccagaattatgtaaaacattgtatgaaaaaaaatgccattttatgtgtatatttttcaaattacagttggtggagttcttcattcccaagaaaaatttaggaaaaaaaaaaagacaagtaaattcctcctccttccaatcccaccactctgagttaattactgttatcctgttgagtaatttttatttaggtctcccgactgagtgtcaccctgaggaaaaggacccttgtaggtggataaactccactctccaacttcaagcccctggcagaggctagtgggagcacagattgaagtcagaggaagatcaagaatcttcaaaatggcagatgtttgtatcatttttaaactttttttctagtccacgtttaccggtcaagaagcttgcaatggcattagagtctcaaggttcatttctagatgctgcttactcctgctgtacttccactgtcatattacggggatca

SEQ ID NO: 80214 - DNA, 1001 bp, Homo sapiens
ataataaaggtcacaaatatttttttctcctacaaataatattttttaaaaaaatttagactacaagggacactgttcttaaaattgctttatcaatatcttgcccctaagatgaagaatataagctgaactctacagacaggaatttccagagatcagcttgtttttgaccttcatttcttctgttcattccaagtttcactgaactgcaattttgaaccaagccctggactagatgaaacattttcagcagaagagctgatgattcaggacagccagaaatctgttattttttttcctctgctaatcaaccacaaatattgatgaggcttggttttctcatgtctacaacagctaatactattaatccctaattcactgggctgagtattatgaggaaccaatgatataatgtgtgaggacctggtttacaaacatgaatttaccctgaatattttgccagaatccccaaatagaccgcatcttacaatttctggtttgtacatttcagtaggtgaaggtggttctagtttccagaattatgtaaaacattgtatgaaaaaaaatgccattttatgtgtatatttttcaaattacagttggtggagttcttcattcccaagaaaaatttaggaaaaaaaaaaagacaagtaaattcctcctccttccaatcccaccactctgagttaattactgttatcctgttgagtaatttttatttaggtctcccgactgagtgtcaccctgaggaaaaggacccttgtaggtggataaactccactctccaacttcaagcccctggcagaggctagtgggagcacagattgaagtcagaggaagatcaagaatcttcaaaatggcagatgtttgtatcatttttaaactttttttctagtccacrtttaccggtcaagaagcttgcaatggcattagagtctcaaggttcatttctagatgctgcttactcctgctgtacttccactgtcatattacggggatca

SEQ ID NO: 80215 - DNA, 895 bp, Homo sapiens
tgaattctgcacacaaaatgtcaactgatatattaagaaagagcaactcgctatagttactagcagtaaaatttctctagctttaaccccattctctgctttatagatatattgttatgcctgtaccatttcagatgagatcatttgacacccaaaatatacattcaagttaaacctctgcaatatgagagtgaaatcccatagaaaaaatgaaaggagtatcatttttccatctttagatcaraaaccgaagtcatggattatgaattttaaatagtcaatatgtcattcaaaaatcattctagatagaaatatgacatctttattcaacttgcttattacttttaaagtatgttcttattgcttcttcatatgaataactttcaaaaattggatagtaatacaaaaaaattaaccccaattgtaaagctattgaattgaatagcatttttatattgaattttagagtgggtaatgctgcaacacacaatgtctagaaattcaaagaaaatgaatgcttgaaaataaaacacatgcttaatctttatgtaaccttttcaatatgaaacagccaaggaagattttctccatggaaaatcagattagccacaaaattggttgctgcagtacatagactaccatagagtcaactgaggctcagcagaatacagcttgtgtgtggtgcttcccttatccatgacgcagcacgtgtgtgctgtggcctaacagatatatgagtgtgtttctaacattaatgtatgttaccccaacctccttatcacacataagcctgctctgcacatacattgcttgctactgttccatcaaattcattcattcattcctactttctcactacaactttcaggacccctttcatattacaaatatagtc

SEQ ID NO: 80216 - DNA, 1167 bp, Homo sapiens
ttgtactctcttttggaagatagagtagatgtaatcaggcataattataaaagaaagaaagcagagtttttggattcgatattatcagagatttatacgaagttacagagtaggcaataaaaaaatcttaaatacattcaattgctttagcagctttgggaaaagtcaatggctgttgatccatcagttggaaatatgaatgtgcttgaatctaaacatcaacagatttttttggggtatttttgtcattccatcatgtactcaaatgatttttaatgcatagacatatagtgtatttagtgaggaaatagaaggtaatataatagaaaaataatcattgagtgaaatactacacttttttattactttggacagtatcttttaaagatcttgcaaataaaaattgtgaataattacttacttgttataactttgtcttttgttcactttttgaggtggaaaatcctacgagataatagacccagctctcatgtgctccctgaatgatttcagcacamctttttgagcaagtgcctatgtttatacattctgagttcaattttgaatctctaagacttaaattttcttaagtttctctaacttttacattcttagactgaatctgatccatgttgttgaaatctgctttctccacgtgagttatataggatatgaccaaggagattttaaaaaatggctttgggccgagtgtggtagctcatgcctgtaatcccagcactttgggaggctgaagagggtgggtaaactgaggtcaggagttcaagaccagcctgggaaacatggtgaaaccctgtctctactaaaaatacgaaaaaattagctgggtgtggtggcaggcgcctgtaatcccagctactctggaggctgaggcaggagaatcgcttgaacctgggaggtggaggttgcagtgagctgagatcgtgccattgaactccagcctgggtgacaagagtgaaactctgtctcaaaaaaaaaaaaaaaaaaaaaagaaaaaaatggctttggtttcttgtattgcttctgtaagttaagcttatctattgcatgagtacattggaactttgttttatgtatctacttacgtatatatacatgtgctttttctttttttttttttttatcacactgccttgcagtggaaagttt

SEQ ID NO: 80217 - DNA, 657 bp, Homo sapiens
gcttttgtttcagctgagttgagtttaatctctgtcccttgttgcaatagtcttgaataaagtatctcttcctgttcaactttgcccagtgcaacttttattttgacagctctttcaatatcaattcatatagaatgaaaactctagggacccaaactaccaaacccatataacttaccatctacattaagatgactttatcatttcactgttttcattaacataactttgctatttcaggagactcctgaccaggctcaaggcaaataacttggttgttcattacagtaatgaactgttgagaagacctagcaagtctttagtggggatcatcaacagaaaatttacacacaaactctcccaacccctccttttaaaaatgacacataccatggtgagtgtttgagtattctggaatctgccagtcactcaaggtctgatccaagaaactggagcaatgtgacttccacagtattctgttgatcaggcaggatggagttcttttttgttaaaggtttttctaaggttttaacaaagkgtcttacaaaccactccctgaatttgatctttgcccccaaaccatttctttctttcaaaatcattcactggaagagactgggaatgacggacatatttattttgaatatagcaagttcc

SEQ ID NO: 80218 - DNA, 742 bp, Homo sapiens
aaaatgcaagccacaacacagttactttttcttatactctatatcaaaataaattcaacattgatcagatcttaaggtaacaaatgaaaccttaaaagcgcttgaataaaatattgctgaatatttgctaggcttggaataagaaaagcttttccaagaaaagaattaagttcagaagttgcaaataaaaagtgtgaaagatttgatgaaatcaaaaattttaatgtttattacaataattagtaaaaaaaaattaaatgggaaaatattcactatatatgacagaattaatacagacaaataagataaatcagtgaaagtatagttacaagatatgaatggataactcacaaaataggaaatataaatggcctttgatatgcaaaatatttcactctcgtaatcaataaaatacaaattaacataatatcattttcccctttcagactggcaaagatgttaacaaatattaataaccaggatgacactgtagagaaagaggaaacacagtgtaaaytggcataaaatttccagagggcactttgacaacactcatcaaaagccttaaaattaagcatcctttgatctagcaatttcctttacaataatttgtttgatgaaagtactccaacaaattcatgaagatctgtgtatttagcatttactgttagtgattataatagtaaaaaaacagtattaatataaaaaaatcaatggaggattgattaaattaaggattagt

SEQ ID NO: 80219 - DNA, 511 bp, Homo sapiens
  misc_feature (1)...(511): n = A,T,C or G
gnnnnnnnnnnnnnnnnnnnnnnnnnnnnnnnnnnnnnnnnnnnnnnnnnnnnnnnnnnnnnnnnnnnnnnnnnnnnnnnnnnnnnnnnnnnnnnnnnnnnagagaaaatattgcaaaccattaatccaatggggagttacatttaaaatgtataaggaacacatatgactcaatagtaaaaatgcaaacacaaataacccaatttaaaaatgggcaaaggacctgaatagacatttttccaaagaagacatacaaatggccaagtatattgtgctctacattgtgaaccagtgggaatttatgttgaagtataacacgctcaacatcacgaatcatcaaggaaatgcaaatcaataccttgtgtaatttctatcycccaactgagccttggctgatacacccagttttcatataaagaaaccaagcacagaggaattaaacaaatcgtccaaagccaaagagctcatgagtgactaagctagggttggtgcaactccagaagccatgctc

SEQ ID NO: 80220 - DNA, 556 bp, Homo sapiens
tttctcacaaatttcaacccagaagaatcccagtcttcycacacaaagaccgtgtgcttgggcagcccctgacccttaaagcctggcataaatcaatttcacctgtttggctaaatgtgcacatgttaacctaatgaaagtgaccggtgcaatcagatagcttctgcacatgttctaacttggagggaatggggaggggtgctgacctctccccgacctcctctgtccctgctcttcctggtggggacagtatttctgggccctggtggggttcttatgagtccttgggccaggctcagcttgggtggttccgaatatgtagagtcctacgtcccaactgaataggatcagaggagaaggaagttttgtatctaattgggagggcggaggtgggtaggcctaatgggagccattcaaattaaaatttccctggaggcttcagatgaaaaatggttacacttttgcccctggcttccaaggtcaagtcttgaaaacagcactcatatcatcaagctgagtgatgaggcaatgagaccggtctcttggcaggatatat

SEQ ID NO: 80221 - DNA, 556 bp, Homo sapiens
tttctcacaaatttcaacccagaagaatcccagtcttcccacacaaagaccgtgtgcttgggcagcccctgacccttaaagcctggcataaatcaatttcacctgtttggctaaatgtgcacatgttaacctaatgaaagtgaccggtgcaatcagatagcttctgcacatgttctaacttggagggaatggggaggggtgctgacctctccccgacctcctctgtccctgctcttcctggtggggacagtatttctgggccctggtggggttcttatgagtccttgggccagkctcagcttgggtggttccgaatatgtagagtcctacgtcccaactgaataggatcagaggagaaggaagttttgtatctaattgggagggcggaggtgggtaggcctaatgggagccattcaaattaaaatttccctggaggcttcagatgaaaaatggttacacttttgcccctggcttccaaggtcaagtcttgaaaacagcactcatatcatcaagctgagtgatgaggcaatgagaccggtctcttggcaggatatat

SEQ ID NO: 80222 - DNA, 556 bp, Homo sapiens
tttctcacaaatttcaacccagaagaatcccagtcttcccacacaaagaccgtgtgcttgggcagcccctgacccttaaagcctggcataaatcaatttcacctgtttggctaaatgtgcacatgttaacctaatgaaagtgaccggtgcaatcagatagcttctgcacatgttctaacttggagggaatggggaggggtgctgacctctccccgacctcctctgtccctgctcttcctggtggggacagtatttctgggccctggtggggttcttatgagtccttgggccaggctcagcttgggtggttccgaatatgtagagtcctacgtcccaactgaataggatcagaggagaaggaagttttgtatctaattgggagggcggaggtgggtaggcctaatgggagccattcaaattaaaatttccctggaggcttcagatgaaaaatggttacacttttgcccctggcttccaaggtcaagtcttgaaaacagcactcatatcatcaagctgagtgatgaggcaatgagaccsgtctcttggcaggatatat

SEQ ID NO: 80223 - DNA, 635 bp, Homo sapiens
aaattctccttagctcaactcgagccatttcccgattgcttcatcagcaaggagctggttattgggctgtccaggcctcccaaactgcacagaaatgaggtgagggagtttttctgctgctccactctgtgaggagttggaggatgatatttacttgtttgcagagagagatgcattgtaggcaccttaggatggaggggaccctgattccaatgtccttttttttctttagaaacaggaccttgctgtgtcactcaggctggagttcagtggtcctatcacggctcattgtagcctcaaactcccaggctcaagcgatcctaccacttcaaccttcccagtagctgggactacaggtaagcaccatggcacacagtgattattattattctttttttagtagagatggggcctctcrctatgttgccagggctggccttgaacttctgcacgcaagggaatttcctggcttggcctcccaaagtattggtattacagggataagccattgtgcccaccatctctggttcttaactttctgcctccctcttccacatttaaagaacacttgtaattacatgggctcttctagatactccaggataatattattttaaggtcagctgattagcaac

SEQ ID NO: 80224 - DNA, 1512 bp, Homo sapiens
tctgggtcctcccaggatcactctcttccaggaggcaatttaggaatggaatcgagtgtgaatcctgctttgcagtcttgcagcatttgcagatactaacagctcttcatttattcctgcacacctatattatttatttatttatttatttatttatttatttatttatttattttgagacagtctcgctctgttgcccaggctggagtgcaacggcgcaatctcggctcactgcaacctctgcctcccaggtttaagcgattcttctgcctcagcctcccaagtagctgggattacaggcatctgccaccacatctggctaatttttttttttttttttttttttttgkagttttagtagagacagggttttgccatgttggccgggctggtcttgaactcctgacctcaggtgatctgcccacctcggcctccgaaagtgctgcaattacagggtgagccactgcacccagcccagcacacctttattgaactctacttagctccagatttgggaacactaggaccttgcccctgcagtgcacagtgtgggtgtggaagagggggcagcttccaccgtgggtgagcttgctactccagccgttacgcacagagcctgcaaggctacgaacggagctggcaacggtgcaggcagagctggggcgatggctcgtcctgcagaacatctgtcggagaagtttggctgcatttaagagagttgccatccaaaatgcccgagattttaagtttggacccagaatgcagaaagtgtctattctctgagaaacatgtatgcttcattctcccacgtcagacatcagacaggcctggggttggatcctcctgcctccgcttttcctgtctctctggcctctgcgctgggtctcctctcctgtaagatagggctgtgcagaagtgagacccagaccaagtcactgaagagaggagccttcccagcccgcccttcttgcctcggagcctacgttggtggttgcacctgaacgacaaggcagagcctgtgcacctgccaaggtcaggccagcctccccacccagggccacatcccgctcggcaccctcaggtgcaggaaggtccctgcacctcctcatgacctggggcccccatgggcatgccggatgcatgcaaagtgctctgcaggaatcgagcttggctttgtcagcactaaggggcatctgcatggtgttctcctgttcatgcagcacacacttaccttgtctgcacacctgccccatgccgggtctgctgggtaggcatgggtgtgaggggtgtttccttgttcttcacttcttccaccccaagagcccagctgagtgtgccctgcaggcagtttgaccagggctatgtacagggcccaaactttactgagttggcctagccctccctttgtaaccaggagcctacctaaggtgctggggcacctcccacagtcttcccctgccagggagaattgtgagacatcaatgtctaaatagaaaaaataatcaggcatgc

SEQ ID NO: 80225 - DNA, 1512 bp, Homo sapiens
tctgggtcctcccaggatcactctcttccaggaggcaatttaggaatggaatcgagtgtgaatcctgctttgcagtcttgcagcatttgcagatactaacagctcttcatttattcctgcacacctatattatttatttatttatttatttatttatttatttatttatttattttgagacagtctcgctctgttgcccaggctggagtgcaacggcgcaatctcggctcactgcaacctctgcctcccaggtttaagcgattcttctgcctcagcctcccaagtagctgggattacaggcatctgccaccacatctggctaatttttttttttttttttttttttttggagttttagtagagacagggttttgccatgttggccgggctggtcttgaactcctgacctcaggtgatctgcccacctcggcctccgaaagtgctgcaattacagggtgagccactgcacccagcccagcacacctttattgaactctacttagctccagatttgggaacactaggaccttgcccctgcagtgcacagtgtgggtgtggaagagggggcagcttccaccgtgggtgagcttgctactccagccgttacgcacagagcctgcaaggctacgaacggagctggcaacggtgcaggcagagctggggcgatggctcgtcctgcagaacatctgtcggagaagtttggctgcatttaagagagttgccatccaaaatgcccgagattttaagtttggacccagaatgcagaaagtgtctattctctgagaaacatgtatgcttcattctcccacgtcagacatcagacaggcctggggttggatcctcctgcctccgcttttcctgtctctctggcctctgcgctgggtctcctctcctgtaagatagggctgtgcagaagtgagacccagaccaagtcactgaagagaggagccttcccagcccrcccttcttgcctcggagcctacgttggtggttgcacctgaacgacaaggcagagcctgtgcacctgccaaggtcaggccagcctccccacccagggccacatcccgctcggcaccctcaggtgcaggaaggtccctgcacctcctcatgacctggggcccccatgggcatgccggatgcatgcaaagtgctctgcaggaatcgagcttggctttgtcagcactaaggggcatctgcatggtgttctcctgttcatgcagcacacacttaccttgtctgcacacctgccccatgccgggtctgctgggtaggcatgggtgtgaggggtgtttccttgttcttcacttcttccaccccaagagcccagctgagtgtgccctgcaggcagtttgaccagggctatgtacagggcccaaactttactgagttggcctagccctccctttgtaaccaggagcctacctaaggtgctggggcacctcccacagtcttcccctgccagggagaattgtgagacatcaatgtctaaatagaaaaaataatcaggcatgc

SEQ ID NO: 80226 - DNA, 1512 bp, Homo sapiens
tctgggtcctcccaggatcactctcttccaggaggcaatttaggaatggaatcgagtgtgaatcctgctttgcagtcttgcagcatttgcagatactaacagctcttcatttattcctgcacacctatattatttatttatttatttatttatttatttatttatttatttattttgagacagtctcgctctgttgcccaggctggagtgcaacggcgcaatctcggctcactgcaacctctgcctcccaggtttaagcgattcttctgcctcagcctcccaagtagctgggattacaggcatctgccaccacatctggctaatttttttttttttttttttttttttggagttttagtagagacagggttttgccatgttggccgggctggtcttgaactcctgacctcaggtgatctgcccacctcggcctccgaaagtgctgcaattacagggtgagccactgcacccagcccagcacacctttattgaactctacttagctccagatttgggaacactaggaccttgcccctgcagtgcacagtgtgggtgtggaagagggggcagcttccaccgtgggtgagcttgctactccagccgttacgcacagagcctgcaaggctacgaacggagctggcaacggtgcaggcagagctggggcgatggctcgtcctgcagaacatctgtcggagaagtttggctgcatttaagagagttgccatccaaaatgcccgagattttaagtttggacccagaatgcagaaagtgtctattctctgagaaacatgtatgcttcattctcccacgtcagacatcagacaggcctggggttggatcctcctgcctccgcttttcctgtctctctggcctctgcgctgggtctcctctcctgtaagatagggctgtgcagaagtgagacccagaccaagtcactgaagagaggagccttcccagcccgcccttcttgcctcggagcctacgttggtggttgcacctgaacgacaaggcagagcctgtgcacctgccaaggtcaggccagcctccccacccagggccacatcccgctcggcacccycaggtgcaggaaggtccctgcacctcctcatgacctggggcccccatgggcatgccggatgcatgcaaagtgctctgcaggaatcgagcttggctttgtcagcactaaggggcatctgcatggtgttctcctgttcatgcagcacacacttaccttgtctgcacacctgccccatgccgggtctgctgggtaggcatgggtgtgaggggtgtttccttgttcttcacttcttccaccccaagagcccagctgagtgtgccctgcaggcagtttgaccagggctatgtacagggcccaaactttactgagttggcctagccctccctttgtaaccaggagcctacctaaggtgctggggcacctcccacagtcttcccctgccagggagaattgtgagacatcaatgtctaaatagaaaaaataatcaggcatgc

SEQ ID NO: 80227 - DNA, 866 bp, Homo sapiens
gaagcagatcttagctgcatttgtaacaagggccagtggaatgaaatggtgttttgctcacacatggtttgtatttttgttctttctctcgatctgcaagatactcatgacagcctatgaggggccaggcactgactgagctaacaacctgcggagctgagagctgggagctccaaaaacgccagcagggaagaagcagtgggaccaaagcaaccccttcctgcatgtgcctccaaaagagacctttccttttctaataggtgcgatttgtgacacttgacctaaggttaggtttagacaatggtaatytgggagacatttatctctctctctctttttttttttttagatggtgtctcgctctgttgcccggctggagtgcagtggcaccatctcagctcactgcaagctccgcctcctgggttcacgccattctcctgcctcagcctcctgagtagctgggactacaggcgcccgccaccatgcccggctaatttttgtatttttagtagagatggggtttcagaatgtttgccaggatggtcttggtctcttgaccttgtgatccgcgtgcctcccaaagtgctgggattacaggcatgagccactgcacctggcctatctcccctttctagtacttaaatgcttttttcactttctcaaccaagggagtcactttggttttcctgcctttggaagacgtaaaaatgagaattccatacctatggcataaagtgtatggcataaatttgaagagtgattcttttttaaaattactttttccctagttagaataaaaattattaaatgttgagatatttaaagaaaaataaaaataaatcacctataactcttttggcatattt

SEQ ID NO: 80228 - DNA, 866 bp, Homo sapiens
gaagcagatcttagctgcatttgtaacaagggccagtggaatgaaatggtgttttgctcacacatggtttgtatttttgttctttctctcgatctgcaagatactcatgacagcctatgaggggccaggcactgactgagctaacaacctgcggagctgagagctgggagctccaaaaacgccagcagggaagaagcagtgggaccaaagcaaccccttcctgcatgtgcctccaaaagagacctttccttttctaataggtgcgatttgtgacacttgacctaaggttaggtttagacaatggtaatctgggagacatttatctctctctctctytttttttttttagatggtgtctcgctctgttgcccggctggagtgcagtggcaccatctcagctcactgcaagctccgcctcctgggttcacgccattctcctgcctcagcctcctgagtagctgggactacaggcgcccgccaccatgcccggctaatttttgtatttttagtagagatggggtttcagaatgtttgccaggatggtcttggtctcttgaccttgtgatccgcgtgcctcccaaagtgctgggattacaggcatgagccactgcacctggcctatctcccctttctagtacttaaatgcttttttcactttctcaaccaagggagtcactttggttttcctgcctttggaagacgtaaaaatgagaattccatacctatggcataaagtgtatggcataaatttgaagagtgattcttttttaaaattactttttccctagttagaataaaaattattaaatgttgagatatttaaagaaaaataaaaataaatcacctataactcttttggcatattt

SEQ ID NO: 80229 - DNA, 866 bp, Homo sapiens
gaagcagatcttagctgcatttgtaacaagggccagtggaatgaaatggtgttttgctcacacatggtttgtatttttgttctttctctcgatctgcaagatactcatgacagcctatgaggggccaggcactgactgagctaacaacctgcggagctgagagctgggagctccaaaaacgccagcagggaagaagcagtgggaccaaagcaaccccttcctgcatgtgcctccaaaagagacctttccttttctaataggtgcgatttgtgacacttgacctaaggttaggtttagacaatggtaatctgggagacatttatctctctctctctttttttttttttagatggtgtctcgctctgttgccyggctggagtgcagtggcaccatctcagctcactgcaagctccgcctcctgggttcacgccattctcctgcctcagcctcctgagtagctgggactacaggcgcccgccaccatgcccggctaatttttgtatttttagtagagatggggtttcagaatgtttgccaggatggtcttggtctcttgaccttgtgatccgcgtgcctcccaaagtgctgggattacaggcatgagccactgcacctggcctatctcccctttctagtacttaaatgcttttttcactttctcaaccaagggagtcactttggttttcctgcctttggaagacgtaaaaatgagaattccatacctatggcataaagtgtatggcataaatttgaagagtgattcttttttaaaattactttttccctagttagaataaaaattattaaatgttgagatatttaaagaaaaataaaaataaatcacctataactcttttggcatattt

SEQ ID NO: 80230 - DNA, 1190 bp, Homo sapiens
catactaataatgacaccaatctaccatcttggacatgaagaagtgacactatttcttgatactttagttgaaaatatttgttaatactctgaagatgcaaaactctttgtggttttttgagcattctgtagatatggtatatttattttatcaattgggtaaaaagcatctataggataaagataattccttgttggaggtgattattaagtcaaaatcattacttatggactgaattttccagattatttctccaaattcgctttttcacttgcaatggtatgtgtgtatttaacgtaactctccagtgaacccatcactataaagtataaattagtatagaatctctatttattagaaaaaaacaaaactgctggccaaacacaacttagaaattaaaattctattgcacttggttttttggtggtgtccacacaaatatttaaaaagcattctgttaggttgcaatttgataataaaagtaataataaaagccatactcaagaatctgtctttttccattcatttgattatggacacctagtttgctcccatattgtagctactgggaacaatctggcagtaaacaagggtgtgcagatagctgtttaacttaccgatttcaaattagttggatatatacccaaaagtgggtttgctgaatcatatggtaattttatatttagttttctgatgagactttatactttttcttaatggcttatgttaatttacattcccatcaacaatgccaagggttctcttttccctatacccttgcaaacgyttgttaccttttgtctttttgatagtagcccttctaaaaagtttgaggttatatctcgttgtgggatacatactcagtggaatactactcatccttaaagaagggggaaatcctgtcatttgccacaatgtagataaacctaaggaacattgtactaaaacaaataagctgggcccagaatcacaaatactgcatgatctcacttatatgtggaatctaaaatagctgaactcatagaagtagagtgtgaaatgatggtgaccagagattgggggaggggagtgaatggggaaaagggagatgttcatcaaaggttacataaaaataattatattatttatacattattatgtataaataattttcagtgacctattgcacagaatggtgtccctaattaat

SEQ ID NO: 80231 - DNA, 775 bp, Homo sapiens
cagtttttcctaggttttcttctagaatttttatgatttcaggtcttaaagtctttaatccatcttaggttaaattttgaatagggtaagagatagggatccagtttcattcttctgcatgtgactagccagttttcccagcatcatttattgaatagggtgtcctttccctaatttatgtttttgaatgctttgatgagtgaccttttttttttaagagcacagatcagttattttataaatatctctccgtttgggtttgtgtgatgttttatcatgattggattcacattatttatttttgacaggaatattatggaagttatgttgtgtcctcactggtatatcataccaggagatacacactgtcacttgtcccaatattgatgttaactgatatcttccagatttctccactataaagttactaattttccctttgtgataaataagaaatgtctttgtaaatattctgttcattatcatgttttcatctataacattttgcatcattgatgattttctgacatcattccttctatatttattagttcttattctayattcaatatatagacacttccatcagcccaggaagctcctccgtgtctcttcccagcctgtctcccctgcagagacaactcttcctttcattgttttcactgtagcaggttattctccatttttctctttctctctccctctccctctctgtctgtgtgtgtgtgtgtgtgtgtgtgtgtgtgtgtgtgtgtgtgtgtatatctatatctat

SEQ ID NO: 80232 - DNA, 775 bp, Homo sapiens
cagtttttcctaggttttcttctagaatttttatgatttcaggtcttaaagtctttaatccatcttaggttaaattttgaatagggtaagagatagggatccagtttcattcttctgcatgtgactagccagttttcccagcatcatttattgaatagggtgtcctttccctaatttatgtttttgaatgctttgatgagtgaccttttttttttaagagcacagatcagttattttataaatatctctccgtttgggtttgtgtgatgttttatcatgattggattcacattatttatttttgacaggaatattatggaagttatgttgtgtcctcactggtatatcataccaggagatacacactgtcacttgtcccaatattgatgttaactgatatcttccagatttctccactataaagttactaattttccctttgtgataaataagaaatgtctttgtaaatattctgttcattatcatgttttcatctataacattttgcatcattgatgattttctgacatcattccttctatatttattagttcttattctatattcaatatatagacacttccatcagcccaggaagctcctccgtgtctcttcccagcctgtctcccctgcagagacaactcttcctttcattgttttcactgtagcaggttattctccatttttctctttctctctccctctccctctctgtctgtgtgtgtgtgtgtgtgtgtgtgtgtgtgtgtgtgtgtgtgtgtrtatctatatctat

SEQ ID NO: 80233 - DNA, 775 bp, Homo sapiens
cagtttttcctaggttttcttctagaatttttatgatttcaggtcttaaagtctttaatccatcttaggttaaattttgaatagggtaagagatagggatccagtttcattcttctgcatgtgactagccagttttcccagcatcatttattgaatagggtgtcctttccctaatttatgtttttgaatgctttgatgagtgaccttttttttttaagagcacagatcagttattttataaatatctctccgtttgggtttgtgtgatgttttatcatgattggattcacattatttatttttgacaggaatattatggaagttatgttgtgtcctcactggtatatcataccaggagatacacactgtcacttgtcccaatattgatgttaactgatatcttccagatttctccactataaagttactaattttccctttgtgataaataagaaatgtctttgtaaatattctgttcattatcatgttttcatctataacattttgcatcattgatgattttctgacatcattccttctatatttattagttcttattctatattcaatatatagacacttccatcagcccaggaagctcctccgtgtctcttcccagcctgtctcccctgcagagacaactcttcctttcattgttttcactgtagcaggttattctccatttttctctttctctctccctctccctctctgtctgtgtgtgtgtgtgtgtgtgtgtgtgtgtgtgtgtgtgtgtgtgtatrtctatatctat

SEQ ID NO: 80234 - DNA, 775 bp, Homo sapiens
cagtttttcctaggttttcttctagaatttttatgatttcaggtcttaaagtctttaatccatcttaggttaaattttgaatagggtaagagatagggatccagtttcattcttctgcatgtgactagccagttttcccagcatcatttattgaatagggtgtcctttccctaatttatgtttttgaatgctttgatgagtgaccttttttttttaagagcacagatcagttattttataaatatctctccgtttgggtttgtgtgatgttttatcatgattggattcacattatttatttttgacaggaatattatggaagttatgttgtgtcctcactggtatatcataccaggagatacacactgtcacttgtcccaatattgatgttaactgatatcttccagatttctccactataaagttactaattttccctttgtgataaataagaaatgtctttgtaaatattctgttcattatcatgttttcatctataacattttgcatcattgatgattttctgacatcattccttctatatttattagttcttattctatattcaatatatagacacttccatcagcccaggaagctcctccgtgtctcttcccagcctgtctcccctgcagagacaactcttcctttcattgttttcactgtagcaggttattctccatttttctctttctctctccctctccctctctgtctgtgtgtgtgtgtgtgtgtgtgtgtgtgtgtgtgtgtgtgtgtgtatatstatatctat

SEQ ID NO: 80235 - DNA, 1200 bp, Homo sapiens
aatattctttgtattttatttgcgtgacaagagagtccttatttatttactttaatggcaggaaaacacaagaaaataactctgtccttatagttgagtatagaacatagtaaaatgtaatataaattgggccatgagcttagttgatcagttgatagccaagactctttattctgtgttcttattaacataaaaaggagatttatgacacagtaaatgaataaacaaatactgctaagttcaagtaatgtgctctgtggattttctttcattaaaagctggtcttyctggaggaacactcatcattctgattttgtatgctctctttttatttatttatttatttgagatggagtttccctctgttgcccaggctggagagcagtggcgccatcttggctcactgcaacctccacctcccaggttcaagcaattctcctggcttagcctcccaagtagctggaattacaggtgcccaccaccacactcggctaatttttgtagtttttagtacagacggggtttcaccatgttggccaggctggtcttgaactcctggcctcaggtgatctgcccgcttcggcctcccaaagtgctgggattacaagcgtgagccacggtgtctggcctatattctctctttttaaatacgggccaatgttattttataccttggctgtctcccttccccaaacatctgaaattcaggtgaaatgaatctgaaatgacccaaaagcaatacaataccgaagtgaatatgaaagtggccgaggggatagatcagcccagtggagtcctcctcattgtgggggcgtgagggtgttggttggttgggatattacctaaaggaagcccagtcctaaagcagacgccagtgctgcctccctgagccactgcccagcctcctggaaagcccagggcactgctgccagctggccctctctgagcctggctctgagagcaggccgactgtgcacgggttcagaggcatccatcacctggagaaggcacagaaggcctgctgcggtagggctggatttgagtccaggtaggtggagaggagaattacacattaggaaaccatgtgagctaaggcaggaacacacgaaatctcttccaggacagggaggagccctgttgtgagagcctgagaagggaagaaaaagctgtagagaatagcaagggcagatgatggaagtg

SEQ ID NO: 80236 - DNA, 1046 bp, Homo sapiens
tgtggagtgggaagagaccaaacgcaaaatcctaggaatccaatttaaagagcaggaacaattggggcaggggaaggggagagaaagagaattgttaggaaagtaagacaaaactcaggataagagagctgtgttgtggaaatcaaagatagagttgtgctatggagagattaaataaaatgaggtcatcagtgaccttggcaagaccagttcctgggaacagaatgcacacaaatctgatgattgttcttgaaaagggacagacatgagtaactggagtcagcaagagtaaatggttgtattaagcaaatgaatgaagttgtctcagatcctcttatcttgtagtgttgtgcctagcatatttgacatgcacagcatcttttttgtttgtttatttgtttgtttttgagacagggtctcactctgtcacccaggttggagtgcagtggcgygatctcagctcactgcaacttccgcctcccaagttcaagtaattctcgtgctttatcctcccaagtagctgggattacaggtgtgcaccaccatgcctggctgatttttgtatttttactagagatggggttttgccatgttggctaggctggtctcgaactcctgacctcaggtgatctactgccttagcctcccaaagtgccaagattacaggcatgagccactgtgcccagcccagtgtatcatttttaattacttccgtcctgtctgcaacattagttttggaaataagtactaataatggctagaaaagaaaaaaaagatcatataatcattccaagaaaataaattaatgaataaattaaatattacagtacaccaaagaagggggaagtaatggaataataccttttatttttcctttaaatttatttttaatttttgtgggtacatagattaatatatttatggggtacatgagatgttgaaataataccttttagtttcattaatatgttttctgaataaagacaaaaaacttatatgcacttattgatctgttgcagtcatttctagttgtttctagtttcagt

SEQ ID NO: 80237 - DNA, 1046 bp, Homo sapiens
tgtggagtgggaagagaccaaacgcaaaatcctaggaatccaatttaaagagcaggaacaattggggcaggggaaggggagagaaagagaattgttaggaaagtaagacaaaactcaggataagagagctgtgttgtggaaatcaaagatagagttgtgctatggagagattaaataaaatgaggtcatcagtgaccttggcaagaccagttcctgggaacagaatgcacacaaatctgatgattgttcttgaaaagggacagacatgagtaactggagtcagcaagagtaaatggttgtattaagcaaatgaatgaagttgtctcagatcctcttatcttgtagtgttgtgcctagcatatttgacatgcacagcatcttttttgtttgtttatttgtttgtttttgagacagggtctcactctgtcacccaggttggagtgcagtggcgcgatctcagctcactgcaacttccgcctcccaagttcaagtaattctcgtgctttatcctcccaagtagctgggattacaggtgtgcaccaccatgcctggctgatttttgtatttttactagagatggggttttgccatgttggctaggctggtctcgaactcctgacctcaggtgatctactgccttagcctcccaaagtgccaagattacaggcatgagccactgtgcccagcccagtgtatcatttttaattacttccgtcctgtctgcaacattagttttggaaataagtaytaataatggctagaaaagaaaaaaaagatcatataatcattccaagaaaataaattaatgaataaattaaatattacagtacaccaaagaagggggaagtaatggaataataccttttatttttcctttaaatttatttttaatttttgtgggtacatagattaatatatttatggggtacatgagatgttgaaataataccttttagtttcattaatatgttttctgaataaagacaaaaaacttatatgcacttattgatctgttgcagtcatttctagttgtttctagtttcagt

SEQ ID NO: 80238 - DNA, 1046 bp, Homo sapiens
tgtggagtgggaagagaccaaacgcaaaatcctaggaatccaatttaaagagcaggaacaattggggcaggggaaggggagagaaagagaattgttaggaaagtaagacaaaactcaggataagagagctgtgttgtggaaatcaaagatagagttgtgctatggagagattaaataaaatgaggtcatcagtgaccttggcaagaccagttcctgggaacagaatgcacacaaatctgatgattgttcttgaaaagggacagacatgagtaactggagtcagcaagagtaaatggttgtattaagcaaatgaatgaagttgtctcagatcctcttatcttgtagtgttgtgcctagcatatttgacatgcacagcatcttttttgtttgtttatttgtttgtttttgagacagggtctcactctgtcacccaggttggagtgcagtggcgcgatctcagctcactgcaacttccgcctcccaagttcaagtaattctcgtgctttatcctcccaagtagctgggattacaggtgtgcaccaccatgcctggctgatttttgtatttttactagagatggggttttgccatgttggctaggctggtctcgaactcctgacctcaggtgatctactgccttagcctcccaaagtgccaagattacaggcatgagccactgtgcccagcccagtgtatcatttttaattacttccgtcctgtctgcaacattagttttggaaataagtactaataatggctagaaaagaaaaaaaagatcatataatcattccaagaaaataaattaatgaataaattaaatattacagtacaccaaagaagggggaagtaatggaataataccttttatttttcctttaaatttatttttaatttttrtgggtacatagattaatatatttatggggtacatgagatgttgaaataataccttttagtttcattaatatgttttctgaataaagacaaaaaacttatatgcacttattgatctgttgcagtcatttctagttgtttctagtttcagt

SEQ ID NO: 80239 - DNA, 555 bp, Homo sapiens
cagtgactcaataaggtttaattgcattcctgtaaacatatggatggttcaagaattacttctttgtaaataatataaattggtaagactctgaagtgaatgacacagatttgatatagtaagacatttgaatttcagcttctctgagcactgatactatttcatcattgaaatacaaaattatggaaatgctgaggaagaatgaatgcttatttataggcacaaatcaccaatattaagctgttatcaaaatctttacctaaatttgttggttgcaaagttctgtaataggcttaaaaatgtgcagtgttcagaaagtaaattcttatttgatttgccagatgcaaataatgtatttgttacgttcattcaattattaaagaaaatttatatcattcttcctatcttgtagggttgatatatattacttggaaatgtgagacaaacgaaatgagtgtaaaccctaagaatatccattggtggactaaaatgtaawttttaatttctgtattctcatgtagcttaactagcatttagcatgtttgtgaaactcct

SEQ ID NO: 80240 - DNA, 422 bp, Homo sapiens
gcagccctgctgccgctagagcccaccagccacctccccgtgastgtcacgtgcctgtgtgtacaaatgtatcgaactgactgtatttctgtagttacagtgttcaaaatagtagcacccttttacttagtgtttactatgtgccaggctctgtgctaaccgctttcatgcattacttcattttatccacaattgtgtaaggtaggtcctttttttattattttttttatttttttgagaccaagtctcgctgtcacccaggctggagggcaggggcacgctctcggctcactgcaacctccacctgcccggttcaaacgattctcctgcctcagcctcccgagtagctgggactacaggtgcgcaccaccatgcccggctaatttttgtaattttagtagagacggggtttcaccatgttg

SEQ ID NO: 80241 - DNA, 547 bp, Homo sapiens
gaccctgtcaaaattaaaaaaaaaaaaaaggtacagaaataatgaatatatgtgagctacaagttaagcagtctgaatatttccttctctcacttggaatattattactcatctttatttatttatttatttwtgcaatggagtctcgctctgccacccaggctggagtgcaagagcgctaccttggcccactgcaacctctgcgtcctgggttcaagtgattcttctgcctcagcctcctgagtagctgggattacaggtgcccaccaccatacctggctaatttttgtatttttactagagatggggtttcaccatgttggccagctggtctcgaactcctgacctcaggtgatctgcccgcctcagcctcccaaagtgctgggattacaggcgtgagccgcgcacccagcctattgcttatctttaagtcagtctatagttgtaaataaatcagctagatttaactgggtgtttgtgttttaaactacaaagttttgcaggataaagaaaaaggaactcaatgtatggtcttgagactggactg

SEQ ID NO: 80242 - DNA, 680 bp, Homo sapiens
ttgaggaggggtcctaggccttggggagggttcctggggccctggggaggggtcctgggtcctgrgggtttggaggagaggtcctgggtccacaggctttcctatgaaccagtcatgtcctgttgtgcctctgatgctctggacagtgtttggaaacgcttgttggtctcagtaatgagtggtttgtggccgggtgcagtggctcacacctgtaatcccagcactttgggaggccgaggcaggtggatcacgaggtcaggagttcaagactagcctgaccaatatggtgaaaccctgtctctactaaaaatacaaaaattagctgggcatggtggcgggcacctgtagtcccagccactcgggaggctgaggcaggagaatcacttgaacctgggaggcggaggttgcagtgagctgagatcacgcccctgcactccagcctgggtgacagagtgagactccatctcaataaaaaaaaaaaagagtggtttgtaagaaggcagacgtctctctcaggatttttctcaaggcccaagtcctccagggcgagcctgagcagtgcctttggtgggggtgatgggctggagccaggaaggggagacaggctgggggtggcagtgccgctcctcacgccctccttcccttccacagtcgttgcagttcgataaggagcagatggt

SEQ ID NO: 80243 - DNA, 680 bp, Homo sapiens
ttgaggaggggtcctaggccttggggagggttcctggggccctggggaggggtcctgggtcctgagggtttggaggagaggtcctgggtccacaggctttcctatgaaccagtcatgtcctgttgtgcctctgatgctctggacagtgtttggaaacgcttgttggtctcagtaatgagtggtttgtggccgggtgcagtggctcacacctgtaatcccagcactttgggaggccgaggcaggtggatcacgaggtcaggagttcaagactagcctgaccaatatggtgaaaccctgtctctactaaaaatacaaaaattagctgggcatggtggcgggcacctgtagtcccagccactcgggaggctgaggcaggagaatcacttgaaccygggaggcggaggttgcagtgagctgagatcacgcccctgcactccagcctgggtgacagagtgagactccatctcaataaaaaaaaaaaagagtggtttgtaagaaggcagacgtctctctcaggatttttctcaaggcccaagtcctccagggcgagcctgagcagtgcctttggtgggggtgatgggctggagccaggaaggggagacaggctgggggtggcagtgccgctcctcacgccctccttcccttccacagtcgttgcagttcgataaggagcagatggt

SEQ ID NO: 80244 - DNA, 680 bp, Homo sapiens
ttgaggaggggtcctaggccttggggagggttcctggggccctggggaggggtcctgggtcctgagggtttggaggagaggtcctgggtccacaggctttcctatgaaccagtcatgtcctgttgtgcctctgatgctctggacagtgtttggaaacgcttgttggtctcagtaatgagtggtttgtggccgggtgcagtggctcacacctgtaatcccagcactttgggaggccgaggcaggtggatcacgaggtcaggagttcaagactagcctgaccaatatggtgaaaccctgtctctactaaaaatacaaaaattagctgggcatggtggcgggcacctgtagtcccagccactcgggaggctgaggcaggagaatcacttgaacctgggaggcrgaggttgcagtgagctgagatcacgcccctgcactccagcctgggtgacagagtgagactccatctcaataaaaaaaaaaaagagtggtttgtaagaaggcagacgtctctctcaggatttttctcaaggcccaagtcctccagggcgagcctgagcagtgcctttggtgggggtgatgggctggagccaggaaggggagacaggctgggggtggcagtgccgctcctcacgccctccttcccttccacagtcgttgcagttcgataaggagcagatggt

SEQ ID NO: 80245 - DNA, 616 bp, Homo sapiens
gtgtgaggtgtgagcatgtgtgtgtgcagcgtgtggagtgtktgtgtgcatggtgtgtgggatgtgagcatatgtgtgcatgcagtgtggggtgtatgtgtgcatgcagtgtgaggtgtgagcacatgtgcatgtgtggtgtggggtgtgaacacgtggggtgtgagcatgtgcgtgtggggtgtgagcacgtgtgtgtgtggtgtgtgggatgtgaacatgtgcacgtggtgtgtgttacatgagtgtgtgtatgtgatgtgtggtgcgtgagcatgtgtgtggtatttattacaactggtgctgcttgcttgccacagatggtgatttatagccattatctgcaggtcagattttcttctgtatttttgaagcattgaactgaagagatgattttgtttgtcccaactatccccgtgtgtcatcgtgtgcatgctgtggtcggttaattcaacttctttaacaaaaaggaaggttgtgagactgtgtcagacagctggtgtctggtgtgtgcagccacacagcctcatgcctgccggcaccacaggaagtgaggggggtcagggcctgtcccatgaccaagcgcccgttccatcttggcccttaggaaaggatc

SEQ ID NO: 80246 - DNA, 616 bp, Homo sapiens
gtgtgaggtgtgagcatgtgtgtgtgcagcgtgtggagtgtttgtgtgcatggtgtgtgggatgtgagcatatgtgtgcatgcagtgtggggtgtatgtgtgcatgcagtgtgaggtgtgagcacaygtgcatgtgtggtgtggggtgtgaacacgtggggtgtgagcatgtgcgtgtggggtgtgagcacgtgtgtgtgtggtgtgtgggatgtgaacatgtgcacgtggtgtgtgttacatgagtgtgtgtatgtgatgtgtggtgcgtgagcatgtgtgtggtatttattacaactggtgctgcttgcttgccacagatggtgatttatagccattatctgcaggtcagattttcttctgtatttttgaagcattgaactgaagagatgattttgtttgtcccaactatccccgtgtgtcatcgtgtgcatgctgtggtcggttaattcaacttctttaacaaaaaggaaggttgtgagactgtgtcagacagctggtgtctggtgtgtgcagccacacagcctcatgcctgccggcaccacaggaagtgaggggggtcagggcctgtcccatgaccaagcgcccgttccatcttggcccttaggaaaggatc

SEQ ID NO: 80247 - DNA, 780 bp, Homo sapiens
tttttagtagagagcagggtttcaccatgttgcccaggctggtcttgaactcctgagttcaagcgatctgcccgcctctacctcccacagtgctgggattccaggcgtaagccgccacgcccagcaactccgtttcttacttgttggctcacattctcctgagaagtcctccctcaaccatcggcctgaaatagcagcgagcctccccagggttgcctctgccttttcttgactctttctgtcaccttctatgcttgttgtctggtccccactagaatataccttctgtaagagcagggatttgggacagtgcctagaatagtacttgcagacagtaggctacgataaatatgaatgacggccccatgcagatggtagcccctctcgctcgaacgcttcacccagttttattttcttttcatcagttaccgccctctgaaggtatccacacacaaacatgaaactggaccaaagcagggaccccccrcacgcagaatagtgctgggctcgcgtaaggcacctcagtgggtccatcagctgatgcatggacagacaaaatgggtgtatccagacactggagtatcgtgcagcgaggaaacgtgctgagtgtggatggaccttaaacacaccatgcaagtgaaaaggcgtcacagaaggccacatacgatatgatcccatttctatgaaatgtccagaagaggcacattcataaagacagaaggtgactgagtggttgtcgggctgggtggaggggatagggagtgaatgcaagaaggatcc

SEQ ID NO: 80248 - DNA, 780 bp, Homo sapiens
tttttagtagagagcagggtttcaccatgttgcccaggctggtcttgaactcctgagttcaagcgatctgcccgcctctacctcccacagtgctgggattccaggcgtaagccgccacgcccagcaactccgtttcttacttgttggctcacattctcctgagaagtcctccctcaaccatcggcctgaaatagcagcgagcctccccagggttgcctctgccttttcttgactctttctgtcaccttctatgcttgttgtctggtccccactagaatataccttctgtaagagcagggatttgggacagtgcctagaatagtacttgcagacagtaggctacgataaatatgaatgacggccccatgcagatggtagcccctctcgctcgaacgcttcacccagttttattttcttttcatcagttaccgccctctgaaggtatccacacacaaacatgaaactggaccaaagcagggaccccccgcacgcagaatagtgctgggctcgcgtaaggcacctcagtgggtccatcagctgatgcatggacagacaaaatgggtgtatccagacactggagtatcgtgcagcgaggaaacgtgctgagtgtggatggaccttaaacacaccatgcaagtgaaaaggcgtcacagaaggccacataygatatgatcccatttctatgaaatgtccagaagaggcacattcataaagacagaaggtgactgagtggttgtcgggctgggtggaggggatagggagtgaatgcaagaaggatcc

SEQ ID NO: 80249 - DNA, 1367 bp, Homo sapiens
gccctcgaatggagacatcaccagtgaaggggcatttcttgtcaatgtaggtgccctcagtagcctctttgggtgtcttgaagcccagaccaatgttcttgtagtaccgcaggagcttctccttgccagtttctcccagcaggaccctcttcttgttttgaaagatggtcggctgcttttggtaggcacgctcagtctgaatgtccgccatcttcccggccactgaaaaaaggtgctcttccagtttctaactccctggactccctcattggaactgaagctcacagatgtttcagctggactagtttagactttgctgtattttaaaaggcagtgttgatgctccaggattcaaatacttaatcattttgttttggaaccattagctttgtagcagaggaatgtactcagcagaatcagcagaactgaagatttaattcggcaaattaaacctgtgttggcactttaggagttgggagtgttcaaggtggtgggaggcagacggggaatgagtctctgtcttcaaggatctcgccatgtaatgggcacacacgcaatggcagacatgacgtgctgtggtggaggccacgtgaggtacagtgatggcagagggggtagacgagacactttacctgcggggccaggagggtctgcacgcgcaggcacacaccgtcggttcctttacctgaggggccaggagggtctgcacgcgtaggcacacacggtcggttccatataatcaccccacccccgcaaggcagaagcaaagacatcacaaagcaaaacgcaagttttcttttgctaggaaattttcaagaggaccagatgtacagggtaccagtattcagtggcgcagtcgagtccacattccaccgcgtgtagtcctccgtgccagtttgtaattcatctgtcaaaggggcaagcctgtgataagcagccatcattttgctgatgctcctccccttgttttgtgggtgtcttctccattcccaggtgggcgtggccggctgacccccagttctcttggagtgtgtctgggattgtagctgaggggcaggcttggtggagatcgcagtgtttttcctggaaagtgattttcagagggttctgtgctgtgtgtaaggacaggtgtgtagttcagatccctgcctaggctctaaggcccatttatcacccacccacccrgaaaatccagggatgagagatgttactagatgatcatagacgcaaacatgagattgagaattcgttgcacacaggattagcttttgaccagccttggtaacttccttcacttctgtgcttcagacattgctttaatctttaaatatttttatgtgccaggcaccctgagtcaagacatctag

SEQ ID NO: 80250 - DNA, 1317 bp, Homo sapiens
actggtaggtacggagagctctatgcaggaaggtcgtgttgggtattctgtgtttttgctgattctgtatttgtctatctggcatccatagatcacaaggccaaactaatggccaaagttgtttaaacctcccgagagccaaagtccattctctgaaccacctcctttatctaactctcacacatcaagccaacatttcacctgccctaaatcaacccaggaccaggtaccagacaactaaggacagccctaaagcccactggaattattcaaattggccaattctaacctgtttctcctgccctgccttgcctttcccaaggaaaacatagtaagagctctggaccatgctttcccctcgctccttctgcctcctgactgaaactggtgcttccctctgcggccctgtgtggtgcagaatgccctcttgtcttgggaaatgtaagtaataaactttcctttcaatgacattgaccactctgtgtagtcactgagtcacctttataaattacatcaatggccacaaatcaactggatactaccactactattgccaccagacacaaagaactagaacccaacccaacttaatcctaaatggtggcttacatcactgcttacaaactctcaccttccgtattagatagcaaactcctttaaaaacttctaccactcaacaaattcaatgctatgtataacagcagttacttgataagctgaattttacacagacaagtagataattagttgacatttttggcctgaatcttagcgattgtttaattattccctctgtcaaaaaaacaaaagagggggaggggtgattaaactctaataccgcacagtttgacaacttcctataaagttaaatataaacttaaaatatgacccagcaatcacaacctagttattgatccaagttaactgaaaaccaggttcacataaaaacctgtacacaaatatttatagcagctttgtgtataagcatccaaaactggaagcaacaacgtcttttgacaggtgactgaataaagaaactgtggtataccatagaatggacrattagtcaacaacaaaaagcaacaagccattgattcttgcaacaatatgagtgaatcttaaatacattttgctaggtgaaagactacaaattatatgattccactcacgtgacattttggaaaaggcaaaactacagggatgaaaaacagattactagttatcagggtttgcagtggaaggtgtttgactacagggagatgcacagggaaacttttaggataacggaattattctatgtgttactagggtggaaca

SEQ ID NO: 80251 - DNA, 734 bp, Homo sapiens
ccccmaaatgaacttaggaattctggtattttacggaatattggaggaatgtaatttatagatagagtagtctattgtacttttaaatctatactagagctgatacctctcccagagtaattgtggacaagctcttcttctcttcccttgggaacatgaaacccaaaaagcccgacttgataacttaaatagcagcattagagctttcttgataaaaatcaattcccataagcatagtagatctcctgcatgaagcagactctcgaaacccaggggactcattttcgtctgccttctcacacttacgctatggtaagaatgaatccctgctaaaaaaccaagacctactgacattgattgacaaaagacagtatgagatgttgataagtggtcaatctgaatagcatcaaagtgaaataaaacaatatattaaactcatatataagagacaggaggtgtttggacaagagagtatctgggcataattttctggtgatttggagatgagctagcaatagcaaaacatactgcaatgttagtcaattcaagggagaaggataaatctgataaacccacctttgattcttccggaagcagactctgaggttgaggttagcatggaagagtttatcagagaatcgctatatgtagaagggaagaaaaggaaacaggattgacgagagggagacgctggactgtaatgcagtctgaacagaggcctcaaagggagctct

SEQ ID NO: 80252 - DNA, 619 bp, Homo sapiens
acagctctatgaaaaagttgccctgcttctgacgaatttaggtgagtggaatcctttctatttcatagaactgtactgtgggctagagagtatrgttcaaagattcctttctctaatactgctggaaagaaatagtccctttattttaaaattcatacaacaagttttttctttgccttcaacagaataatttaaatatgtctagtaatttttctatataaatctttaaaatctgtcacaaacattatctgtcatgagctaatgtaatttaaggtagattttctcttcatgcacaaaaaatagcattacaaaagtacatttgtataaagtatccagtataatttaggaaagtgttcatttgctattgcctataatttttgtttaattaaaaatgtatcaagtttttatggtatataaactcacagcaaagttagtttctttgaagactggaaggccaggcatggtggctcacatctgtaatcccagcactttgggaagctttggcaggaggattccttgagtccaggagttcaagaccagcctggataaaataacaagaccctgtctctacaaaaaaattaaaaaattagccaggcatggtggcatgtacctgtagtct

SEQ ID NO: 80253 - DNA, 808 bp, Homo sapiens
cgcctataatcccattactttgggaggccgaggcgggcggatcacgaggtcaggagatcgagaccatcctggctaacatggtgaaaccccgtctctactaaaaatacgaaaaattagctgggcatggyggtgggcgcctgtagtctcagctacttgggaggctgaggcaggagaatggcgtgaacccgggaggcggagctcgcagtgagtggagatcacgccactgcactccagcctgggcgatagagcgagactccgtctcggggggaaaaaaaaaaaaaagacttatctatactgatttactaaaagacaggagacaaaatatggacttcactttcatcataggaacaaaatcacttggtatactccattatgacacccacatggtccaaatccatgccctggccaaatgagggaaaaaaccctcttttttgttgtgctggcactagcacctgactgaagagctattctcctttgaaatttttggagacttttagcaaaccacatcagtcgcctccctatgatttcaaggtagcattatataatagcagtgaactggtctcactacctctggggtgtgaaccctccaatctactctatattcttccatgatgttatcccttctagagcataactttggttactatcattgcattatctgaaatctacaaataatggtttccttaatgcttattgggctagtccaaactcctgtgcctgaatggaacaagatcatttttgttaattagctactaacctgtttccttctccttcaaaactttgtttacactattcatgcttttatttt

SEQ ID NO: 80254 - DNA, 613 bp, Homo sapiens
ttccaggagactgaaatgctcactgaattctcaagggttagctacctgttaccctcactggaagacctacgctattattaattatcccaaaatgattcccagaaccatctgtaacatccaaacagcagccagatgaacgacggactttaacgtctgaaacgaagcaactgcatttgraacttctaacacaggccacgagctgaatttacaaatggaacagtattgttttctgtgagattgcacacgcctgcattcaagtcttcatctaggaaaccctctggggatttcttttcccctaaaaattcattagaataatcaatcgtatgacacatcacagcttgtactgcagccgtctcatctttaacaagttcaggaaaatgtgtcaacacagatatttgcaaattctaaagaaagacctgttcaagaccaggcactgtggctcacgcctgtaatcccagcatttcaggaggctgcatcatttgaggccaggaattcaagaccagcctggccaacatggcaaaaccccatctctactaaaaatacaaaaactagctgggcgtggtggtgtacacctgtaatcccagctactcaggaggccaaggcaggagaatcg

SEQ ID NO: 80255 - DNA, 613 bp, Homo sapiens
ttccaggagactgaaatgctcactgaattctcaagggttagctacctgttaccctcactggaagacctacgctattattaattatcccaaaatgattcccagaaccatctgtaacatccaaacagcagccagatgaacgacggactttaacgtctgaaacgaagcaactgcatttggaacttctaacacaggccacgagctgaatttacaaatggaacagtattgttttctgtgagattgcacacgcctgcattcaagtcttcatctaggaaaccctctggggatttcttttcccytaaaaattcattagaataatcaatcgtatgacacatcacagcttgtactgcagccgtctcatctttaacaagttcaggaaaatgtgtcaacacagatatttgcaaattctaaagaaagacctgttcaagaccaggcactgtggctcacgcctgtaatcccagcatttcaggaggctgcatcatttgaggccaggaattcaagaccagcctggccaacatggcaaaaccccatctctactaaaaatacaaaaactagctgggcgtggtggtgtacacctgtaatcccagctactcaggaggccaaggcaggagaatcg

SEQ ID NO: 80256 - DNA, 1421 bp, Homo sapiens
cagatatgaaccactgtgcccggctgagaaaggactcttaacagcggacgctccctggggaggcagcccacagactctgcagaattatgtggcatccttgctgatggtcacgcagctcacaaaaggcatcgggatactctcctctgctaagccgagtccctgccaccccacactactgccaccaatcaattctgagtcaccatctttcagaagaaaagataatcgggcatgctgtgaaacagaacactttaccagatggcctcaaaaagcacacggttcgagagtgaaagaccaaaaccatccagctggtttagttatagaagatgttaatcatggccaatgaccagcacagctctggtggttgcacacttttcctacaataatattgatctttgtatctgactcttacaataaaatgcatgcttcatctgtcagtcagcctagtgagttaccatgaaaaaaatatggtccctcattactacacattgtcaataaatttaaaatcccggccagctacggtgggtcatgactataatcccagcacttttggaggccaaggtgggagaactgcctgagccaaggagttcaagaccagcctgggcaatataggaagaccccatctctacttaaaaatatatttttaaaattctgcataaatattaataacagactgttgctgctttaggcaagaaagccttgattgttcccgttttgatgagaagcttctgaagggtacagcatgtgctcgtgggttctttacccaggttaggaacctgatttcatcttttcttgaggattctgggactcattcaggctctccgcccataaaagcgatgcccacagcaagtgaggaagactctatcttctaatctacaatgaaaccaccccaggctcctaagcttccgctgttctccaatctgcttggcctcactacactggttctttctcagccttgccatgcgccacccccgtggctgtgttggaaggaagcgccaaatctcctgtggaatgaaaggcttttcctccaagggccactatgtcagggggtattgaaaagtgttttcaggtaaaaggtcgtctgaatgcgtggttaacgtaacagaagataccaagccaggcttttattttgcttttcattttacacaccatatatcacatcaagtgaaaaaaaaaaattcttttccaaaaagatttgtatttcagtatgtttaaaacctttcaccttttaaggtaagtaataaataaaagttacgtgcaccctagaagctgcctgcctcasatgtgtgacgatctttcatgccccatgatctactttatagctttaaactgaaccatgagttgaactccccaaattcctcaaaaaatggtcaggaccctttctgcttgttgggtagagaaagagcacttaaacagctgctcct

SEQ ID NO: 80257 - DNA, 550 bp, Homo sapiens
attgaacagtattttttatttggaatcagcaggatgattcaaagaccatctgtaatcttaagccacttatttaaattctctgaggtcctattttcacatgtataaaatgaattacatacaattgctttacattctataaaagattgctatgaaaatcaaataacaaaatataaattacagtggtttataaaaaataatatattttttcattaaaaccaataagatttttgtattcatctattttcactatgaattatgttttctctttgttttatactttattctcatagacatattttaaaaattgtaatgtttgtattactctgttgttcccagaactttggtgatcaagaagaaatgaaagtctycccctcctagggacttgatctcctccacagaaggacctttcagtggtgtgtaatccctcatgagcccctgttctttctcatctcaagacagtgtgtttgcaggactcctctctcacctcctgaatgggacccctcgagggcagtgaaggtttcttatcttctgctgtattccaaacacccag

SEQ ID NO: 80258 - DNA, 1954 bp, Homo sapiens
ccttggacaaccaagaaaatctttctcgaatatttcaaggaaggattgttttagactgtgttagttacttaattcacttacatgtgataaatgttgtaggtatcrggatggaaaataaagctattctctttcactccaggcaaaatcatctcttacctctgcatctgagcgtggcactactcccgctcacatgaaatgctgttcttggaagaaatacagatcaccttctacacctgtggtatctctgcagctctgtcactaccaagttattggcaataaggaacacacagggccaacatgagaaaccacactgagcctttctgacacgtcagctacttttatatcactccttgcttagagcaagacataaatgggctcttaatccaaatcagtacatttttgagaaccatttggcaacttcttaaacaggacaagttacatcttagctggtacaaccttcatagagagaatccaggtttgggtctaccttgagaggccatgtagagtataacagaactggactgtgagtcaggagacccccaactctgctactaactggcagtgtgaccttgggaaggtgctgaatcacctgagaaacacattgttttatcagctaaaatgtttttaaagatactactactgtcccttaatgacaggtctgtgttctgagaaatatgtcatcaggcaattttgtccttgtgcaaacatcatagagtgaactcacacaaacctagatggtatagcccactacacacctaggctacatggtatagcctattgctcccagtctacaaacctgtacagcatgttactgtgctgagtcctgcaagcaattggaacaccatggctgcaatttcactagatgacaggaattttcatctccattataatcttgtgggtccaccaaatgtagtttgtccttgactgaaacgttgctaggcaatgcatgactatatatgattctatatctattttgtggcaatcttattagataaagatagtattataataaagcgaatactttgggctaggatcttctatggcattaactttttgatcttccctcccagattgaaaagactgctcagagatttgtgtgtccttttccctgccaagactcatagatatggccaggatgttctgtaacatacgcattacagtgccacagtaatcaaacttactgtctgtgcaagaaacatatggtacaagaataataattctatatttagaaaaagtaacttcagccaaagctttcaatttcttgaacttcatattcaaaaagtcaggaaaacattatgttatgtccagaaaatgattacattcatccataaagagaagtaagcataataataattatgtccttattaaaaactcaaagaatatatgtttctgagtaaagaatagacaatgaaaacaaagttcactaatgccagaatattgaggaagacagcccctggaggagggaggagactttgtaatataactataattttcctaaattaggtggtgcaagtatgaaggaataatatttcaaattatggcttttggagactctctagtttcagggtgggaagacaccaagtgcagtcttggcttttatttctgtctgaaaggcaaatctcactggtggttcttttatgcgcatgacaagagcagtcaattttttcttctaagtttcatgcccctgagccagtattgtactgcagctggactgcattaacttaatagagccaattgtgctgatgtttccagctcccagttcaatgagtcacataggtgacttgaaatcagccaaaataggagtatttacacaatggaaattggtcaacactcaaaccagacctccccatcagagcccattgcaaaagatttaccaacacagtactgccttgatcccatgaaccctgacactcatctaccacagctcactctatcttcccacacagccccatct

SEQ ID NO: 80259 - DNA, 478 bp, Homo sapiens
cacatacacattgggcctccctctacagatactcatttccaatcactayacttctctgctggttttgtaccacttttattgatacatgtgctttgtctgcatattctatttaggaattcactcaaattcatgttatatcaagattactattttagctttcagtgtgactcagaatataatgcaagtatgtgtgtttatagttccacatgtgtgatattacttgtaaactttatttacgagtaaatttgttttgtcttattgcctacaacatgttagcattcatttatgcaatacatttctttttagctatgtcactttatgtacttttctatggattgatataatagtatagtttaattagaatttaaggttttctactggtttccagtgtatgatacactgaatttcctacccaaaatgtctcctcacatatgggtacttattaagaacaaacgaaggcagtaagatggaggggaga

SEQ ID NO: 80260 - DNA, 1072 bp, Homo sapiens
atcttcagcgctttggagaaacactatcatttgtcctcagaagtgaagattaaaggggattttatgaatgttttatgtatcctaggactatgagattatttccttggcraaggctaagttatttgaagatatatgtttagcatttaccagggacagtctgaactattgattccaaaataaataagaagaaggtgttggaagacagtattgcccactgtgatcatatttcatgtaatactagcaaaatatagtaatcactgtgattttctgaagtttgtgctttcttgtcctctgtttcatagaaagcaatttctttggtatctgtgattgtcagtaaggttttagaaaataaattatttgattctggtctttcacagtgaagtttttgatagcttttaaacaaagcctacatttcatggacaggttttgatgtgtcagatgtaaaaacattaaatgaaatcttgaaaccagaatccataaaccataagcctatataaggcccactttaaaaaatgttctggtcacagtaaggccttacccctggagaagcagctcagacttggagcatcctcgcaggagtttcctgattgaaatctctgtctctttgatcgtaacagatgtacattagttagagaaaaacatgcttgactctctatcagactaatcaatgcccacatacaggcagagactgtaattgtaagatttataagttgcacagtacctagtaagacgaatgtggttgagagagtgaaggtgaaaggtgaaagaattggaaggtgaattaaaattgcagacttgttgtgcttgttcaggtgtgatatagtaaacattcaatttagatagatgtttattggttggatgattatataggtaactgaaagttaaaaaaatatttttcaatacaataatgaagatgttctaaaatagccaaaataattaataggtacttaaatgtattacactagcttagttctaaagattgtaaaagaagaaaaagtctgcttactactcattaggagcttatgatatagttagaaaggtatgagctcctaaagtagtcatgtataaagat

SEQ ID NO: 80261 - DNA, 1072 bp, Homo sapiens
atcttcagcgctttggagaaacactatcatttgtcctcagaagtgaagattaaaggggattttatgaatgttttatgtatcctaggactatgagattatttccttggcaaaggctaagttatttgaagatatatgtttagcatttaccagggacagtctgaactattgattccaaaataaataagaagaaggtgttggaagacagtattgcccactgtgatcatatttcatgtaatactagcaaaatatagtaatcactgtgattttctgaagtttgtgctttcttgtcctctgtttcatagaaagcaatttctttggtatctgtgattgtcagtaaggttttagaaaataaattatttgattctggtctttcacagtgaagtttttgatagcttttaaacaaagcctacatttcatggacaggttttgatgtgtcagatgtaaaaacattaaatgaaatcttgaaaccagaatccataaaccataagcctatataaggcccactttaaaaaatgttctggtcacagtaaggccttacccctggagaagcagctcagacttggagcatcctcgcaggagtttcctgattgaaatctctgtctctttgatcgtaacagatgtacattagttagagaaaaacatgcttgactctctatcagactaatcaatgcccacatacaggcagagactgtaattgtaagatttataagttgcacagtacctagtaagacgaatgtggttgagagagtgaaggtgaaaggtgaaagaattggaaggtgaattaaaattgcagacttgttgtgcttgttcaggtgtgatatagtaaacattcaatttagatagatgtttattggttggatgattatataggtaactgaaagttaaaaaaatatttttcaatacaataatgaagatgttctaaaatagccaaaataattaataggtacttaaatgtattayactagcttagttctaaagattgtaaaagaagaaaaagtctgcttactactcattaggagcttatgatatagttagaaaggtatgagctcctaaagtagtcatgtataaagat

SEQ ID NO: 80262 - DNA, 1072 bp, Homo sapiens
atcttcagcgctttggagaaacactatcatttgtcctcagaagtgaagattaaaggggattttatgaatgttttatgtatcctaggactatgagattatttccttggcaaaggctaagttatttgaagatatatgtttagcatttaccagggacagtctgaactattgattccaaaataaataagaagaaggtgttggaagacagtattgcccactgtgatcatatttcatgtaatactagcaaaatatagtaatcactgtgattttctgaagtttgtgctttcttgtcctctgtttcatagaaagcaatttctttggtatctgtgattgtcagtaaggttttagaaaataaattatttgattctggtctttcacagtgaagtttttgatagcttttaaacaaagcctacatttcatggacaggttttgatgtgtcagatgtaaaaacattaaatgaaatcttgaaaccagaatccataaaccataagcctatataaggcccactttaaaaaatgttctggtcacagtaaggccttacccctggagaagcagctcagacttggagcatcctcgcaggagtttcctgattgaaatctctgtctctttgatcgtaacagatgtacattagttagagaaaaacatgcttgactctctatcagactaatcaatgcccacatacaggcagagactgtaattgtaagatttataagttgcacagtacctagtaagacgaatgtggttgagagagtgaaggtgaaaggtgaaagaattggaaggtgaattaaaattgcagacttgttgtgcttgttcaggtgtgatatagtaaacattcaatttagatagatgtttattggttggatgattatataggtaactgaaagttaaaaaaatatttttcaatacaataatgaagatgttctaaaatagccaaaataattaataggtacttaaatgtattacactagcttagttctaaagattgkaaaagaagaaaaagtctgcttactactcattaggagcttatgatatagttagaaaggtatgagctcctaaagtagtcatgtataaagat

SEQ ID NO: 80263 - DNA, 627 bp, Homo sapiens
agattttaggcctgccttgctttttagaaacatcttcaatgatcatctagaattctctccgaaaaatycagaagccacctgtctcagaaatggcagctgaagctggagaagagctgtctaagatgtggcaagtaaatcaatcaataaatcaatcacataacttttgtttttataagccattgagattttgaagtataattattacagaggcctatcttgggctattccaatataggcagaaaggcaaataatatttaacagccttctctgacacgattagtgtgtggcaattaattcacagccaaaatgacataattgaatgttgttcaacaaatgttgcttcaagaaagcaaatgtgattgccagaacatattcttctggatgccaaactatttattaatgctactatataatggaaaaggatttcttacttgctaaagaacttctataagttttagaaaattcatatggagatcattacttatgttttcaagtgcatatttataatatcatgaaaatattctggtgtgtcaataatgagacaacagggttttcattttgataatttttgttaattgaatacatgactgaaattggaggacctacccacaagactctggcttcatt

SEQ ID NO: 80264 - DNA, 654 bp, Homo sapiens
caaattaattaactcaatatattcagacaaaggatgaaccagagaactatagaagataatggatcgagttggtactcaagaataaggataatcagtaacattaccactttcatgaatctgttcctcccagcctctttttctgtgttctcctcttgctctcagcttacatctttctcagtgtaaagcttccacttcacaggggagacacagagccacaacacctgctgatctttatatcctaatccagctgctgttatcatggagaacatactttgtcatattctggtttgaaatgttctgggggaaraaaacttgaattggcaaaattcaagtcagttgatgatccttggaccaatttggagaggcaggcaagggataccttaggctaattgactctacctggataagccaactgtggctaaagagttgaagtcaaacaagaaatcagctcctattgcagcaataagagtgtgttagtgcaatcgttgtaaaaaaaaaaaaaaaggtggtgctgttctaagaataaaaggtttgttgagggcgttaagtatagaaaagaggctatgctgggcaagtgaaaaaaataatatccactataggagtttagccaaaattctaagacctatcactggagccctggttgtttacatgaat

SEQ ID NO: 80265 - DNA, 1865 bp, Homo sapiens
aaagttacaaagttaacagttggaagtcatttgtttaatttgtattctatttcctaatattcctgtgtactatatttttgtgaaacttcatatttttaaacaataatgaaacacaaaaaaattataaagataactgtagccaagtcaaagaaaacaaagcaaaaggaagaccctcactgaatgctcaatctcaaacttctcagccatcagaatcgtgagacaaataaacttttttcctttataaactatcaaggctyaagtattctcttatggcaatatgaaacagactaagacaggtataaatttagtgatattagtataaattgttaaaactcttttaagactgaaaattaattggcccattaatctctcaataatagaaatgcaaagactttgaattcatgtgctcaatctaagtcaacagcctctacagaactctcttctatagtaaagatgaaaaagaaagaatgaatgtcagagagcagctcagatcctgtagtgctaggaccaaaagttagaaaaaacaattggtaataaaacaattcatatacttatttcacaaggaaggaaaaagtcacaaagatatctactgtagactatacaaacctaaactcatcaatagtagattctaaaagatatattaattggctttttttaaagtcaggaactctaagtgactcataactattatttgtgtttcctcccagataactgcctaatgatcctaaactcccttgctgtaatattaataccaaggccaaaattaagccagactgtttttctttcacatctttagattcacttttcaaatacactactttaaataaactatgaaaaaatacctaaatgatagtaaaaataagtgatatgcattcacttaggcttaatgaaaacacataaattttcaacaatataaaacatgaaatcataattcattacataccacagcactcaggacattttggatgttgctggacattcattccatatcctggaaagcagcgattaatccaaaccatttggagagtaccttcaatatagtatatttgaggtaattgttctgcacgtctgccaagaatttctacttgttgattaaaaaatctctctatgagatttttagcctaaaacataaatacaatttgataaactgttagccataaaaaatgtaattttagaacaaataaggatgcatgtggatttagaatttaaagaaaacaaagtctcaaggtcattattttttcttgcactcacagactataaataaaacacacaaaactgaaaagatgtcatctataaacatcaaatatttctaaatgcacttccaattacaatgcaaagaaatcatttgaagatttctttttggtccctttgtattttgaataatacaggaataagtatatgagcaaaatcaagaaagctctttgaaattgattaagaaatgtaatgtactttaaaataatatattataagcatctgtaagaagcttatcctgaggcacaacatcaactcttttcacaaagaaaaatttaatttaaaaacaaaaaaatatataacttctagctctgtttcaaaaattaaatctaaaaaaataaagcatcattctgatctataattatctttatgtttgtaataattatactggcttgcctcctaaaattaacaagagccttagacttctctgactgctaagatctatgcattcaagtatgaggtacgcataaattcaaactgctacaagctagttagttctactcattctgccacactaactagcacctccaatctagtcaggagcagggataaatggaccacacaggctgatctataactactaatggtgcacctcatgtctactgagttcttcc

SEQ ID NO: 80266 - DNA, 1865 bp, Homo sapiens
aaagttacaaagttaacagttggaagtcatttgtttaatttgtattctatttcctaatattcctgtgtactatatttttgtgaaacttcatatttttaaacaataatgaaacacaaaaaaattataaagataactgtagccaagtcaaagaaaacaaagcaaaaggaagaccctcactgaatgctcaatctcaaacttctcagccatcagaatcgtgagacaaataaacttttttcctttataaactatcaaggctcaagtattctcttatggcaatatgaaacagactaagacaggtataaatttagtgatattagtatwaattgttaaaactcttttaagactgaaaattaattggcccattaatctctcaataatagaaatgcaaagactttgaattcatgtgctcaatctaagtcaacagcctctacagaactctcttctatagtaaagatgaaaaagaaagaatgaatgtcagagagcagctcagatcctgtagtgctaggaccaaaagttagaaaaaacaattggtaataaaacaattcatatacttatttcacaaggaaggaaaaagtcacaaagatatctactgtagactatacaaacctaaactcatcaatagtagattctaaaagatatattaattggctttttttaaagtcaggaactctaagtgactcataactattatttgtgtttcctcccagataactgcctaatgatcctaaactcccttgctgtaatattaataccaaggccaaaattaagccagactgtttttctttcacatctttagattcacttttcaaatacactactttaaataaactatgaaaaaatacctaaatgatagtaaaaataagtgatatgcattcacttaggcttaatgaaaacacataaattttcaacaatataaaacatgaaatcataattcattacataccacagcactcaggacattttggatgttgctggacattcattccatatcctggaaagcagcgattaatccaaaccatttggagagtaccttcaatatagtatatttgaggtaattgttctgcacgtctgccaagaatttctacttgttgattaaaaaatctctctatgagatttttagcctaaaacataaatacaatttgataaactgttagccataaaaaatgtaattttagaacaaataaggatgcatgtggatttagaatttaaagaaaacaaagtctcaaggtcattattttttcttgcactcacagactataaataaaacacacaaaactgaaaagatgtcatctataaacatcaaatatttctaaatgcacttccaattacaatgcaaagaaatcatttgaagatttctttttggtccctttgtattttgaataatacaggaataagtatatgagcaaaatcaagaaagctctttgaaattgattaagaaatgtaatgtactttaaaataatatattataagcatctgtaagaagcttatcctgaggcacaacatcaactcttttcacaaagaaaaatttaatttaaaaacaaaaaaatatataacttctagctctgtttcaaaaattaaatctaaaaaaataaagcatcattctgatctataattatctttatgtttgtaataattatactggcttgcctcctaaaattaacaagagccttagacttctctgactgctaagatctatgcattcaagtatgaggtacgcataaattcaaactgctacaagctagttagttctactcattctgccacactaactagcacctccaatctagtcaggagcagggataaatggaccacacaggctgatctataactactaatggtgcacctcatgtctactgagttcttcc

SEQ ID NO: 80267 - DNA, 1865 bp, Homo sapiens
aaagttacaaagttaacagttggaagtcatttgtttaatttgtattctatttcctaatattcctgtgtactatatttttgtgaaacttcatatttttaaacaataatgaaacacaaaaaaattataaagataactgtagccaagtcaaagaaaacaaagcaaaaggaagaccctcactgaatgctcaatctcaaacttctcagccatcagaatcgtgagacaaataaacttttttcctttataaactatcaaggctcaagtattctcttatggcaatatgaaacagactaagacaggtataaatttagtgatattagtataaattgttaaaactcttttaagactgaaaattaattggcccattaatctctcaataatagaaatgcaaagactttgaattcatgtgctcaatctaagtcaacagcctctacagaactctcttctatagtaaagatgaaaaagaaagaaygaatgtcagagagcagctcagatcctgtagtgctaggaccaaaagttagaaaaaacaattggtaataaaacaattcatatacttatttcacaaggaaggaaaaagtcacaaagatatctactgtagactatacaaacctaaactcatcaatagtagattctaaaagatatattaattggctttttttaaagtcaggaactctaagtgactcataactattatttgtgtttcctcccagataactgcctaatgatcctaaactcccttgctgtaatattaataccaaggccaaaattaagccagactgtttttctttcacatctttagattcacttttcaaatacactactttaaataaactatgaaaaaatacctaaatgatagtaaaaataagtgatatgcattcacttaggcttaatgaaaacacataaattttcaacaatataaaacatgaaatcataattcattacataccacagcactcaggacattttggatgttgctggacattcattccatatcctggaaagcagcgattaatccaaaccatttggagagtaccttcaatatagtatatttgaggtaattgttctgcacgtctgccaagaatttctacttgttgattaaaaaatctctctatgagatttttagcctaaaacataaatacaatttgataaactgttagccataaaaaatgtaattttagaacaaataaggatgcatgtggatttagaatttaaagaaaacaaagtctcaaggtcattattttttcttgcactcacagactataaataaaacacacaaaactgaaaagatgtcatctataaacatcaaatatttctaaatgcacttccaattacaatgcaaagaaatcatttgaagatttctttttggtccctttgtattttgaataatacaggaataagtatatgagcaaaatcaagaaagctctttgaaattgattaagaaatgtaatgtactttaaaataatatattataagcatctgtaagaagcttatcctgaggcacaacatcaactcttttcacaaagaaaaatttaatttaaaaacaaaaaaatatataacttctagctctgtttcaaaaattaaatctaaaaaaataaagcatcattctgatctataattatctttatgtttgtaataattatactggcttgcctcctaaaattaacaagagccttagacttctctgactgctaagatctatgcattcaagtatgaggtacgcataaattcaaactgctacaagctagttagttctactcattctgccacactaactagcacctccaatctagtcaggagcagggataaatggaccacacaggctgatctataactactaatggtgcacctcatgtctactgagttcttcc

SEQ ID NO: 80268 - DNA, 597 bp, Homo sapiens
atccctgcaaggacatgtggaagaggtgccaacaaaccttaggtgatgacccccttagccccttgaccccacaagccaacacccatggttccagttctgtgagactgagttgctgggacttctggcaatgttgaagtggccttgagtcaattctgtggtgtgtccacgtgggcatgtccgaccgcctgtgtgcacatgtgtgtgtgaaagctcgtgtgtgagcctgtgtacccttggcatgtgcccataaatatccatgtgcacaggtctgtgtgcaggcctgcacatgtgtgtctgaggagtgtgtgtgtacacgagtctgtgcatgtctgcgcatccgagcactgtcattgtgcatgcctgtttttgcttgtctgtgcacaagtgtgtgtatgcatatgtgcctgcgcctttctgtgtgtctgtgtgcaggagcagctatgggtgcgtctgtccaggcgtatacgtgtttctgaatgctggcgcccttgtgtggtgggcgttgggagtctagagagctatgctgaggtcctgagccatcactcaagaaggaatgtgragcagacagtcactcagtgggttactaacatgaatact

SEQ ID NO: 80269 - DNA, 591 bp, Homo sapiens
ctggtgcaatgccccggtgccccatcggacctcactcaccaagcagaagctcaaagattaaattattaaacatttcaaaatgacaagagyacagcatgaagccaagtacatggccctgtgtgacgacacagagctcccggccacagagcgggccctgcccagcccctgccccgccctggctgccctggctgccctggtggtggccttgacttccctgggattctcagcactatctccactcccaccccctttagtggcagggaccaggtgataaatacggccacgtccctccgccagatgcctctcacagaagtcagcgcaccagccaattccacccatgttaactccaccgcatttagccacagcactaattaaaatccctcccataaaagttgttatctcccagatgctccgtaaatagtaaatatgctgccggggcccccattaggatgcgcctgtgtgtggggggtcgctgtttatggagcagctccagaagtgggtttggtgccgtgcttggtgtgacggggagctcagggtcacccgcactgattgagctcaaggtggggccagagcatatcaaagggtgaagat

SEQ ID NO: 80270 - DNA, 722 bp, Homo sapiens
aaataaaatgtatggaaatataacgtctcatttgtacatattcaaaaaaggccctttcattattgaaattcggcggcaactgttcaaaggtcagaggactttgtggcctggaaatacccaccatctggcccgagcaggcgcaggcgaggacaaattggtgcccctccacggggagcccgggaggacgcggaggcggtgcgggcatggactggaggctctgccagggatttttatagggcagagagggatagagagcttacccaccgccggcccaggctcatgctgggcccgaagccagggcctggtgtgggcacctcgccaatggctgccgtccatatgccctgcccaccccggtgccagatcgggggcacgagatcccctccctcccctctagcagccgggcactgaccttgcaggcaacaaggggttaacagtcagagctgcaggaggacccaccttctcccagcacagcctcgccacccccagcctcacccaccaagctggrgggaggcagagagtggcctccaaggcgggcaggccccattccccgcttggcaatcgctcataaatcataattgacaagcataatttttcccttgagcggcaagggtgctttatttagttgtttctattttatctggttgcaggagatgatggacccccctccaacccacttctgctgtttcccataataataaaacgctctgctaggccaggatggg

SEQ ID NO: 80271 - DNA, 713 bp, Homo sapiens
tttatattttatatactaaaattatttaaagtatgtttatcagatagttgggaaggtagacagaaatgtaaataagtgacctgagaatcccaccaatgaattctgacagtcttctttctagtcctctcctccaaagtaaaagcaaaagtagaagctggggttgatcagtaatggataatcgcatgtgtcaactagggtaggccatggtagcagttattggtcaaacatcagtctacatgttgtcttgaaggtatttgttagaagtgataaacactgaagtcactagactttgaataaagcagattgctctccataatatgatgggcctcatccagttgttggagatcttaacagaattaaggaagagggaattccacctccagccaacctttggactggaaatgcaacatcaactcctccctgagtctccaggctgccggcttgccctgtaaatttcaacttgccagctgttccaattgcatgagctaattctttaaaatcaacctcgagatggatgaatagattagatagatagatagatagatagatagatagataaacatagatagtagattagatagatgatagatggagattacatagatagtagatttgatagatagatacatayatacataatacatacatacttaattagatagataaatagagaaagagatctccatcctattggttcagcttctctggaggat

SEQ ID NO: 80272 - DNA, 713 bp, Homo sapiens
tttatattttatatactaaaattatttaaagtatgtttatcagatagttgggaaggtagacagaaatgtaaataagtgacctgagaatcccaccaatgaattctgacagtcttctttctagtcctctcctccaaagtaaaagcaaaagtagaagctggggttgatcagtaatggataatcgcatgtgtcaactagggtaggccatggtagcagttattggtcaaacatcagtctacatgttgtcttgaaggtatttgttagaagtgataaacactgaagtcactagactttgaataaagcagattgctctccataatatgatgggcctcatccagttgttggagatcttaacagaattaaggaagagggaattccacctccagccaacctttggactggaaatgcaacatcaactcctccctgagtctccaggctgccggcttgccctgtaaatttcaacttgccagctgttccaattgcatgagctaattctttaaaatcaacctcgagatggatgaatagattagatagatagatagatagatagatagatagataaacatagatagtagattagatagatgatagatggagattacatagatagtagatttgatagatagatacatacatacataatacayacatacttaattagatagataaatagagaaagagatctccatcctattggttcagcttctctggaggat

SEQ ID NO: 80273 - DNA, 529 bp, Homo sapiens
ggtgacattctccccttttccttgttctcccttttcaccctggcctccttcagcctcattcttcctccttctccattgctcctgtagacccaaaccaacaacagcaggacctcttattaacctctgttaatacctcaatttagcaaatgtaatgagtactgtgggtaagagggaaggaaatgagccctttgacattcactctctttgaaactgtcatcccacagggaaagaaacaggccaagagtggccagagtatgtaagagaatgggatgactgtgggcagaatcacaggagagacacagaatgtggcggtagagacggtcagagcgaaaaaacaggcacagagcaaggacacaaggcaayatccagaggcagaaaggaggctggagggcactgacaacacagaggaaccaaaacccagacaattcccttcaggggccccagagagaaagtgaacccctaggaaccccctgcaaagggtgggtatgaggggggtcgggttaagcggcttaacaaagaggtgtgcccg

SEQ ID NO: 80274 - DNA, 885 bp, Homo sapiens
actgaaattcctataaaaagcatattcttttaagtatctttgaaacaaataagccctatattttccactgctagtagaatcttaagagacaagaaaaaaataagtaattttcagaccttcatttgtgtttctgcatttcaaataaatgaaactcatgcactaaatctaagtactaaattttagagcaacaacttttccattacgaagtttaaattaaaagtattagtttttaaaaagtgatgctacatagtctttttccttctgaagtttattattcttttttggatatgaactactaagccttaagtgtgtgtagtacatgcaggctgaccgcacactatagatgtggctgagccattatcgtttatcgcctcagtgatctgcgaaataagaagggtttcttttggccattatagtctgttggctcaataatctgtgctttaagaattccctaaataagtatcagcacaacaattcttaatgttacaatttatcaccttagttcttaaaaatcaaaacctgtatttacayaatagacaatttaaagtctattctgaaagaattatttcataacctacatgtttgcctaccaagaaatttaacattttgcctattctatactcagaatttaagctttttcccttgcttgctatatagttattatataaaatgttttcccttgaacattaacataaaaaagtactatattttttgtataaataagaaaagtattaatgcaagaatcagctactaaacagggaagcaaaaccacgtttgaaaccaacatatgacacgtaattaagagacaagggagttcaaagtaaaccctcacacctagtttacacaaactggagctacccaacttttgatgttacagactatgca

SEQ ID NO: 80275 - DNA, 443 bp, Homo sapiens
gtcacatctagagatttccccaggaaagtcaccagtgtcccggctctgatgcgtcagggtcggggcgaggacagagggracgaggcagtgtggggtcaaggccccaacactctggctaaaagtggcctctagggtgggctgggtaaccggagagggactcttaagtagccgtctgtgttcatttgctagggcggctgggacagagtactgcaagtcagatggcttaaaacaccacgaatgtgtcctctcacagtgctggaggccagaagtctgatattgtgatgtcagtggggccgcgctccctctgaaggccccaggggaggccccttccttgcctcttccagcttctggtggccccaggccatccctggcttgcagatacgtggctcccatctctgcctcggtcttcacatggggcctcccgtctatgtctctctgtgtgt

SEQ ID NO: 80276 - DNA, 606 bp, Homo sapiens
attctcagcaaagccttagagatgaataattctcagcaaggccttagggactaacactggccacattatagatcaaatttgacaaggtttatatgcataagccatttctttctttccagggttcatgcctgaaatttgggtaacttccagcggatcaatgatggcacttaagctagagatatggtccaaatgggaaaacttcctatagtggggtcaaaagttagcaggcaaaaaccaaacaaaaaattagcatgctattctactcacygtgtgatttctataaaaacagcagtatttattaaaatgtttggtctattagctaatagtaagcaatatgcaatgtaactaatattagcataataatgtacctttggaaggaggatatataatccagaacataatttaggagaatgcatcaggcatggtggctcacacctgtaatcccagcgctttaggaggccaaggcaggaggatcacttgaggccaagagtttgagaccagcccgagcaacatagaaagatcccatctctaaaaaaaaatttaaaaattggccaggcatggtgatgtatgcctatagtctcagtgactcaggaggcagaggtgaga

SEQ ID NO: 80277 - DNA, 623 bp, Homo sapiens
ctgtgctacccccaccctcctgcagcctgtcaagaagtcccacctcctctgatcccagagcctggctttttctctctctttcttgtgttcccctgtgattctgaggctccgatgcrgtttccaccatcagccttgtctgattcatatggctgtgtgcaggcagcaagggtaccatttgggtctgttattctatgagggagttttaagcctggatgccgaaaggagacacagttgctggaggagtggctgcaggcaggtgaggtccccaaggcgctttcgagcagcagggcctcccagcagtcccctgatttctcaggggcttatcaggtgtgtacacccagcaaggctggcctcaaagtaggccaatttctaggaggaaataggcaaaggcaggctgcctagagcaaagcggtaacctagttcagcacacagagtggctttgagaggaacgaagaatacaaacagggctggttcagcaaccggccgccgagcctgagtgagggacgtgggaccctgctgggtgctggcagaagggccccatccctacctttccagggaaggggcagaggagacaagatatagggactgtgctctgggtggacaacatcccaagggacacttgg

SEQ ID NO: 80278 - DNA, 623 bp, Homo sapiens
ctgtgctacccccaccctcctgcagcctgtcaagaagtcccacctcctctgatcccagagcctggctttttctctctctttcttgtgttcccctgtgattctgaggctccgatgcggtttccaccatcagccttgtctgattcatatggctgtgtgcaggcagcaagggkaccatttgggtctgttattctatgagggagttttaagcctggatgccgaaaggagacacagttgctggaggagtggctgcaggcaggtgaggtccccaaggcgctttcgagcagcagggcctcccagcagtcccctgatttctcaggggcttatcaggtgtgtacacccagcaaggctggcctcaaagtaggccaatttctaggaggaaataggcaaaggcaggctgcctagagcaaagcggtaacctagttcagcacacagagtggctttgagaggaacgaagaatacaaacagggctggttcagcaaccggccgccgagcctgagtgagggacgtgggaccctgctgggtgctggcagaagggccccatccctacctttccagggaaggggcagaggagacaagatatagggactgtgctctgggtggacaacatcccaagggacacttgg

SEQ ID NO: 80279 - DNA, 442 bp, Homo sapiens
ttacaacctctgcatgctgtcactagaaaacgctacgactttcgctggggagagaaagagagcacggcttttaacaggctaaacaagcagtgcaaccggccctggatctatggcccttacgggatgggccagtagaactgcaagtaacggccgggcgcggtggctcacacctgtaatcccagcactttgggaggctgaggcgggcagatcacgaggtcaggagattgagaccatcctggccaacatggtgaagccccgtctctactaaaaaaaatacaaaaattagccgggcatggtggcgggtgcctgtagttccagctatcgggaggctgaggcaggagaatggtgtgaacccrggaggtggagcttgcagtgagccgagattgtgcccctgcactccagcctgggcaacagagtgagactccgtctcaaaaaaaaaaaa

SEQ ID NO: 80280 - DNA, 714 bp, Homo sapiens
aaatggaatccctgggtaaccagaaaatgtaattaatggaaacaaggtgcttcacgaggaagctggtcagagcctgcttttattgtcgtggtttagccagggacctgctgtgtaggtgtccccactgctctcaggcgttgcagtaggagcagactttcaaaaaggaaagctgtgaggcacactgttctccttatctcacagggccctgcagaccctcacccaccatcccggggcgcctatcagcctgggcgcagtcgcgtctgagactcacggagctgcttgtgaatcatgtcgtaacacacacatgtaaagtaaggaggctgctgtctccccggggtgtgtattattatctgggattgttgtgaattgctcaagaatggactgggaggagggagcggtcgggagtcacttgggccctgtagagctggactttattgccaccaaatgtcactgaagttattggaccccaaatcactgcaccatgaaggagcgccargcatatcagacaaaaatgaaacaaccattccgctaggagccctgaagggccacagtcatgaatacggagacacagccaggtactttcatcttgggtgcattacagtgatggaagactggttttgcatacactgtgcccacatgacatgctgatatttcctatttcttttcaagcccctgtgttttgcttctatatagatggggaaattctcagcttgg

SEQ ID NO: 80281 - DNA, 714 bp, Homo sapiens
aaatggaatccctgggtaaccagaaaatgtaattaatggaaacaaggtgcttcacgaggaagctggtcagagcctgcttttattgtcgtggtttagccagggacctgctgtgtaggtgtccccactgctctcaggcgttgcagtaggagcagactttcaaaaaggaaagctgtgaggcacactgttctccttatctcacagggccctgcagaccctcacccaccatcccggggcgcctatcagcctgggcgcagtcgcgtctgagactcacggagctgcttgtgaatcatgtcgtaacacacacatgtaaagtaaggaggctgctgtctccccggggtgtgtattattatctgggattgttgtgaattgctcaagaatggactgggaggagggagcggtcgggagtcacttgggccctgtagagctggactttattgccaccaaatgtcactgaagttattggaccccaaatcactgcaccatgaaggagcgccaagcatatcagacaaaaatgaaacaaccattccgctaggagccctgaagggccacagtcatgaatacggagacacagccaggtactttcatcttgggtgcattacagtgatggaagactggttttgcatacactgtgcccrcatgacatgctgatatttcctatttcttttcaagcccctgtgttttgcttctatatagatggggaaattctcagcttgg

SEQ ID NO: 80282 - DNA, 1851 bp, Homo sapiens
agaattccagacaatggggtgcacacagtctaaagaaggaagattgcagggagcttgagcagacaggtgggacacatggtagacaagtacagctaggacacctagtagacatgtaggatatctcttatacagctakggcacctggtaggcaggtaggatacctcttatacagctagggaacctggtaggcagagaggacacctctgatacagctagggcacctggtaggcagggaggacacctggtagactggaaggggagagaaggacgccttgtcagatcagactataagatcgtgtcatctcagttcctccatggagacagaatcccacactagtgggaccctattctttatcatttccaccctcactcttgtttactgagtgctcactgtatcctcaaccctgtgccaaccaccttatcaactcctggtatctttcagtgaccctgggctgggctgtcatttggagagtatgagcagctagcccagtggatgctcacagctggtctgtggtgagccaggactcggacccacatcctcctgagctcccacagtggggtgtcaccccaagctgtttcctccataccttagtatctggtggggtcgtgatcccttccctcgcctccaacttgctgctcacccagagttggcgtttgccctgactggggtcatggtcatggttagcactcacagtggacaggccgaccgcccttgaactcgtgacgggccccgctgaggctagaggtccccccctcacagtggacatgccgaccacccttgaacttgcgacaggccccgctgaggctagaggcaccagccccactgccaggcctgatttctttcctggtactcctatcacagctcggtgtgtgctgaatttcttgccccagcctcggtttgtactggcttgagtgtcggtgctgctgtcctcacctggatctcaacctctacattgcaggaatcgaggcagtggggcaggaaggtggacaccaatgcattcgtgcaggggctgggcaggggctgggctctgccatctggccaaagtgctgcctggtcctccctggaaactcggtgggcacctttagtgctctgatacccagaccttctcctcttgaaaagaccctcaaacttctcagtctctaaagggaaggaccaacaccgggcatctttcctcatcccaccaggtcttgccacgtgcccacagcagaagtcacacctttgaggtggaatgagtcacacagtcttgaggagcaggagcagccaggtcagcctggggtggaggggccaggggtgctgaggtctgacttgggaagggcaggggcaggggcagggctggatctcaggtcagtgtcaggcctgggaggctgagcccctgggaggccgagcccctgggaggccagcccctgtgacccccctgcctgtgatctcccccatctggagcagcacactttctgccgtgctatccaaaggtggccctccaggcctctagggtctctgttaaggggctctcagcctccgctacacccacagaaccctgcaataaacaggccagaatcacggcccgtccaagacaacctgcgctttctatcccagggtctccaaagaccagagacctgagcttctcagaatgtgggtctcaataggcaaacgtagtcttcggccacagaaatcagaagggtggtgacctctgcaggcaggactagttgcaaaaggggcacaaaaccacttcttagagtgatgggaaccttccttatcttgagtgggtgctggtcacctggatgtatacatatgtcaaaacttactggagggtacacttactgtgttctcaattataccttgatttttaaaaa

SEQ ID NO: 80283 - DNA, 1851 bp, Homo sapiens
agaattccagacaatggggtgcacacagtctaaagaaggaagattgcagggagcttgagcagacaggtgggacacatggtagacaagtacagctaggacacctagtagacatgtaggatatctcttatacagctagrgcacctggtaggcaggtaggatacctcttatacagctagggaacctggtaggcagagaggacacctctgatacagctagggcacctggtaggcagggaggacacctggtagactggaaggggagagaaggacgccttgtcagatcagactataagatcgtgtcatctcagttcctccatggagacagaatcccacactagtgggaccctattctttatcatttccaccctcactcttgtttactgagtgctcactgtatcctcaaccctgtgccaaccaccttatcaactcctggtatctttcagtgaccctgggctgggctgtcatttggagagtatgagcagctagcccagtggatgctcacagctggtctgtggtgagccaggactcggacccacatcctcctgagctcccacagtggggtgtcaccccaagctgtttcctccataccttagtatctggtggggtcgtgatcccttccctcgcctccaacttgctgctcacccagagttggcgtttgccctgactggggtcatggtcatggttagcactcacagtggacaggccgaccgcccttgaactcgtgacgggccccgctgaggctagaggtccccccctcacagtggacatgccgaccacccttgaacttgcgacaggccccgctgaggctagaggcaccagccccactgccaggcctgatttctttcctggtactcctatcacagctcggtgtgtgctgaatttcttgccccagcctcggtttgtactggcttgagtgtcggtgctgctgtcctcacctggatctcaacctctacattgcaggaatcgaggcagtggggcaggaaggtggacaccaatgcattcgtgcaggggctgggcaggggctgggctctgccatctggccaaagtgctgcctggtcctccctggaaactcggtgggcacctttagtgctctgatacccagaccttctcctcttgaaaagaccctcaaacttctcagtctctaaagggaaggaccaacaccgggcatctttcctcatcccaccaggtcttgccacgtgcccacagcagaagtcacacctttgaggtggaatgagtcacacagtcttgaggagcaggagcagccaggtcagcctggggtggaggggccaggggtgctgaggtctgacttgggaagggcaggggcaggggcagggctggatctcaggtcagtgtcaggcctgggaggctgagcccctgggaggccgagcccctgggaggccagcccctgtgacccccctgcctgtgatctcccccatctggagcagcacactttctgccgtgctatccaaaggtggccctccaggcctctagggtctctgttaaggggctctcagcctccgctacacccacagaaccctgcaataaacaggccagaatcacggcccgtccaagacaacctgcgctttctatcccagggtctccaaagaccagagacctgagcttctcagaatgtgggtctcaataggcaaacgtagtcttcggccacagaaatcagaagggtggtgacctctgcaggcaggactagttgcaaaaggggcacaaaaccacttcttagagtgatgggaaccttccttatcttgagtgggtgctggtcacctggatgtatacatatgtcaaaacttactggagggtacacttactgtgttctcaattataccttgatttttaaaaa

SEQ ID NO: 80284 - DNA, 1851 bp, Homo sapiens
agaattccagacaatggggtgcacacagtctaaagaaggaagattgcagggagcttgagcagacaggtgggacacatggtagacaagtacagctaggacacctagtagacatgtaggatatctcttatacagctagggcacctggtaggcaggtaggatacctcttatacagctagggaacctggtaggcagagaggacacctctgatacagctagggcacctggtaggcagggaggacacctggtagactggaaggggagagaaggacgccttgtcagatcagactataagatcgtgtcatctcagttcctccatggagacagaatcccacactagtgggaccctattctttatcatttccaccctcactcttgtttactgagtgctcactgtatcctcaaccctgtgccaaccaccttatcaactcctggtatctttcagtgaccctgggctgggctgtcatttggagagtatgagcagctwgcccagtggatgctcacagctggtctgtggtgagccaggactcggacccacatcctcctgagctcccacagtggggtgtcaccccaagctgtttcctccataccttagtatctggtggggtcgtgatcccttccctcgcctccaacttgctgctcacccagagttggcgtttgccctgactggggtcatggtcatggttagcactcacagtggacaggccgaccgcccttgaactcgtgacgggccccgctgaggctagaggtccccccctcacagtggacatgccgaccacccttgaacttgcgacaggccccgctgaggctagaggcaccagccccactgccaggcctgatttctttcctggtactcctatcacagctcggtgtgtgctgaatttcttgccccagcctcggtttgtactggcttgagtgtcggtgctgctgtcctcacctggatctcaacctctacattgcaggaatcgaggcagtggggcaggaaggtggacaccaatgcattcgtgcaggggctgggcaggggctgggctctgccatctggccaaagtgctgcctggtcctccctggaaactcggtgggcacctttagtgctctgatacccagaccttctcctcttgaaaagaccctcaaacttctcagtctctaaagggaaggaccaacaccgggcatctttcctcatcccaccaggtcttgccacgtgcccacagcagaagtcacacctttgaggtggaatgagtcacacagtcttgaggagcaggagcagccaggtcagcctggggtggaggggccaggggtgctgaggtctgacttgggaagggcaggggcaggggcagggctggatctcaggtcagtgtcaggcctgggaggctgagcccctgggaggccgagcccctgggaggccagcccctgtgacccccctgcctgtgatctcccccatctggagcagcacactttctgccgtgctatccaaaggtggccctccaggcctctagggtctctgttaaggggctctcagcctccgctacacccacagaaccctgcaataaacaggccagaatcacggcccgtccaagacaacctgcgctttctatcccagggtctccaaagaccagagacctgagcttctcagaatgtgggtctcaataggcaaacgtagtcttcggccacagaaatcagaagggtggtgacctctgcaggcaggactagttgcaaaaggggcacaaaaccacttcttagagtgatgggaaccttccttatcttgagtgggtgctggtcacctggatgtatacatatgtcaaaacttactggagggtacacttactgtgttctcaattataccttgatttttaaaaa

SEQ ID NO: 80285 - DNA, 1851 bp, Homo sapiens
agaattccagacaatggggtgcacacagtctaaagaaggaagattgcagggagcttgagcagacaggtgggacacatggtagacaagtacagctaggacacctagtagacatgtaggatatctcttatacagctagggcacctggtaggcaggtaggatacctcttatacagctagggaacctggtaggcagagaggacacctctgatacagctagggcacctggtaggcagggaggacacctggtagactggaaggggagagaaggacgccttgtcagatcagactataagatcgtgtcatctcagttcctccatggagacagaatcccacactagtgggaccctattctttatcatttccaccctcactcttgtttactgagtgctcactgtatcctcaaccctgtgccaaccaccttatcaactcctggtatctttcagtgaccctgggctgggctgtcatttggagagtatgagcagctagcccagtggatgctcacagctggtctgtggtgagccaggactcggacccacatcctcctgagctcccacagtggggtgtcaccccaagctgtttcctccataccttagtatctggtggggtcgtgatcccttccctcgcctccaacttgctgctcacccagagttggcgtttgccctgactggggtcatggtcatggttagcactcacagtggacaggccgaccgcccttgaactcgtgacgggccccgctgaggctagaggtccccccctcacagtggacatgccgaccacccttgaacttgcgacaggccccgctgaggctagaggcaccagccccmctgccaggcctgatttctttcctggtactcctatcacagctcggtgtgtgctgaatttcttgccccagcctcggtttgtactggcttgagtgtcggtgctgctgtcctcacctggatctcaacctctacattgcaggaatcgaggcagtggggcaggaaggtggacaccaatgcattcgtgcaggggctgggcaggggctgggctctgccatctggccaaagtgctgcctggtcctccctggaaactcggtgggcacctttagtgctctgatacccagaccttctcctcttgaaaagaccctcaaacttctcagtctctaaagggaaggaccaacaccgggcatctttcctcatcccaccaggtcttgccacgtgcccacagcagaagtcacacctttgaggtggaatgagtcacacagtcttgaggagcaggagcagccaggtcagcctggggtggaggggccaggggtgctgaggtctgacttgggaagggcaggggcaggggcagggctggatctcaggtcagtgtcaggcctgggaggctgagcccctgggaggccgagcccctgggaggccagcccctgtgacccccctgcctgtgatctcccccatctggagcagcacactttctgccgtgctatccaaaggtggccctccaggcctctagggtctctgttaaggggctctcagcctccgctacacccacagaaccctgcaataaacaggccagaatcacggcccgtccaagacaacctgcgctttctatcccagggtctccaaagaccagagacctgagcttctcagaatgtgggtctcaataggcaaacgtagtcttcggccacagaaatcagaagggtggtgacctctgcaggcaggactagttgcaaaaggggcacaaaaccacttcttagagtgatgggaaccttccttatcttgagtgggtgctggtcacctggatgtatacatatgtcaaaacttactggagggtacacttactgtgttctcaattataccttgatttttaaaaa

SEQ ID NO: 80286 - DNA, 1851 bp, Homo sapiens
agaattccagacaatggggtgcacacagtctaaagaaggaagattgcagggagcttgagcagacaggtgggacacatggtagacaagtacagctaggacacctagtagacatgtaggatatctcttatacagctagggcacctggtaggcaggtaggatacctcttatacagctagggaacctggtaggcagagaggacacctctgatacagctagggcacctggtaggcagggaggacacctggtagactggaaggggagagaaggacgccttgtcagatcagactataagatcgtgtcatctcagttcctccatggagacagaatcccacactagtgggaccctattctttatcatttccaccctcactcttgtttactgagtgctcactgtatcctcaaccctgtgccaaccaccttatcaactcctggtatctttcagtgaccctgggctgggctgtcatttggagagtatgagcagctagcccagtggatgctcacagctggtctgtggtgagccaggactcggacccacatcctcctgagctcccacagtggggtgtcaccccaagctgtttcctccataccttagtatctggtggggtcgtgatcccttccctcgcctccaacttgctgctcacccagagttggcgtttgccctgactggggtcatggtcatggttagcactcacagtggacaggccgaccgcccttgaactcgtgacgggccccgctgaggctagaggtccccccctcacagtggacatgccgaccacccttgaacttgcgacaggccccgctgaggctagaggcaccagccccactgccaggcctgatttctttcctggtactcctatcacagctcggtgtgtgctgaatttcttgccccagcctcggtttgtactggcttgagygtcggtgctgctgtcctcacctggatctcaacctctacattgcaggaatcgaggcagtggggcaggaaggtggacaccaatgcattcgtgcaggggctgggcaggggctgggctctgccatctggccaaagtgctgcctggtcctccctggaaactcggtgggcacctttagtgctctgatacccagaccttctcctcttgaaaagaccctcaaacttctcagtctctaaagggaaggaccaacaccgggcatctttcctcatcccaccaggtcttgccacgtgcccacagcagaagtcacacctttgaggtggaatgagtcacacagtcttgaggagcaggagcagccaggtcagcctggggtggaggggccaggggtgctgaggtctgacttgggaagggcaggggcaggggcagggctggatctcaggtcagtgtcaggcctgggaggctgagcccctgggaggccgagcccctgggaggccagcccctgtgacccccctgcctgtgatctcccccatctggagcagcacactttctgccgtgctatccaaaggtggccctccaggcctctagggtctctgttaaggggctctcagcctccgctacacccacagaaccctgcaataaacaggccagaatcacggcccgtccaagacaacctgcgctttctatcccagggtctccaaagaccagagacctgagcttctcagaatgtgggtctcaataggcaaacgtagtcttcggccacagaaatcagaagggtggtgacctctgcaggcaggactagttgcaaaaggggcacaaaaccacttcttagagtgatgggaaccttccttatcttgagtgggtgctggtcacctggatgtatacatatgtcaaaacttactggagggtacacttactgtgttctcaattataccttgatttttaaaaa

SEQ ID NO: 80287 - DNA, 600 bp, Homo sapiens
ttctcttaatgtcttaaaattgccctggtgaccctatatatttggaaaattgttaaaaccagataaataaaactctaaactctccattattgtatctgaattatttagataatttgattataataagaagaaataaggggtagaaaattgcttccattttctatctttccaagtcttcaaatgcaaaaagttggatacagractgtcaaacatacatttctaagaagctgtggaaacataaaatctgttcgtttgtagcaattatatgcttttttcattaccaatttgagcggatgcagtaatttcaactctgagggttagtctcccccaaattctcaccaagctgtttccattgccctatatggtattaacattaatgaattgtgataaccagaatatattcttttttaataaactgacatcaaattaataaaagaaaaatgactctcattttttagtcatgtaaggtggcaccttccaaaattctgcagacatcaatctcatgaatttctagcagctctgaggaagagggccttgttaaaatattactgtttattgcattcattcaatcttcattagctgagataggacttcaggatc

SEQ ID NO: 80288 - DNA, 2956 bp, Homo sapiens
tttttttttttttttattggtaggctatttataactgtctctattttaaacaggtagttttgatgaatccattgcacagccaggtgcctcgtagacagtttagaatgtagactcgggaaaatgacattgtctccagtttcatatgtagttttagagtcttcagaggtgttgagagagacataaagtgaaagaaagatggggagtgaacgtaggatgaaggtgcctatgaagaaataagataagcacatcgtggaaatttaagaggagcacaaagtcataaaagataaaaactgaaaaattcccattggatttatttttcatgaaagaagggatttcctccctttggcaaggcaaattttgatggcatgctgagcgcagatgtcagacaccacgggtttgaggaatgaaggtaaggtgcagatggagatggtaaatgagggttcctctttcacgaggctctatactaaaggtgaggaggcatggtgagaagctcttggggcacacatgtattttccctgccattctcctcttttctctatattgacattccccaatgggaatccttttcaaaactcagggtgcctcaaaacttctgtgtttttttgtttttgtttttgttttcctgacgcttttctgatgttgagtgcaagaacttagtctgtggttccttctcctctgtctgtctcaactaaacaattgcaaaaccacttatccctacctgtaatctcaatgtcaaatccaacagctgaccagtttattgacagctcttgcatatttcatgttaattcaatacacatttgatacaattaattaaatggtaaatgcctatgggtgtagagtaatttaaagctagtaaaatactctcacaaatattatcacatatttttgactagtccaattggtgtcaatgatgaagatatttactaataacctacattttactattgtctgcstttagtttgctttgtctctgagccaatgtgaccccttatcttatagataacataacagatgttaatataataatcaaattatctgtcaataggattttgaatgattaaaaaggaattggattgtaagattttctccaaaacatgcatcatgttcattataacacacctgatattttacttaaatatttttcaagcccaatttattattgaaaatatttgggagtttttgacattgttttgcagcagaagcctattaatattagtatatttacaggaagtttaaaataaaatcaaaataaccatctaaaagaactttgcacattatgtttcagaaaccatgaaagagataaaactaattcatttatacgtattaggcacaataaaatcatattagaagcagagctcatttataattttatgtacaaaatagcaaaacaactaaattctgtttcctaacattaattgaacatctattatgcctgtaaaacatagtgctaggaaatgaatgatataaatggtaagttcctttattgattcacagtcattatctgcaattggagacactcagtatccctacaaaacacatttaattactttctgactgcttcaaagtgtaggtcttaatagaattgcacttacattcttctctgttctaccgtgagatatatgttgaatagtgcagttctttaatgcttttattttatagattcactaccatgattcactttggtatctcagggtagctgaagcttatcaacatctttacttgtggggtgtgacctgtacttcttaccatgggagcatcatgagaaactaagggaaatgctgggtacagtgattcatgcctgtaatcccagaactttgggacgccaaggtgggcagatcacttgaagtcaggagtttgagaccagcctagccaacatggcaaaacaccataactactaaaaaaaaaatacaaaaattagctgggcatggtggcacatgcctgtaatcccagctactcgtgaagctgaggcaagagaattgcttcaaccctggaggcagaggttgcaaggagctgaaatcatagcactacactgtagaagtgaggttccatctaaaaaaaaaaaaaggaagaaaaagaaagaaaaataaatgaagggaaatatccaagtgcaacttttctcaagaccttcaaccaagagaaaggtaactgggcaacatcacacactacccttggcaacttaagcatttgtcctgacaggtggcatgtctctggggactccaaacatatctcagcatttcagtgaaattacttaatgtttttaaactcatcttagattccctgcattatgtgacatcaataatattgtctattctgaaagcaacagagtgcatgcatgtatgcattaagtgttcataaccatgggtaagaccattctatcaaaagactgagcatacatgttactgagcatttatttatataacagaaccatcagcaacttgaaagtataagctgtgtgaagagtccttaagtctcaggacctcagctgagctgtcaggtattggagtcatcaattaagaccacaagacaaaaggaaagcaaccgtctgttccttaatcactgactgctttaatataagcaagaggtaaactggagaaagtgcaaattcgtccattccattcttttacatggaatagtgcaggtcaaaggtcaagtggacaaacagagatgtgagggttataaggggtggtctcactgctaagggagccgcaaacgaagggcttctgtggttttatggacctgggggtgggcagagggagacaggagggtagtggataagagtggaaaagtcctgtaggctgactcagagtggagaaagtgtcttcagtgttcccatctgtattagtccattctcatattgctataaagatactaccagagactgggttatttataaagaaaaaagattcaattaactcacagttccacatggctggggagacatcaggaaacttacaat

SEQ ID NO: 80289 - DNA, 1480 bp, Homo sapiens
ccttccacctcagtctcccaaatagcttggactacaggcatgagccactgcacccagtcctatttatcttttattgcatagtaattggcaaatagtaggggtgcaacacatggttattccacataagaatgtggaaaacttggacaatctatagatattgctgatgggatgagcaccagggtcaaatttaaattttcttttaacattatagaagacacaaagtgctgagtgtgctgtgcttgaagggtaggaaggctggaagggtaggagggcaatttcactggaaagagtggatacagagttagaagactagtaggacagagtgaggaaaggaagagtgagtggcttggtcagagtcaaagacagtcacagcaaatgatgtcatgggcaacattattaatgtattttatccaaactcatttcacgaaagtctgatttacagcctcagactattttatttgcatttaatttggcatagcttagattctggtgcctaataacagaacacggttttagttccaccttgttcacatccttctctctgcttgacttcactactacacatcgtttccaagttacttctctgtccactcacctccacccaaacaaaacccccaaacagcaccacacttttgtgtcaaagttatcattgtacggctagctttacaggatccaaatacacccatatcacaaatattagattgaaaaaaaggccttcattgagaggatcgatacctaatgggatagaacatggaaaygtcctttgctacaaacaaattttgcaggagctgggcaaggtgacatgcacctgtagtccctgctgcttgggaggctaaggcaggggactctttcatctcaggagtttgaatccatcctaggctccatctctaaaaaaaataaagaaagaggtaaaataaattttaaaaaattagtaacattttaaacattaaaaatattaaaatttcaggggatagaatttgttaaaaaccagataaaccaaacactgccaagataagtatatattcaaaggtagaaatagcctgattatgtacacccgaatgttataatgctatttgttaaaatgacattcagtgtttactgtcatgtatatatttagtagcgattatttatccacatgcatatatacctattcatacatatatacacacacatatgtctgtacatatataaatatatagatacatagcaaaactgcacttgtacttcctaaatcaataaaaataaaaaagacaaaaaataaaaaatttaaatttgcaaaataatattatttttaaaagttcacaaaaagatatacatgtatacatacaaacatgtgcattatgtatatattacgtatatatattatacgtaagtatacacacacatatatgcaaaataaaaaactctcatgggaaacattctggaatttgaaaaaaaataaatcgagactattgaagcacgtcatgtcaagattcactgt

SEQ ID NO: 80290 - DNA, 684 bp, Homo sapiens
  misc_feature (1)...(684): n = A,T,C or G
tagnnnnnnnnnnnnnnnnnnnnnnnnnnnnnnnnnnnnnnnnnnnnnnnnnnnnnnnnnnnnnnnnnnnnnnnnnnnnnnnnnnnnnnnnnnnnnnnnnnnntttattgtcatgaaagtaatttcaccctatgcccctgttgcaggattttagaaaaaccactggttgccatcattggaaagtggtaatttaaaagctttaagcttggtaaccccaaaggtttgggggaaaatattagttctacctggtttaaagtatctagagaggaccctgcagtctttgaaccacagtggtccaatctaaagatatagtcaatgcattattcagtgtgttttaatggaatgggagacagaggtgagtgggagacagagrtgagtaggagacatcgtatatgacacaggacatttgacaaagactagagacatttttgatttggagcgcactgatggcatctagttggtagaggccagagatgcttgtaaacatcctacaatgcacacgacagcccctgccactacaaagaattatcagtccccaaataccaatagtgtcaaggttgagaaagcacgctggaaatccatatgatctctccaacggaagagactgctgcttctatatcttgcttagaagacagggtaccttagttccagacttccttgattcagaactgcttttccaagcta

SEQ ID NO: 80291 - DNA, 638 bp, Homo sapiens
tcatcctttttgacatttgcatgtatgtattttccaggtacttgttggggattttctacttaacccctagatagtcttcccagttagcatgttttccatccatggcttcaaataaaatgatttagtcatgatgtctgattctgagatgtggcagggagcaccattctatagtgcagacccatatttcaagatccctttttcatgactcaaagttgcctgaaagtgaacagaaacatattgaacttccttcccttttcactcttcttctttacataaaactgtcaccggcagacgtggtgtgcttcacaactaggaaaggcaaattttctaacatattgtactggtcaacttgaatgccaatcatttatctatgttggtgcaaaggtgaacacattttttgccactactttcaatgacaaccgcaatcacttttgcaccaacataatactaaccccttcttttattttctcatcttcacaaacacagagctcaagttcaattatgcctatccttagcatattccaatcattttcctatttttttgctatttacttctttctctttgttcttcagatgttatttcccctttggttcaatctttgccctaatgttgccartaaaataagtatcactgatta

SEQ ID NO: 80292 - DNA, 679 bp, Homo sapiens
attcagggtcatggttacttctgaaggaaagacatacatagagattccatagtactggaaattgaacaatacacaaccaaaaataaaatgcacaagagtgattaacaaaaaatgcaaattgttaacaaataccaggaaaaagatacaccttattacgtcagagctattcaaatgaaaataataatgagagacaactattcccataggataaagaagaatgtattaaaacaatggcaatatagtgttagggaaatgaagttagcgaaagcagtaagagtggaggtgcttctcctgaagctgagaatctggaatctgggaagcaaaaccagaggcaggtattaaattattaaatgctcacatctataatcccggtgtatccggagttggttccktccagtgggttcatggtcttgctaacttcgagaatggagctgtggaccttcacggtgtgttacagctcttaaagatggcatggacccaaagagtgagtagcagcaagaaatgttgtgaagagcaaaagaacaaagcttccatagcatgcaaggagaccagagtgggttgccgctgctggctgaggggtggccagcttttattctgttatttgtccccgcccatgttccgtttctgtcctatcagaatgcccttttttttcaatcctccctgttattggctactttta

SEQ ID NO: 80293 - DNA, 593 bp, Homo sapiens
aatgataagaatctaattctgcaacgtttgtggctaataatgacggtgcaagttcaaaattactctgagcttgtgatagaagtcaataagtattctctcagcaactgttgtgggctgggtgttacaggggatgaagagagaagaaagacactaccttcatctcaagcttaggatcttcatgaaatttttttttttttttttttttttttgagacggagtctcactctgttacccaggctggagtgcagtggtgcgatcttggctcactgcaagctccgcctcccgggttcacgccattctcctgcctcagcctccygagtagctgggactacaggcgcccaccaccacgctcggctaaaatttttgtatttttagtggagatgaggtttcaccatgttagacaggatggtctcgatctcctgacctcgtgatccacccgcctcggcctcacaaagtgctgggattacaggtgtgagccactgcgctcggcatgggattcttaaagtacctaatttaagtttttaaatttctagactacaagaaagaattcagtagttgtggtaaatgaggttaagattctaagccatatgata

SEQ ID NO: 80294 - DNA, 593 bp, Homo sapiens
aatgataagaatctaattctgcaacgtttgtggctaataatgacggtgcaagttcaaaattactctgagcttgtgatagaagtcaataagtattctctcagcaactgttgtgggctgggtgttacaggggatgaagagagaagaaagacactaccttcatctcaagcttaggatcttcatgaaatttttttttttttttttttttttttgagacggagtctcactctgttacccaggctggagtgcagtggtgcgatcttggctcactgcaagctccgcctcccgggttcacgccattctcctgcctcagcctcccgagtagctgggactacrggcgcccaccaccacgctcggctaaaatttttgtatttttagtggagatgaggtttcaccatgttagacaggatggtctcgatctcctgacctcgtgatccacccgcctcggcctcacaaagtgctgggattacaggtgtgagccactgcgctcggcatgggattcttaaagtacctaatttaagtttttaaatttctagactacaagaaagaattcagtagttgtggtaaatgaggttaagattctaagccatatgata

SEQ ID NO: 80295 - DNA, 1652 bp, Homo sapiens
actttactcttttccaatttttggctctgtggttccatttaggttgtttctatccaaagaaagccaggaatggcatatttatttcttcccccaaactccaaggtgtgctttgctagtttgttttccttagagaaatgaggtttaaactgtctcagaaatgggcatctccagtaggtaaccttctggacttgaactgataatattttgcaggggtgtctaattcttctgaaaatgtgacagctcttcgacctgacagcccttctgccctgactggtcacatgtgagggaatgtgtgtactgtctggtgactgctaaatgtggcccaggcattcacttacccagtgcacaagacccagcagcatcaccagcaaggtagcttgaaaaatcttttaattaaatattctaggctacgcgcagttgctcagacctgtaatcccagcactttaggaggccgaagtgggtgggtcacctgaggtcaggagttcaagaccagcctagtcaacatggcgaaatcctgtctctactaaaaatacgaaaattagctcagtgtggtggtgtgtgcctgtagtcccagctacttgggaggctgaggcatgagaaccacttgaacctggaggcagagaatgtagtgaaccgagatcgtgccactgcaccccagcctaggtgacagagcaagactctgtctcaaaatgaataaataagtacatacatacatacacacagacatactctaaaacttagagagtcactttaacctttgcagtattgtcttgacctraaaaaatgaagatactaggtgtagtggctcatgcctgtaatcccagcattttgggaggctgaggcaggaagatcccttgagcccaggagtttgagaacagcctaggaaacatagggagaccctgtctctacagaaaataaaaataaaaaattagccatgggtggtggtgcatatctgtggtcccagctactaagtaggttgaagtggacagatcgctcgagcctgaaaggtcagggctgcagggagctgtgtatctcaaatgttttatttcgatggccctccaggccctgggtcatctggctcctgcctctcttctcattgggcttcagccatgctgcctgcattcctccaactcccagtgccccttcttgcttcctctaaagctgctcacatcctctgcctccccatttcctgtcatctgtcaggtggaagcttagggaggccttccctggactccacacaccactacactccagcctgggtgactgagcgagacctagtctcaaataaataaataaataaataataaaaataaagcatcaaaacattaatcttaggaatctttttcagcttgtggagtaaatcagatgaacagtgtgtgagaattggaaaacgtgtcccaaagaataagcacaacagaatggcgtaccttctttcaacccagttcagtttaacacaagagacttcacacggttaattccatgtggaaaggacattttcttgctggaaacaaattttaatctttgtgagtctggaatgcactaggaagaacacaagatatgataccaagaatgtctgcccagccttgccattagaagtcttgtgacatggaactctgtctggcacactcataaccttaatgcaagaggatggt

SEQ ID NO: 80296 - DNA, 1495 bp, Homo sapiens
ttttaaagatcaaatcagtataattggaatatttaccaccttaaatatttgtctaattctttcaaagaattagaattattctttgtcgctattttgaaatacacagtagagtataataaactatagtcaccctctggtctctgaaacactaagtcttatttcttctatcaagctgtatattggtatccattcatcagtgtctcttcatcctcccctcctcactaccttttccggcctctgrtaaccacccatctagtccctgtcttcatgagatccacataagctcccatgtataagtgataacatgtactatttgtctttctgtgcttggcttatttcacttagtaacctgcagttccatccatgcaaatgacaggatttcattctcttttatgacagaataatattcccctgtgtatttttcatatgtcttataatttatgaccagaattagcattctgcattttagttgactttttacatgtccgcttctccccctagacttaaggcttctagagggcagaattttgtattaatcagctctatacccttaagtcctgtcatggtgcctatcacacagaaggtacctgataaatatttgcgaagtttgaattgaaaaatatgcagtaagacatataacaggtagcaaagaacaagaggacattttaactaatgtttcatttaaagaaactaaatccttctagaatataagaagccagagacagatgaagtaaagaaagaaaatgattagcttagaaaaaaaaaaaagagttttttttttgtttgtttttgtttttgagacagagtctcactctatcacccaggctggagtacagtggcacaatcacagctgcttagcagccttgacctcctgggcttaagcgatccttctacctcagcctacccagtagctgggacttcaggcatgcatcaccatggctggctaattttagtattttttgtagagacaagatctccctatgttgcctggactggtttcaaactcccgggttcaagcaatctgtccacttcggcctcccaaagtgctgggattacaggtgtgagccattgtccctggcctgaagtccaacttttaaaagttaacagatcgaggggagagaagcagcaataacaataatgaaggagtttgtgtttgtgagttgtaaggcatgagctagaccaggatattcaccacaatatcagtaataacacctaattgtggtacctaacatttactgggtgcttcctatctactaggcaatttgcattcgttattagatttaatctttatggcagccctttgaaggtctgtcattattctccattttatgtatcaggaaactgatgttccaaaagcgtaacttgctagggtcacacagacaggatgtggctcagctcagattttaatccaggcccatgagattccagtgggactgtgatcagtgacactctccaaagagcaccttggaagcccacataatggtggacgacaggc

SEQ ID NO: 80297 - DNA, 784 bp, Homo sapiens
tgcatacattaaatagctcagtttagtcattccacaatgtatatatatttaaaatatatataccattgatacatacatacaatttttctcaattaaaagtaaaggtaaaaatatataacttaaggaaatttattttggtaaatgcagatgttatggtcataacttattagcacagaaattaatgattccacagtaaaaataaaataattgtaggagcaaagctcttaagtgagttagggcatatctgaactaaaacatgaacataggtttggagtggtaggtttaacttattttagaagaagaaaggtttaggttactgtagccttgtagtatagtttgaagtcaggtagcgtgacgcctccagctttcttcttttggcttaggattgacttggcaatgcgggctcttttttggttccayatgaactttaaagtagttttttccaattctgtgaagaaagtcattggtagcttgatggggatggcattgaatctataaattaccttgggcagtatggccattttcacgacattgattcttcctatccatgagcacagaatgttcttccatttgtttgtatcgtcttttatttcattgagcactggtttgtagttctccttgaagaggtgcttcacatcccttctaagttgcattcctaggtattttattctctttgaagcaattgtgaatgtcatgatttgactctctgtttgtctgttactggtgtataagaatgcttgtgacttttgcacatcaattttgtatcctgagactttgctgaagt

SEQ ID NO: 80298 - DNA, 829 bp, Homo sapiens
gcccccatgattcaattatatcccacttgatccctcccacaacatgaaggaattatgggagctaaaatacaagatgagatttgggtraggacacagaaaaaccatatcaagatgcttatttgaggcattttccttttttcacaattgtaattttcccaaactgcaataaatattttgcacatcttttataataaaatttcttaaaataaagcttacagaagtagaaatattaaactaaaattttagacttaaagaacaaaatgcctacctagaaacattatgatggtaattaatttcacttactgtatgaaacacctttaacataaacacatgatattttttgcatgtgatttgactccaattcttgaaataaatttctcaactgtccttcaaagacctgctcattctgttcccaaaattgcagaaataggtatgtatgaaaaaaatgataacttgctttttagtcttctctgcttaggaacattgactaaatttgatgcttaatataactttatattaactttacttattttctatttttcaatcagcctgttttctatttttaaaccatcttcctaatctgtggtcatgcttagtgccaatatcctaaggcaatgaatatgtctcaaatccaaaaccaagcagccactcatttttgcaaacttcttacatgcacaagtcatgtatactcaggaaccccagggttcattgtcacttgacagattttcctgcaggaccatttcagtattcttgattttatactcaataaaggtattctgacaagaagtaaaaaacacttgaagcattcttttttttttttttttttttt

SEQ ID NO: 80299 - DNA, 608 bp, Homo sapiens
gaatgttatgatacttaaattrtatttccataaagctgttaaaaaaatactactatcatggggtccactttcttggaaatctgttttaaaagaatgtttttgtagctagcacagtgtgggtataaaataaggactcaacaaatattagtcgattgatttcttagttcatttgagacattggtaaatcagcacataattgatgtgcatcttaggggcttctgctgatgagcagcataggctaaggctctgatggaattcaggcttttgctcgtatcttggctttgctatttattgaccttataatggggatcatcactcaatctctcagattctcattttcccattctaaatgggccattgacaataactctcacagagaattaaataagagaatgtgaagggaaaataagagagcaatattcatgaaacaagattgaccatattttgctagtggttgatgataagtgatggatgtgtgaaagttcattgtgagactctctctacttttgtgcatatttgaattatctaatataaagttaaactgtaaaaattacatatatgatactgtaggttaaactctgttacatagaaggcattggacagaagat

SEQ ID NO: 80300 - DNA, 496 bp, Homo sapiens
ggactgcaatcaagagtggaaaaaatcttgaagaattgactcactaaagcttccgtcagacattgacagctcaatggagcattgctttgcagcccctgtaatggtaatcatatgaaagcatttgccccaccccagggtgaccgtgggaacctggagaagttaagaaatgaatgtaatagactgaactgcaagctgtggcagtctgggtctggaaggagaagaagctgtagaagatattttccttcagtagcttctccacagccatggtgggagatggcagaaacagccagcatcacttctgggagstggaccacagaagagaaaaagaaacaacagacccaatagggtaggtaaaggatgccctccttcactcaggagaaacagttctttccttctcagtctcctctgagaggaatttgaagagatagagttgggggttgagaataggctggagtggctatagagtgagtggggacaaagtcaaggaacttctgtg

SEQ ID NO: 80301 - DNA, 638 bp, Homo sapiens
agatgggggtcttgctatgttgcccaagctggtcttgaactcctggggtgaagtgatctgcctacctcagcctcccgaagtgctgggattataggggaagtcaccacgcctggctggttaaagaatttttaatagtaccattctacaaactgttaaacagaaatttttgaggggtttttggatccgtttttgataaaggatgtagaaaatagaaaagaaattcctgtcactgctcccaaacacagagaaaaagtgtacttttctcacattccctgtctgctagagtggctgttgtatccactgtctgcagtttcttcacattatcccctcaggtggcatgtcagacaatttcttttgtaatttctcaagatgaatatttggaatgccaatcaagaccatatataaaggacagaggatcatatcagattattctgtaagccaaaaactaaatatctagtattatttattaccaatcaaaaatatatttgcagagaagatatacttgcaggaattattcaaatataagatctcagttgagttaagaatggaatcattgctrttcagacacatcaatcgttttcaatgatatagttcctttaaaaatcccctcatcttcatgactatgtaaaatacatgca

SEQ ID NO: 80302 - DNA, 1183 bp, Homo sapiens
cttacattaaaatatcaatgagcagctgcaataataacaaaaataaaacctatctgcataaaactgcttactttgtccatgactttgtctggacagaccaatttataagaacaagtttagcctcctgtaattaaataaacttgtcagagctcccctaggcctggcatgcatgggtttaatagacatgttttctggtgacatgtattgcctctaacatcttaaagtaaaaattgggaaagtgctgagccttttctggggggcactggtttagacattgtgccccttaggggttaagcctaatagcatcacaagtctttcagtaggtcacataatttctcatgaccataattttcaaactttaagataaagatattggagtagatttttttccattttttttccatctgaaaaattatgagtctatgagaaacagcatcaatgagttagtaataccaaccactcaaaattttgttgctattttatatcttggatattatgcactgcagctggctatacaatttgatttccaaactttagaatcatgtcaccattagcagtttatattcatttagaatccatgagcccgaagtgatttatggaattttatggaacacagagaagatgtgatccttgccgtygatgtacttacagcagaacttttgttttgctgtatactcaattataataacagactccttttccatatgcagaaatatctcccagaaataattagctgcagacacaaaacaattaggtggttgcaacctcataaaatgtggttgttggttaattggctcatattcacattatgatatttgcatctaccaccttactacctgcaaaattttagctcacaaaaatagaaatgaggtttcaaaaatatgccctggcaagtgtagtctaagtagtcagtatgacctgaattttctatggacattcttaatagcactgaaaaatgttcaagcatatggaaatgaaaaatgttaatttctagactgcaaactctttttcaggaagaaatataataaataccaagggcttagagcaacacccagtcatcgcctcaattttccatctaaacctatttttctctgtgggttcattgtctcaggacttttatacttgaaggcattgggttgtactttctttttagtttcttgacaccttgcctatggtagggccc

SEQ ID NO: 80303 - DNA, 1079 bp, Homo sapiens
tgcatgctgaaaaaaataattgaagcttcagttttctctatatttacaaacatttaactgacatacatataaatacatgactataagaatgtatagacagcacttgtgtgcaatctgctgtatggcttctgtgaatgtcactggagaagactccttatggcacagatttattcattcccacagtttttatttcattttggcagaagattactcagagttttagggtttgtccaatcagcttttaactaagcccagcatacaatgccaataatgaattccctacctaaacccaactaactatgtgaatgctccagatgttcttagctcaaacatctgttgcttaaggcaggggggaggttctgcattgtaccatacctgagttacttgctacatttacatacttcatatgggaggctaattcaatccactgaattttaatataggtcactgtacagaggtcaccaatcatgatagaataataaaatagtgataatttaatgataaaccagtaaaatgaagtaattatgaactaagaagaactccaaaagaaaatcactttactcaatctcagtttgctatggcagtagtatatatattttattacatgttttctactgaataattacaatattataaatacaatagtcataccatggtcccagtaacactgacaaggcctttgaaggacttggagagataaagtctgggctccaggaccacacccgtactttgggccagatcatctaggcttctattcacatagtcagttatttayttgacatattgttctgcactttttgttggaataaagaattccaaggctaactacatatagcctagctccctcattttacagatgagcaaaaagagaccagagaaaataagtccgatcaaccagattaaataatacagtaaatgaaaacttggattagaatctagttttcctaattatctagtactctatgccctgcacaatactccctcctttatgtcaaaacatccctactataaacccatgtgtatatggcaaatccaaattggtggcaagtcagtatcagattcgtttcaaaagaaatgca

SEQ ID NO: 80304 - DNA, 1036 bp, Homo sapiens
acttacatcgagcccatcttttttcttctgtgtctctagctgaactgccgtgagagacactgacggtgttgaggttgaaggctacttgtcagggagatcctgagaaagttaaagggccaggtaggagaatgaactagtgttccccaagtgtgaatttctgaccggagagacaaacatatgctgtccatcagcttgatggtatttgctccacttcctgcctctacctcactagtggttgacatcttcagcaaacagtgggaagttcctttcctacagaatcacgtgggctgagaaaccctttgacaataaggatgcactaagctactccaatttcgggagataatatatggagaaaataaaattacttgctgcatttaattttgtatctaactgaactagaacatttgtaattaaaaacactttaaatgaatccagtaaattattaaaagttatggctagcgaagcaatattgtgatcagtggtagcgagaacaatttaaccaggagaggggcttgtttgggagagatgtggggctgaaaaaagtttataagatgcagaagtgaggccgggcgcggtggctcatgcctgtaatcccagcactctgggaggccgaggcgggcggatcacgaggtcaggagatcgagaccatcctggctaacacagtgaaaccccgtctctactaaaaatacaaaaaattagccgggtgtggtggcgggtgcctgtaggcccagctacttgggaggctgaggcagaagaatggcatgaacccaggaggcggagcttgcagtgagcagagatcgcgccactgcattccagcctgggcaacagagcgagactccgtctcaaaaaaaaaaaaaaaaaaaaaaaaagttgcggaagttcccttggcacacttggctaaggaaacctggcaccgaggatatgaaactgggggacttgaggctccctgaataagagatggagcttgcagaggacgcactaggtgcctggcgttggcctaagcactttccagcagataayttgcttatcctcaggg

SEQ ID NO: 80305 - DNA, 666 bp, Homo sapiens
tggtttattgaatttcatctgaagaataagcgataacaaaaattgtttggtcttataaccaagtaaatagatatttggatactaggtatggggagaaataaaactaattgtttaaacctcagttaatgagaacatactgttttgccagtgcagtgttgggaaagaaagcatctttatttgataatggaaaatattaataattacttaaagcactttgttgaagtaactgtatgagagctacatgtttcttgtgggtagccatcactctttgtaacaattgttttaataccagagctctttcagagagtaataacagaagtataccttttactattgttaccagaaaggggtcccgatcaagacaccaaaagaaggttcttggacctcgtgcaagaaagaatttggggcaagtccataaagtgaaagcaagtttattaagaaagcaaaagaaaggggctgggcgyagtggctcacgcctataatcccagcactttgggaggccgcggtgggtagaacacgaggtcaggagtttaagaccagcctgagcaagatggtgaaaccccgtctctactaaagattaaaaaaaaaaaaaattagctgggtggcaggcgtctgtaatcccagctactcgggaggctgaggcagacaattgcttgaacctgggtg

SEQ ID NO: 80306 - DNA, 823 bp, Homo sapiens
ttgtttttgtttttgttttttttgagatggagttttgctcttgttgcccaggctggagtgcaatggcacaatcttggctcgctgcaacctccgcctcctgggttcaagagattctcctgcctcagcctcctgagcaggcatgcgccaccacgcccggctaattttgtatttttagtagagacggggtttctccacgttggtcaggctggtctcaaactcctgacctcaggtgatctgcccacctcggcctcccaaagtgctgggattacaggtgtgagccactgcrcccggccttgcatagttcttacgacttagcaattccatgtttgggtatatgaacaaaataaattgtcatgcacaagtcatttggtgtgtgtacagatgtttattctccctgcttgcagggacagggatctgaagcctcctgggagcccatcactagtgagtggattgggaacacgtaaatgaatgctaccagaggtacccacaccatggatatatcccaaagaaagtgctacaagaaatgaaagaaacaagcagaagcaatctacagcatgatattgtttatgtaaattaaaattacagtcatacaaagcaattcatgttttgcaagaatacaaattatagaatttacattgcattggtttcctagggctgttaggaactaccactaattgggtggcttaaaacaaaataaattattctctcatagttctggaggcctgaagtccaaaactgaggtgtcgacatggttggttccttctgggcctccgaggaagaatctgttcaatgcctgtctcgtagcttctgatggtgctggcaa

SEQ ID NO: 80307 - DNA, 1093 bp, Homo sapiens
tttttcctgttcactactgtataatatttcattgtgtgactataccagaatgtattctaccactgataaacatccgtgctgtttccaattttttgctattataaacagtgctgcaatgaacattcctgtattggtgcatatgatcaaaagattctccaatacatatggctagaagaacactgctggatcaaaggttatgcctaattttgactttagctaagctattttgacttttgactatagcgtcaaattatttttccaaagatcwtcttccagttcacagtctaatttcctatttcttggcagaaatgttgaaaactaccttggagaatgttattcctagattttttgagcttaatctctgaatttcatttaccttagtggcccgtcaagctgtctccaacatttcagaagccacattaatgtgagaaaactatgagaattatatccaatttgtttctttctttactagaaattaagctatctactcttgcaatggaatactttgaagaaatgatggcaagtagcctaaatcgctctttttcttcaatacttaagaatgtaactaaaaattcataccaactggccgggcgcagtggctcatgcctgtaatcccagcactttgggaggctgaggtgagcggatcataaagtcaagaaattgagaccactctggccaacatggtgaaaccctgtctctactaaaaatacaaaaattagatgggcgtggtgacgcgtgcctgtagtcccagctactcaggaggctgaggaaggagaagcatttgaacctgggaagcagaggttgcagtgagccgagatcgcgccactgcattccagcccggcgacacagcaagactctgtctcaaaaagaaaaaaaagaaaaaaaaattcacaccaattatccagttgatttttaagtgcaaaatgcaagaattcccaatattaggtcacaaggacaggttttgcctattttcaatgctaatacataattaaacttccatctatgttttaagattgtttttctcaaccaagtctgatgaattatataatttgtgatgtacctgttgacaaatcatgcttcttttacataatta

SEQ ID NO: 80308 - DNA, 1093 bp, Homo sapiens
tttttcctgttcactactgtataatatttcattgtgtgactataccagaatgtattctaccactgataaacatccgtgctgtttccaattttttgctattataaacagtgctgcaatgaacattcctgtattggtgcatatgatcaaaagattctccaatacatatggctagaagaacactgctggatcaaaggttatgcctaattttgactttagctaagctattttgacttttgactatagcgtcaaattatttttccaaagatcttcttccagttcacagtctaatttcctawttcttggcagaaatgttgaaaactaccttggagaatgttattcctagattttttgagcttaatctctgaatttcatttaccttagtggcccgtcaagctgtctccaacatttcagaagccacattaatgtgagaaaactatgagaattatatccaatttgtttctttctttactagaaattaagctatctactcttgcaatggaatactttgaagaaatgatggcaagtagcctaaatcgctctttttcttcaatacttaagaatgtaactaaaaattcataccaactggccgggcgcagtggctcatgcctgtaatcccagcactttgggaggctgaggtgagcggatcataaagtcaagaaattgagaccactctggccaacatggtgaaaccctgtctctactaaaaatacaaaaattagatgggcgtggtgacgcgtgcctgtagtcccagctactcaggaggctgaggaaggagaagcatttgaacctgggaagcagaggttgcagtgagccgagatcgcgccactgcattccagcccggcgacacagcaagactctgtctcaaaaagaaaaaaaagaaaaaaaaattcacaccaattatccagttgatttttaagtgcaaaatgcaagaattcccaatattaggtcacaaggacaggttttgcctattttcaatgctaatacataattaaacttccatctatgttttaagattgtttttctcaaccaagtctgatgaattatataatttgtgatgtacctgttgacaaatcatgcttcttttacataatta

SEQ ID NO: 80309 - DNA, 1093 bp, Homo sapiens
tttttcctgttcactactgtataatatttcattgtgtgactataccagaatgtattctaccactgataaacatccgtgctgtttccaattttttgctattataaacagtgctgcaatgaacattcctgtattggtgcatatgatcaaaagattctccaatacatatggctagaagaacactgctggatcaaaggttatgcctaattttgactttagctaagctattttgacttttgactatagcgtcaaattatttttccaaagatcttcttccagttcacagtctaatttcctatttcttggcagaaatgttgaaaactaccttggagaatgttattcctagattttttgagcttaatctctgaatttcatttaccttagtggcccgtcaagctgtctccaacatttcagaagccacattaatgtgagaaaactatgagaattatatccaatttgtttctttctttactagaaattaagctatctactcttgcaatggratactttgaagaaatgatggcaagtagcctaaatcgctctttttcttcaatacttaagaatgtaactaaaaattcataccaactggccgggcgcagtggctcatgcctgtaatcccagcactttgggaggctgaggtgagcggatcataaagtcaagaaattgagaccactctggccaacatggtgaaaccctgtctctactaaaaatacaaaaattagatgggcgtggtgacgcgtgcctgtagtcccagctactcaggaggctgaggaaggagaagcatttgaacctgggaagcagaggttgcagtgagccgagatcgcgccactgcattccagcccggcgacacagcaagactctgtctcaaaaagaaaaaaaagaaaaaaaaattcacaccaattatccagttgatttttaagtgcaaaatgcaagaattcccaatattaggtcacaaggacaggttttgcctattttcaatgctaatacataattaaacttccatctatgttttaagattgtttttctcaaccaagtctgatgaattatataatttgtgatgtacctgttgacaaatcatgcttcttttacataatta

SEQ ID NO: 80310 - DNA, 775 bp, Homo sapiens
taataataaacacttttaagtcccttttgtaaaaataaaccctttcctggtacttaattcactgtctaagcattgattttcatcactggtttctttctaatctaagttctcaaaagaatagcatacatcagccattataattctttcactctaccaaaagttctcatatccatttctgagtaaattcaaggtgccaaaacaaaatggcatttttcaaagtttatcttactgggtccttctgaagtgtgttaagcaattaaattacttaaatttacttttcctctctgatcattcctattgttttttgcatggacgcttgtctcctattattggctttacccagagttaagccatagcctccttgtttgttccactatatctgtggtttctagaaatatcttcttccatagtttcagtaccacctctagagtgataaaacaggtagacaaatggatctgctagaatgatgtatctagcgtgcatacctaaccatttctctttcctgctgaaaaytctgctggtattctccttacctaaacagaagaaggctaactgggagatcaaacaacctgttgttttttctcgttcagatacccttgatctatataatgttttgtcttgatgttcttgttttgggtgtgtgtggtgttttttttcattgttgtttttttgcttgtttgtttgcttttctttgacaggctcttgctctgttgctcaggctagtgtgcaaagaaatgatcaggactcactgcagcctcaaactcctggactcaag

SEQ ID NO: 80311 - DNA, 775 bp, Homo sapiens
taataataaacacttttaagtcccttttgtaaaaataaaccctttcctggtacttaattcactgtctaagcattgattttcatcactggtttctttctaatctaagttctcaaaagaatagcatacatcagccattataattctttcactctaccaaaagttctcatatccatttctgagtaaattcaaggtgccaaaacaaaatggcatttttcaaagtttatcttactgggtccttctgaagtgtgttaagcaattaaattacttaaatttacttttcctctctgatcattcctattgttttttgcatggacgcttgtctcctattattggctttacccagagttaagccatagcctccttgtttgttccactatatctgtggtttctagaaatatcttcttccatagtttcagtaccacctctagagtgataaaacaggtagacaaatggatctgctagaatgatgtatctagcgtgcatacctaaccatttctctttcctgctgaaaattctgctggtattctccttacctaaacagaagaaggctaactgggagatcaaacaacctgttgttttttctcgttcagatacccttgatctatataatgttttgtcttgatgttcttgttttgggtgtgtgtggtgttttttttcattgttgtttttttgcttgtttgtttgcttttctttgacaggctcttgctctgttgctcaggctagtgtgcaragaaatgatcaggactcactgcagcctcaaactcctggactcaag

SEQ ID NO: 80312 - DNA, 1119 bp, Homo sapiens
cttggagttgaaaaaagtgctaggtaaaaagtggtgaaaaaaattggcatggactttgttgtaaaaatcacagtcaaatgtgaaaacaaaataaataagttaaaactggccttccttcaaacaggaaagttctagctcattttctgtctttgaacacaattttttctctgcctggacggttctttctcaacatgtacttcttgtgaaaggcgtaactcactacttataaaattacatgttaaaattgtcctgtgtgcaagtctaccagtctccttacaaactgtaaactcttagagattaagcagtgaacctgttttgtcttggaactcccagtgctatgcacaacatttggcaaacaataagcaataaatatggttttgttgaacaggtaaatagataaatgtgctttacaaaaggattatcagcagatcattttaaaaaatatttatgaagataatatgtaaaactaacaaatcaatgtttacattacttctcctggtattcctctcatcaatccaccaccaactttctcatcactttgtaaaactttatcttttatttttagtttacacatagttgtcatatttatgagatacaagtgatatttaacacatatctaatatgtaataatcaaatcagggtaattaacatatccatcacctcaagcatttatcatttctttgcactgtgaacattcaaaaccctctcttctagctttttgaaaatatayactaaattattgttaaccactttcattctaaagtgctatggaacaatagaaatgtatgactgctatcagcagttactttgtgtacaccaccttctccctgtctcccccccactcagccattcccagtctctaatgactacaattctactctccacttctaggagctcaatattttttaattctcatatatgaatattaacatgacgtatttgtctttctgtgcctgacttctttcacttaacataatattctccatattctccatcctttctaaagctcgtttttgttgccttgaatcacaggattccgttcttttttacatgcaggatgtagctggtatctcaaattaggcagttaatgaataacagagaagcagaccaagccaagta

SEQ ID NO: 80313 - DNA, 786 bp, Homo sapiens
cttttcacctatccaaatgatttggcatgttcaatcagatttcacctatccaaatgatttggcatggtaggtcagattgccagaggaatctactggcacatgtgaacaaaatcttccagtaatttcaaaggcatttgatatgtatacaaggcacctgcagctgcagaacctttgttcttatttggcacaggctctaaaattctggaatacttaaaattttatgaagtgcagggaaagaaataggaataactatgtgatagcgtctaggtattttcctgagttatcattcttagaaatatttgcacagatgtctttgaaccattttgttaatttttccctcaagaaggatgagaatttgtatattttttgtccaatatctgctttcattaattcttcaaatatgagagataatgccttggtcaaggagtgttttggtgcatttttaattataaatatwcactggtaaaaacatgttttcattattctacacatggtcataatcatgatattcaaatgctgcccacctgaataccactcgtgaagaatttaaagagagcctatcttatataaatgccttgtatatgatgctagaatctgctctagctcccctagtgtattgtttactatattccctcctgatgtatcaaacacttgcagaaagcttgtttctgaaacactcgaatcttggcaaaacccaggaaaattacaagttttcctcattaatcgtgtgcaggcctctgtcttctccagcttgccccactcctgtctttattttacaatttccag

SEQ ID NO: 80314 - DNA, 786 bp, Homo sapiens
cttttcacctatccaaatgatttggcatgttcaatcagatttcacctatccaaatgatttggcatggtaggtcagattgccagaggaatctactggcacatgtgaacaaaatcttccagtaatttcaaaggcatttgatatgtatacaaggcacctgcagctgcagaacctttgttcttatttggcacaggctctaaaattctggaatacttaaaattttatgaagtgcagggaaagaaataggaataactatgtgatagcgtctaggtattttcctgagttatcattcttagaaatatttgcacagatgtctttgaaccattttgttaatttttccctcaagaaggatgagaatttgtatattttttgtccaatatctgctttcattaattcttcaaatatgagagataatgccttggtcaaggagtgttttggtgcatttttaattataaatattcactggtaaaaacatgttttcattattctacacatggtcataatcatgatattcaaatgctgcccacctgaataccactcgtgaagaatttaaagagagcctatcttatataaatgccttgtrtatgatgctagaatctgctctagctcccctagtgtattgtttactatattccctcctgatgtatcaaacacttgcagaaagcttgtttctgaaacactcgaatcttggcaaaacccaggaaaattacaagttttcctcattaatcgtgtgcaggcctctgtcttctccagcttgccccactcctgtctttattttacaatttccag

SEQ ID NO: 80315 - DNA, 786 bp, Homo sapiens
cttttcacctatccaaatgatttggcatgttcaatcagatttcacctatccaaatgatttggcatggtaggtcagattgccagaggaatctactggcacatgtgaacaaaatcttccagtaatttcaaaggcatttgatatgtatacaaggcacctgcagctgcagaacctttgttcttatttggcacaggctctaaaattctggaatacttaaaattttatgaagtgcagggaaagaaataggaataactatgtgatagcgtctaggtattttcctgagttatcattcttagaaatatttgcacagatgtctttgaaccattttgttaatttttccctcaagaaggatgagaatttgtatattttttgtccaatatctgctttcattaattcttcaaatatgagagataatgccttggtcaaggagtgttttggtgcatttttaattataaatattcactggtaaaaacatgttttcattattctacacatggtcataatcatgatattcaaatgctgcccacctgaataccactcgtgaagaatttaaagagagcctatcttatataaatgccttgtatatgatgctagaatctgctctagctcccctagtgtattgtttactatattccctcctgatgtatcaaacacttgcagaaagcttgtttctgaaacastcgaatcttggcaaaacccaggaaaattacaagttttcctcattaatcgtgtgcaggcctctgtcttctccagcttgccccactcctgtctttattttacaatttccag

SEQ ID NO: 80316 - DNA, 557 bp, Homo sapiens
ataatgtgtgagaaggtaaatgagtaattagatgatagtataattctgttagccccaatatccttgagaagtaggatgttcaaacttaggagaaagtagatacagatacaagatagatattgtatggcttaagtccgcaataaaaagcctgttgtcctgaatttgaattggaagtgtcagtataaacttagaaattatctctctaaaaatcttttctaayttcacccactgaaagagtctagaatcagtgaccaatctcgggattcagagggggtggccgcttccagatctggggcagcatatatgtaagttaggttgggatatctttttctagcaggcagcaaggaagttcttaaacacaacagagctcatgtccaaagcatcccagagccaacttgtagaggctcctgtgagccattgagcatcagtaagaataataataccatagattagatgaaacacattatatgtgtttaaatccatccatttacaatgaagtttataatactttaaaaaactgataagtcatcatcataggatgttagggaaccaactta

SEQ ID NO: 80317 - DNA, 618 bp, Homo sapiens
gatctatttataaataaaatattattgttagagtggaaaaactaaaaaatctataatttacaaaaaatagttatctgaattttatttatgtttatggaaagtagacatcctttcttttctgttcttcaattagcacattgtgaaattattcatgtaggcaagattcagttaaatttgtcactaacttggttaagaatagtatgtaaatttttwaaaaaatttttaaaaatgtgtgtttaaatacaaagcttataattgtaatgtgggaggaacttctttgaatgacaaaagattgtaatatggaatattatcagtttaagaaacagattggaggaagatcaaaaatagatctaacttaaaactacagtagaaaacagaagaaataaggagagtagtgttaaaaaaattatttaatgttgctaacaagcatggtaaggaagactttacacaggatcatcataagggtaggaccactgcctggcgggttgtgggtgtcggggagagacagactgggctcaacactgaatacagcatgggcagttaggaacttataaccaaagagtacagtggggtggaggtcagtggatcagggtaagggggattctggctaaatgattc

SEQ ID NO: 80318 - DNA, 618 bp, Homo sapiens
gatctatttataaataaaatattattgttagagtggaaaaactaaaaaatctataatttacaaaaaatagttatctgaattttatttatgtttatggaaagtagacatcctttcttttctgttcttcaattagcacattgtgaaattattcatgtaggcaagattcagttaaatttgtcactaacttggttaagaatagtatgtaaattttttaaaaaatttttaaaaatgtgtgtttaaatacaaagcttataattgtaatgtgggaggaacttctttgaatgacaaaagattgtaatatggaatattatcagtttaagaaacagattggaggaagatcaaaaatagatctaacttaaaactacagtagaaaacagaagaaataaggagagtagtgttaaaaaaattatttaatgttgctwacaagcatggtaaggaagactttacacaggatcatcataagggtaggaccactgcctggcgggttgtgggtgtcggggagagacagactgggctcaacactgaatacagcatgggcagttaggaacttataaccaaagagtacagtggggtggaggtcagtggatcagggtaagggggattctggctaaatgattc

SEQ ID NO: 80319 - DNA, 618 bp, Homo sapiens
gatctatttataaataaaatattattgttagagtggaaaaactaaaaaatctataatttacaaaaaatagttatctgaattttatttatgtttatggaaagtagacatcctttcttttctgttcttcaattagcacattgtgaaattattcatgtaggcaagattcagttaaatttgtcactaacttggttaagaatagtatgtaaattttttaaaaaatttttaaaaatgtgtgtttaaatacaaagcttataattgtaatgtgggaggaacttctttgaatgacaaaagattgtaatatggaatattatcagtttaagaaacagattggaggaagatcaaaaatagatctaacttaaaactacagtagaaaacagaagaaataaggagagtagtgttaaaaaaattatttaatgttgctawcaagcatggtaaggaagactttacacaggatcatcataagggtaggaccactgcctggcgggttgtgggtgtcggggagagacagactgggctcaacactgaatacagcatgggcagttaggaacttataaccaaagagtacagtggggtggaggtcagtggatcagggtaagggggattctggctaaatgattc

SEQ ID NO: 80320 - DNA, 618 bp, Homo sapiens
gatctatttataaataaaatattattgttagagtggaaaaactaaaaaatctataatttacaaaaaatagttatctgaattttatttatgtttatggaaagtagacatcctttcttttctgttcttcaattagcacattgtgaaattattcatgtaggcaagattcagttaaatttgtcactaacttggttaagaatagtatgtaaattttttaaaaaatttttaaaaatgtgtgtttaaatacaaagcttataattgtaatgtgggaggaacttctttgaatgacaaaagattgtaatatggaatattatcagtttaagaaacagattggaggaagatcaaaaatagatctaacttaaaactacagtagaaaacagaagaaataaggagagtagtgttaaaaaaattatttaatgttgctaamaagcatggtaaggaagactttacacaggatcatcataagggtaggaccactgcctggcgggttgtgggtgtcggggagagacagactgggctcaacactgaatacagcatgggcagttaggaacttataaccaaagagtacagtggggtggaggtcagtggatcagggtaagggggattctggctaaatgattc

SEQ ID NO: 80321 - DNA, 567 bp, Homo sapiens
taggtcaagtttgttgataatgttactaagatctgtytgactttctgcttgttctgttgattactgagagaagtcttgaagtctgcagctattgtgaaggatttgtctgtttctccttgaagttctagcaatcttcatgtattttgaggctttatattcatgtattttgaggctccttcctaaagtccataaacctttaggaaggattattttatcctcttaattatttaacccctttatctctatctttatctgttaagacatggagctgaaatgggcttttaatatctggcccttctttaattacaacctactttgggcagggacagtctcattcagtctctgtagtgcctggttcaatctcttgaatgcagtaggcagcacaagtaattgtggaactgaatgatgagtcaaagaaagcctgtggattcttttcacgctctatactgtccagtatggtagccactagccacatgtggagagttaaattaattaaaactaggcaggccaagcgtggtggctcatacctgtagtcccaatactttgggaggctgaggtgggaagatc

SEQ ID NO: 80322 - DNA, 524 bp, Homo sapiens
gtagacttcaacactcttctcacagtaatcaagagaacaagtaggcagaaagaaagtgcagttttctgtttttgtagacagcaaaattatttcacacacttcttaaagtcttattcagtaagttactcatttctccaccttatgactgtactgtgctttcaaagtgctgtgcaaagagtaaaatgttttaaggtggttttactgtaatttcasatacatatttgaacttttgagtctgaattatccaggtgaaatgcattggatttctgatcctctgtaaacttggaagattaccttcttccaggtatattggttttccttaattgctttaatagcatgagttgtgaatcttctctgtgtctcagaagaaacctaacagtggagattgtttatggcaagggtcacaaatttacatgctcaggttaggaccctctttaaggtaaagacatgaagtgcccccctttttattaatacataactgcatttgctgataatattgatttgccttaaaaaaactagtccta

SEQ ID NO: 80323 - DNA, 524 bp, Homo sapiens
gtagacttcaacactcttctcacagtaatcaagagaacaagtaggcagaaagaaagtgcagttttctgtttttgtagacagcaaaattatttcacacacttcttaaagtcttattcagtaagttactcatttctccaccttatgactgtactgtgctttcaaagtgctgtgcaaagagtaaaatgttttaaggtggttttactgtaatttcacatacatatttgaacttttgagtctgaattatccaggtgaaatgcattggatttctgatcctctgtaaacttggaagattaccttcttccaggtatattggttttccttaattgctttaatagcatgagttgtgaatcttctctgtgtctcagaagaaacctaacagtggagattgtttatggcaagggtcacaaatttacatgctcaggttaggaccctctktaaggtaaagacatgaagtgcccccctttttattaatacataactgcatttgctgataatattgatttgccttaaaaaaactagtccta

SEQ ID NO: 80324 - DNA, 643 bp, Homo sapiens
ggtggcggtaccgacctttgcagaaatctgggaagctccacaacagctactttcagacaaaacttccctttcaaaaatgaagcaggggcacgttaaattttaaaagttaaaaaaagaaagatgctttttgcagcagttccagggtaaacggccccatgcaacacaaaccctcgggaagggcattacagccttgcagtgggtcacggagtgcaccacgcggcgctcagcccccccagggaagcgatgccccacatcgggccagaaacaaaagggggtgagataaagcatgctcgagtacccctttggttctcccattctggaacttcgaatttcctaacccgttgttgctacctgattttcgtgcctctaactgcaacatcagcacaaacaccttcctctccctaaatgggggcagtgggcgccatggttatctgtttgcaaaatacacagggctttgacattcggtaccggcagtcatctcttcccaaggctttcacatgctgtccccggtaaatgtgtgcgtgactgcacgagtgtgtgtgagtgtgaacgtgtgctctccctcctctgagagggygctgggtcacatcggacatgcacccacgctcggtgacagggtggcccgctgctgctcatcagctgg

SEQ ID NO: 80325 - DNA, 1175 bp, Homo sapiens
tttgacatttacattaatataataaaaggcctgaaattatatgtatagtggtttttgcgtttcaagattgtggaacttgttaaacttggtcaaaacttgctctttaagctcaaaactatctcagaagacaactgacagctgactagtggcctatagggagaccttttatttagaacttttccaaggaagagagcatcccagatgtttttgccatgaatgactagtgacctgatactatagaaaattagagaatatctaaaggtgctaaatatgatgatgggtcactaaaggaatatctgattttgaaattgcaatttgatttctgcctgcactgaggaagggctttgcataaagatttttgttatgccaaaatttcaaaatatattctaaatatctatacacaaattatacagatatttagattggtgaaatcattataacctactaggtaaatagcattacttagaatatccaatttgtattttaaaggcagattctaatattccaaaataaaatatataagtatattttaagtataaacaattggatcaataatatgtttcaaagtccttgatgagtatttgtatgatctggatttcaaaaagtccacaaataagtatttacacatctttagaacctttacagtctatcatcccrtcttctttacacttctatgaggaatttcttccattaaaaaaaaaatctgttataaaaggaaattaacaacttctaaataatactcttagagaaacctccaaagctgggaaactaaaagtgaaggctagcacttaattcctcactttttctgcttattcctatgtgttggagggatctcagatcagtatggtacaagccatatgtgctgtaataacaagacacaatggaacaagttgtatatggattgtgtcagcttgccatctcccctccccagattcctccctttcctccatttagtgcaaacacagaagaaaaagtgcttctgaggtgtatatctattgtattttctggtgcattacaatcccagttgccatagtcatagtatcagatgacttaaaaagctctgcctacaaaataaaatacagctcattcatctgaggagttagcatgcgattgcattacctggttaaacatgttcagctgaattattaattttatgtcttgttaagtactggatt

SEQ ID NO: 80326 - DNA, 1175 bp, Homo sapiens
tttgacatttacattaatataataaaaggcctgaaattatatgtatagtggtttttgcgtttcaagattgtggaacttgttaaacttggtcaaaacttgctctttaagctcaaaactatctcagaagacaactgacagctgactagtggcctatagggagaccttttatttagaacttttccaaggaagagagcatcccagatgtttttgccatgaatgactagtgacctgatactatagaaaattagagaatatctaaaggtgctaaatatgatgatgggtcactaaaggaatatctgattttgaaattgcaatttgatttctgcctgcactgaggaagggctttgcataaagatttttgttatgccaaaatttcaaaatatattctaaatatctatacacaaattatacagatatttagattggtgaaatcattataacctactaggtaaatagcattacttagaatatccaatttgtattttaaaggcagattctaatattccaaaataaaatatataagtatattttaagtataaacaattggatcaataatatgtttcaaagtccttgatgagtatttgtatgatctggatttcaaaaagtccacaaataagtatttacacatctttagaacctttacagtctatcatcccatcttctttacacttctatgaggaatttcttccattaaaaaaaaaatctgttataaaaggaaattaacaacttctaaataatactcttagagaaacctccaaagctgggaaactaaaagtgaaggctagcacttaattcctcactttttctgcttattcctatgtgttggagrgatctcagatcagtatggtacaagccatatgtgctgtaataacaagacacaatggaacaagttgtatatggattgtgtcagcttgccatctcccctccccagattcctccctttcctccatttagtgcaaacacagaagaaaaagtgcttctgaggtgtatatctattgtattttctggtgcattacaatcccagttgccatagtcatagtatcagatgacttaaaaagctctgcctacaaaataaaatacagctcattcatctgaggagttagcatgcgattgcattacctggttaaacatgttcagctgaattattaattttatgtcttgttaagtactggatt

SEQ ID NO: 80327 - DNA, 977 bp, Homo sapiens
ttagctatttatcctggtgctctccttctccccacaaccctcccaccctgacaggacccagtgtgtgttgttcccctccctgtgtccatgtcttctcattgttcagttcccacttgtaagtgagaatatgcagtgtttggttttctgttcttgcattagtttgctgaggataatggcttccagctccatccatgtccctgcaaaagatgtgatctcattcctttttatggctggatagtattccatgtgtatgtgtaccacattttctttatccagtctatcattgatgggcatttgggttgattccatgtctttgctattgtgaatagtgccagcagctatattttatattaattatttgtttatccccaactttttctctactgctatataagttttaggtttttgttgggcatatggctgaattgacataatcctctaatagtatggcaatagataggactttgtgtgtgggtcccctatgttaatgaaatgtttttcatttgcacaaaggacaatagtggatggtgaaggtcaaacaagaagacctatccagtaggatattatttgtcccttcatactcgctcttcaccctttttcacccgcctttgtgtcccagaaggctaaactcagtgggttgcatgaataaggctcactctcttgctatgtgacttctggttggattcagccaatttatggccaggaggagagaggctgggaaaatattcacttcccctgttccttccttgctgattgtgaacaatggatatattcctctctacagtgtcatgtagagggagaacttctcttaaagcaattgttcttttggaattctagtagccacttctttcttttaacaatttagtctcagggctttggactattatgactctacaaatgtttctctatcctttgtrggaaacttgctcatatatttgtaaataatccctgtcaaactctcttcagttactctttgt
